United States Patent Application Publication US 2005/0228172 A9 - sequence listing, part 16

SEQ ID NO: 53232 - DNA, 488 bp, Homo sapiens
gagaagcgagctgctctgaccagccgcttgggattggcggagggaagcgggccaggccctgtgaggagtcaaggtgagatgctgagggaggactcaggaggcccccaccccagatagacgaccccaaataatcccgcaccactcctgctaccagccgtgggccacckgtgggcggacttctgagtctggggcgcccaccaccccactgcctctgaagtcgcagaggactctggagtcagagcttagggtgtttagtgtaagactagtgaggccaggctctgccaggcatcaatctcaggaccgtaagagagggctaagcgtaccccacccctattcccatcccccatcacgtcccctttcccattaccatttgcactcctaaacccatccgcgcccccatcccccaccagcactcctcctcgaccccccacctctgtcataccgccatctgccaccccaaaaaccggggcccctccaccaacctcacc

SEQ ID NO: 53233 - DNA, 1918 bp, Homo sapiens
ttttttttttttttttttttggtagacacggggtttcaccctctttcattggttttcactggagattctagattcgagccacacctcattccgtgccacagagagacttcttttttttttttttttttttaagcgcaacgcaacatgtctgccttatttgagtggcttcctatatcattataattgtgttatagatgaagaaacggtattaaacactgtgctaatgatagtgaaagtgaagacaaaagaaaggctatctattttgtggttagaataaagttgctcagtatttagaagctacctaaatacgtcagcatttacactcttcctagtaaaagctggccgatctgaataatcctcctttaaacaaacacaatttttgatagggttaagatttttttaagaatgcgactcctgcaaaatagctgaacagacgatacacatttaaaaaaataacaacacaaggatcaaccagacttgggaaaaaatcgaaaaccacacaagtcttatgaagaactgagttcttaaaataggacggagaacgtagctatcggaagagaaggcagtattggcaagttgattgttacgttggtcagcagtagctggcactatctttttggccatctttcgggcaatgtaactactacagcaaaatgagatatgatccattaaacaacatattcgcaaatcaaaaagtgtttcagtaatataatgcttcagatttagaagcaaatcaaatgatagaactccactgctgtaataagtcaccccaaagatcaccgtatctgacaaaataactaccacagggttatgacttcagaatcatactttcttcttgatatttacttatgtatttattttttttaatttatttctcttgagacgcgtctcgctctgtcgcccaggctggagtgcgatggtgtgatctcggctcactgcaaccgccacctccctgggttcaagcgattctcctgcctcagcctcccgagtagctgggactacaggtgcccgccaccacgcccagctaatctttatacttttaatagagacggggtttcaccgtgtcggcccggatggtctcgatctcttgacctcgtgacccgcccgcctcggcctcccaaagtgctgggatgacaggcgtgagccactgagcccggccttctcttgacgtttaaactatgaagtcagtccagagaaacgcaataaatgtcaacggtgaggatggtgttgaggcagaagtaggaccacactttttcctatcttattcagttgataacaatatgacctaggtagtaatttcctatgtgcctacttatacacgagtacaaaagagtaaaacagagagactgctaaattaaagggtacgtgaagttcttcatagtaactccgtaaactggaacactgtcaaaaagcagcagctagtgaattgtttccatgtatttttctatkatccaataagtgaactatgctattcctttccagtctcccaagcacttcttgtccccatcaccacttcggtgctcgaagaaaaagtaagcaaatcaaggaacacaagctaaagaaacacacacacaaaccaaagacaactacagcgtctgcaaaagtttgctagaagactgaaactgttgagtataaggatctggtattctacgatcatgagttcacttcagagtttgttcaagacatacgtttcgtaaggaaacatcttagttagaagttattcagcagtaggtaccatccctaagtatttttcaccaaatccgtgacaataaagagctatctaaccagaaaaattagcgagtacgggcaccatccatagggctttgtctttacgcttcattagcacttaccatgccttacaatgtctaggattgaccctgatagcatttcgaaaacaagctaatgctttgtccagttc

SEQ ID NO: 53234 - DNA, 602 bp, Homo sapiens
agctccatgtgcctctttgtctgcgtgggtcagaagagttgtgcacgcagattagcaggccaaggtctgagccacagcagcatttttatttcagattttgataactgtttatatgtgttgaaaaccaaaatgacatctttttaaagcttatccataaaaaaaaatagatgtcttttatagtggaaaaacacatggggaaaaaaatcatctattttgatgcagcatttgataatgataaaacacctcacacctcactctttatagtgcacaaaatgaatgaggtctgggctaggtagaaaaagggtcaatgctatttttgtttttagaatcattaccttttaccagcttttamccatctgatatctatagtagacacactatcatagttaacatagttaagttcagcacttgtctcattttaatgtaaagatttgcttccattttcctacaggcagtctctctcttcctcacagtcccactgtgcaggtgctattgttactcttacgaatattttcagtaatgttattttcttctaagtgaaatttctagcctgcactttgatgtcatgtgttccctttgtctttcaaactccaaggttcccc

SEQ ID NO: 53235 - DNA, 985 bp, Homo sapiens
tcttgagtgacactgaaaaagtgttttattaaaaatgcaacagccatacctgattttttaaatactgttgataaactatgaagaaaaacaatagttgctaaatatgcacagccacttctgctttayagttcattactggccattgcacaacatcctgtctcaccaatatcctctttgctcccagacatgctggcctatatttacttccttaaacacaagaatgacctttccctgctcaggggctctgctcagggtggctgtttttctgcaaagctctttgcctattgtgttacaagactggctttttgtggtccttcatgtctcggctaaaaagacattagccatggttatctaactctacatgctggaatttgatacaatttttattatctcctttataacttttcagatttttaatgttttattccatatacattcagtttttcaaaaggaaaaaataattttttaatctttagtatattttgataaaatatactagtacgtttggtatgttttagtatgtttgataaaatacaaaacattgatgtaacttttcccaaaaaataagtagacagttgtcctaatgtcatttattgcataatgcaacctttccctggtgaattaaagtgtcacattccacatgaacttggctgtttcttaagtttctagacagttctactgatctgttcattctagcaccagtacccccactattttaaagttcttaatagagcaagtgtctccttgtcttcaacattttcctagcttattttcattcctattttataggaaatttaaactagctcttgtttctttaaaaccctgttacaattttgactttcaaataggttaaattttagaacaactcagaatatgcacctttgcaacatctcatcttttttatctagaatcttggttatatctgtccatttaataaatttttactttatgcctcaatagagattcttattaataccttaatgca

SEQ ID NO: 53236 - DNA, 985 bp, Homo sapiens
tcttgagtgacactgaaaaagtgttttattaaaaatgcaacagccatacctgattttttaaatactgttgataaactatgaagaaaaacaatagttgctaaatatgcacagccacttctgctttatagttcattactggccattgcacaacatcctgtctcaccaatatcctctttgctcccagacatgctggcctatatttacttccttaaacacaagaaygacctttccctgctcaggggctctgctcagggtggctgtttttctgcaaagctctttgcctattgtgttacaagactggctttttgtggtccttcatgtctcggctaaaaagacattagccatggttatctaactctacatgctggaatttgatacaatttttattatctcctttataacttttcagatttttaatgttttattccatatacattcagtttttcaaaaggaaaaaataattttttaatctttagtatattttgataaaatatactagtacgtttggtatgttttagtatgtttgataaaatacaaaacattgatgtaacttttcccaaaaaataagtagacagttgtcctaatgtcatttattgcataatgcaacctttccctggtgaattaaagtgtcacattccacatgaacttggctgtttcttaagtttctagacagttctactgatctgttcattctagcaccagtacccccactattttaaagttcttaatagagcaagtgtctccttgtcttcaacattttcctagcttattttcattcctattttataggaaatttaaactagctcttgtttctttaaaaccctgttacaattttgactttcaaataggttaaattttagaacaactcagaatatgcacctttgcaacatctcatcttttttatctagaatcttggttatatctgtccatttaataaatttttactttatgcctcaatagagattcttattaataccttaatgca

SEQ ID NO: 53237 - DNA, 637 bp, Homo sapiens
aattacaaactgtttgcacaaaagtcaagaaaaacttgaaagccttatatcaagaagcattcttcccatccaaacttcagtggtgcatttattttggatttgaccctctggggaaggggcatggcctctctcgacaagaaggttctggggaccaggcagagagaatgaggtctcaggatgacttccttgacagccctgttcscctttcatcaacacacagacccagaagacctctctgtcttgtagcatctgccatgagaatcaggctcctgtgctgtgtggccttttctctcctgtgggcaggtaagtcctgggcagggcccatgtgtagatttcaagacccagagccttcccattgaggctgcagcattggctttgttctccttctctgtaggtccagtgattgctgggatcacccaggcaccaacatctcagatcctggcagcaggacggcgcatgacactgagatgtacccaggatatgagacataatgccatgtactggtatagacaagatctaggactggggctaaggctcatccattattcaaatactgcaggtaccactggcaaaggagaagtccctgatggttatagtgtctccagagcaaacacagatgatttccccctcacgttgg

SEQ ID NO: 53238 - DNA, 1940 bp, Homo sapiens
tgaataatcacagtgaagatatgtacaagtaaaactgctcaagcacccactctgtttagcagaattgagacaggtatgcatggggcaatgtgaggagttaatttatatttaattctaaaggtgaaygatggggacaagctgtgtcatatggtccacaactgccacagctcagttattttggattacattttcaatccagggtatatagtaaaaaattttggcatagatgccaacatcggctctcaaaacacatccatccgcaaaagacaggattccttgaagcatcccattgcagattgccggggcagcagaaacttcctgccaggaaaacaataataacaacaacaaaaaagcagattatctttctggcaagacagaaggaagaaaatgggaaaattaatggatgaagagtattttaccttgcagggctgcctccttcctggcacaatgcccacacacagcatattttccgtgatgttgtaggttttataggcatcgcgacactgaggcttggagattacagagatgttcacagtttgcagtgaatcgggctctttgtctaaagaaaagatagaagtcaaacttccttaagagttttgttaggtattaaaacttcttttaaaaaacttttcttcttctaccatcagaaattaaaagagatcaaacattcagagaagtcagaactgtggcagttaggacaacgagggtataggagatgatcagattaacaatttcttatgatgcagaatcggtgaccttataaaagtgatcaaattcttgggagttacatgtacatgtgagacactccaggaatgaaatgaaacactttgttttaaacttttctggaaatttggctgggcacagtgctcacgcctgtaatcccagcactttggtaggccaggatgggtggatcacctgaggtcaggagttcgagaccagcttggccaacatggtgaaaccctgtctctactaaaaatagaaaaattagctgggcgtggtgatgagtgcctgtaatgccagctacttgggaggcaggagaattgcttgaactcaagaagcggaggttgctatgagccgagactgcgccactgcactccagcctgggtgacaagagtgagactccatctcaaaaaaacccaaaaacttttctggaaatttaaacattcaaagggtttcttttgagatgtaatttttagagtttgaatgaatttacagatatctggcctactttctcaattgtcaggtcaaaacaaaaccgagtatctgcacaaaaaagtcactgaaaaagcagttttcttaaacatataaagctagtaaatggtaaagctaagatttaaaactggatttcctggttcctaattaaagttcttttctttgtatcaatagtccacaaatactgtgaattgtgcacacttgtaacaaaatttgtccaatctgaaacaaaatgagaaaaacaacaaagtagtatgaacacatgtggcatgtgttctttccacggacgtttctttgggaagaagtactgtattttaagattttggtttttttaataatggaagagtatgtttaatgtttttatttgaaaataatgtattagttcttgaaaataaaatgtataagatccttcactttattttccaagcaataatttcatggctaaacatttcttttgggaatacttctgtaggaaatgcttacttaactacttgatgacccagatcaaaataagatgcattttttttgaagtcatatctcgttttgaaccttatgccataacccagatgaatcaaacatactgctcacagaaggacatttggctctttccaaaaatcaaattgactctcagaggacaaataatttctacttattgatatattcaagaaaatgtgctctaaatctgaaggtatttactaaggattagttttaaaaggcttgaatcatgg

SEQ ID NO: 53239 - DNA, 1940 bp, Homo sapiens
tgaataatcacagtgaagatatgtacaagtaaaactgctcaagcacccactctgtttagcagaattgagacaggtatgcatggggcaatgtgaggagttaatttatatttaattctaaaggtgaacgatggggacaagctgtgtcatatgrtccacaactgccacagctcagttattttggattacattttcaatccagggtatatagtaaaaaattttggcatagatgccaacatcggctctcaaaacacatccatccgcaaaagacaggattccttgaagcatcccattgcagattgccggggcagcagaaacttcctgccaggaaaacaataataacaacaacaaaaaagcagattatctttctggcaagacagaaggaagaaaatgggaaaattaatggatgaagagtattttaccttgcagggctgcctccttcctggcacaatgcccacacacagcatattttccgtgatgttgtaggttttataggcatcgcgacactgaggcttggagattacagagatgttcacagtttgcagtgaatcgggctctttgtctaaagaaaagatagaagtcaaacttccttaagagttttgttaggtattaaaacttcttttaaaaaacttttcttcttctaccatcagaaattaaaagagatcaaacattcagagaagtcagaactgtggcagttaggacaacgagggtataggagatgatcagattaacaatttcttatgatgcagaatcggtgaccttataaaagtgatcaaattcttgggagttacatgtacatgtgagacactccaggaatgaaatgaaacactttgttttaaacttttctggaaatttggctgggcacagtgctcacgcctgtaatcccagcactttggtaggccaggatgggtggatcacctgaggtcaggagttcgagaccagcttggccaacatggtgaaaccctgtctctactaaaaatagaaaaattagctgggcgtggtgatgagtgcctgtaatgccagctacttgggaggcaggagaattgcttgaactcaagaagcggaggttgctatgagccgagactgcgccactgcactccagcctgggtgacaagagtgagactccatctcaaaaaaacccaaaaacttttctggaaatttaaacattcaaagggtttcttttgagatgtaatttttagagtttgaatgaatttacagatatctggcctactttctcaattgtcaggtcaaaacaaaaccgagtatctgcacaaaaaagtcactgaaaaagcagttttcttaaacatataaagctagtaaatggtaaagctaagatttaaaactggatttcctggttcctaattaaagttcttttctttgtatcaatagtccacaaatactgtgaattgtgcacacttgtaacaaaatttgtccaatctgaaacaaaatgagaaaaacaacaaagtagtatgaacacatgtggcatgtgttctttccacggacgtttctttgggaagaagtactgtattttaagattttggtttttttaataatggaagagtatgtttaatgtttttatttgaaaataatgtattagttcttgaaaataaaatgtataagatccttcactttattttccaagcaataatttcatggctaaacatttcttttgggaatacttctgtaggaaatgcttacttaactacttgatgacccagatcaaaataagatgcattttttttgaagtcatatctcgttttgaaccttatgccataacccagatgaatcaaacatactgctcacagaaggacatttggctctttccaaaaatcaaattgactctcagaggacaaataatttctacttattgatatattcaagaaaatgtgctctaaatctgaaggtatttactaaggattagttttaaaaggcttgaatcatgg

SEQ ID NO: 53240 - DNA, 1940 bp, Homo sapiens
tgaataatcacagtgaagatatgtacaagtaaaactgctcaagcacccactctgtttagcagaattgagacaggtatgcatggggcaatgtgaggagttaatttatatttaattctaaaggtgaacgatggggacaagctgtgtcatatggtccacaactgccacagctcagttattttggattacattttcaatccagggtatatagtaaaaaattttggcatagatgccaacatcggctctcaaaacacatccatccgcaaaagacaggattccttgaagcatcccattgcagattgccggggcagcagaaacttcctgccaggaaaacaataataacaacaacaaaaaagcagattatctttctggcaagacagaaggaagaaaatgggaaaattaatggatgaagagtattttaccttgcagggctgcctccttcctggcacaatgcccacacacagcatattttccgtgatgttgtaggttttataggcatcgcgacactgaggcttggagattacagagatgttcacagtttgcagtgaatcgggctctttgtctaaagaaaagatagaagtcaaacttccttaagagttttgttaggtattaaaacttcttttaaaaaacttttcttcttctaccatcagaaattaaaagagatcaaacattcagagaagtcagaactgtggcagttaggacaacgagggtataggagatgatcagattaacaatttcttatgatgcagaatcggtgaccttataaaagtgatcaaattcttgggagttacatgtacatgtgagacactccaggaatgaaatgaaacactttgttttaaacttttctggaaatttggctgggcacagtgctcacgcctgtaatcccagcactttggtaggccaggatgggtggatcacctgaggtcaggagttcgagaccagcttggccaacatggtgaaaccctgtctctactaaaaatagaaaaattagctgggcgtggtgatgagtgcctgtaatgccagctacttgggaggcaggagaattgcttgaactcaagaagcggaggttgctatgagccgagactgcgccactgcactccagcctgggtgacaagagtgagactccatctcaaaaaaacccaaaaacttttctggaaatttaaacattcaaagggtttcttttgagatgtaatttttagagtttgaatgaatttacagatatctggcctactttctcaattgtcaggtcaaaacaaaaccgagtatctgcacaaaaaagtcactgaaaaagcagttttcttaaacatataaagctagtaaatggtaaagctaagatttaaaactggatttcctggttcctaattaaagttcttttctttgtatcaatagtccacaaatactgtgaattgtgcacacttgtaacaaaatttgtccaatctgaaacaaaatgagaaaaacaacaaagtagtatgaacacatgtggcaygtgttctttccacggacgtttctttgggaagaagtactgtattttaagattttggtttttttaataatggaagagtatgtttaatgtttttatttgaaaataatgtattagttcttgaaaataaaatgtataagatccttcactttattttccaagcaataatttcatggctaaacatttcttttgggaatacttctgtaggaaatgcttacttaactacttgatgacccagatcaaaataagatgcattttttttgaagtcatatctcgttttgaaccttatgccataacccagatgaatcaaacatactgctcacagaaggacatttggctctttccaaaaatcaaattgactctcagaggacaaataatttctacttattgatatattcaagaaaatgtgctctaaatctgaaggtatttactaaggattagttttaaaaggcttgaatcatgg

SEQ ID NO: 53241 - DNA, 1940 bp, Homo sapiens
tgaataatcacagtgaagatatgtacaagtaaaactgctcaagcacccactctgtttagcagaattgagacaggtatgcatggggcaatgtgaggagttaatttatatttaattctaaaggtgaacgatggggacaagctgtgtcatatggtccacaactgccacagctcagttattttggattacattttcaatccagggtatatagtaaaaaattttggcatagatgccaacatcggctctcaaaacacatccatccgcaaaagacaggattccttgaagcatcccattgcagattgccggggcagcagaaacttcctgccaggaaaacaataataacaacaacaaaaaagcagattatctttctggcaagacagaaggaagaaaatgggaaaattaatggatgaagagtattttaccttgcagggctgcctccttcctggcacaatgcccacacacagcatattttccgtgatgttgtaggttttataggcatcgcgacactgaggcttggagattacagagatgttcacagtttgcagtgaatcgggctctttgtctaaagaaaagatagaagtcaaacttccttaagagttttgttaggtattaaaacttcttttaaaaaacttttcttcttctaccatcagaaattaaaagagatcaaacattcagagaagtcagaactgtggcagttaggacaacgagggtataggagatgatcagattaacaatttcttatgatgcagaatcggtgaccttataaaagtgatcaaattcttgggagttacatgtacatgtgagacactccaggaatgaaatgaaacactttgttttaaacttttctggaaatttggctgggcacagtgctcacgcctgtaatcccagcactttggtaggccaggatgggtggatcacctgaggtcaggagttcgagaccagcttggccaacatggtgaaaccctgtctctactaaaaatagaaaaattagctgggcgtggtgatgagtgcctgtaatgccagctacttgggaggcaggagaattgcttgaactcaagaagcggaggttgctatgagccgagactgcgccactgcactccagcctgggtgacaagagtgagactccatctcaaaaaaacccaaaaacttttctggaaatttaaacattcaaagggtttcttttgagatgtaatttttagagtttgaatgaatttacagatatctggcctactttctcaattgtcaggtcaaaacaaaaccgagtatctgcacaaaaaagtcactgaaaaagcagttttcttaaacatataaagctagtaaatggtaaagctaagatttaaaactggatttcctggttcctaattaaagttcttttctttgtatcaatagtccacaaatactgtgaattgtgcacacttgtaacaaaatttgtccaatctgaaacaaaatgagaaaaacaacaaagtagtatgaacacatgtggcatgtgttctttccacggacgtttctttgggaagaagtactgtattttaagattttggtttttttaataatggaagagtatgtttaatgtttttatttsaaaataatgtattagttcttgaaaataaaatgtataagatccttcactttattttccaagcaataatttcatggctaaacatttcttttgggaatacttctgtaggaaatgcttacttaactacttgatgacccagatcaaaataagatgcattttttttgaagtcatatctcgttttgaaccttatgccataacccagatgaatcaaacatactgctcacagaaggacatttggctctttccaaaaatcaaattgactctcagaggacaaataatttctacttattgatatattcaagaaaatgtgctctaaatctgaaggtatttactaaggattagttttaaaaggcttgaatcatgg

SEQ ID NO: 53242 - DNA, 1940 bp, Homo sapiens
tgaataatcacagtgaagatatgtacaagtaaaactgctcaagcacccactctgtttagcagaattgagacaggtatgcatggggcaatgtgaggagttaatttatatttaattctaaaggtgaacgatggggacaagctgtgtcatatggtccacaactgccacagctcagttattttggattacattttcaatccagggtatatagtaaaaaattttggcatagatgccaacatcggctctcaaaacacatccatccgcaaaagacaggattccttgaagcatcccattgcagattgccggggcagcagaaacttcctgccaggaaaacaataataacaacaacaaaaaagcagattatctttctggcaagacagaaggaagaaaatgggaaaattaatggatgaagagtattttaccttgcagggctgcctccttcctggcacaatgcccacacacagcatattttccgtgatgttgtaggttttataggcatcgcgacactgaggcttggagattacagagatgttcacagtttgcagtgaatcgggctctttgtctaaagaaaagatagaagtcaaacttccttaagagttttgttaggtattaaaacttcttttaaaaaacttttcttcttctaccatcagaaattaaaagagatcaaacattcagagaagtcagaactgtggcagttaggacaacgagggtataggagatgatcagattaacaatttcttatgatgcagaatcggtgaccttataaaagtgatcaaattcttgggagttacatgtacatgtgagacactccaggaatgaaatgaaacactttgttttaaacttttctggaaatttggctgggcacagtgctcacgcctgtaatcccagcactttggtaggccaggatgggtggatcacctgaggtcaggagttcgagaccagcttggccaacatggtgaaaccctgtctctactaaaaatagaaaaattagctgggcgtggtgatgagtgcctgtaatgccagctacttgggaggcaggagaattgcttgaactcaagaagcggaggttgctatgagccgagactgcgccactgcactccagcctgggtgacaagagtgagactccatctcaaaaaaacccaaaaacttttctggaaatttaaacattcaaagggtttcttttgagatgtaatttttagagtttgaatgaatttacagatatctggcctactttctcaattgtcaggtcaaaacaaaaccgagtatctgcacaaaaaagtcactgaaaaagcagttttcttaaacatataaagctagtaaatggtaaagctaagatttaaaactggatttcctggttcctaattaaagttcttttctttgtatcaatagtccacaaatactgtgaattgtgcacacttgtaacaaaatttgtccaatctgaaacaaaatgagaaaaacaacaaagtagtatgaacacatgtggcatgtgttctttccacggacgtttctttgggaagaagtactgtattttaagattttggtttttttaataatggaagagtatgtttaatgtttttatttgaaaataatgtattagttcttgaaaakaaaatgtataagatccttcactttattttccaagcaataatttcatggctaaacatttcttttgggaatacttctgtaggaaatgcttacttaactacttgatgacccagatcaaaataagatgcattttttttgaagtcatatctcgttttgaaccttatgccataacccagatgaatcaaacatactgctcacagaaggacatttggctctttccaaaaatcaaattgactctcagaggacaaataatttctacttattgatatattcaagaaaatgtgctctaaatctgaaggtatttactaaggattagttttaaaaggcttgaatcatgg

SEQ ID NO: 53243 - DNA, 1940 bp, Homo sapiens
tgaataatcacagtgaagatatgtacaagtaaaactgctcaagcacccactctgtttagcagaattgagacaggtatgcatggggcaatgtgaggagttaatttatatttaattctaaaggtgaacgatggggacaagctgtgtcatatggtccacaactgccacagctcagttattttggattacattttcaatccagggtatatagtaaaaaattttggcatagatgccaacatcggctctcaaaacacatccatccgcaaaagacaggattccttgaagcatcccattgcagattgccggggcagcagaaacttcctgccaggaaaacaataataacaacaacaaaaaagcagattatctttctggcaagacagaaggaagaaaatgggaaaattaatggatgaagagtattttaccttgcagggctgcctccttcctggcacaatgcccacacacagcatattttccgtgatgttgtaggttttataggcatcgcgacactgaggcttggagattacagagatgttcacagtttgcagtgaatcgggctctttgtctaaagaaaagatagaagtcaaacttccttaagagttttgttaggtattaaaacttcttttaaaaaacttttcttcttctaccatcagaaattaaaagagatcaaacattcagagaagtcagaactgtggcagttaggacaacgagggtataggagatgatcagattaacaatttcttatgatgcagaatcggtgaccttataaaagtgatcaaattcttgggagttacatgtacatgtgagacactccaggaatgaaatgaaacactttgttttaaacttttctggaaatttggctgggcacagtgctcacgcctgtaatcccagcactttggtaggccaggatgggtggatcacctgaggtcaggagttcgagaccagcttggccaacatggtgaaaccctgtctctactaaaaatagaaaaattagctgggcgtggtgatgagtgcctgtaatgccagctacttgggaggcaggagaattgcttgaactcaagaagcggaggttgctatgagccgagactgcgccactgcactccagcctgggtgacaagagtgagactccatctcaaaaaaacccaaaaacttttctggaaatttaaacattcaaagggtttcttttgagatgtaatttttagagtttgaatgaatttacagatatctggcctactttctcaattgtcaggtcaaaacaaaaccgagtatctgcacaaaaaagtcactgaaaaagcagttttcttaaacatataaagctagtaaatggtaaagctaagatttaaaactggatttcctggttcctaattaaagttcttttctttgtatcaatagtccacaaatactgtgaattgtgcacacttgtaacaaaatttgtccaatctgaaacaaaatgagaaaaacaacaaagtagtatgaacacatgtggcatgtgttctttccacggacgtttctttgggaagaagtactgtattttaagattttggtttttttaataatggaagagtatgtttaatgtttttatttgaaaataatgtattagttcttgaaaataaaatgtataagatccttcactttattttccaagcaataatttcatggctaaacatttcttttgggaatacttctgtaggaaatgcttacttaactacttgatgacccagatcaaaataagatgcattttttttgaagtcatatctcgttttgaaccttatgccataacccagatgaatcaaacatactgctcacagaaggacatttggctcttyccaaaaatcaaattgactctcagaggacaaataatttctacttattgatatattcaagaaaatgtgctctaaatctgaaggtatttactaaggattagttttaaaaggcttgaatcatgg

SEQ ID NO: 53244 - DNA, 559 bp, Homo sapiens
aaaagtgcctaagctagttccccagcccttttatgagtcactaattcattcatgagagcagaaccctcatgacctaatcacttctcacctcttaatactgccacaatggggattacatttcaaaatgaattttagaagaaacacattcaaaccacagcacatttctagacaaactttcagacacagatatagggaaattttaatgaaattgaattttaccaagtaaagacaaataacccagatttgcaaatacccttcaaagattcttcaaagcgatctcaatggttaatcgtgttgtttaggaaaataagaacagtggcagcaagacctcctcagtggtacaatggcytcagcagcagtaaaagagggtagtaaacattatgcagactttgtgtgggctcaggatcacccacagagaagaaggttatttgcatgtatgtgtgtaactgtgtgtgtttaagagaaatgaactatgtttatttacagggattattgaggagcagaacctcagttgggtagatgcaggtataacttttaagatcaatatccatgtctttga

SEQ ID NO: 53245 - DNA, 562 bp, Homo sapiens
tcggaacgtaggactcattcatcatatttaatagggttagggtttatgatgttgcrggttaataaatagccataatagccgctcggcgttttctggagtcagaacaccagaaatagtcccttggctctctttcctttccttgtgaatctttcaaaattcttacattactactcctgcttgtgtgtgtttaataatttaatttaatgccttcctttggaaacattacctcgctgctcacccactcggctgttttgccttctcagcagagtaactgagtttaagacagccacgtgacaggcacagctatattagaaccagcatagtgagaagggatgcagtgcctctcttttctaattgggtagagcaacaattttatatgctttcacattatgtttgttcccaaaaaaaaagaggcaaaattgggagctgaacgtgatcatcattattattttatatttttatacataacaagatgcgctcatacttattgtctcacttaattgtacagcagtccttgaagcaggtgctattgattctgtttgatgagctgaccgtgtctccg

SEQ ID NO: 53246 - DNA, 562 bp, Homo sapiens
tcggaacgtaggactcattcatcatatttaatagggttagggtttatgatgttgcaggttaataaatagccataatagccgctcggcgttttctggagtcagaacaccagaaatagtcccttggctctctttcctttccttgtgaatctttcaaaattcttacattactactcctgcttgtgtgtgtttaataatttaatttaatgccttcctttggaaacattacctcgctgctcacccactcggctgttttgccttctcagcagagtaactgagtttaagacagccacgtgacaggcacagctatattagaaccagcatagtgagaagggatgcagtgcctctcttttctaattgggtagagcaacaattttatatgctttcacattatgtttgttcccaaaaaaaaagaggcaaaattgggagctgaaygtgatcatcattattattttatatttttatacataacaagatgcgctcatacttattgtctcacttaattgtacagcagtccttgaagcaggtgctattgattctgtttgatgagctgaccgtgtctccg

SEQ ID NO: 53247 - DNA, 616 bp, Homo sapiens
gaatctctcattttgttaacgttttagataatggctgacctttgaatggtctgttcatgccttcactcgttctttcatggagtaatcaaccaacttttattaaaagcctattatttggctgggtgaggtggctcacagctgtaatcctagcactttgggaggcccaggccggcggatcacttgaggtcaggagttggagaccagcctgaccaacatggcaaaaccctgtctctaataaaaataaaaaattatcagggcgtggtggcgcatgcctgtagtcccagctactcaggaggctgaggcacgagaatcgcttgtgcccaggaggccaaggttatggtgagctgagatagcaccactgcagtccagcctgggtgacagtgagaccctgtctcaaaaaaaaaaaaaaaaaagaaaaagaaaaaagaaaaagaaaaragcctattatttgccagaccctgtgctaggtgatagggacggaggtgcctcatggaatgctcagtctagcaaagaagataaaacacgtgagtatgatctagggagatataggctatgatgtgggtaatacagggtttagcggagcactgaggcaggtatttcctgaccttttcctgca

SEQ ID NO: 53248 - DNA, 534 bp, Homo sapiens
ggtcaatctcagattattattatcagacctaccctaatgacgttagtcttccaaataaagtgagtgactgaactgtcaaatcagcaagatcaggatattgaaagtcctgctttgaattctaacgaccagttataagtagaaaatgacactcaccctggtactgataggacagcaaatgttaagtgtagacaagagggtcatctgcctccaattcacaggagccagcatctgcattagcagcacaagatacgtccttagaaggttcgtcattagctggaagtttgagagctgcagcrgaagcggctttgtcacagactggatttagtgatgatgaaaatactggactgtattttgaccacagcactggtttctattaagattctgagaatcaaatatattatgatttaatttattaccactgtgatgtggaaagttgtcgctatcgatttcattctcgagtagatttgcaaccttatcagacttatagcacgaaacaaaaacgaaaaattgagaaaagaaaggattcttctacaa

SEQ ID NO: 53249 - DNA, 1418 bp, Homo sapiens
acttttggctggatcaaagtaaagggtcaaactatggaaacttaatttattatttgcctgcttatttgtagagatatctgcttccagcttccttatgaactggrggaggagctgtggctcttactgaagataactgttaaggttggtctctcctgtgttctactacttcttctatttccctcagagtcagtttttatgtgtgagacctttagcttggggaatattgtaatagcactcctgtgataggcaagaccaatatccatagtttgtttcctaggagactctctgggtttctagctttttccaattttgtaacagcaggtgcgacaaagtctgtggggcttaacaggtctcgttgaaatcttcagatctgtggttttctttctgttccaaagcaaatttggaaaaaaagagaagaaaaagctaacatggttgttacttggcaagagatgtgttcttattggtgcattcacattttaagaaattcacactttgaattactaaggtgctaacatagatcttcacagactagaagaaacagaatttcagggttggagggacattagaggtcatctgatccaactatcatctgtaatgttttaagtcaagctccctgaacagtcgtttttcttttttaattttacaattttatttatttatttattttttgagacagggtcttgctctgtcgctcaggctggagtgcagcgacgtgatcacggctcactgcagcctcatcctcctaggctcaagcgattcttccacctcagcctcccaagtggctgggactacaggcacataccaccacacctgactaatttttaaatttttcgtagagacgaggtctcactagattgctcaggctggtcttgaactcctgggctcaagagatcctcctccctctacctcccaaaatgctgggactacaggtgcaagccactgcccccggcctgttatttttcttagtatttcttggtcttgtttccttgaatactttgaatttggtctaacttattttcttctagacttaaatttggtgttgtcgcaacatttttcccaactgtcttcaaatgtccagagatggtctgtgttgtaaaagaacatcttgaatatggtttagttttattattttttccaccaaacttttgtggaggtctctgtagcttccaagccacaattgtgttaaagtgtctaaagcagaggaaagcacactttctctctaaagaggcagataataaatgtttttggccttgaggaccatacagtctctgttgcagctactcaactctgccattgtatgggaaagcacccataaaatactcatacaaatgggcatgggtttttttttttttttgaaacggagtctcactctgttgcccaggctggagtgcagtggtgtgatcacggctcactacaac

SEQ ID NO: 53250 - DNA, 1418 bp, Homo sapiens
acttttggctggatcaaagtaaagggtcaaactatggaaacttaatttattatttgcctgcttatttgtagagatatctgcttccagcttccttatgaactggaggaggagctgtggctcttactgaagataactgttaaggttggtctctcctgtgttctactacttcttctatttccctcagagtcagtttttatgtgtgagacctttagcttggggaatattgtaatagcactcctgtgataggcaagaccaatatccatagtttgtttcctaggagactctctgggtttctagctttttccaattttgtaacagcaggtgcgacaaagtctgtggggcttaacaggtctcgytgaaatcttcagatctgtggttttctttctgttccaaagcaaatttggaaaaaaagagaagaaaaagctaacatggttgttacttggcaagagatgtgttcttattggtgcattcacattttaagaaattcacactttgaattactaaggtgctaacatagatcttcacagactagaagaaacagaatttcagggttggagggacattagaggtcatctgatccaactatcatctgtaatgttttaagtcaagctccctgaacagtcgtttttcttttttaattttacaattttatttatttatttattttttgagacagggtcttgctctgtcgctcaggctggagtgcagcgacgtgatcacggctcactgcagcctcatcctcctaggctcaagcgattcttccacctcagcctcccaagtggctgggactacaggcacataccaccacacctgactaatttttaaatttttcgtagagacgaggtctcactagattgctcaggctggtcttgaactcctgggctcaagagatcctcctccctctacctcccaaaatgctgggactacaggtgcaagccactgcccccggcctgttatttttcttagtatttcttggtcttgtttccttgaatactttgaatttggtctaacttattttcttctagacttaaatttggtgttgtcgcaacatttttcccaactgtcttcaaatgtccagagatggtctgtgttgtaaaagaacatcttgaatatggtttagttttattattttttccaccaaacttttgtggaggtctctgtagcttccaagccacaattgtgttaaagtgtctaaagcagaggaaagcacactttctctctaaagaggcagataataaatgtttttggccttgaggaccatacagtctctgttgcagctactcaactctgccattgtatgggaaagcacccataaaatactcatacaaatgggcatgggtttttttttttttttgaaacggagtctcactctgttgcccaggctggagtgcagtggtgtgatcacggctcactacaac

SEQ ID NO: 53251 - DNA, 1418 bp, Homo sapiens
acttttggctggatcaaagtaaagggtcaaactatggaaacttaatttattatttgcctgcttatttgtagagatatctgcttccagcttccttatgaactggaggaggagctgtggctcttactgaagataactgttaaggttggtctctcctgtgttctactacttcttctatttccctcagagtcagtttttatgtgtgagacctttagcttggggaatattgtaatagcactcctgtgataggcaagaccaatatccatagtttgtttcctaggagactctctgggtttctagctttttccaattttgtaacagcaggtgcgacaaagtctgtggggcttaacaggtctcgttgaaatcttcagatctgtggttttctttctgttccaaagcaaatttggaaaaaaagagaagaaaaagctaacatggttgttacttggcaagagatgtgttcttattggtgcattcacattttaagaaattcacactttgaattactaaggtgctaacatagatcttcacagactagaagaaacagaatttcagggttggagggacattagaggtcatctgatccaactatcatctgtaatgttttaagtcaagctccctgaacagtcgtttttcttttttaattttacaattttatttatttatttattttttgagacagggtcttgctctgtcgctcaggctggagtgcagcgacgtgatcacggctcactgcagcctcatcctcctaggctcaagcgattcttccacctcagcctcccaagtggctgggactacaggcacataccaccacacctgactaatttttaaatttttcgtagagacgaggtctcactagattgctcaggctggtcttgaactcctgggctcaagagatcctcctccctctacctcccaaaatgctgggactacaggtgcaagccactgcccccggcctgttatttttcttagtatttcttggtcttgtttccttgaatactttgaatttggtctaacttattttcttctagacttaaatttggtgttgtcgcaacatttttcccaactgtcttcaaatgtccagagatggtctgtgttgtaaaagaacatcttgaatatggtttagttttattattttttccaccaaacttttgtggaggtctctgtagcttccaagccacaattgtgttaaagtgtctaaagcagaggaaagcacactttctctctaaagaggcagataataaatgtttttggccttgaggaccatacagtctctgttgcagctactcaactctgccattgtatgggaaagcasccataaaatactcatacaaatgggcatgggtttttttttttttttgaaacggagtctcactctgttgcccaggctggagtgcagtggtgtgatcacggctcactacaac

SEQ ID NO: 53252 - DNA, 1418 bp, Homo sapiens
acttttggctggatcaaagtaaagggtcaaactatggaaacttaatttattatttgcctgcttatttgtagagatatctgcttccagcttccttatgaactggaggaggagctgtggctcttactgaagataactgttaaggttggtctctcctgtgttctactacttcttctatttccctcagagtcagtttttatgtgtgagacctttagcttggggaatattgtaatagcactcctgtgataggcaagaccaatatccatagtttgtttcctaggagactctctgggtttctagctttttccaattttgtaacagcaggtgcgacaaagtctgtggggcttaacaggtctcgttgaaatcttcagatctgtggttttctttctgttccaaagcaaatttggaaaaaaagagaagaaaaagctaacatggttgttacttggcaagagatgtgttcttattggtgcattcacattttaagaaattcacactttgaattactaaggtgctaacatagatcttcacagactagaagaaacagaatttcagggttggagggacattagaggtcatctgatccaactatcatctgtaatgttttaagtcaagctccctgaacagtcgtttttcttttttaattttacaattttatttatttatttattttttgagacagggtcttgctctgtcgctcaggctggagtgcagcgacgtgatcacggctcactgcagcctcatcctcctaggctcaagcgattcttccacctcagcctcccaagtggctgggactacaggcacataccaccacacctgactaatttttaaatttttcgtagagacgaggtctcactagattgctcaggctggtcttgaactcctgggctcaagagatcctcctccctctacctcccaaaatgctgggactacaggtgcaagccactgcccccggcctgttatttttcttagtatttcttggtcttgtttccttgaatactttgaatttggtctaacttattttcttctagacttaaatttggtgttgtcgcaacatttttcccaactgtcttcaaatgtccagagatggtctgtgttgtaaaagaacatcttgaatatggtttagttttattattttttccaccaaacttttgtggaggtctctgtagcttccaagccacaattgtgttaaagtgtctaaagcagaggaaagcacactttctctctaaagaggcagataataaatgtttttggccttgaggaccatacagtctctgttgcagctactcaactctgccattgtatgggaaagcacccataaaatacwcatacaaatgggcatgggtttttttttttttttgaaacggagtctcactctgttgcccaggctggagtgcagtggtgtgatcacggctcactacaac

SEQ ID NO: 53253 - DNA, 640 bp, Homo sapiens
tagagataaacataaataaggcatatgtttctgttattcattgctatgagacaaaacagcccaaaatgtattggcttaaaaccacaatgatttattatttttcagggctcagctagtagttctgcttaatgtacaataaacagccatcacttatgtagctgaattccactgggagcttgacttgagttggaatgtccaagatagcccctcatcttccagggcctttctctatgtggcctctcatcatttagtatctatcccaagctttcctggagcgtagttgctggcttaagagggagtttattcacataaccatctgtaaaatgagtatccgaggagatagcacaagagtgaatacctgaaagtttatttataggggactgccaccatgacaatayattattttacagtcttctctctggattctcctgattaatgtcccttcgtcatgcacaaaatcccacaccctcccaaaggtttatcacattaggacatcatgttgaagtccaatatagcatgttgaaatcagttccagattcaaatgaagtttcgttgctaaaatccctgttgatctgcagaactaagaacctaaaaataagttatggttccttacacacacaacacacatggaacaggggca

SEQ ID NO: 53254 - DNA, 632 bp, Homo sapiens
tccctgaaataayctacctgtacaaaactgtatcatgaacacaacattttttctgggcttataaacgttaatcctgacttccatatagaagcgttttttgataatgaataaagatggtataaccttcctcagagctttccaaaaaaataaaagaggaaagacagcacattcttccaccgaaatgtgagaacatttggtagttcctttatataccaggaaaacaaaggatacgtgggggttacatgagaagaaacaattttgaatgaacaagcaatcgaattggtttaaaaatgagcaagagagagaacttgtacaacaagcgtgtcagacaaacccagaggtctgcaaataacatggactgcctggggaggtagcaagttccccactccacccaaagtgcaagcaaacatactgtggccatttgtcatagtggagcatacagcgagtactggccccactgagctttaaggctacctactagactgatactcccttgttctcttcctgaggccctttgtcccacgttacttagatggagggaagtggaaaggtattttgtatttacaggtaaaataactatccacctctcagccccacagtgcagtttggcctggggaggtaggactttgggg

SEQ ID NO: 53255 - DNA, 1755 bp, Homo sapiens
gatcaaaaatattctgaaaaataaaaaataaaaacaataatataacaacaaaaaaatacaaattttttcaatacagtataaaaagacttgtgtagcatttacattgtattaggttttataagtaatctagagatgatttaaagtatatggaatatacatagtttacatgcgaagacratgtcattttatataaaggactagaacatttgtggattttgatatatcctggggtcctggaatcaatcccctccagtactgaggggtgactgtaactttcttgggagtgtaccgtttggtactctagtctattcccagcacttaaaacagtgcctggcatatagtaagtgttcaataaatattgaaataatcaatgaagaataagtgaataaacagaatattcttcaacaagtgttaattccctcttccttcctctcccctaaggaggtagaaacatttgaattcaaatctcttgcactcttcttgaatctgaggttttgcataaaatttgcccaaattacatataatcaagtatccatcatagagatgaattcagataattagaccaaaaatacaatctacaaattcccatgcaatgcatttgtctgaaaaaggtatttgcctggaatttcaaccaaacccaatgtccctttaacgccactaaggagaagctcagcctggtgaataacaggacatttgagtactggaataaatgatgattagaagacacccgtggcaaagctgcctcatagcaagattaatttgggggcgagaagagggtggttattaatgtgtccgggagacaactccaggcactgtttccctgatgggagcagaatctcaggttatttatagccacttctcaggaggaacatggcacagggcatccgaggagagaaccacgccaaggtgcgctaatggaactttgaggataatttactgctcaagttcaaggacttttgcaacaagaaagagcctctcaaactcccagcaatctctacccaggaaggagatgaacgtgactgtgcaggtctgtcattcaagattcgccatctcatcaatctcatcttctcccactgtccccctggctcactcctctccagccaccgcagcctcaggcagctcctcaaacatgaaaacacactcccaccacagggttttcatttttgccctttcctctgcatggacacacttttctgacacccttttaaactataggcttccgatcacctgatactagtaattgaagggtgtagtgagctataactgtgctgctgcactctagcctgggtgacagagaccaaaaaaaattaaactaaaagttgaaaagaataaaatataaacttccttttctgcttccctgctttgcatttttctacagctcttaccaaatccatgcttgctttgccccgagtttgctgtgtgatcttgggctaatcactatctctctctgggttttagcttcccatctacaaaatgagggcagtggttgacaattctctaaaatcctttctagcattcacatcccacatctctgggtgcaaataatgtaaataagcttgatgctgtgctggtcaaaatacatagtttcaggcttatttatcaataacaagaaagtgacattgtacatagtcacttcttgttattttcagtaaagtcaccaccaactcccaattagccaatcctgagccatggctcctaagagaaatacagggttgggttcctgcaagcctctgaccacaacatttttatcaatca

SEQ ID NO: 53256 - DNA, 1755 bp, Homo sapiens
gatcaaaaatattctgaaaaataaaaaataaaaacaataatataacaacaaaaaaatacaaattttttcaatacagtataaaaagacttgtgtagcatttacattgtattaggttttataagtaatctagagatgatttaaagtatatggaatatacatagtttacatgcgaagacgatgtcattttatataaaggactagaacatttgtggattttgatatatcctggggtcctggaatcaatcccctccagtactgaggggtgactgtaactttcttgggagtgtaccgtttggtactctagtctattcccagcacttaaaacastgcctggcatatagtaagtgttcaataaatattgaaataatcaatgaagaataagtgaataaacagaatattcttcaacaagtgttaattccctcttccttcctctcccctaaggaggtagaaacatttgaattcaaatctcttgcactcttcttgaatctgaggttttgcataaaatttgcccaaattacatataatcaagtatccatcatagagatgaattcagataattagaccaaaaatacaatctacaaattcccatgcaatgcatttgtctgaaaaaggtatttgcctggaatttcaaccaaacccaatgtccctttaacgccactaaggagaagctcagcctggtgaataacaggacatttgagtactggaataaatgatgattagaagacacccgtggcaaagctgcctcatagcaagattaatttgggggcgagaagagggtggttattaatgtgtccgggagacaactccaggcactgtttccctgatgggagcagaatctcaggttatttatagccacttctcaggaggaacatggcacagggcatccgaggagagaaccacgccaaggtgcgctaatggaactttgaggataatttactgctcaagttcaaggacttttgcaacaagaaagagcctctcaaactcccagcaatctctacccaggaaggagatgaacgtgactgtgcaggtctgtcattcaagattcgccatctcatcaatctcatcttctcccactgtccccctggctcactcctctccagccaccgcagcctcaggcagctcctcaaacatgaaaacacactcccaccacagggttttcatttttgccctttcctctgcatggacacacttttctgacacccttttaaactataggcttccgatcacctgatactagtaattgaagggtgtagtgagctataactgtgctgctgcactctagcctgggtgacagagaccaaaaaaaattaaactaaaagttgaaaagaataaaatataaacttccttttctgcttccctgctttgcatttttctacagctcttaccaaatccatgcttgctttgccccgagtttgctgtgtgatcttgggctaatcactatctctctctgggttttagcttcccatctacaaaatgagggcagtggttgacaattctctaaaatcctttctagcattcacatcccacatctctgggtgcaaataatgtaaataagcttgatgctgtgctggtcaaaatacatagtttcaggcttatttatcaataacaagaaagtgacattgtacatagtcacttcttgttattttcagtaaagtcaccaccaactcccaattagccaatcctgagccatggctcctaagagaaatacagggttgggttcctgcaagcctctgaccacaacatttttatcaatca

SEQ ID NO: 53257 - DNA, 1755 bp, Homo sapiens
gatcaaaaatattctgaaaaataaaaaataaaaacaataatataacaacaaaaaaatacaaattttttcaatacagtataaaaagacttgtgtagcatttacattgtattaggttttataagtaatctagagatgatttaaagtatatggaatatacatagtttacatgcgaagacgatgtcattttatataaaggactagaacatttgtggattttgatatatcctggggtcctggaatcaatcccctccagtactgaggggtgactgtaactttcttgggagtgtaccgtttggtactctagtctattcccagcacttaaaacagtgcctggcatatagtaagtgttcaataaatattgaaataatcaatgaagaataagtgaataaacagaatattcttcaacaagtgttaattccctcttccttcctctcccctaaggaggtagaaacatttgaattcaaatctcttgcactcttcttgaatctgaggttttgcayaaaatttgcccaaattacatataatcaagtatccatcatagagatgaattcagataattagaccaaaaatacaatctacaaattcccatgcaatgcatttgtctgaaaaaggtatttgcctggaatttcaaccaaacccaatgtccctttaacgccactaaggagaagctcagcctggtgaataacaggacatttgagtactggaataaatgatgattagaagacacccgtggcaaagctgcctcatagcaagattaatttgggggcgagaagagggtggttattaatgtgtccgggagacaactccaggcactgtttccctgatgggagcagaatctcaggttatttatagccacttctcaggaggaacatggcacagggcatccgaggagagaaccacgccaaggtgcgctaatggaactttgaggataatttactgctcaagttcaaggacttttgcaacaagaaagagcctctcaaactcccagcaatctctacccaggaaggagatgaacgtgactgtgcaggtctgtcattcaagattcgccatctcatcaatctcatcttctcccactgtccccctggctcactcctctccagccaccgcagcctcaggcagctcctcaaacatgaaaacacactcccaccacagggttttcatttttgccctttcctctgcatggacacacttttctgacacccttttaaactataggcttccgatcacctgatactagtaattgaagggtgtagtgagctataactgtgctgctgcactctagcctgggtgacagagaccaaaaaaaattaaactaaaagttgaaaagaataaaatataaacttccttttctgcttccctgctttgcatttttctacagctcttaccaaatccatgcttgctttgccccgagtttgctgtgtgatcttgggctaatcactatctctctctgggttttagcttcccatctacaaaatgagggcagtggttgacaattctctaaaatcctttctagcattcacatcccacatctctgggtgcaaataatgtaaataagcttgatgctgtgctggtcaaaatacatagtttcaggcttatttatcaataacaagaaagtgacattgtacatagtcacttcttgttattttcagtaaagtcaccaccaactcccaattagccaatcctgagccatggctcctaagagaaatacagggttgggttcctgcaagcctctgaccacaacatttttatcaatca

SEQ ID NO: 53258 - DNA, 589 bp, Homo sapiens
gaataaactctttgatttgggcccagggcactttgaacatatgagtgcaaacccacgaaaggtttattctgagacaattcagcacaatttctctgagtcatggagaatgattctcagaccttttgtccttgcgcaggggcagtgcatctatccgtctacttacccaaacaaagaacaatggttgagcaggaacgatgtgcctggtactgtgctcatcttcacacatgcagccctcagaggcttgatcctcaccccaaaggagtgctgcatggcagggacacagacaagcaagcaaatatagcagcgtggtgtgatagatgcttgatgtggcttggctgtgtccccacccaaatctcatcttgaattgtaatcctcaggtattgaaggagagacctggtgagaggtgactggatcataggggcrgtttcccccatgctgttcttgtgatagtgagtgagttctaacaagagctgatggttttacaagaggctcttccccctttgctgctcacttttctctctcttgccgccatgtgagacggtccaagcttgctttcccttcaccttccgccatgattttaagtttcctg

SEQ ID NO: 53259 - DNA, 589 bp, Homo sapiens
gaataaactctttgatttgggcccagggcactttgaacatatgagtgcaaacccacgaaaggtttattctgagacaattcagcacaatttctctgagtcatggagaatgattctcagaccttttgtccttgcgcaggggcagtgcatctatccgtctacttacccaaacaaagaacaatggttgagcaggaacgatgtgcctggtactgtgctcatcttcacacatgcagccctcagaggcttgatcctcaccccaaaggagtgctgcatggcagggacacagacaagcaagcaaatatagcagcgtggtgtgatagatgcttgatgtggcttggctgtgtccccacccaaatctcatcttgaattgtaatcctcaggtattgaaggagagacctggtgagaggtgactggatcataggggcggtttcccccatgctgttcttgtgatagtgagtgagttctaacaagagctgatggttttacaagaggctcttccccctttgctgctcacttttstctctcttgccgccatgtgagacggtccaagcttgctttcccttcaccttccgccatgattttaagtttcctg

SEQ ID NO: 53260 - DNA, 545 bp, Homo sapiens
acaaaagtcatttaggaaagagagaaaaagggaggatggagccatgaaaggagtataagaaagataaactttatgccaagggcagtgggagggtctttgaaaggcatttaagccagaaagaggtgtgatatattcatggcaagcrtgagcatgtcagtacatatgacagcaccctcttcaccaattttacagcaatattctccatttgtaattacatacttttaacatttttgtttgtcttttcatggccggccacacatcagtaatcttcattagggacagaaccacatctgctttatttactattgtatgcttgtgcctagaatggtgcccggcacataaaagaggctcaataaatatttgctgaaagagggcgggcacggtggctcaagcctataatcccagcactttgggaggcgaggagggtggatcacctgaggtcaggagttggagaccagcctgaccaatgtggtgaaaccccgtctctactaaaaatacaaaaattagctgggcatggtggcacatgcttgtaatcccagctattc

SEQ ID NO: 53261 - DNA, 536 bp, Homo sapiens
taccccaccagagcarcgccacagagaatcatggctgaggctttcctgtgggctgcagtgcctgaccctttagggtccccacaaaaacatctttcctgcaaataatccaccgtgtcctgcttgccagcctaggcttcctcatcagttggtgatttcaatgaaaacaaactacagtggaatgaacaaattctaaatcaggaacacacaaagaatctgtggaaagtccatttgtcatctagatttttaaaagatacacattttcccttcttgttatattcagtagtgcatgaagccaatattataatagatgtgcaactcacactaaagctgactaaagggtgaattcttattctaaggtactttgtggtctcaaatttatctgttcccacccccaggaccccattaaaactgaataattgtcattgagagcagatgtagaaagaaactagctaggcagatagagcaaagagttctcaacagaacatcccttctaacagaaagcaacccaggaattcacttctctttaacaaagagca

SEQ ID NO: 53262 - DNA, 536 bp, Homo sapiens
taccccaccagagcagcgccacagagaatcatggctgaggctttcctgtgggctgcagtgcctgaccctttagggtccccacaaaaacayctttcctgcaaataatccaccgtgtcctgcttgccagcctaggcttcctcatcagttggtgatttcaatgaaaacaaactacagtggaatgaacaaattctaaatcaggaacacacaaagaatctgtggaaagtccatttgtcatctagatttttaaaagatacacattttcccttcttgttatattcagtagtgcatgaagccaatattataatagatgtgcaactcacactaaagctgactaaagggtgaattcttattctaaggtactttgtggtctcaaatttatctgttcccacccccaggaccccattaaaactgaataattgtcattgagagcagatgtagaaagaaactagctaggcagatagagcaaagagttctcaacagaacatcccttctaacagaaagcaacccaggaattcacttctctttaacaaagagca

SEQ ID NO: 53263 - DNA, 536 bp, Homo sapiens
taccccaccagagcagcgccacagagaatcatggctgaggctttcctgtgggctgcagtgcctgaccctttagggtccccacaaaaacatctttcctgcaaataatccaccgtgtcctgcttgccagcctaggcttcctcatcagttggtgatttcaatgaaaacaaactacagtggaatgaacaarttctaaatcaggaacacacaaagaatctgtggaaagtccatttgtcatctagatttttaaaagatacacattttcccttcttgttatattcagtagtgcatgaagccaatattataatagatgtgcaactcacactaaagctgactaaagggtgaattcttattctaaggtactttgtggtctcaaatttatctgttcccacccccaggaccccattaaaactgaataattgtcattgagagcagatgtagaaagaaactagctaggcagatagagcaaagagttctcaacagaacatcccttctaacagaaagcaacccaggaattcacttctctttaacaaagagca

SEQ ID NO: 53264 - DNA, 536 bp, Homo sapiens
taccccaccagagcagcgccacagagaatcatggctgaggctttcctgtgggctgcagtgcctgaccctttagggtccccacaaaaacatctttcctgcaaataatccaccgtgtcctgcttgccagcctaggcttcctcatcagttggtgatttcaatgaaaacaaactacagtggaatgaacaaattctaaatcaggaacacacaaagaatctgtggaaagtccatttgtcatctagatttttaaaagatacacattttcccttcttgttatattcagtagtgcatgaagccaatattataatagatgtgcaactcacactaaagctgactaaagggtgaattcttattctaaggtactttgtggtctcaaatttatctgttcccacccccaggaccccattaaaactgaataattgtcattgagagcagatgtagaaagaaactagctaggcagatagagcaaagagttctcaacagaacrtcccttctaacagaaagcaacccaggaattcacttctctttaacaaagagca

SEQ ID NO: 53265 - DNA, 632 bp, Homo sapiens
ctcacgggggcagagctgagatcccagcytcctatgtccccacagcgtgcctccggctgctcccccacatctaccctgggctggtgccagggcccaggctcatcaggggacttggccttttttattccccagttggcatttgaagtgaacttaatgagatccagccctttatgtcagaataaaaccatgccagacccttctaaactgccctaatgttccggtgctgggtttcagcatccaatcattccatgtgctcagggctggggtttggctgggcacggacctcctctgtctgatgattgtttctggtgtgctctcattggttccacttttctgcccctgcctggctggtggggtcccacgaggctgggcagctgcactctctcccccaagctgagactgggcaccaaaggagggtggagggtctctgcaggaggctacctgtgcctgccatggctccgagcatcctcacccccccatcctggatggtggcatccagggcccactgcccccagaccaggcctgcacttcacccccacatcctgacactccaagtcttcatgtgctcccggctcccaggccttggcacagcctgttccctgcgcctggaatgcctttcccagatcttctcc

SEQ ID NO: 53266 - DNA, 543 bp, Homo sapiens
atgcccacactttctgggcttggaaaaacaactattaattcagtttaaaatgaaacataattaaacagaaaaaaaaatattcctttccccctggagggtaggacataggaaaaaaagagaacgtgaattactttagggatgttttgctttttattcaaggcagatggctactttcctgggtcttcaatttctctagttttgtttctcttttgctcttatccactgaaagaacatctgttttatgagcagggccttsgcagccttcctcctcatttttcaggtgatgaacggcctctgaattgtggtttataaacctcagggctcccatggtgagtctgtctggctggggaactcagcacttttgttttcatccataggacttcttcagggcacgcaatcctctcaaatgaagtgagctccaattgggtgagaaatgggagagaaagaatgaggttcactgaaaggtgtaaattgttatacaaatggctacttggccacaaaacattggttcttcccttgcagagtatagaattattgctggga

SEQ ID NO: 53267 - DNA, 543 bp, Homo sapiens
atgcccacactttctgggcttggaaaaacaactattaattcagtttaaaatgaaacataattaaacagaaaaaaaaatattcctttccccctggagggtaggacataggaaaaaaagagaacgtgaattactttagggatgttttgctttttattcaaggcagatggctactttcctgggtcttcaatttctctagttttgtttctcttttgctcttatccactgaaagaacatctgttttatgagcagggccttcgcagccttcctcctcatttttcagrtgatgaacggcctctgaattgtggtttataaacctcagggctcccatggtgagtctgtctggctggggaactcagcacttttgttttcatccataggacttcttcagggcacgcaatcctctcaaatgaagtgagctccaattgggtgagaaatgggagagaaagaatgaggttcactgaaaggtgtaaattgttatacaaatggctacttggccacaaaacattggttcttcccttgcagagtatagaattattgctggga

SEQ ID NO: 53268 - DNA, 704 bp, Homo sapiens
ttaatcatcatcctagccctaagtctggcctatgagtgactacaaaaaggattagactgaaccgaattggtatatagtttaaacaaaacgaatgatttcgactcattaaattatgataatcatatttaccaaatgcccctcatttacataaatattatactagcatttaccatctcacttctaggaatactagtatatcgctcacacctcatatcctccctactatgcctagaaggaataatactatcgctgttcattatagctactctcataaccctcaacacccactccctcttagccaatattgtgcctattgccatactagtctttgccgcctgcgaagcagcggtgggcctagccctactagtytcaatctccaacacatatggcctagactacgtacataacctaaacctactccaatgctaaaactaatcgtcccaacaattatattactaccactgacatgactttccaaaaaacacataatttgaatcaacacaaccacccacagcctaattattagcatcatccctctactattttttaaccaaatcaacaacaacctatttagctgttccccaaccttttcctccgaccccctaacaacccccctcctaatactaactacctgactcctacccctcacaatcatggcaagccaacgccacttatccagtgaaccactatcacgaaaaaaactc

SEQ ID NO: 53269 - DNA, 3049 bp, Homo sapiens
cctaaacctcaacagttaaatcaacaaaactgctcgccagaacactacgagccacagcttaaaactcaaaggacctggcggtgcttcatatccctctagaggagcctgttctgtaatcgataaaccccgatcaacctcaccacctcttgctcagcctatataccgccatcttcagcaaaccctgatgaaggctacaaagtaagcgcaagtacccacgtaaagacgttaggtcaaggtgtagcccatgaggtggcaagaaatgggctacattttctaccccagaaaactacgatagcccttatgaaacttaagggtcgaaggtggatttagcagtaaactgagagtagagtgcttagttgaacagggccctgaagcgcgtacacaccgcccgtcaccctcctcaagtatacttcaaaggacatttaactaaaacccctacgcatttatatagaggagacaagtcgtaacatggtaagtgtactggaaagtgcacttggacgaaccagagtgtagcttaacacaaagcacccaacttacacttaggagatttcaacttaacttgaccgctctgagctaaacctagccccaaacccactccaccttactaccagacaaccttagccaaaccatttacccaaataaagtataggcgatagaaattgaaacctggcgcaatagatatagtaccgcaagggaaagatgaaaaattataaccaagcataatatagcaaggactaacccctataccttctgcataatgaattaactagaaataactttgcaaggagagccaaagctaagacccccgaaaccagacgagctacctaagaacagctaaaagagcacacccgtctatgtagcaaaatagtgggaagatttataggtagaggcgacaaacctaccgagcctggtgatagctggttgtccaagatagaatcttagttcaactttaaatttgcccacagaaccctctaaatccccttgtaaatttaactgttagtccaaagaggaacagctctttggacactaggaaaaaaccttgtagagagagtaaaaaatttaacacccatagtaggcctaaaagcagccaccaattaagaaagcgttcaagctcaacacccactacctaaaaaatcccaaacatataactgaactcctcacacccaattggaccaatctatcaccctatagaagaactaatgttagtataagtaacatgaaaacattctcctccgcataagcctgcgtcagattaaaacactgaactgacaattaacagcccaatatctacaatcaaccaacaagtcattattaccctcactgtcaacccaacacaggcatgctcataaggaaaggttaaaaaaagtaaaaggaactcggcaaatcttaccccgcctgtttaccaaaaacatcacctctagcatcaccagtattagaggcaccgcctgcccagtgacacatgtttaacggccgcggtaccctaaccgtgcaaaggtagcataatcacttgttccttaaatagggacctgtatgaatggctccacgagggttcagctgtctcttacttttaaccagtgaaattgacctgcccgtgaagaggcgggcataacacagcaagacgagaagaccctatggagctttaatttattaatgcaaacagtacctaacaaacccacaggtcctaaactaccaaacctgcattaaaaatttcggttggggcgacctcggagcagarcccaacctccgagcagtacatgctaagacttcaccagtcaaagcgaactactatactcaattgatccaataacttgaccaacggaacaagttaccctagggataacagcgcaatcctattctagagtccatatcaacaatagggtttacgacctcgatgttggatcaggacatcccgatggtgcagccgctattaaaggttcgtttgttcaacgattaaagtcctacgtgatctgagttcagaccggagtaatccaggtcggtttctatctaccttcaaattcctccctgtacgaaaggacaagagaaataaggcctacttcacaaagcgccttcccccgtaaatgatatcatctcaacttagtattatacccacacccacccaagaacagggtttgttaagatggcagagcccggtaatcgcataaaacttaaaactttacagtcagaggttcaattcctcttcttaacaacatacccatggccaacctcctactcctcattgtacccattctaatcgcaatggcattcctaatgcttaccgaacgaaaaattctaggctatatacaactacgcaaaggccccaacgtggtaggcccctacgggctactacaacccttcgctgacgccataaaactcttcaccaaagagcccctaaaacccgccacatctaccatcaccctctacatcaccgccccgaccttagctctcaccatcgctcttctactatgaacccccctccccatacccaaccccctggtcaacctcaacctaggcctcctatttattctagccacctctagcctagccgtttactcaatcctctgatcagggtgagcatcaaactcaaactacgccctgatcggcgcactgcgagcagtagcccaaacaatctcatatgaagtcaccctagccatcattctactatcaacattactaataagtggctcctttaacctctccacccttatcacaacacaagaacacctctgattactcctgccatcatgacccttggccataatatgatttatctccacactagcagagaccaaccgaacccccttcgaccttgccgaaggggagtccgaactagtctcaggcttcaacatcgaatacgccgcaggccccttcgccctattcttcatagccgaatacacaaacattattataataaacaccctcaccactacaatcttcctaggaacaacatatgacgcactctcccctgaactctacacaacatattttgtcaccaagaccctacttctaacctccctgttcttatgaattcgaacagcatacccccgattcc

SEQ ID NO: 53270 - DNA, 602 bp, Homo sapiens
gggtgtggggtgcaggcacagggctcagccaccttttgcccgtgctgatggtgctatgaacctcatgcctcggtgtgcgtggcctgctggccaggcatcccctgatcctagcatggttgctggagggatgctctgtggtgcctgtcatgcagggggstgaccacctccatctcaccccctcccaccgcctttccttagtgccctacgggctgtccttgcgcctggcccgcctttgcaccgagaacctgctgaagcctgacactcgggagtgcgcccagctgcgccaggaggtggaggagaacgtaaggacccaggaactaggcctggccggagatgtgggtatgagggcgggtgaggtgggcagggcagagcgaatgcggtcgtggtaccgagattcattaactaggggagaggggtctctctggacctgtgcctggcagggggcatcctgggatctgtttccagagggcagaaggccagagcctgggcccaggatgctgccccacggggcatgccccagccaaccctgaggatctctgggtacagaggctgcctggctccctgggtccccagcctgagggcttgccacggggtggcctagg

SEQ ID NO: 53271 - DNA, 594 bp, Homo sapiens
gtgctgggaacacgttcccgctgagcctttccccggtgtgcagcgctggccccgcctggctgccacaggctgcctttcctgcccctgaccctcattcctcctcactccctcgccctgcatccacctgcgggagggaggagagcaaaccccacaccgcagcccccagcacaggcttccaccccaggaggccgggggagcagggcccacaggggctggctttaaaccaagaatggagcttggattaatatctcagggttrgggtaatggatttggactgactctgaattgagactgtatttgccagttgagtgacagaagctgctttttatgtaggagcacacagaaaatccccaggcagccaggagctttcagggccggaggaggtttgcccaccgcatacgcagtaatggggaacagaaaccgggcaggctgcatttggtgatctcaggagaaaggcttcctcagtgtgtcgaaagaaaccacacgcggcctggggcagaagacctgcccttagggtggccgagtggcctctcctggctctaagcatcaaaggtcctgcacccctggaaccccctcggtcctaggcaaaacaga

SEQ ID NO: 53272 - DNA, 612 bp, Homo sapiens
agagcgagcctcccaccactgccggcctctgctgggagccaccaagcgaggagtgaagaagaaaatcttggctctgttttaaaaagagaacagaatagaccagttatgttaaaatgttcacggcatcaattttttattaactgttcaggaaaaatgccttttaaaaaactgtaaaacctaaacattgaaaagaaactatcttggccagatacagtggctcacacttgtaatctcagcactttgggagtctgaggtgggtggatcgctgggcaacatggtgaaacaccactgctacaagaaatacaaaaaataggccgggcgtgttggtgcccgcctgtagtcccagctacccaggaggctgaggtgacaggatcacttgagcctgggaagttgaggctatagtcagccgtgatcatgccccactgcactcctgtctgggtgacagagacattgtcacacagacacacacatacatacaaaaaggaaacaattyggctgggcatgcggttcacgcctgtaatcccaccattttgggaagccgagatgggaggaccacttgagcccagacgtttgagaccagcctgggtaacacagcaagacctcatctctata

SEQ ID NO: 53273 - DNA, 551 bp, Homo sapiens
ttcatctgtttgttttcatgacagaacatcctggtagggaatattggcgtctttttcttttcaaagtgacactgacacaactccactttgtgcaaataaatgttttcaacctaaatgagtcatttggtgggaacagtgagttcgcaagcctgcatataggttgacccctttaccaaggagggtggcaggtagcattgtgtttggggctgacaaatattatgaacaatgagatcctttccatggtgatatcccttgctgtacgcagggaaaataaggataaaaatagggtgatagttgaaaactctgggccaggmagaatgcatccttggggagaatccagctacactagtatcttgccataaaatcttgagagtaaaggaggtatttaacttctgactcttgttaattcatttgtggttgtcaggattttaaatgtaaaacatttaaaaaatactcagtatatagtaagcattcaatgttagctgttattcttttttttttttttttttttttttttttttttttttgacagggtctcgctctgtcatcca

SEQ ID NO: 53274 - DNA, 550 bp, Homo sapiens
gttatctgtgcatgctgggaccttggggctggtcctattgcttttcccttgcttttctatagtttctagactctctgcaatgagcaaatactgctttttaaataattcattttgaaaggtagagtaataaggttttattgtaataataaggtattataagatatataaatatagtgataatattttgtaatataataactgtgttgttcgggagagaatgcctcagggagcgacagccactggcgttagagcacaggcttcagtgtccacagccctgagtcagtatctcatctccacactttgctgtgtgactttgggcaggttcattcacctctctgagcctctatttttatatcaatgacatagtgatgatcaaagtaagcccctcccccagctacagggcasatttaataaagcaaacagcaggctgggctcccatgccattcttggttgaacctacagtctgggcaggagcctagatccagcgctacaacctgcaacctgcccagaggccctggggtgggccggatgggccccttcccacactgcc

SEQ ID NO: 53275 - DNA, 654 bp, Homo sapiens
tttcatgggggaaatggattttgaggggccttgaaggatgaataggtaggatctgggcttgcatagatgaggagatgaaaattccagagaagaaaagacttggtgcatacactcctctcttcaccttttgtccctccccatcatctttcctgaattatttcagctccccactctagtctctgccctcacattcttcctctaagctcttcatttctgagaccaactggggatatcaatcttcaacttcacagtgaccttcagaatggcttttccttggtcagttgctacagaccaggtccttgggaattttttctgttttggcccttagctaccttttctgattcttaggtctcttgctattcccaaaaaaactgctacagaggacttcacagtatctcctttgggaggaagagccctgccaggagtccagaaagacccaagccatgcyctcccgggtactgcccagcacatgggggtgctcaagaaatctatgttgactgatgggacacaataatggccctgcttcctaaaggactaagttcaatacatcgttgcagactgagcacctagcaaaatgttatctgtctcaggcatgtttgatgaataaattacaagtgtctaagtgcctgagatgtcaccatcaggagttaatgc

SEQ ID NO: 53276 - DNA, 542 bp, Homo sapiens
tgagcttataaaagtgatagggaaaccttttttgaggaagttatttgtttgtttgttttttgtttttgttttttgagatggaatctcactctgtcactcaggccggagtgcaatgatgtgatctcagctcactacaacctctgcctcccagattcagcaattctcctgcctcagcccctcctgagtaggtgggattacaggtgcacgccaccatgcccggctaatttttgtatttttagtagagatggggtttcaccatgttggccaagctggtcttgaactcctgaccttgtgacccacccacctcrgcctgccaaagtgctgggattacaggcgtgagccactgcgccccaccaagggggtgagatttgagcagggatgtgaaggatgtttatcttcacactttgcgttgccacctaatctcgccccacaggggtcaacttaagccttctgccaaaagcccagagagtccttgaaatcactgtaagagatctctaagaataatgagagggcaaattagaaatggtgggggggcggggggg

SEQ ID NO: 53277 - DNA, 606 bp, Homo sapiens
cagaaaaatacctccttgcatcttaaacttgtctgctttaataatttactctacaagtaatacgtgctttcgtgtgtgtttaaagcttgtgaggctggatgatatttctgaaacgttaattggtaattgtttccacctggtatgtcctttctcttgagacccttctccatttgagccagtgggctgctctgtggctactgctttgggaaagggacgtaactgctccctgccctctgcttttgtttccaaaacccaagttcttaggaaaaccaaaacaactcttggcataggagacaayagatttgggagaaatacggtatgtaagagcagggcttctcacctctgagatgagacaagaattccctgtctgggggaaaggggaaaagtggaggtaaatccacaaaaggggatattttgggggttggggtggggtggggagctgtaccccacttctggcacgtgagccttggaataaggaacaagtcccaaggagattcaggcaaggaggggacctgcacattacttcctggtagaactatgtcactggagaagcagcaggaccctagagtggaagtggctgcttgaaacgtccaggtggatggagcc

SEQ ID NO: 53278 - DNA, 606 bp, Homo sapiens
cagaaaaatacctccttgcatcttaaacttgtctgctttaataatttactctacaagtaatacgtgctttcgtgtgtgtttaaagcttgtgaggctggatgatatttctgaaacgttaattggtaattgtttccacctggtatgtcctttctcttgagacccttctccatttgagccagtgggctgctctgtggctactgctttgggaaagggacgtaactgctccctgccctctgcttttgtttccaaaacccaagttcttaggaaaaccaaaacaactcttggcataggagacaacagatttgggagaaatacggtatgtaagagcagggcttctcacctctgagatgagacaagaattccctgtctgggggaaaggggaaaagtggaggtaaatccacaraaggggatattttgggggttggggtggggtggggagctgtaccccacttctggcacgtgagccttggaataaggaacaagtcccaaggagattcaggcaaggaggggacctgcacattacttcctggtagaactatgtcactggagaagcagcaggaccctagagtggaagtggctgcttgaaacgtccaggtggatggagcc

SEQ ID NO: 53279 - DNA, 3677 bp, Homo sapiens
caatggttcgtcatgagactttgcacagtggataacaaatagcaccattgctggtggttttataaaagttgccgaaacgtctccagccgactggaaccttcctcccgccctttcccaccttcattgcatgaccccttggctttgtcaggctgaggacagggcagcgggctcctccagagctcattaaggtttgcttttcccttgctcaaagtgatccttggtaaatttcctcttcagggtctgagaactcgacctttagtcaaggaaccatctgggttggcctggagggacattgctcacctgtgaaatgattgccccacagtgaccggccctgacagagagctcctctctccctggtctctgcctaatactccccacaatctggtctttcacggggagtgcccgacagtggacttgaccggctctgccccctgtcagcacttcctcactaagccgctccaccctactccgttttctgcccaacaggagaataaaggaagcatcagagcctcccaggcgagattccagattgtctgtaatgaaaacagaccaagccaagcaaacaaagcagatgcttggcctaagccctgcttattatttcaatcttatatggacatttcattgcttcgggccatgtctgcaggtgattggcccagggtccttcctttctgttgttggggggcatcagcccaggctttcatgggaaggacacaggatcaaccaggacaagggaaagaagagccagggggcctgaactccagttccagctgggaagagacctcactgggtgaccttgggcaagtaactttccctctctcaactctcagattcaaatttccaccatgcaagcatagggtataaaagtaaatcaaggttaagagagtggcctctggagtcagagcatgtggctttcagttctgactcaccgattgccataacctcattgcgttcccactccttcaactgtacgctggttattagtatccagcttagaggcactataggtaagaggtttaagtaaattaactcatgggaagttctccaggcagggcctggcatgtagcatgtgctcaatacattcatcatgattattatgaataatcctatgaagatcacagcctgtaagggcaatgagacatgtcaaagttaagtacaccagcagattacagatggggccccagaattctgcataaacacagtgtggatgcaaagcagggagggtcatgtcaactgaaggtgttggggagaagttcaggaaactcttgaacttgagctgagtttggtcttgatgaggctgacacaggtgtaggacactcgtggaagataaaatggagggaaaagccagagaacatggaacagcctggcatgttccgggattggagagtggttgggtgtggctggagcagtgggtgtgaggaggcatgtgccgagaggaccctggaaaagttgatggatcagggtggatcctgtaggctttccccttggacaacctggagycctgctagtttttttgtttggagacagagtctcactctgttacccaggctggagtacaatggctcgatctcagctcactgcaacctccgcctcccaggttcaagcgattctcctgcctcagcttcctgagtagctgggattacaggcatgcaccaccatgcctggctaattttgtatttttagtagagacagggtttctccatgttggtcaggatggtctcgaactcctgacctcaggtggtctgcctccctcggcctcccaaagtgctgggattacaggcatgagccactgcgcccggcccctgttgggtttcaagcagaggaagtgaggtagccagttctgggttttaggaccctagcaaatggatgggaggggccagctggggggccacgcaatccttaggcagtgattgttgcagtttagagcagaagtggtgcagagctgacctaagacaccaagatcagggaggcaggaaaatgcaacgcatgcctgagctgggaacacaggactcaatcatggagtggctgtgagggcccaaaggggagccaaatgatagaaccatttgccggccatgactgcacgtctttcatactgggagtcctgccctgctacagatgaagaggccccgggagggttgagtcacttcttccaggtcacatagctggtgagcaaaggagaaggatgcctactgggaatctggcttcgcagctcccagccataaaccaaggctgcttctctgtaaccatggccagcctttattgaatgcttttcatatgccaggcattgttctaagtaactttcccaaggtcacacggctagtaaatgacagagctgtgattcaaacacaagcagtactcccagactgcacccaaacaatgctcccggactgtacacaaacagtgtcccagactgcacccaaacagtgctcccggactacacccaagcagtactcccagaatgcacccaaacggtgctcccggactgtacacaaacagtgctcccagactgcacccaaagagtgctctcggactgcacccaaacagtgctcccggactgcacccaaacagtgctcctgggctgcacccagtgctcccgcattgtacccaaacagtgctcctgggctgcacccaaacagtgctcccgcattgtacccaaacagtgctcccggactacacccaaacagtgctcccggactgcaccctaacagcgctcccggactgcaccctaacagtgctcccggattacacccaaacagtgctcccggattgtacccaaacagtgctcctggactgcacccaaacagtgctcctggactgcacccaaacagtgctcccggactgcacccaaacagtgctcccggactgcacccaaacagtgatctcagactgcacccaaacagtgctccctgactgtacacaaacagtgctcccggactgcacccagacagtgctcccggactgcacccaaacagtgctcctgggctgcacccaaacagtgctctcggactgcacccaaacagtgctctcggactgcacctaaacagtgctcctggaccacaactgcttatcactatgctgagttgctttgggtgacacaatgatgcaggtgaaaccatgggagtggatgggattgtctaaagcattgttgtctctggaactccagtgagagtcacatgtataattacaagttttctattagccacattaaaaaaagtaaaaagaaataggtgaacataattttaatagtgtatgtatgtatgtacatatatatacacacacatatacatataaaatagtttacgtatatacatatataaaaaatataaattcatacataaaaatatatataaatatataagtatatataggagaccgaatcatgccctgtgcccaggctggaattcagtggtgcgatcctagctcactgcagcctggaactcctgggctcaagcaatcctcctgctacagcctcccgagtagctaggactacaggcatgcaccaccgtgcctggctaatttttaatttaatttaattttattatatatttatttatttatttaatttttttttactcgctctgtcccccaggctggagtgcagtggcacgatctcggctcactgcaagctccgcctcccaggttcacaccattctcttgcctcagcccccccgagtagctgc

SEQ ID NO: 53280 - DNA, 3677 bp, Homo sapiens
caatggttcgtcatgagactttgcacagtggataacaaatagcaccattgctggtggttttataaaagttgccgaaacgtctccagccgactggaaccttcctcccgccctttcccaccttcattgcatgaccccttggctttgtcaggctgaggacagggcagcgggctcctccagagctcattaaggtttgcttttcccttgctcaaagtgatccttggtaaatttcctcttcagggtctgagaactcgacctttagtcaaggaaccatctgggttggcctggagggacattgctcacctgtgaaatgattgccccacagtgaccggccctgacagagagctcctctctccctggtctctgcctaatactccccacaatctggtctttcacggggagtgcccgacagtggacttgaccggctctgccccctgtcagcacttcctcactaagccgctccaccctactccgttttctgcccaacaggagaataaaggaagcatcagagcctcccaggcgagattccagattgtctgtaatgaaaacagaccaagccaagcaaacaaagcagatgcttggcctaagccctgcttattatttcaatcttatatggacatttcattgcttcgggccatgtctgcaggtgattggcccagggtccttcctttctgttgttggggggcatcagcccaggctttcatgggaaggacacaggatcaaccaggacaagggaaagaagagccagggggcctgaactccagttccagctgggaagagacctcactgggtgaccttgggcaagtaactttccctctctcaactctcagattcaaatttccaccatgcaagcatagggtataaaagtaaatcaaggttaagagagtggcctctggagtcagagcatgtggctttcagttctgactcaccgattgccataacctcattgcgttcccactccttcaactgtacgctggttattagtatccagcttagaggcactataggtaagaggtttaagtaaattaactcatgggaagttctccaggcagggcctggcatgtagcatgtgctcaatacattcatcatgattattatgaataatcctatgaagatcacagcctgtaagggcaatgagacatgtcaaagttaagtacaccagcagattacagatggggccccagaattctgcataaacacagtgtggatgcaaagcagggagggtcatgtcaactgaaggtgttggggagaagttcaggaaactcttgaacttgagctgagtttggtcttgatgaggctgacacaggtgtaggacactcgtggaagataaaatggagggaaaagccagagaacatggaacagcctggcatgttccgggattggagagtggttgggtgtggctggagcagtgggtgtgaggaggcatgtgccgagaggaccctggaaaagttgatggatcagggtggatcctgtaggctttccccttggacaacctggagtcctgctagtttttttgtttggagacagagtctcactctgttacccaggctggagtacaatggctcgatctcagctcactgcaacctccgcctcccaggttcaagcgattctyctgcctcagcttcctgagtagctgggattacaggcatgcaccaccatgcctggctaattttgtatttttagtagagacagggtttctccatgttggtcaggatggtctcgaactcctgacctcaggtggtctgcctccctcggcctcccaaagtgctgggattacaggcatgagccactgcgcccggcccctgttgggtttcaagcagaggaagtgaggtagccagttctgggttttaggaccctagcaaatggatgggaggggccagctggggggccacgcaatccttaggcagtgattgttgcagtttagagcagaagtggtgcagagctgacctaagacaccaagatcagggaggcaggaaaatgcaacgcatgcctgagctgggaacacaggactcaatcatggagtggctgtgagggcccaaaggggagccaaatgatagaaccatttgccggccatgactgcacgtctttcatactgggagtcctgccctgctacagatgaagaggccccgggagggttgagtcacttcttccaggtcacatagctggtgagcaaaggagaaggatgcctactgggaatctggcttcgcagctcccagccataaaccaaggctgcttctctgtaaccatggccagcctttattgaatgcttttcatatgccaggcattgttctaagtaactttcccaaggtcacacggctagtaaatgacagagctgtgattcaaacacaagcagtactcccagactgcacccaaacaatgctcccggactgtacacaaacagtgtcccagactgcacccaaacagtgctcccggactacacccaagcagtactcccagaatgcacccaaacggtgctcccggactgtacacaaacagtgctcccagactgcacccaaagagtgctctcggactgcacccaaacagtgctcccggactgcacccaaacagtgctcctgggctgcacccagtgctcccgcattgtacccaaacagtgctcctgggctgcacccaaacagtgctcccgcattgtacccaaacagtgctcccggactacacccaaacagtgctcccggactgcaccctaacagcgctcccggactgcaccctaacagtgctcccggattacacccaaacagtgctcccggattgtacccaaacagtgctcctggactgcacccaaacagtgctcctggactgcacccaaacagtgctcccggactgcacccaaacagtgctcccggactgcacccaaacagtgatctcagactgcacccaaacagtgctccctgactgtacacaaacagtgctcccggactgcacccagacagtgctcccggactgcacccaaacagtgctcctgggctgcacccaaacagtgctctcggactgcacccaaacagtgctctcggactgcacctaaacagtgctcctggaccacaactgcttatcactatgctgagttgctttgggtgacacaatgatgcaggtgaaaccatgggagtggatgggattgtctaaagcattgttgtctctggaactccagtgagagtcacatgtataattacaagttttctattagccacattaaaaaaagtaaaaagaaataggtgaacataattttaatagtgtatgtatgtatgtacatatatatacacacacatatacatataaaatagtttacgtatatacatatataaaaaatataaattcatacataaaaatatatataaatatataagtatatataggagaccgaatcatgccctgtgcccaggctggaattcagtggtgcgatcctagctcactgcagcctggaactcctgggctcaagcaatcctcctgctacagcctcccgagtagctaggactacaggcatgcaccaccgtgcctggctaatttttaatttaatttaattttattatatatttatttatttatttaatttttttttactcgctctgtcccccaggctggagtgcagtggcacgatctcggctcactgcaagctccgcctcccaggttcacaccattctcttgcctcagcccccccgagtagctgc

SEQ ID NO: 53281 - DNA, 647 bp, Homo sapiens
cacctccggcacatccatccgtggcaacttagttcctgatcctcagtttcctcatctataaaatggggatactgggactatctccttatagggttatggtaagggctccataagataatggagaaggagtgcccagcacagtgcctggcacacagtgggaatgcgactaaatcaactcttaatgttgacaggtagaagagacagtcttcctttggaggtatccagaatggtcattctcttctaagacatgaaaggacagcagtacttttgcagtctaaatcctcgcccaagaccctctggggccagcttgcagatgtcatcattgtccaaccagaaagcgacaaaggaggtagatggtagggatgggggtgggaaggaggcagcagagggaggatcagaggactagaggattctgttcttttctttcccttaggaaactgaaattagcctaattaggtctgtcccagtccaaggccgcggggattggacaaatttagaagctattgacaggtgagagcaacacacgctgatggcccaaagcgaaactgagcyggccattgagtcagcggctggaaggctctttccctccctctgtcgtgatgaccgggatgaaggagccggcctcctggtttatcacctcacctcta

SEQ ID NO: 53282 - DNA, 1629 bp, Homo sapiens
tgcccaggtggcacccaagttacatcaaccagaatgcctggagctgggccaagcacgggtctacaccaaccatggcctggtgatctcaatatgcagcaaagcttgggaaccacaaggatagcgtgtgctgagtttccctaacctagatgaacctggaaccttccgattttcattacatgtttcccagaccaaatcacaggactgggtttccctacagaacatcagtttgtgaaatggaactcagttgtttggggttattgttaacatagtttttaaaaacatatttttttttttggttaaaaaagcaatatattcccagtcatttccatatagatgtaaagtacttaaaatagtgtctggcacatcatcagagctcaataaatgttgctcttattgttgttgttatttataccttaacatgaagtttatcatctctcttcctaaaaacgggtcttggttgacacatcaaaacatttattaagaatatttattcagccttacaacatgccagggactttatatgtctgcaagtcagaatcttctgattttaaagatgaggaaacaaaggcttagaaaagtaaagcaaccagccgagggtcactcagataactggtggcatgaccaaggctatgtgtgtggatcttgcccaccactaaaattcatcctgattttataagattgttgctctttcccaataatgtgaacgtagttttggattttattctcgtgtaaaggaatacagaaatgaaagaaccagatgcttttctgggctccccaggcagaactaatccctcccgtctctgggcctccacgggcctttgtatgttcctccattatggctcttagcatattgatttccagctggagttgggattcacggtaaagtcagggaagggggtggctgccctgggtacctccgaaagctgttgttctaaattgtgctgtggttctgaattgtgctgtgggtatgggctacagtgcgtgggctgcagatttgctatatgggctacagtgcatggctgcagatttgctggtagtgctatgaccccttgtgtgagggatgagaccacacagaggcagtgcatcctagtggttcagagagggagtctggtggcagaatgccaggtttccaatccagggtctggcccttggtggccttatgaccttggatgactttctggacctctctgtgcctccatgttttcatctgtaaaacagaggtaaccgcagtatcttctgcataaggtagaaaggatgaaaggaattaatgcatgcaaagttcctgaacagtgcccagcatacatcagcactaaatagacattagctgtttgcatcatgttatggttgaaactggcatcagaatggggttaactttttggaggttgggaggggacagggactaaggaggtgaacaaggggacctccaatagtgtgacttggatgactttctgggtccctctgtgccttcattttctaaatccatacaaatagaacacagattggtggataccagggtctggagtgaggggtaaacatagtgactgcttaatgggcatgaggttcccttttgggaagatgaacatgtgtgagcctagatagaggtagtggttgtgcaataytgtgaacaca

SEQ ID NO: 53283 - DNA, 574 bp, Homo sapiens
taactcaggcccagtctcatatattccatttatactttataataaaatgctgccgtgtgagccaattttatgcttcagtgtatcaaataacatcaaggtcaccatgaacagcttaggtcttayagtcacttgttatctcctgcctagatattcagtctctaccggggtcagtggatgcttttcaaatcgaaaatggtagtcccagaagaaggactcattacaaaccctaggtgtcaagcaacttttgggtcttgctagagcttccatacggcatcactctttgctatagatgtttccaataccaatgagtctacagcatttaaaagcgctataacattttgcactacagactggacttgttagagccttactttgctctgagcctcattaaaaactgccatcattatgagtttctcaataaataggtcagaggagcatgtgaaatctgacgtatgttggcctgaaaaacacaaaaaggctcactaagtgtggtgcatatttctttgtggtggacgaggtaaggtacagcaacctgcttatgacttcagtggcataatgctcataagcatagggc

SEQ ID NO: 53284 - DNA, 723 bp, Homo sapiens
gagaaaaaaaatcccaaaagccaatgacctgcatatctttctgaaaagactaactatagaacatagttagatctatgaaattataatttttgaaaaaattacttagaaatttatgaaataacaagcatacaataaagatttaggggaaaaaaagccaaaagttgatctattaaaaagcctaatcgaattgaaaaaaacaaattcttccagatgtcaatcaagaagaaaaggaaagaaaactcaaaatgaccaacatcaggaatgaaaaaagagacttaagagacttagacgaacaatcaataggatacttcttaaaatataataaaagagagcaagaatggatgagcagggtgctaaggatggtcactcccataataagatcataatcccttgccaagttttcagatttgaggcagttttcagatctagaacccattaacaaagggagttggccagggccccaargaagtgaccctcgatgtgaaatgatccacgtcaggcacacactgtagaaactcctctagtcctgccccaaagggacctatatcatttactgtagctacagtgcactggaggaaaggaaatgtctgggtaggcattcaaggactattgcacacacagtctgaattgacactgatacctgtagagctgaactgccgtcatggctcccctcctcaaatgaaggttagtgggtgtcagataataagtggagtcctagaaaaa

SEQ ID NO: 53285 - DNA, 603 bp, Homo sapiens
cctggtaagggagcagccctacccttcctttctgaccctgggagccccatgccacttctgatagaacayctgcctccctgcagacaggtggcctgctgaacaagaatgtctccttctccatctggacccatgacagcttccagcccccgctagccccatgctcctgcctcactgcccatgccacttgacttgctctctgctcaggggttttgcacagttgttgctgtaccatagctacctgtgtgaatgcattctgtgccctgacagctccccaaagacagggaccatgttgtcatctttggattatcctaaagtcaactgagaggcagggctatgcatttgcctactccacaaagatctgcctatacccagctggaactactagtgtaagctactcaaacagaaatgggcagggagtctaactggaccctgtgttggaactgatctttaaaaagtaagcattttgtaagaacttccagttgcttttctaaattagacacaaaacaacccacctaattctaaacttggccaacatttcagccttccactttgaacagatgaaaatctgggaaatggtatgaactcatggtttcataagtttgc

SEQ ID NO: 53286 - DNA, 1457 bp, Homo sapiens
ttctcttgggcaatagcagaaaggtacatgtggattaatggaatttatgtattcactggcggtaaaaggcactgggaattcctgcactgggtgtaaaaacttgggccttggggacctcactaatgacttttcaagagcagttctttacagagcccaagtcttcaatcttgtaactggaccatcaaccccagtgacagcctactttgaaggaggcctcataaagacaaggttcaggctctttctaacggttttggctaatggaagacctggaggggaaaaatgaaattgttctcaaacttcttacaggtagaaaggagaaaatctctggaagttctgagaagtgacaggaatgtaaaattttgtgtttaaaatgtaagaagtagcaggggatgatgaagaatgcttaaaaatgcttgtttttattatagrcagtggaaaaaatgtgagtctcaatttgcttgccctggaattgctccagctagcagaataaatcaaggctagaaccagatcagaatttcttacgagatgacagggatctgaaggactttacctctatagtcgttttgcctttttaggcactgggtgacctggtcccatgtccatcctagtgggccctgtatgatccaatccaaaggcccctttaggtttgcgttttatcattccctctttctcagaatttgatgtttgtatgtaaaagcactctggaaaatatttaaatcatggtacaaatataagagaagtcatgcaggtatggaattgctttgagaagtatcattttattaatttgtctggcttgataccaattacctgatgcagttgttaagggcagatccatccagaaacctttgggttctctgctccctgattttgttttgcaaattatataaccatacttcatagaaaacaccagtggtggctatgttgttcacagacacaaagtgattctaaggcaaccacaggagagagacacaaaagaaatcacacaaaaatctctcatcacaacataaatattgtgacaattgtgtggtactttttgtcttttttgttctctctgttccttttttgtcagtacaagtaagtcatcatgaacaaataagcttttgtatcctgcttttttaacctgacatgttcacagaacataacctagtcacacacgggcaagtacatcttctatccagtgatttgtttcaccatcaccctgcacatcacttttctcatgtttcaaatgatttcctcagaagagacatctggaaatgggattactgagtcaaagattctcaacctcttttaaggcccttgatatgtagtggcaaattgccttcctgaagggctgtgccagttgacatggctggcaggggcaaggcttgagtcttcctctggacctgtacatgggtacagttaacattaaatttttttaatgagtataatttacatacaataaactggacaagccttca

SEQ ID NO: 53287 - DNA, 1447 bp, Homo sapiens
caattaaatactcaagatagctgggagaagggcaagaagagcccacagagatgagatggtactgagactccactggtggccctttctaagggactagaactacactacagatttatcaatgaaaggttgaaggcaagggaaaaggaaaagccagtgacatatgcaggcactgcaatgcgctagataattgatatacattatttctgggtattatttccattatcaggtgaggagagtcagactcagagagattaagtgactggatccaggccaaatagctagtaaacagtagagccagagccataattataactgttctttctgttacatgttacgcagcagtttagtccagaaaagcatttacccctaggccaagaaatagggaaggtaagtgtatgattatctatacactggtttagccacactgtttcccttccagcaatgggaaaaatggagagataattcatctttaacctgcggttatcacccaattattcccattggtagaagaaaagcagtgcttctcaaatgttagcatgcagacaggtcactaggtatcttgttaaaatgtagattctgattcagtaggtctacagtggcgtctgagatttctgcatctaccaggaaatgaagcttctagtgctggggccatactgtaaacagattatactcaatagttcccaatcttgaccgatcatttgaatcacctgggaataatctaaaaactacagatttccctccttgattcagtagtgtctggaatgaggtccaggttgacttcaatacagtcatcccttgatgtccatgggggactgttttgaggacccctctcagacaccaaaatccacagatgctcaagtccctgatgtataatagcacagtatttacatataacctatgtatatcctcccagagattttaaatcatctccagatcacttataatacctaatacagtgtaaatgctacgtagttayttagtatttttatttgtattatttttattgttgcattgttattttttttctgaattattttcaatccgtggttggttgaatgcacagatgtggaccccacagatacaatacgccaactgtacagaacagggactactgagctatactatctccaggcacattctacctcagaattctgtaattcaaagaaatatataattattaccgacaataatcacagcaagcactgactgagaacacaccaaatgtctaagagctttatatattagcttacttagtcctcaaaccacactgtgaggttggtactcacagcactatcattcccattttacacatgaggaagccaacgcaccaagagactaacttgtccaaggtcagtgagtgaactgcagaacaggggttcagacttgaaccaacccgatttcaaagagtctgtgccctcagacacaccatctaaagctgcttcccaca

SEQ ID NO: 53288 - DNA, 628 bp, Homo sapiens
tagctgctttcatactacaagagttgaatagttacaacaaaaatgtaagacttaaaaactttatctgacccttcacagaaaaagatgattaatatcttatatacatcttgaaaattattttataataatttgtgaatttgtatcaaaaagtaaaaagtacagttgaaaaaagtaaagcatactaagaaagaaactctgtataattattaactctagatgctattagaaaagtgtaagctgaagtactggtatttgttatctattgatgtataacaaattactccaaaagttagtggcttcagaaacacttattttctattgttccaaaattgctgttggytaaaaatacagaagtaactcaaggtgactctagctcaggttcaatacatggtcaaggctaaagtcaccttaaagcttgagcgatcttgaagatccttctttaagatagatcatgcacgtgactgttgccagaaggcctcaatttcttgctagctctatgcaggagttctttgtttctcaccacatggatcacttcataggatgcttgaatgtcctcacaacatggcagatagatctccaaagtgagaaaatggagagaaatggcaatgatgaagctgtaatgcctttt

SEQ ID NO: 53289 - DNA, 580 bp, Homo sapiens
caaatgaaggtttacagctcagcttttwaaaaaaataaaaataactagtaggttctggctgggcacggtggctcacgcctataatcccagcactttgggaggccaaggcaggtggatcacctgaggtcaggagtttgagaccagcctggccaacatggtaaaatcccatctctactaaaaatacaaaaaagtagccaggcgttgtggtgcatgcctgtagtcccagctactcaggaggctgaggcaggagaatcacttgcaccctggaggcggaggttgcagtgagtggagattgtgccactatactccagcctgggcaacagagcgagactccgtctcaaaaaaaagaaaaaaaaaaaggagttctaactacgttccaggtatgtagctgacgtgtaatatctcatttaacctggcaaagagttggtatccgtggcctcagagaggtttagaaagttgcccaagatcacacaggagcaaagatttaaactctggacttttcttcatgtgtcatgaagtttcctcctgattttcagagacccttccaggcctgcaagcgatttgacagccatccctcagt

SEQ ID NO: 53290 - DNA, 557 bp, Homo sapiens
attatctctaagggcagcaaggagagaacctcattatatgtgtatttttgtgggtggatttcaaagagggcgttagycttttccattatgtttaaatttttgtgatgttataattattatggatatacagtaattaaaatttaattaaaaatccaaactcttgcaatttctttttttatttgaacaatgaagtacaatatttttaaatgggaagattttagaatggaaacttgaaaaagggttctgtattcagtgccataaaaaagaaagcacatgagattgggagtcagggcgttcgactgtgtgacctcaggcaaatcacttccctcctctgggtctctgttcctcctctgtagaatgaggggtttgggcctagtcaatggttttctcattactttccagtgccccaggatttgccagaggtggctcaggtgccattgcaaagtgtatgtgcatgtgttggggcagggggcggtgaggcgtggagagacagagatagagaaataaagacaaatacaaagaaggttaaaaggagagagagagaaggaaggagaaaa

SEQ ID NO: 53291 - DNA, 1068 bp, Homo sapiens
aaaacaaacaaaaaaacaaaaacagtagactagtttttttccccctccctcctaacccagtccactcaaaaattacttattgaactgaatcagtgtatcaattctagaaacaaaattaatcctttccctcctcctctggctcaaagacggcttttggaaacactgtatcactccttttattacaaactcctctgccctcctccaggcgcctgggccactccaggattacaaatggagccttctgcctctaggtcactgattctactaccatctgtcagcgtggattgattgaggagactggccctgctcggcagatcagtgacttgtgcgaagtgagccagggtgtcggtgccttcagagcaggcggatgtccttcctcacttgccagctctcgtgagcagacacacagccctcacctttatccttcaccaagctccagctctccttcctcttgggaggcgcygcctgctaactcagtcacaccaagagggaggcctggaattcctgctcacaagctcggggcttcatctgcagtctgccaggaggcaacttacaaaagcctctggctaacagagcgggaaactccccacagcctcctgctgtgcctgtccccaagccacgcactgtccccttgcaaagcacaaggatactgagagtgcacaaacagcaggggtggagagcctctgtgggcacgccctcattctgtgccctcattccacaggagcccctgctttgtgcaagtctctgagcccgcatggagggagcatgggggctcagaacagttctttctggggcaaggtcaggggaggctctaaagttatggtggtggggagggccttaaaacagaggaccagagaataccaagacttaggggtgtgggggagagccacctgctgtgcccaggaggactgtgcccagtgcaggggaaaaagatgaagctgcggagttgggcaagggtgggatcctgcagggccttagagcattgacatgtttggcatggatttgtttcacagggtcccacagaaacttctgctctccaggtttgcccctccactctgccctccagga

SEQ ID NO: 53292 - DNA, 571 bp, Homo sapiens
atctgtattttatagtttccctggctcttggataattttctgtagttatggatatgagatataacgctagaatgttacagtgtcaaggtcagtaagtccagctccctcattttgcagataattgtatttagaccctgggagagaaagtgactagttggaggcagacctcacttaagccaatagtttccaaactgtgttccagggatccttagggttctgcagatggggaggaaaagcaggggacagacacgtctgaagccccggctgcactagtacagccccgctgttgtccatcttatacatgggggatcttgctaaaattatatgtaaagaaaatctttcagtaatttcttttaaagtttgagaatcactgtttgagcccagttccctcaagatgcagacaaggagtttgaggatcagattttggctgaattacggtgatgaaatagawcattcattcgctcattcattctaggtcctggggatctggcagtgagcaaagcagtggatgtccacactcatgaagctgatattctcttggtgaaattaaaccatagaaaattaagcatat

SEQ ID NO: 53293 - DNA, 1099 bp, Homo sapiens
gaatgcaaacagccagaagaacctcttgggctgcttgcggggtctgttggacacctactgcagacacaactacggggtttttgagagcttctccatgcacaggcgaggtgagcaaggcgggtgggggaggggagtagggtccctgagaacagggagtgtgtgtgtatgcacacgtaagcaccctgtgggagggtgtaggattgtgagccagaaggaattaggagggctcaggtaggtgagtgtagagtggggatttgtctgtgtgtctgctgtgggagggaacacaggagggagcttcagcttgtccttccagccttctgggcagagatgagatgagatgggggtgggaatggtggtgcagggggctggagaaggagaccttaatcgccctgaatcattagagatgcaggaaagggaaacttacctagtctgctgttggcatgaaagtttaggggagaagagatgagaaatgataatgtgagggataatgtgaggaggctagtcacaaactgtccttggtacactccctttatgatcccgaaatctctgaaataaaagtgtatgatatttgtttgcataagcatttcactgagaaaaaagtattsaactaatttctttcttttttattttaaacttttattttagttttagggatacatgtacaggtttgctctataggtaaactgcatgtcaggtgtttgatgtacagataatttcatcaccaaggtaataagcatagtatctcacaggtatttttcctgatcctttccctcctcctatccttcaccctcaagtaggtccccatatctactgttctcttctttgtatccatgtgtactcaatgtttagttcccacttataagtgagaacatgtggtatttggttttttgtccctatgttagtttgcataagataatggcctccagctccatccatgttcctgcaaaggacatgatcttgagaggtgacgctggctgggcttctgggttgggcagggacttggagaacttttctgtctagctaaaggattgtaaaagcaccaatcagcactctgtgaaaacacaccaatcagcactctgcatctagctaaaggtttgta

SEQ ID NO: 53294 - DNA, 561 bp, Homo sapiens
caggacccaccattgcaccctccacatccagcatggattttctcctctgtcttttcccctggctctcactgactgcctttcaggactaggaaatacattgtaaagactgctctaattgattcctggattaaaagggatggtctgagaatgctgtgataatctcaagaggagagtgagaccctgtcccaagtaaacgctttcctttttgtttttcatgttttgatcttatgagccttgactaggctcagttaaaaacagtggcagcctcttcaaaggggaayaccaagccctttgaatgggctaattctgctccaggttcccgccatctacccgcccttgacaagcgccagtagaagtcaacaggtggttgtccaaatataaatgaaaaggcttaactctaaaacatcgctgtctgaggggatttttagaagactttactctgtggttttggcagtgaccgtgtgtttctttgccagcacaaagagaaatttgacctgtgtctctcaggagttagagattttcatcactgctgtccccacactagacctatcaaccccttct

SEQ ID NO: 53295 - DNA, 604 bp, Homo sapiens
ctgtttctcgtcaggctgactagtcccagtctatagcatcagctacacgccatcctttcagtgtctacatggcacagtccttttttccatttttattcctagtgtgggtttctggccatgtttcctgagcatagcacaagtcttctggtttcaaatggaacacaaaggggcctgggcaccagcggttcccattcgtcagctgtcgtttctccccatgcttacggttatttcctcctgccactgcagtgctgggtggccttcctacaccagytgatggggcctgtgtctttgcaatatgctgggaagagctgctgagtctctggctttcagggcacaaaattcaccatttgccctttagaagcaagtgcttaaagccgagtgacatacaagagaaaaggaaggcaatggtagcctgtaattaccttataaacctcaagccacatgtttctctttgttgtatctgggaagcccttttcctgttcttttcctgtgttgttaaaatttctctttcaaaatgtgaccaaatagctgtttcttgtcaggctgactagtcccagtctatagcatcagccagacgccatcctttcagcttctacaaatggca

SEQ ID NO: 53296 - DNA, 607 bp, Homo sapiens
acacacttttttttttctatgtggataactagttgttcaataatcaatggcagagccaggcatggtggcatgtgcccatagctccagctacttaagaggccgaggtaagaggattcatcgagcccaggagttcggggctgcagtgagccatgatcacaccactgcactccaacctgagtgtcagagggaggccctgtctcaaaaataaaaaaataaaataaaaggaaaaaaagaaaaaaggaaaaaaaatcaatggcaattgattaatatcatttccctacttaaaaccatcctgtggctgtcccatcttcttgtcttggtctgttagggttgcacaacttgccccgaccaccctacccctgccagcccyctgccacctcacctctcattgctctcctgttctccagccacaagtaccttgaccttccttcacttctaaagggctgggctctctatccttcactgatttttttgttttgttttgttttggagatgtagtcttgctctgtcacccaggctggagtgcagtggtgcaatcttggctcactgcaacctctgcctcccgggttcaagcaattctctgcctcagcctcccgagtagctggga

SEQ ID NO: 53297 - DNA, 1665 bp, Homo sapiens
taaattgttatagacatgtagcacagtataaaactcaagagttggtgaatgcaagccaactttgccatagttactcactctttaaaaagagctttcctaggaagatttggatacaaatatgactaaatgttggcatgttgaatgtagtggtggacatggaagtacttgttatttttttcttggtactcttttacatgtttgaaatatgtcatcattttttttttgaaaaacctgaccaatgctgcaaacagaaccattaattcaatttctagaggtttccactctkgctttctctcgtcgtcttctcttttatcatctcaggccaagtgtcaaggctgtcatctttatcctgatctattctgaaattgcttttctggaagtactaagctctacatcctgaatggatacatggaggccgtgaagtaagcaggcagaatcgcctatttgtgggggcaaatggaaggaaagtggactgagttcagagaggactttctcaagagggtttattaaataatattcaccaaaggcaactgtggtcaggctcagcttggcacagggacaggggatgaggcggtaacacccaggctttgtcttccagacactctcagtcaaggtaagtgtcacctgccagcttccactccaaaaaccagcctccatctggctgcccatggtattttcagtgccttcttcctttcagtgaccatggctcaacatccaccagcaggtgcagtgatgaaaattctttgcttcccccattgttagccatgctcctgaaccttctcctaggcctatgtgggcatttctttacgaaatccaggtttagcaagagccctgctcaatgagtgtatcccccaccttcaatatccgttcaccctctgtatctgctcaggttcctcatcatccagggtaaggctccagtgccatccatgctgtccacactccagttccatccatcccgtccacaccccagttccatccatcccatccacaccccagtgcaatccatcctgtccacactccagttccatccattcgtccacattccagttccatccatcccatctgcactccagttccatccattccgtccacactccagtgcaatccatcccttccacaatccagttctgtccattccgtccacaccccagtgcaatccatcccgcccacactccagttccatcccttcgtccacattccagttccatccttctcgtccacactccagttccatccatctcgtccacactccagttccatccatcccatccacaccccagtgcaatccatcccgtccacaccccagttccatccatcccatacacaccccagtgccatccatcccgtccatactacagtaccaggcatcctgtccacccttcagtgccatccattccatccccgtgcctcccctggccacagatgagggcttttcccagcactttttccctccatggtcacaagctgctgcttttttcctgaaagaaaaacaatcctaaattttgggttaatcatctcctttttttttttttacacaaaattgtttgacacctgtaactcctatccctaaataatatattatttacatttggcttgttttgaacttcatataaatgaaatcatactgagtgtatttttctatgacttgtttttcccccaaataac

SEQ ID NO: 53298 - DNA, 1665 bp, Homo sapiens
taaattgttatagacatgtagcacagtataaaactcaagagttggtgaatgcaagccaactttgccatagttactcactctttaaaaagagctttcctaggaagatttggatacaaatatgactaaatgttggcatgttgaatgtagtggtggacatggaagtacttgttatttttttcttggtactcttttacatgtttgaaatatgtcatcattttttttttgaaaaacctgaccaatgctgcaaacagaaccattaattcaatttctagaggtttccactcttgctttctctygtcgtcttctcttttatcatctcaggccaagtgtcaaggctgtcatctttatcctgatctattctgaaattgcttttctggaagtactaagctctacatcctgaatggatacatggaggccgtgaagtaagcaggcagaatcgcctatttgtgggggcaaatggaaggaaagtggactgagttcagagaggactttctcaagagggtttattaaataatattcaccaaaggcaactgtggtcaggctcagcttggcacagggacaggggatgaggcggtaacacccaggctttgtcttccagacactctcagtcaaggtaagtgtcacctgccagcttccactccaaaaaccagcctccatctggctgcccatggtattttcagtgccttcttcctttcagtgaccatggctcaacatccaccagcaggtgcagtgatgaaaattctttgcttcccccattgttagccatgctcctgaaccttctcctaggcctatgtgggcatttctttacgaaatccaggtttagcaagagccctgctcaatgagtgtatcccccaccttcaatatccgttcaccctctgtatctgctcaggttcctcatcatccagggtaaggctccagtgccatccatgctgtccacactccagttccatccatcccgtccacaccccagttccatccatcccatccacaccccagtgcaatccatcctgtccacactccagttccatccattcgtccacattccagttccatccatcccatctgcactccagttccatccattccgtccacactccagtgcaatccatcccttccacaatccagttctgtccattccgtccacaccccagtgcaatccatcccgcccacactccagttccatcccttcgtccacattccagttccatccttctcgtccacactccagttccatccatctcgtccacactccagttccatccatcccatccacaccccagtgcaatccatcccgtccacaccccagttccatccatcccatacacaccccagtgccatccatcccgtccatactacagtaccaggcatcctgtccacccttcagtgccatccattccatccccgtgcctcccctggccacagatgagggcttttcccagcactttttccctccatggtcacaagctgctgcttttttcctgaaagaaaaacaatcctaaattttgggttaatcatctcctttttttttttttacacaaaattgtttgacacctgtaactcctatccctaaataatatattatttacatttggcttgttttgaacttcatataaatgaaatcatactgagtgtatttttctatgacttgtttttcccccaaataac

SEQ ID NO: 53299 - DNA, 565 bp, Homo sapiens
aatctctttggatgaaaatgagagacagcttccattttaaataaacaaacacaaaaagctccaaagagttgatgttaaccaccagtgctcatgaaaattatttgtgttttataaaatacataaagtcaggctttactccaggaacgtccgacccatagcctggggcaagccaggggcagcgagccaccttttaaggagaccccagaggagccrctgctgggcccttggctgagaacagtgaagtaagcaacatccagcccactactgcagtgtccccagccggccctcgcctctgcttctgagaagcacctggggctggattgtgagatcactaccatctttttaatccagttaattaattttttattttgataatacatgtacaacccacaggcagataaaagtatgtaaaacacataagtagggtttaaagattactattattaaagaataataaaataaaaattaataatatttataataaaaataacaaaccacatctgggttgcagccattcacctgtcaatgtcggctggtatgtacgttgaatctctgagtatttcca

SEQ ID NO: 53300 - DNA, 2424 bp, Homo sapiens
gcaacaggaacgaaactctgtctcaaataaataaataaataaaattatgtgaatgtggcctcttctctctctctctctctccaagtagcttatagtaccgtactgctggtaactgaaaccagggaaggtgagaccgtggataagaggggacggctgcgtatcaatataacctataaccgaatgtgactagtgataacaaggaacaaactgtcactgcatgcaacagcgtggatcaatcctaaaagcatcatgttgagtcaaagatatgagacactacccccaagtacacacacagtatgtttccatttatttacagtttttttaaatctacactaatctgtagtgatagaaagcagatgagtggctgctgagtatgcagtgcagacagggatagattacacaaggcacagggaaacttttggaggtgatggaaattttcactatattgatcatggtaatttgctaaaactcatcaaattgtacaattttactttttgcagcttgttgaatgtcaatcatgccttaataacactgaaaaaaactccacctgtcctgggcccattttttcagagcctgctcctggtttcctaagggccaaatcatcaagcagtaaaatcatgagaggcttttgagaacctaaggaagaggaactactaaaagctaagaggggccatcaagactaggtgcattctcctctcctaaagcttcttggcttgggaaagaaaaggggtgtgtagacataggctgaagggaggttagtaggcatttggggcacttgtgtggtgccctggtgaacaagacttggaggtgccaaggtgcataggccacgtgaagatacaggaggatggcgctgggggttgaatgacccaggtggtacagatgaggggcctgacatcacccagagggtgctatctgctggcagccacccttccgctttggcctacttctgcttggcattttcaactgtgacttagatgacaacataaattacaagcttgttaaatatatattcagcaaatatctattgagtcctacaatgtgacaggcaccatgtcggtcccacaagggatagatgatgggaggagatgacttggccacctggagcttaaacaataaagaaaggctgtgagacttatatactcacaaatatcccgttcaaagtcttgatttgacacacagagctgtgcttagagaaggagtgtggggttccaaggattgcaaggaggaggagtgtgtacagggacaggcgagcacacggccagggagcccagagggctgggtgagtctggccttgcacgatttgggcgtttggtctgagagaagggcagcgatggaggatttagagcagcgagggttgtggtcggatttgtggttttactagattgctctgggagctggagggggacttggaggcagaaggggatggcagcccaggggagggaaggcagggcctcaggggcacaagggagtggcctgcatacacggcccccaaatgcactcctcaaccctggcctcccttgtcacgtgctgtgaccctaagctgtctcacacctcttgtcccctatccctgcttctccagctcaggctcttcttgtcttggtgtgtcactgtgagcatcgtgtttctgagctcagctctgagtgtctgccctaatcctcgcccctcataaaagcataccgattttggtgtggacagatctggctgcaaaccttggctccattacttatagctatgaccttgggcaactaactaagctttctaagcctcagttttctcatctttacaatggggatatctccctcagtacgatgactgtgaggattaaactgaataaatatgtaaagtgctaggtaaactttaggctttccctcaggttttgccccacaaaatcagaatgattctttggcctttaatttggggacagagaggcaaatgacaataacattaggaaatgttggaaatgttaaaaatcaaacaatctctaggggccagaacgtctctaggcagaaggagggtccggtaaaatctcccctcccccattcagttaggaggcaygtcagaaagtgttgagagtgtagggggcctcagtggcccctgcactaggaaggcagcagcaggcgttcctgctcctacaggagacaggctggcccatctcgggaggcacttagtgcttcttaactaaaggcgattctgccctccagggagcattggcaacgtctggagacatccgactgtcacaacaggggagtactactggcatctggtgggtggaagccagggatgccactgaacatcctataatgcaaggagagggaggacagggtccccctacaacaaagaattctccagcctccaatgtcaatagtactgaggttgagaaactccgggctagtaagaaagccgggtccaaattccaactctctc

SEQ ID NO: 53301 - DNA, 2424 bp, Homo sapiens
gcaacaggaacgaaactctgtctcaaataaataaataaataaaattatgtgaatgtggcctcttctctctctctctctctccaagtagcttatagtaccgtactgctggtaactgaaaccagggaaggtgagaccgtggataagaggggacggctgcgtatcaatataacctataaccgaatgtgactagtgataacaaggaacaaactgtcactgcatgcaacagcgtggatcaatcctaaaagcatcatgttgagtcaaagatatgagacactacccccaagtacacacacagtatgtttccatttatttacagtttttttaaatctacactaatctgtagtgatagaaagcagatgagtggctgctgagtatgcagtgcagacagggatagattacacaaggcacagggaaacttttggaggtgatggaaattttcactatattgatcatggtaatttgctaaaactcatcaaattgtacaattttactttttgcagcttgttgaatgtcaatcatgccttaataacactgaaaaaaactccacctgtcctgggcccattttttcagagcctgctcctggtttcctaagggccaaatcatcaagcagtaaaatcatgagaggcttttgagaacctaaggaagaggaactactaaaagctaagaggggccatcaagactaggtgcattctcctctcctaaagcttcttggcttgggaaagaaaaggggtgtgtagacataggctgaagggaggttagtaggcatttggggcacttgtgtggtgccctggtgaacaagacttggaggtgccaaggtgcataggccacgtgaagatacaggaggatggcgctgggggttgaatgacccaggtggtacagatgaggggcctgacatcacccagagggtgctatctgctggcagccacccttccgctttggcctacttctgcttggcattttcaactgtgacttagatgacaacataaattacaagcttgttaaatatatattcagcaaatatctattgagtcctacaatgtgacaggcaccatgtcggtcccacaagggatagatgatgggaggagatgacttggccacctggagcttaaacaataaagaaaggctgtgagacttatatactcacaaatatcccgttcaaagtcttgatttgacacacagagctgtgcttagagaaggagtgtggggttccaaggattgcaaggaggaggagtgtgtacagggacaggcgagcacacggccagggagcccagagggctgggtgagtctggccttgcacgatttgggcgtttggtctgagagaagggcagcgatggaggatttagagcagcgagggttgtggtcggatttgtggttttactagattgctctgggagctggagggggacttggaggcagaaggggatggcagcccaggggagggaaggcagggcctcaggggcacaagggagtggcctgcatacacggcccccaaatgcactcctcaaccctggcctcccttgtcacgtgctgtgaccctaagctgtctcacacctcttgtcccctatccctgcttctccagctcaggctcttcttgtcttggtgtgtcactgtgagcatcgtgtttctgagctcagctctgagtgtctgccctaatcctcgcccctcataaaagcataccgattttggtgtggacagatctggctgcaaaccttggctccattacttatagctatgaccttgggcaactaactaagctttctaagcctcagttttctcatctttacaatggggatatctccctcagtacgatgactgtgaggattaaactgaataaatatgtaaagtgctaggtaaactttaggctttccctcaggttttgccccacaaaatcagaatgattctttggcctttaatttggggacagagaggcaaatgacaataacattaggaaatgttggaaatgttaaaaatcaaacaatctctaggggccagaacgtctctaggcagaaggagggtccggtaaaatctcccctcccccattcagttaggaggcacgtcagaaagtgttgagagtgtagggggcctcagtggcccctgcactaggaaggcagcagcaggcgttccygctcctacaggagacaggctggcccatctcgggaggcacttagtgcttcttaactaaaggcgattctgccctccagggagcattggcaacgtctggagacatccgactgtcacaacaggggagtactactggcatctggtgggtggaagccagggatgccactgaacatcctataatgcaaggagagggaggacagggtccccctacaacaaagaattctccagcctccaatgtcaatagtactgaggttgagaaactccgggctagtaagaaagccgggtccaaattccaactctctc

SEQ ID NO: 53302 - DNA, 683 bp, Homo sapiens
atttataaggaaaagaggtttaattgactcacagttgtgcatggctggggaggcctcaggaaatttacagtcatggtggaagggaaggggaagcaaggcacgtcttacatggaggcaggtgtgtgtgtgtgtgtgagagagagagagatagagaactttaaaaaccatcagatctcatgagaactcattcactatcaggagaacagcatgggggaatctgcccccatgatcaaatcacctcccaccaggtccctccgttgacacatgaggattacaattcaagatgagatttgagtggggacacagagcaaaaccatatcaagatccaaactcaccatctcaatragggaaaggctgggggcccctaaacttctgtcctcagaaggggacccctaaactcacttcacccttgggcttgaagtaaattctggaatgggactaagatgaatcaattaacgttcttcccctgggctttcttgaggggggatgccaaaactctgaaaaatcaagataaatattattgtaatggaatagtttacatgtcaaaaccaaagcaagaaaatccacaaataacaaaatgttaaatctttaaggacaggatctgtcgttgagattgatgcctctaatttcctgattgctaaaccaatcctattcttaaaagtactatgatgagaaccatggct

SEQ ID NO: 53303 - DNA, 832 bp, Homo sapiens
gtgtgggttatgtgcctggcacatactatacattgaaaaatatttgaatacttcttgtctaattctgaccatttcatcatcctttgccctaatggtgatgtgacaatgaaagaaagtcagagattggtcgggaagtcaaaagggtcctgtatttctccagaatgtcacgatgagtaatgaacaaaagcccacccagagctgtaaggcctgttctcagcagcaacactcagtttggagggactggaggtcagggctattgtttggctgagsctttattccagaagactgagtaggtgtcaggaaatgaggctgggctcttgaagatgggtgctttgaatcatgttttgttacttgaacaaaaataatagtaaggagcccattcataaaaacaacatcattttcttcaacaacatgtactctgtatcacttcccttgtgaacggaataattctacgtctgtgacagaatcccggaagacagaaccatagcaacactggcacattcatttcttcttataactgacaatactggacacacttatgtgggctggggccaagctgtgcactgagcactctatgaacaccacttcatgtcatcctcacaataatcgggtgcaggagacattattaatattcacatcttacagctgtagcaacagatgcatggtgagccgaccaacctgctcaaaggctcacgggagcaaggggcagagcctgcactctaactagggaccatgtggtgccagtcctgaatccacaacccccttgcactaccacctcttaaagggcttcccttcaggaaacttggctgtttttcacagacagcagcatcag

SEQ ID NO: 53304 - DNA, 557 bp, Homo sapiens
acctaaccaccttttaaagacggtgcctcttaatactgttaaaatggcaattaaatttcaacctgcgtcttggtggggacatgcaaatcatagcaactggattgctttctcttcttttgccaaaatcagttggttgtcaaaaatcagttggacatattcgtgtgtgtctatttctggggtctctattctgtttcatggatccatgtgtctggcccctgccacgccccacactgtcttgwttactgcagctatacagtaagccctgaaatctggtagaatgattcctcctacttcatttgtgtttgcaaattttgcctttgcctttccatataaattttagaattagcttgtctagggtccgcaaacagtccttcaagggaaattgacaaaaatagcattaaaactataggtcaatttggagagaattgacatgtttcctattttgtctttcaatccacaccataatttgcgcttttattgatttatgccttctttgattgcttttattagcataattttcagcacacagatcctgcatattttttaaagtttatacc

SEQ ID NO: 53305 - DNA, 569 bp, Homo sapiens
atgaaaaaaaaaaaaactataaaagaccaagcgcgaggcctggtgcagtggctcatgcctgtaatcccagcactttgggaggctgaggcgggcggatcacctgaggtcgggagttcgagaccagcctgaccaacatggagaaacactgtctctactaaaaatacaaaattagccaggcgtggtggtgcatgcccataatcccagatactcgggaggctgaggcaggagaatcacttgaacccgagasgcagaggttgcagtgaacgagatcacgccattgcactccagcctgggcgacaagaacgaaactccgtctccaaaaaaaaaaaaaaaaaaaagaccaagcattctatagatgtagctattaacttcttataaccaaaggagtccatattataacccttcaaaaaattgagatgggtgggggccaggcgcggtggctcatgcctgtaatcccagaactttgggaggccaagtcgggtggatcacgaggtcaggagattgagaccatcctggctaacatggtgaaatcccgtctctactaaaaatacaaaacaattagccgggcg

SEQ ID NO: 53306 - DNA, 569 bp, Homo sapiens
atgaaaaaaaaaaaaactataaaagaccaagcgcgaggcctggtgcagtggctcatgcctgtaatcccagcactttgggaggctgaggcgggcggatcacctgaggtcgggagttcgagaccagcctgaccaacatggagaaacactgtctctactaaaaatacaaaattagccaggcgtggtggtgcatgcccataatcccagatactcgggaggctgaggcaggagaatcacttgaacccgagaggcagaggttgcagtgaacgagatcacgccattgcactccagcctgggcgacaagaacgaaactccrtctccaaaaaaaaaaaaaaaaaaaagaccaagcattctatagatgtagctattaacttcttataaccaaaggagtccatattataacccttcaaaaaattgagatgggtgggggccaggcgcggtggctcatgcctgtaatcccagaactttgggaggccaagtcgggtggatcacgaggtcaggagattgagaccatcctggctaacatggtgaaatcccgtctctactaaaaatacaaaacaattagccgggcg

SEQ ID NO: 53307 - DNA, 569 bp, Homo sapiens
atgaaaaaaaaaaaaactataaaagaccaagcgcgaggcctggtgcagtggctcatgcctgtaatcccagcactttgggaggctgaggcgggcggatcacctgaggtcgggagttcgagaccagcctgaccaacatggagaaacactgtctctactaaaaatacaaaattagccaggcgtggtggtgcatgcccataatcccagatactcgggaggctgaggcaggagaatcacttgaacccgagaggcagaggttgcagtgaacgagatcacgccattgcactccagcctgggcgacaagaacgaaactccgtctccaaaaaaaaaaaaaaaaaaaagaccaagcattctatagatgtagctattaactycttataaccaaaggagtccatattataacccttcaaaaaattgagatgggtgggggccaggcgcggtggctcatgcctgtaatcccagaactttgggaggccaagtcgggtggatcacgaggtcaggagattgagaccatcctggctaacatggtgaaatcccgtctctactaaaaatacaaaacaattagccgggcg

SEQ ID NO: 53308 - DNA, 569 bp, Homo sapiens
atgaaaaaaaaaaaaactataaaagaccaagcgcgaggcctggtgcagtggctcatgcctgtaatcccagcactttgggaggctgaggcgggcggatcacctgaggtcgggagttcgagaccagcctgaccaacatggagaaacactgtctctactaaaaatacaaaattagccaggcgtggtggtgcatgcccataatcccagatactcgggaggctgaggcaggagaatcacttgaacccgagaggcagaggttgcagtgaacgagatcacgccattgcactccagcctgggcgacaagaacgaaactccgtctccaaaaaaaaaaaaaaaaaaaagaccaagcattctatagatgtagctattaacttcttataaccaaaggagtccatattataacccttcaaaaaattgagatgggtgggggccaggcgcggtggctcatgcctgtaatcccagaactttgggaggccaagtcgggtggatcacgaggtcaggagattgagaccatcctggctaacatggtgaaatcccgtctctactaaaaatacaaaacaattagcmgggcg

SEQ ID NO: 53309 - DNA, 544 bp, Homo sapiens
aaagagtttaaagagatgcccctcccccaaaaaagaaccaaagtgaactgaaatatctcaggaagaaatggaagagaataataaaaccatttcagagttaaaggaaaatttctccaaaagtacaatgaacttggctgaaagcacaattataaacaaggattagagaaatgagaaaagccacaaaaatgcagggaagaaaaaagtagaataaatattatttgaggaaatagttctgcaagatatgcaaataaaatcaacagacacattctttatgtttccagaaaaaaatactrtgtgaaaaaagatatttaggtggatgacaaaattgccttttctaaatagtaaaggcagttcagctctcacaaaatttgatacagaaacagcaatactgtatgatacgctctgagatttagaacttaaatgttgataataatacttttgaaaagcacatagccagaaagcctgatttctttagacctcatatgatgctaggaggcaacatgggacaatctaagaatctcatatccaacttagtttctctcag

SEQ ID NO: 53310 - DNA, 578 bp, Homo sapiens
ctaattatttaaagtattctttacatacctgagagtattattataacttaataatttgtcatttgaagttgttcataccatcatcaaatagttaaatattatcaagcactccacaacagacaacactgtacaaattgtgataatctccagcccttcactataatttcaatatgtaatatcactggataagtataagattaactccaccctataagtacctggttagttacagctttatgactgtgcatatttgcatggttaaatcactatgtcatatcacttatgtaattcatgaaatgaatatttttagacaacgarttatatacaacaggggtccccaccctcctggccatggacccatactgagggggcattaacacctaagttccgcctcctctcagattagtggcagcattagattctcataggcatgcaaaccctattgtgaactacacatgcaagagattgaggttgcatgctccttatgagaatctaatgcctgatgatctgaggtggaacagtttcatcctaaaacaatccccacctgactgccctacccccaataaatagaaatattg

SEQ ID NO: 53311 - DNA, 544 bp, Homo sapiens
cctcattttccttcatctttcttgatgaatccattatttgcaaatgctgtcaaaacatgctttccttctccctggctacctctcaggagttcatttgtctctctgtctcagcttcctccctcatcttcctttacccctcttctctgtcttagtgggtggatgggcatggatagaaatcctctgtttctttaggttaggataaacacctgggccctggtgaggcagttgctgttcagcaccagggacagcaactgcagggctgtgaggccggagcccaccttgtgtcctgttcgatgagctttggttactgatgagcaattgccagaycatgtcacccacccagccttttacacctgggagcctcatgcatctgggtttgggagtttggccctgctgatgatagtttgttttctcttcattccctgaattagtcatcagttctccgtggccatttggggattcatgcctgcaactgcttcagtcgaattcttttttaaagatccagtttatgttttataataattttgatcttatggctttcaac

SEQ ID NO: 53312 - DNA, 544 bp, Homo sapiens
cctcattttccttcatctttcttgatgaatccattatttgcaaatgctgtcaaaacatgctttccttctccctggctacctctcaggagttcatttgtctctctgtctcagcttcctccctcatcttcctttacccctcttctctgtcttagtgggtggatgggcatggatagaaatcctctgtttctttaggttaggataaacacctgggccctggtgaggcagttgctgttcagcaccagggacagcaactgcagggctgtgaggccggagcccaccttgtgtcctgttcgatgagctttggttactgatgagcaattgccagatcatgtcacccacccagccttttacacctgggagcctcatgcatctgggtttgggagtttggccctgctgatgatagtttgttttctcttcattccctgaattagtcatcagttctccgtggccatttggggattcatgcctgcaactgcttcagtygaattcttttttaaagatccagtttatgttttataataattttgatcttatggctttcaac

SEQ ID NO: 53313 - DNA, 660 bp, Homo sapiens
tgccacagtcagagtagtgcctggaatatgcagtaagggctgaacaaacactaaataaatgaacaagtgaataaatggatattgtctcatttttagaacagagtactgaatggatcatgaacactatctggtatgtcacgtaggtaatttacaagggctacaatttcagctcagatttaccttttcctggatacaggtcttgataggtctcttgatgtcatttcacttcagattcttctttagaaaacttggacaayagcatttgctgtcttgtccaaattgttactaagaatcaagagagatatctgacatgaaatgacattggaaaacattaaacacgattgaaataatgctagccaatatggttattattagaaaccaattacattttcaacttaaaaacagtaatacttattgcagactcaaatgtgcttattctaaaacaagtaaatgtttgcctatggtctgagattctaatccacggagttcattctaatccacattcaacactatcatgtaccagtgggcctcataacccacctagccctgtgatttttcaggttcacttttctaaacttgtgaattaaatatttattttcttagttcagaagaggaaaaaaactcttgtaattgttgcccatttcaggagaaatcttgcat

SEQ ID NO: 53314 - DNA, 660 bp, Homo sapiens
tgccacagtcagagtagtgcctggaatatgcagtaagggctgaacaaacactaaataaatgaacaagtgaataaatggatattgtctcatttttagaacagagtactgaatggatcatgaacactatctggtatgtcacgtaggtaatttacaagggctacaatttcagctcagatttaccttttcctggatacaggtcttgataggtctcttgatgtcatttcacttcagattcttctttagaaaacttggacaacagcatttgctgtcttgtccaaattgttactaagaatcaagagagatatctgacatgaaatgacattggaaaacattaaacacgattgaaataatgctagccaatatggttattattagaaaccaattacattttcaacttaaaaayagtaatacttattgcagactcaaatgtgcttattctaaaacaagtaaatgtttgcctatggtctgagattctaatccacggagttcattctaatccacattcaacactatcatgtaccagtgggcctcataacccacctagccctgtgatttttcaggttcacttttctaaacttgtgaattaaatatttattttcttagttcagaagaggaaaaaaactcttgtaattgttgcccatttcaggagaaatcttgcat

SEQ ID NO: 53315 - DNA, 1523 bp, Homo sapiens
cagacttctcttaggtatctagagaggataagagcagatactccccttgtctgttttatttttatttacttttcacaccttgccctgttgatggatattcttatttggagtatcctttttgtaccaatatggaaaccagtgtttgggttgtaatatttacttttaagtaaagattccaattgtgaattaccaatggtgagaactgccttagagtatccttttaattttcgtatgtatttatggtaggaaaaaaaggatttctgggaaataaaaaaagtctctagttacatagagaagcatcgtatgtgcccagttctattgggtatgtatgaagggatcagtagaccttcatgaaagtttcatctttaactagtagcctttactgttgttttcttttcccctcgacaacaaattgtgcaacatctaaagtcactgatcagtcttaacatcactgaagtggagacagccaggcagtgtgtgcttcccggtgtaatgtgatgtggaatagagccgtcctgttttctgtggaaatatgtttcaagtccctcagtggatgcctgaaacctcggatggtttcacaccctttctatactatgtttttttcctatacatatatccctgtgataaagtttaatttataaattaatcatggtaagagaataacaataataataaaatacaacaattatagcaacatgccagcatcacttctcttgcactttggggccttagttatgtaagataagggctgtttgaacacaaacaatacagggacatttaaatgtatcttactttattagtagtttagtagctgaatgtatctgcttgtctgtctcgggtaggtgggtagactatacagcgtggaaacacaggaccaagggatgatgatctgagtctcaggtgggacagacagggatggagagatttcatcatgcaacacagaatagcatgtaattcaaaactatgaatggtttatttctggaattttcaatttaatattttcggacagcagtttcctcaataacaaaccactgaaagtgaatccaccgataagaggggactactgtgcatcataaccccgtgaagtgttcttgccaaaaaaatgaacttgtgtctgataaacctctagatctaattacaagtttacaagaagcatgaaacgtataaccaccactgtgagccacacctgggagacgggaacagcttcaggacatatgttctctattcttccacaaacaaatggcctgttttttaaaaaaaggagatacttttatagatcaaaagatatttaaagatatatattagtgaaatgcaacatgcagttcttagatcctgattcagagaaacctgaaaaaagcaattgatgcaaacagggaaaatagaayatgaactaggtattagatgatgttaaggaattattgttacttttattgggtgtaataattttaatgtagccgtatttggtaaaagtcatcttttggatatcaggaggtattggtaggttaaaaatgtgatttttgagg

SEQ ID NO: 53316 - DNA, 586 bp, Homo sapiens
tacagtgacataagactgggtgccattaaaatgagtaagaacagaaactacaaatctcacctagatattcctaagcaattaagaattagtctttatcaaatccaacaagatttactaagaatccaattgcccagtggccacagaaaatgctacccaaattgtttgcaagggtttgcagatttaatctaatacaatcatgaggatcatgtttctaacaaaacagaatatactcatttttatgccatgtcatttgagatgatttctcacagcaactgctaatggttcaattagtagagcaatctatatcctctgcattgctaagtccaaggttctattattagtttgtacatactttagcttcctttgcaataatttgctaaaatattttagaaattayttttaaaattatttccaaggaaatgtttctttttagtataacataccatatatataaagtccactggatctgttcatatttttgttatgaatatatcttctcctattattacacaaacattataaaactaataaaattctacataagagttcatcataatctcactactcaacgaagttttcacttact

SEQ ID NO: 53317 - DNA, 1590 bp, Homo sapiens
tctctgctggttgtgcagagttacagggaccagacttggttaagggggtaggtgagctcaaggaccagagcctaagagtgtagtggggacttatgacagagagggctcagggaagagcagggagaaggggcccaaactttgtgttgggtgcatgtagccagtaaaatagaaaaaacaaacaaacaagaaaacccctgctggagaattccagggcaatggtttgtttgctactctctcccctgccaaaccagaagcttcatgaggacaggaacgggctctgtcttgctagagttgtatccccaagactctgcacccagcaagaaagagctccaggtgccttcatgagccttctctggtgtatttcaccgccatcttgtggcctttcaagctctggctgctaaaggcagccaaggcctccttcyctgtcacacactccagactcaggcagcctcccacaatgccattaagtcaaggtccagggggttccacactcctgcctaacgcatctggatgtggaaatacaaaggaaaatattgaggccttatcacacacggacacttcccctgcaacagttgttaatcacattaataataagaactaacatttcccgtacccctaataagtactgagcactctactaagtgctttacatgcatcatattatttgatctgcacaaaatccattttacaggtaaggaattgaggtacaggaagctgagcaacttgcccaatatcgtttagccagtaaataccaaatgggggctaattgatctgggagcctattctctcccatggaaagcaggtcagtgagggccgcagctgggacaggcagacagggccctgaggggtctctgagtgggcagctttgatgcagctgtgcttcacccaggaagaaggcaggggaaacgggcatggcaagtcatgacttcacgacctttctgcacaaactgcttcctcccagttttgctctagacttgctctggaggttgcactgcttggaggggccccaggaccgtgggagtcaaatggagggacttgcaagtccatctgctttcagtggagtctttttcagtgttagagaaactcagggctaacatttaaaatgctaaatgcccaaggacaatttgcaaggcttaaaaaactacttttggccttcagtagctgagttttaaagatggaaattaaaatacatgctgtccacagaggaattcggagcacccaggccagagatgacaaaaatccaccatttgcaaaaccccacttctatgttattctaacctgcattttttccttcttttccctacagttgtcagcaaggggacttgtgtaaaagaggtagaagggaacaagtttgaaaatctgtggactaaagttatcctattctatctctactccctgtggcgatgggaatatcacaattgaaaggttcagtccagggggaaagtagctacgattgtggcaattaatatgactttccagctaagactgtttccaaaatttcccatggaaaagaaattttcatacatggaagagaaaatggctccggtactactaaagcccatccacagaatgccttgtcttttctttaag

SEQ ID NO: 53318 - DNA, 1590 bp, Homo sapiens
tctctgctggttgtgcagagttacagggaccagacttggttaagggggtaggtgagctcaaggaccagagcctaagagtgtagtggggacttatgacagagagggctcagggaagagcagggagaaggggcccaaactttgtgttgggtgcatgtagccagtaaaatagaaaaaacaaacaaacaagaaaacccctgctggagaattccagggcaatggtttgtttgctactctctcccctgccaaaccagaagcttcatgaggacaggaacgggctctgtcttgctagagttgtatccccaagactctgcacccagcaagaaagagctccaggtgccttcatgagccttctctggtgtatttcaccgccatcttgtggcctttcaagctctggctgctaaaggcagccaaggcctccttccctgtcacacactccagactcaggcagcctcccacaatgccattaagtcaaggtccagggggttccacactcctgcctaacgcatctggatgtggaamtacaaaggaaaatattgaggccttatcacacacggacacttcccctgcaacagttgttaatcacattaataataagaactaacatttcccgtacccctaataagtactgagcactctactaagtgctttacatgcatcatattatttgatctgcacaaaatccattttacaggtaaggaattgaggtacaggaagctgagcaacttgcccaatatcgtttagccagtaaataccaaatgggggctaattgatctgggagcctattctctcccatggaaagcaggtcagtgagggccgcagctgggacaggcagacagggccctgaggggtctctgagtgggcagctttgatgcagctgtgcttcacccaggaagaaggcaggggaaacgggcatggcaagtcatgacttcacgacctttctgcacaaactgcttcctcccagttttgctctagacttgctctggaggttgcactgcttggaggggccccaggaccgtgggagtcaaatggagggacttgcaagtccatctgctttcagtggagtctttttcagtgttagagaaactcagggctaacatttaaaatgctaaatgcccaaggacaatttgcaaggcttaaaaaactacttttggccttcagtagctgagttttaaagatggaaattaaaatacatgctgtccacagaggaattcggagcacccaggccagagatgacaaaaatccaccatttgcaaaaccccacttctatgttattctaacctgcattttttccttcttttccctacagttgtcagcaaggggacttgtgtaaaagaggtagaagggaacaagtttgaaaatctgtggactaaagttatcctattctatctctactccctgtggcgatgggaatatcacaattgaaaggttcagtccagggggaaagtagctacgattgtggcaattaatatgactttccagctaagactgtttccaaaatttcccatggaaaagaaattttcatacatggaagagaaaatggctccggtactactaaagcccatccacagaatgccttgtcttttctttaag

SEQ ID NO: 53319 - DNA, 969 bp, Homo sapiens
aattagactgcggtccacaagagctggccaggttccccaggctgatgatgcctctaagacagagcatgcggctatctctgatgcatgttccctagtccccctgccacccacaaaatcctacatttcttacaagaagaattatgctaggaaggcagactgagatgtctgggaaacataaggatgtttaagatgtctgtccaacaggaagtggaaaatagcacactccagaaagcctcaggagggtgcggcatgcacggtaggtgatggccagactccacggccctcagaagaatgagatgcccgcccagtgggcctgggaagggcactggctaaggatacacagaaagcccttacggaaacatctagcatccactgggctcagtgggaggggctgttatcatctctgttgtaaaattcaccaccacctagactcctgacctcctgacatccaactgtcagctcatgcacatggttttaaatcgtgccttgagatcttacaaaaagcctggctttggccctgagacttgattcactttgccatcttctatctatcgagcacctctaagggtaagaagcccagcaggacatatagggaggtagatggggagcacacayagacttggggtggatcgtggggaggtggatggggggcacccacagactcgaggtggatcctggggaggtggacggggagcacccacagactcggagtggatcctggggaggtgaacggggagcacacacagacttggggtggatcctgtggaggtggatgggggcacccacagactcgaggtggatcctggggaggtggacagggagcacccacagactcggagtggatcctggggaggtgaacggggagcacacacagacttggggtggatcctggggaggtggatggggggcacccacagactcgaggtggatcctggggaggtggacaggtagcacccacagactgagatc

SEQ ID NO: 53320 - DNA, 980 bp, Homo sapiens
tatacggtaccttaagaactattattttcctattttacagaagaaacagagtcaaagaattgagatattggcccacaggcatgcataccaggtttatctcgaagctgggattgatctcaggccgtttgtaatatctgtgctgtgaacaattgctatagaaagagaacaattttttaagtcactgtgggaccacagcagcgggggcagggggactttattctgcaaagggaggtgaaacaaagtttcagacagaaagtggcatgagcatgtttttaatagcaagtttaattatcaaattaaatattaggttggtgcaaaagtaattgcggtttcagatcataaatttaaatcttataactatgctcaaacacatctttattaatcaaaatgagaaccattacaatcaacacatttttgccaacgagaaatgtttgtttcttcctgcagcataaaaatccatgtttctggattcgatgaactcttggaaagcattttctgcatcctgccggckttggaagcattttccctgcaaaatgctgtggaatcggtagtcagtgggtgagaggtcaagtgaatatggtggatgaggcaaaacttcatagcccaatttgttcaacttttaaagtgttggttgtgcgatgggtggtctagtgttgtcatggagaagagtgcctttcaagggtgtggctttcccgttccacctccgcaggcctttatgcaggtcctgactgatatgtgctcacacttgtgtctgtgaatggctctggtaagaattagatggtgactgagtggaaacagacccgagacttctctaggctaaaggaagcagactatgtatccatcttgtttgtaactgcagaattgcctatacatctagtgttgtctagtgttgtcatggctgcagtctttgcagttttcagtgcatctcatccatttgctgagcatacttctctgatgtaatggtttcgctggggttcaga

SEQ ID NO: 53321 - DNA, 602 bp, Homo sapiens
atttgcatttgtttggggaaagaaccaaggaaaatcaaagataaaagcagactaaaataacttcagtaactgcagaaaaaaaaacttccaataggaaggtgatggtcatgggatttgtcaggtacataatatattaataattttcaatacagaattttcaggggagtgacatccaaaaaccctaaagggtgacaaattgaatgaggaaagagggagtgaagtatatgagaaatgatgatgaagatagttggctgggaataaaaaatagtatagtagctggtgtttttatttaacccatatccatctctctctctctctttttttttattatactttaagttctggggtacatgtgcaaaacgtgttttrttacatgggtatacacatgccatggtggtttgctgaacccatcaacccatcatctacattaggtatttctcctaatgctatccctccctttgccccccacccaccgacaggccccagtgtgtgatgttcccctccctgttctcattgttccactcccacttatgtgtgagaacatgcaatgttggttttctgttcttgtgttagtttgctgagaatgatggtttccactttca

SEQ ID NO: 53322 - DNA, 727 bp, Homo sapiens
caggccttggaagagtctgtccagctgcccctgcctctggcttcttgtcctgacagcccctccccttcaggcacagtctccacgccccacctcaggcagccactcaggactcccgtgacagaggactgggctatggcccaggcaacacagggagagaagctggagacccagcagactggaagtgttttttctggggtgcatcccagccagagattcgaagatcccaagctctgggacaagcaagacaaagagaccccttaggtcaggactcctagaaagttccaggctccatttaacaaatatctcctgaatacctgctaggatcagcctgagcaaggctaccccaagctctgtcttttaggcttcagccctccatagctttgggaacgtggcagattctctcactaggatgctgctccctgtacctgygtgcacccatgccaaagtggatgtgtggctgctggtctccaggggatgccttgagaggccagtgcctggggtggggatcagaggcctggctgtgcctgctgtgcagctcatgccacagactcacctctcgcctgtccccttccctctcctgctcccctttgctgccctcacccttcccggattgtgtcaacaaatcccacacgtggtgggtcatgcctgtaatcccagcactttggatcccttgaggccaggagttcaagattagcctgggcaacatggcaaaaccccatctctacaa

SEQ ID NO: 53323 - DNA, 870 bp, Homo sapiens
caggccttgtatttttcattctattttagcctaccctattgcataacccaaaaactgtgattttgcgacacactcacaacctgaagaagattgtcctggcctttcattagctcattccttctgggctcagtttaaatgttacctctttaggagaggctttcattgactatgttattttaaataggttaccaggaaatctctgtctcatctcccaatttaaactgttatctattcctttcttgagacagagtctcgctctgttgcccaggctggagtggagtggcatgatctcagctcactgcaaactccgcctcctgggttcaagtgattctcctgcctcagcctcccaagtagctgggattacaggcgcgtgccaccacatctagctaattttttttttgcattttcactagagacagggtttcgccttgttggccaggctggtctcaaactcttgacctcaagtgatccacccgccttggcctaccaaagtgctgggattacaggcatgagccaccgtgcctggcctactagactactagaatataaagtccatgagaacaaagacctcgtctaattttttcatttttctcctmcagtgctcagaacggtgtatggcccataataaacgttcaacagatgcatgcagaatgaatgaattgatccccatgtggccatcagtcagcaccaaaggcatgtcccatcagtgacccagaactaagaacaaatgcataactcaatgcattcccaaaggaaaaggaagaagaaatcctaagcggaatgttatgcttctcttgccaatgccccagaatggtgtgggccacagaatccatcacatccttgggccccctgcaatggaattataagcca

SEQ ID NO: 53324 - DNA, 651 bp, Homo sapiens
atagcaccataagctgtgggttctttcactgattgccccagataattaccttcatagactaattccttttttttctttttctttttcttttttcttttttttttttttttggggtgggggacagcatctcaatcctgttgcccagggtggagtgcagtggcatgatcttgctgcggcctcgacttcgtgggctcagcccacctcagcctcacgaggagctgggactacaggaacaagccaccatgcccagctattttaatgcatttttagtagcaatagggttttgccatgttacccaaggctcargtaatcctcccgcctcggcctcccagagtgctgggattacaagcatgggccactgcacctggtaagactatttctatgtagtagtttattcccacctcctttcctatccctcctgggaataactgacctaattgatctatagaacaaacactcttaccacaaagatcacacacacacacacacacacacacacacacaaacacacacacacacacatagagtcatgtaccacataatgatgtttcagataacagacctcatatatgatagtggtcctataagatataatagaattcaaaaattcttatcacctagagacatgtagccattgtaacatcttagtgg

SEQ ID NO: 53325 - DNA, 651 bp, Homo sapiens
atagcaccataagctgtgggttctttcactgattgccccagataattaccttcatagactaattccttttttttctttttctttttcttttttcttttttttttttttttggggtgggggacagcatctcaatcctgttgcccagggtggagtgcagtggcatgatcttgctgcggcctcgacttcgtgggctcagcccacctcagcctcacgaggagctgggactacaggaacaagccaccatgcccagctattttaatgcatttttagtagcaatagggttttgccatgttacccaaggctcaagtaatcctcccgcctcggcctcccagagtgctgggattrcaagcatgggccactgcacctggtaagactatttctatgtagtagtttattcccacctcctttcctatccctcctgggaataactgacctaattgatctatagaacaaacactcttaccacaaagatcacacacacacacacacacacacacacacacaaacacacacacacacacatagagtcatgtaccacataatgatgtttcagataacagacctcatatatgatagtggtcctataagatataatagaattcaaaaattcttatcacctagagacatgtagccattgtaacatcttagtgg

SEQ ID NO: 53326 - DNA, 576 bp, Homo sapiens
taaataataataataatcattcttaagttacaattgtaatgaatgctacacagaagaagtagagcatgtgacaaatgcctgtcatgagaaaaccaatcaaggttaggagtagaaggtgagagaggtttaggaaagtttaccaaaggaaataaaacataaactgacatattaaagactcgttaaagacaagttgagtcaggacaaaatgaaaggaatgtagagaggtctaggcagaagagcagcaagtaggatagctctgtcaggagtggttggcacacccagaacacacagtgtctatggtccagctaagctgattatttcttccataaaatgccatgatagtgacacttttctaggaccaacagactggcataaaatagagctaataattgagtactgtgcagttcaataccacagagagtaaacttcaaatgttcttatcacaaaaactrttaaatatttgaagtgatggatatcttcattagcttaatttaataattccacattatattaaaaatcataacaacattttctacgccattaatatatacaatcacaatttatcaatatataaca

SEQ ID NO: 53327 - DNA, 1076 bp, Homo sapiens
ttgtgaagtaaggagaataataataactattttgtgggggctggagagagggtaagtgggttagtacatgcaatgtgcttagaagagtacatggtaactgttcaataaatgacatcatcatcatcatcaaagcttcgttgtgtaattattctattgttgactggctgtttggtggtgacattcacactaatcagagagaaaaaggcatgttaatcttagcactgattctaaccatctcattttgagaagtaagaacccaatttttctgatactaaatcctgaaagcaatttagtttttctcttgtcatatagttagaatctggggaaaagttatttgacagctaatctagtttaccctgtaaaaagcaaagattaatctttttgctactgagatgggacatgaaggcctgggtttcttcccaagtccttgcgttggttggctctctcccaagttttagctcttaacaccggacaaggcagggacaaagggggagatagggcagaaagtagcatcagaatccctctgtgttccaagagacgtggtcttgrgacagtcagaattgcttcctgggaggtcactgggagatgtagggagaccagttgagaagcagctaattatacagggattgggaaccaaggatgaagatcaggaaaggcaagcaaggtaacaggagcaataccatgagacaggagcactgaccaccccactagatttagccaatcaatttcttctgggtggtacatcttttgtctgggaattatttatctagattgggcatacacacactggcttttgcactacagcattttacagagtttttctgatgttagacacaggctggattatagagtcacagggtggtcagaaccttcccattctattttttaataggaacagaaagtgaggtcttaggtcaagtggttgccttcaagtcatgcagcaataatggagttggtagatgatctcacgtgcccttagctccaggccaatgttattgccttccttgactttcctttcaatataacccttaacttctcttgtggccttcgattcacactatggccataagaaaaag

SEQ ID NO: 53328 - DNA, 857 bp, Homo sapiens
cgaacacaccatgtgttaaaataagagttggtgtttctgagaagggaagtccaggagctgaccaggatgggattagctgttgataaggggcccagcattgttctagctctcccctgaggcccacaccacatcctagaagagaagccaggtccctcggccctaccagggctgggacagtcggggcacagctgcaggagacgccctgggaggctgtctgggctgcggcaggaggaggcagggcagggcagtgcagtggttgggaggtggccactctgcctctgttgagttttctggctttgtcacttgacgttgattctcccccagggccagagtggggtcaagtggggaccatggaggaggacatgagatcctaacaggcgacctcaaactgctgtacaagcccagcaaccctgaccgctccccaacccacaaccmgcaaaggtcaaggccagtgccaaggagtgcggggagggcggcgtgggggactctccagtttagactcttcagtctcgaaaaacaaaggctgacaggaatgtgaggaaaccactgtttactctgttttcaagggtgttccactgaagtgtgtcccgagatgtttccagaaggaggatgacgggggtggtgctgaagaggctctgccatgggaaccggagccggagatgccggccagaactctgggttctctggaagtggtgggaggaaacccgcaggagggaagaggccatctctcctttaactcctaggggaacagaccgcaggggctgagggtgctagccctttctgaagctgagagggagccggaaaggaagggactcaggggatctcatgggagccagaagggcccagacttaggatcc

SEQ ID NO: 53329 - DNA, 499 bp, Homo sapiens
cagaactgccaccacacatttccaaacacatcccaagggtggccaattgagaaccaccctatgatcggccacagctaaccctctgacctcatctttctctactccctggctttctggctccattccagccacactgggctccttgctgcccttctcataagcccacaaaagcagggatttggtggtggggawtggggtggaggggtgttcctttcatctgtacaaccagttcctgtattcaattccctcttttaagcacttgatttgtttttgatcccttttaaatttgattcagcttccccaactgtaaatgaactaaccaatgaaactaatcactgattccacatgttcccaagctgtgcacttctaccgcaggatcttccaaggtctgaactgaaaactgcgtctgcatttccttttaccttctatgttttgggaaggtatctctaaactatctcttcaggacagaagagaaaaactacatggatgcaaatcagtc

SEQ ID NO: 53330 - DNA, 569 bp, Homo sapiens
atttgatgataacgttctcttcaggactcagagcatgaacttgcttataacgaacataaatggtagcaatgcctgggaaaagataatccaaaaaacaacaaagtaataaataatcaagaaataaagttgccaatgaagagttcacaaaggtcactgctatccagaatcacagattttccttttaaaattaatcagagagaataaaaagaaaaaaaaaaaacaaaatagctgtagttttgtttttgcttttaaaaaatggggtctctctatgttgcacaggctggactccaactcctgacctcaagtgatccattrgcctcagcctcccagatagctgggactgtaggcacatacctgtgtgcctggctcatgctgtggatgttggagaaccttaaggttgtattatggaactactgatgcctccagtgactaagcaaatcatttgccttccatgggtctcatatttacaaacagttatataaaacacaaaatgtttttatgattagcatcagaatcagcactagttatagaatatagataaaatgggcgtaggcaaaaaacccaaaagc

SEQ ID NO: 53331 - DNA, 569 bp, Homo sapiens
atttgatgataacgttctcttcaggactcagagcatgaacttgcttataacgaacataaatggtagcaatgcctgggaaaagataatccaaaaaacaacaaagtaataaataatcaagaaataaagttgccaatgaagagttcacaaaggtcactgctatccagaatcacagattttccttttaaaattaatcagagagaataaaaagaaaaaaaaaaaacaaaatagctgtagttttgtttttgcttttaaaaaatggggtctctctatgttgcacaggctggactccaactcctgacctcaagtgatccattggcctcagcctcccagatagctgggactgtaggcacatacctgtgtgcctggctcatgctgtggatgttggagaaccttaaggttgtattatggaactactgatscctccagtgactaagcaaatcatttgccttccatgggtctcatatttacaaacagttatataaaacacaaaatgtttttatgattagcatcagaatcagcactagttatagaatatagataaaatgggcgtaggcaaaaaacccaaaagc

SEQ ID NO: 53332 - DNA, 892 bp, Homo sapiens
ttcgagcttcccggccactttgtttacctactcaagccttggcaatggtgggcgcccctcccccatcctcgctgccaccttgcagtttgatctcagactgctgtactagcaatgagcgaggctccatgggcgtaggaccctctgagccaggcgcgggatacaatctcctggtgtgccgtttgctaagaccattggaaaagcgcagtattagggtgggagtgacccgattttccaggtgccgtctgtcacccctttctttgagtaggaaagggaattccctgaccccttgcgcttcccgggtgaggcgatgcctcgccctgctttgcctcaggctcagtgcaccacacccattgtcctgcacccactgtccaacaatccccagtgagatgaacccagtacctcagttggaaatgcagaaatcattcgtcttctgcgtcgcacatgttggaagctgtagactggagctgttcctattcggccatcttggctccacccctcctatgtatttcttaaatctgtcctcttatctccatccaccttccctctgcctttaytcaagtgctccttatcttctctcctctctttattgtcagagcctcctaaaaggtcggcctgcttccaatcaccctccatttcagttctaaagtgaaaatctgatcctgcttaaaacttttaagtgcctcactgtcaccatgagacccttcacaattcctccctgcatgtgcacaggccccttctgagtggacccctgggtcatgctctctagcctcacatctcgctgctctccaccttgcagtccaggctccagcaatgcagacccccctccaggactgctctcccaacctccctgtctttatttatgttcctttctcacaggctagaatgctgccca

SEQ ID NO: 53333 - DNA, 822 bp, Homo sapiens
caaccaaactcttatcctacaagtcaccccaggggtctggaagcttctcaagcaaaatgttttctttactccctgttctgaacattgggagtgtgctgcgtaaacctcccgagaaagctcaattcaaatgtctgcaatccttcttagaaaggggaggatctgtcttttgggccctgcgggtaattcctcttcctaatgctgaccacggggactccccaagaacatttccacttmagcaagaatgttgaacaatttgcgtaacctttcccaggtacctgctataacccattctagaaatctaaatagaaaactctatttttccatctagtgtccatgcaaggatggtgcatttctgccaaaaataagtttggggtctggcgtgttatctccagttgattcttacaaatgactgaccaaagaaagtgaaagagaaaagaaaacaattcgtggaaaactcataaataactgtttgtccccctcccccaaagctctgtaaatgtaaagaacacaacatatatggaaaatacacccaaatttaatgtgcagtttgcttgccatgtaactgttcatacatattttgccacctaaagaaaactgtgcagcttctaattgttttgttccattttgttttgtttgacacggaatttcactcttattgcccaggctggagtacaatggctcaatctcggctcactgcaacctccgcatcccgggttcaagtgattctcctgcctgagtctcccaagtagctgggattacaggcatgtgccactatgcacagctaatttttgtatttttagtagagatggggtttctccatgt

SEQ ID NO: 53334 - DNA, 2347 bp, Homo sapiens
ggctcacacctacgatcctagcacttcaagacaccaaggtgagaggattgctggaggctgtgagttcaagaccagtctaggcaacatagtgaaatctcatctctacattttaaaaataataaataaataaataaataaatagccagatattgttcctctgcttaatatccttttacttmtatttataactttgttttttgtacttattttactttttctattcttagaaaaagatcaaaacatattattacagctataatgcagatatctggctaaagcctatctctttggtttcctctcatcatatcttccttatgtattatactcattcaaattagtcttttagctctatgcattagccgagctctgtcccacatgaaacctttgcacttggctgtttcttctacttgaactatattcctcctcttcctcatatgtttggccccttctcattcttcatgaatgagctttaatgtcgcgtccccagtgagaatttctcttacaatcccatctaattcagcattgttgattccttaactacttactttctgataaatttcccaggtcatttatttcatgatactgattataattggtgaccatactgtttatttgtttacttatttattattacctcctctagcccatgttctctgtgaagataaaaatctacttcacttactcagcactgggtcttcaattctttattattattattatttttttttctgggtctccaattcttttaacagtgcctagcatgtagtagaagctccctaccctgatccctcgttaagaaattaagtgaaataaaagaaaaatcatcttcaaatgacattgctaagaaacattagataaagaaacccatgaatacactaaaattaataacttgaataagtaagaacataatttctcctagtgtttctcaatcacgtttattagttaataaaatggctttagatgtttattttgcacaaataagatacgaagccagcatggttcaataaaaagaacttcaaagtaaaaacacaggagcatgtttatggctttatctcccatttaaagaagatggatactagtttaaagttaaaattgtctgtttaaaaattgggataatataggcattgtaacctaggaatattcttttgaactccagagactcatgaaatggatgccagtcttgtatttctacaaagaaaatacatttatgtaacaaattttacatgaaaatggatgatttaatgttattcatcttctggaaaccaacacataatagcaatacctctcagtaagtctaatcttcataattccatcattctttctaaaagattttaggcacttaatcagtccttgtcttgtctcttgaaaaactttttacctaaacatctttaaaatcttggtttctaaggagaaaaaatatgaagctgcaacttagtgactactaattcatttaatctataaatcaccaagaacagaaaaataatacatatcatttctagagcttgcaacttccataaataaaaatttcattttctggtactgacaacctgagtttctactaggtagtaagccctcatcatgtctcttgctgtttatggctaaagtaaatattaaagcccgcatacttgatagatctgcagtggttctcttttcctctcagcttttgaaatgaaataagagttcaataaaatggtgcactacaagtctgttgttcagatgcatacagtatatctctggatatatacagcatattcatttcttccaaatgttttattgaccttggtccttgggggtgatgaaaaaacaaaaacagtagaagctgaagtgctgacgtatttacaggggggattggccactattatcaagaataactttcaatttgattttttttttttttttttttggtgtggacatgactaggatatgactgattaggatctgaaaacattcaggtgcttttcaccaagaggcataattaaagtctaagagacacttaggtttggggatttaatttcaagcagtccctcttctgaaatttgaacttggatctcatccaggtttttccctgtctcattttaaatcaccattatatactgcagtagcaaccatgcaaattagcacattcctacatgttcagggcattcgacagagcttgtaaggataatataagagggcacagacttccccttttctttttcttatatttaatttttattaaaattttcagtcgatcttgcagggagaaaaaaactaggtttatttctaactgacaagcgtctatgtattcttaacatagtgaagcagaaaactagaaataatttcaggaaagggaaagagacttgatagg

SEQ ID NO: 53335 - DNA, 800 bp, Homo sapiens
ctgatatctgctccatattcaagtggccccccaaatacatcttaaagctggtttttcaaatcagagttcaattaaagttcaagcattatatttggttatgtctctatcaaaaatctggagcagtactcctacctttttattttccaacatgacattgactctttgaagagttcaggtttgcagatattccacaatgtggatttctttggcagtttcctcatggtggcatttaaattgctatttgagcgtttgtcattcttatgaaatggatatgaagtctaaaggctcttttcgatttgagttccaagatrtttgtaaataacatgtcattggtgaggttgtatactttggactttatcatatctgaagacaggtgatgtaccttcccactattaatgctgctaactttgatcaccaagttatatggtgactccagatatctgttataaaagtgtttccttttgcaattggcaagtaattgatgagtgatactttgtgatgttggaaatgtcctgttacccaataactgtcacctaatggttttaggcaaatccgtttcctgaatcaattatttcactgggagttaggatcatagtaccaatggtatagtaaatgacatccatctatcttagtctattgagtaccactctggactcatggatttattatttattcaatgtatgacaaacaattaaagtcattattccttttgatgctaaaatttacccaagtttggccagagggagctccttcaagttggtacatgtatcttctgacataatcctattagtctctgagtg

SEQ ID NO: 53336 - DNA, 800 bp, Homo sapiens
ctgatatctgctccatattcaagtggccccccaaatacatcttaaagctggtttttcaaatcagagttcaattaaagttcaagcattatatttggttatgtctctatcaaaaatctggagcagtactcctacctttttattttccaacatgacattgactctttgaagagttcaggtttgcagatattccacaatgtggatttctttggcagtttcctcatggtggcatttaaattgctatttgagcgtttgtcattcttatgaaatggatatgaagtctaaaggctcttttcgatttgagttccaagatgtttgtaaataacatgtcattggtgaggttgtatactttggactttatcatatctgaagwcaggtgatgtaccttcccactattaatgctgctaactttgatcaccaagttatatggtgactccagatatctgttataaaagtgtttccttttgcaattggcaagtaattgatgagtgatactttgtgatgttggaaatgtcctgttacccaataactgtcacctaatggttttaggcaaatccgtttcctgaatcaattatttcactgggagttaggatcatagtaccaatggtatagtaaatgacatccatctatcttagtctattgagtaccactctggactcatggatttattatttattcaatgtatgacaaacaattaaagtcattattccttttgatgctaaaatttacccaagtttggccagagggagctccttcaagttggtacatgtatcttctgacataatcctattagtctctgagtg

SEQ ID NO: 53337 - DNA, 2482 bp, Homo sapiens
attcattcatttctctcctgtacctgctttgccaactttgtacagcaggagtatggaaagtagatgtttaatgaaagtggggtgttctgaaccatcccggataataccaaaagcctaagtgtggagactaaattaaaactaagaccttaatttgccagaacaataaggactgaaaggggcttcagatgtcactgtgtccaaacctccatcttatgcccaacttccctgacagcaacctgtaagtggcttgtcagtctttgctgcttgttactgtatagtaaggggcaacgtcctcatcttggttgttagctgcaattttagacagctccagttgtcaaaaagactttttgtacattgagtcctaatctaaccctcagaaactattagaattgcttgaatccttttattcttacacctgcaggaaggctcatggacatagacttgtgacaactccaaggctcggaaaccaatttgtgagcctctgagtgttagtgattctgatcttcaaggaactattttagggcttaatttcccaacctatccagttgcaagtaaacaagttggctccttcatttttatacaatctcccattatgaaatatttgtttaaaatgatagtttttcaaccttactagtgaaatcacctatcaaggtttgacaaggttactgcatgccgaaatttgagctgcttccctaacaatgcggggatttttttctaatctataaaaacaaggcaccatcaattgtgatttgtatttgtttttttttttttttttttttttgtccaggattattctgttaatgtttataagcccttgtaacaagagatggaaattttactcccgtcattttctcatttcagatatgactgaataatcgtccaagattaagtgagtcaagtggaaataattaggaaagggaaaaaggcccagattcttcaattttcagttccattacattttattctaggagcaaaggcattctgttagtctgaagcaagacacacttccaaagaaaacgaggcacaatcaaaggccttttgttttccctgtctccaatgagcacagtccatctgggccacgcatgtttatgcatcaccttgtagggatccctttgttctccagaaatcaaatgccaccaaaatatgttccagaagaaacgaagccagaaggaaagacagtaggattttttccccagagggttaaggtttattactagaacattctcatcaagtgttctctgtgacacttcaagcaatgtggatcttgtggaattaactcattgccaaaaggcttaaaaataattacaatgaattaacctattatattaattacaattaattttcagttgaacctaggaattccatctctaggggattccttagcactgacatgtaggaagtggctttggcatatgataggtaattaatctctaacaatctgctatcaaattcatttcctttaggaatgaccaatttgcaaagaggaccaatttgcaaagagaaatgagagtaaagacttagagaaacggcattggaaggaatctctttgggaacagaagtgtccagttgggtgttctgaacatctgtataggggatacctatttagttagcagtgactccaaaggcccaaaattgtatccatagctgattaatgagcactccaaaatacgtgaatgggtacacatgctggggtatagctcaataagatcatgaaaaatcagtgtcagtatggacacaacaaaactaatgattatttagtaagaaatgatgatttatggaaattgttcaaagaaacatagaatttcagagcaaaaaggaactagggtccaaaagcctttcctgtcaactctgtagcaacactatccagttgaaatttctgtgacgatggaaaggttctgcactgcactaattgatagccactagccatgtgtgactaatgagcatttgaartgtggctaatgcaactgaggaacttttaattttatttaattttaattaaatttaaacttatagtaatgaagtgcacagcactactgcataccatggtagcagtccagcctttgtctaaatccttttgatgacagggaacatccttccttaccattaagcaccctccatttagaaagagtgcttcagagctcatcatttaaaaagttttgcttcaagttgaactataatctgccaactacagatccacccccctgtggtttactcctcacctcctctcctagaccacacagaataactgctcacagtctcttactgttttttagtatttgagaagcttcaaaatgctgtagtatcatagaatttcagccatggaaggggcatggtttagcttctttgttgaacctcccctcttagtgggtttttctctaggctgaaaaaattttgttttgttatttatttatttatttattttgagacagtcttgttctgtcacccaggatggagtgctgtggcacaaacatgactcactgca

SEQ ID NO: 53338 - DNA, 1006 bp, Homo sapiens
gatgtaatctaaaatattgaaaatattttttcagtgcaggttaattttattaatacataatagttgcacataattatggggtacatgtggtatactgatacatacgtgtaatgtgtaaaatgtgtaatgatcacatcagggtaatgaagatatccataatctccaacatttatcatttctttgtgttagaaacattccaaatcttctctcrtggctattttgaaatatactacaaatttttgttaactataattaccctactgtgctattaaacactataacttatttattttatctaactatatttttgtacccattaactaacctccctttgtccgccctcacccttacacacttccccacctctggtaaccatcattctactcattatttgcatgagatcaattttgttttagatacaacatattaatgagaacaggagacatttgtctttctgtgcttagcttacttcagtttacataatgtcctctagttctatccatgtttttaaagaattaaacttggcccatttattattattcattcatcattattacacagtaatgaagtaaatgtagtaaaacagcagcatcaactaccatttattaatgtactgtttcctacttgaaattctatgttagaatctgtgcaaatagcagatatcatctctgtaaacatatgggagagcatatttaaccatattttacaaagtgtctgagcctcaactagtttaaggactcatcaaactatatgcatgaaatatctataattatagaatcagaaaaaggaagtaggaaaataatgaattaaaatggaaagagagtagaaataaggaagagatgatttgtatcttatttgagtcatatttgccaaacttcccctcctctcacacacagtaacacaggtaatctcttttaaacacacatgcgtctgaataagagatatcagtatctttattttaaatctgagacacttagattttgagtgtttaagatagatgaaaaac

SEQ ID NO: 53339 - DNA, 1006 bp, Homo sapiens
gatgtaatctaaaatattgaaaatattttttcagtgcaggttaattttattaatacataatagttgcacataattatggggtacatgtggtatactgatacatacgtgtaatgtgtaaaatgtgtaatgatcacatcagggtaatgaagatatccataatctccaacatttatcatttctttgtgttagaaacattccaaatcttctctcgtggctattttgaaatatactacaaatttttgttaactataattaccctactgtgctattaaacactataacttatttattttatctaactatatttttgtacccattaactaacctccctttgtccgccctcacccttacacacttccccacctctggtaaccatcattctactcattatttgcatgagatcaattttgttttagatacaacatattaatgagaacaggagacatttgtctttctgtgcttagcttacttcagtttacataatgtcctctagttctatccatgtttttaaagaattaaacttggcccatttattattattcattcatcattattacacartaatgaagtaaatgtagtaaaacagcagcatcaactaccatttattaatgtactgtttcctacttgaaattctatgttagaatctgtgcaaatagcagatatcatctctgtaaacatatgggagagcatatttaaccatattttacaaagtgtctgagcctcaactagtttaaggactcatcaaactatatgcatgaaatatctataattatagaatcagaaaaaggaagtaggaaaataatgaattaaaatggaaagagagtagaaataaggaagagatgatttgtatcttatttgagtcatatttgccaaacttcccctcctctcacacacagtaacacaggtaatctcttttaaacacacatgcgtctgaataagagatatcagtatctttattttaaatctgagacacttagattttgagtgtttaagatagatgaaaaac

SEQ ID NO: 53340 - DNA, 719 bp, Homo sapiens
ctagctctgttgcttacttgctgtgtgaccctaggcaaattacttaacctccctgtgcctcagttttctcatctgtgaaatgggatgatagtaacacttattatagagttgttggagaaataagtgagttaatatttgtaactcacttacagcagtaactggacctggtttctctcctggataacctggataagctttcttttctttctttctttctttytttttttttttttttgagacagagtctcactgtgttgcccaggctggagtgcagtggtgcaatctcagctcactgcaacctcgcctcctgggttcagtgtttctcctgcctcagcctcctgagtagttgggattacaggcacgtgccaccacacccggctaatttttgtatttttagtagagacagggtttcaccatgttggccaggctggtctcaaactcctgacctcgtgatctgcccccctcggcctcctaaagtgctgggattacaggcgtcagccactgcgcctgtcctaccaccatctttttaaacttcatccatcctcatacttgaataattctcttagggcattcatttaaccatagtcatcctatatttatttattgagcacctactatatcctaggtaccatgctatgccccagaaatacagtgaatataacacaaataatatctctactttcattgttgctataaaagtgaagcagagggtgttatca

SEQ ID NO: 53341 - DNA, 570 bp, Homo sapiens
ggcctctgcccatggctgatcctggtggtggcctgggtgttgtggcttcccagccagctctctcctccacgtgcaccaagaacgccagagctgtgtgcagtggtcgttagccccgctcccaccacgcatgagtgcggtggcccaggacaagccctctccctttctgggtcttgcctgaaggattctgcctctagakgaccccaagagaccctttcctagcctggagtcctgaggttcctgtcaccgtctctgtgagtcctgccctgcccctcccggagctcagcgccctcctccctggtgtgtcctacttaacaggaatggagcagtttagaaacaacctagaaagccgagagaggcagcccacacagccccacagcccctctccaggggcccagcactcgctctgggtgactggttgggttgcagcaggcagggagaagggctctcaggtgtcccccgtttccactcagggctcactgtggctgtgggggtcccgggctggagacctgatggtttatgagattctgggagagaaaaccacgagattctggaaactccctcaggggaccc

SEQ ID NO: 53342 - DNA, 570 bp, Homo sapiens
ggcctctgcccatggctgatcctggtggtggcctgggtgttgtggcttcccagccagctctctcctccacgtgcaccaagaacgccagagctgtgtgcagtggtcgttagccccgctcccaccacgcatgagtgcggtggcccaggacaagccctctccctttctgggtcttgcctgaaggattctgcctctagatgaccccaagagaccctttcctagcctggagtcctgaggttcctgtcaccgtctctgtgagtcctgccctgcccctcccggagctcagcgccctcctccctggtgtgtcctacttaacaggaatggagcagtttagaaacaacctagaaagccgagagaggcagcccacacagccccacagcccctctccaggggcccagcactcgctctgggtgactggttgggttgcagcaggcagggagaagggctctcaggtgtcccccgtttccactcagggctcactgtggctgtgggggtcccgggctggagacctgatggtttaygagattctgggagagaaaaccacgagattctggaaactccctcaggggaccc

SEQ ID NO: 53343 - DNA, 776 bp, Homo sapiens
atgaaacgggcacacacctgccctggcaggttgaatggtgtccacctgccaagggtgaagagcctgtgatgggctattccagggatgtggatgtgaactgcggtcaggcaccagaggtctctgtacgatcggcctcctgggatgctcagggccacagagatgcccagtttcctatgaggaacaagatctctcctgattgctccgttctaccccgctcatcacttgggctaccatggcccttcagtctaaccagtgaagctgctttaagaataacgccatttgagcaggartgtgtttggttttggggatgaaaatgatctactgtctccaaagcagccactgtgctcatggaaaccatgtctctcggggacggactgtggactccaccattctgagctgtccctacaggagggggcttcatgttcctgtgtcactgatgtagaagagtgggtccttgctcctggagaacatctagatggaccgtccctcctgataatactcagggcaaaaggaaagcgaggccagacagaataagaaatagttggggagaaccccagtgcccggacccctttgaacacaagggaagttagtctcccctcagccagtcctccagggctccttcactttccacaactgcccaagggcagaagcctccccatgccactcccagacaagggaccatgtgtgtccagtgggtcccacggtgaccatcaggacccagcttaggccccaggtgtgttctgaggacccttccctcctccccacccacagtggat

SEQ ID NO: 53344 - DNA, 1440 bp, Homo sapiens
attcagtacgcacaactatacataggcaccctcttatttttccatttaataggttgatagaagaaattgaggctcagaaaaataacagaactgcccacgaccacacagtgatggaaatggaatttgagtcttgtagtttttgactccaaagctaaaattatttccactaaaattttctataccaaaccctcccccmtcctaccaccggcagccccaccaaattaaaaaaaaaaaaaatcccctcagctgcttttggctccctttttctaactgtataggtcttattctgaatcctgagaaataatcagatggtagtaagtttgatctccagttgaagatcaaacttacaatcttggtttttcttcatatacatgtcacagtacaaatattgtgcagttttacataataagagaagattctgaaagttatttttcatccaatctaatttcaaggaaactcagtcagcaaatgttctggtaatgcaaatactctcaacccatgtcctttaggcatgaaaatggttctggattaaaggtgactattctgcttagtagatcatttaacaaatcttaaaaaatcgcttcatctttacttatacatgcattaaaatataatcaccatgtttaagatgaactaatctcttgtcaaagtatacagtctcaaactgtgaccccaaacataaccagcccatgtttctgacctttctcatcaatatttcccttctcattcttggctgtttcaactctgcgccacgggtttctgtgcctaaattgttcatctccatatatccaaattctactcattctttaaaccccaatataaattccattttctgatgaagtctttgttcatcaattgcccatcattaccccactaaattttctttcctctgacaatcccataacactttttgtctgaatcactcctagtgatgtcgagtcacattttaattagttgttttcatttttttatttgtatacatttaaggagtacaagtgcaatttttttacatggtgtattagtcagggttctctagaaggatagaactaataggacagatgtatatataaaggggaatttattaaggaatattgactcacacgatcacaaagtgaggtcccacaatagactgtctgcaagctgaggagcaaggaagccagtccaagtcccaaagctgaagaacttggagtctgatgtttgagggcgagaagcatccagagtgggagaaagatgtaggctgggaaactaagccagtctagtcttttcacattcttctgcctgcttgtattctggtcacactggcagctgattagttggtgcccatccagattgagggtgggtcagcttttcccagttcactgactcaaatgttaatttcctttggcaacaccctcacagacacacccaggaagaatactttgcacccttgaatccaatcaa

SEQ ID NO: 53345 - DNA, 577 bp, Homo sapiens
atcactaggtccagcccatactcaagcagaagaggctacacagtatatgaatatcagagagggcgggtcattgggagccattttagatgctgcctatcacaaccaatgtgtctgtctacacgtgacayctccagcttggtgctctcaggggtcccggggagagtattccaggagaacttcctttagcagaagttgcaagaattcttatgttctagcttcagaagtctcagaacatcactttcactgcatcctatcggtcaacttaaaactcactaggagcagccagattcaaggggaagggaatcagattcaacctgtcaatgtaaggagtgtcgaagagtttgccatcatccttcatttaccacactgttctacataatatcatatgcctcccccgactacgcaccaattgtttcccttacatcacctttttattacagcccatatattcttaaaaatttgtttatatctaacaactagaaagcgagctccctgaagtcagaaaaatctgcttttttgttttcctcccactgttctaatccccaggatttagagcagtgcctgacacagaatatgt

SEQ ID NO: 53346 - DNA, 741 bp, Homo sapiens
tgatggaaaggaggagtgaagctccgccctttccgctgctaggctgcgcccgaggctatttaaacccaccctggctggcctgtactcagatcttcgcggagcggatcagcggccggagcgtttggcggactctgcgtggacttggagctcacagcgtcttgcgacttgaaagcggattcagaggacaggacagaacacttgggcaagtgaatctctgtctgtctgtctgtctgtctgtcccattggttggttgatttccatttccttaaggggcccatacctcacaccgcacacacacaaacacacacacacacacacacgcacacgcacacacgcacacacactccttccttctgcgagttagaacattagtgggrgcccctgggagctgcaggtttcctaatcatgtctgcacctaagaacagtagggtcttgtctggctcttcttatgaacggtcccccagcacggacaccccaaggtccatgcgagcctcacccagcttctccctctcccctctcagaaactcaggcttaaggggaagctcctcaccagggatccggaactaccattcaccatcccctagggcttcaccacactcacctctgtcatcaccagaatcccacaagctcccatttccctgtcctcaccgtgatgggcaatcaatgaagccattgggctctgccgtgtcctcctctgaggactcctcagagtccccacgttcatcaataatataccacatg

SEQ ID NO: 53347 - DNA, 724 bp, Homo sapiens
tatgtttcaataaaagtcagtcgaactttaatcatagtctttctatatatacttacggattaatacattgaaattcatgatcaaatgaacttagaaaatttctgttagattattcatatctatgtctctcatttctttgttagcaagtgaaataatctrtatttttgttttctattggaaactggattttaactctacatgcaaatttctacattagataatttattcagttttatagaatctatggctacacgatatagtctttttctctctcaaataaattaataaaaatttgacttaattcttcttgctatatctatatatctaattcagttcagactaattgatttgaaatgagataaagaatacaaaattatatatttttactttatgttcctgatattctgcttttatattctttttatttgagatggagttttgctctgtcacccaggctggagtgcagtggcacagttttggctcactacaacctccacctcctaggttattctctcacctcagcctctgagtagctgggattacaggcgctcaccaccacatctggctgttttgtatttttggtagagatggggtttcaccatgttggccaagctggtcttgaactcctgacctcaagtgatcagcccgcctcggcctcccaaagtgttgggattacaggtgtgagccaccatgcgtggcttgcctttatattcttaatatgttt

SEQ ID NO: 53348 - DNA, 1300 bp, Homo sapiens
agaaataagcaagtcatagattcactgacaaaaacattaaaaggaaatgtttagatctcatactggaatgtattctctatttaaagtcacataatcatgcaggctagatgtcagtatatgttagtgtatgtttaaagttttttgcagttacaattgtcctaactttttaacgactcaagtcattagtatctaatgaattctttaagatatttgtatatattattgaaaagcatacaagaaaattttgtcaactgttcatgacatactagattagagcagaaaaaaaaaacattttacaggtttcttgctcttcaatgtggctttataaacggatcaagtgctacaatagtagatcctttaataacaacttgagtatgatgtctttgttactaatacaggtttataaactggagattcatagcacaattcctccatagaacaagtttgtgtttgcatgarcccaaacaaatctcatgaattcagctaaccatcacaaagtgttttattccactttattgggaaatggttaatttcttctcttgtagagattcaattcacatatcatagacagaaatgaacagaaataggaaactatgagaggattctcttagttcagtgtgcttctgtgagtgaggagaggccagttgcttctccctgtttgtgatgccttctaagatcatttccagctgtgtttgtatgtttgttggcagtctgaaaacctttactaattcggaaagctaacacattagacttaataattaagttgagtgcagagaaaaaaaaaaaaaaacagaagtggtagaataagaattaaatggtctaaattttccctgaattaaaaagaaaggaaccttgtaagatcaagaaatcagtgatatttataggttatattacaaggaatatactgtaattatattacatgtaattataatgtaattatattgtaatgtaattataatgtaattatattccttaacaatgagtgactttatgcctttgcagggacatggatggagctggaggccattatccttagcaaactaacacaggaagagaaaaacaaataacacatgttctcacttagatgtggggactgaatgatgagaactttatattataaaagtatataggccagctaagtatatgttgctaggccagcctgggcaacataggaagaccccatctctaaaacaaaaatttaaaactagccaggcatggttgtgtgcacctgtggtctcagcaagttgggaggctgaggcaggaggatcccttgagtccagaaggtggaggctgcagtgag

SEQ ID NO: 53349 - DNA, 714 bp, Homo sapiens
cagagcgagactccatctcaaaaaaaaaaaaaaaatttcccatcctgccagccagcagttagctagaagcaggttctgatcttggttctgccacagactggctgcgtgagtttaggcrtgttacagaatctctctgatctacttctgcatctttgaaaaatttggataatgatacagcctgaccattctcctttgatcataccacttttctcatggcatttaatatggcctactataattacacatggctttatctcccctgtagaccaaaccaagagctcctgagggcaaaggcctttgcttatttactctgaaacgcagcccagtgctagctgtgctagcagacacattgtcaatgccagcttctaccctttctgttggattcccacttgctatgaaaatcctttcctttgttctacaaagtacactgttcttcaaatcatgaagtaacccagtttcaaaattttagttttactttgtaagtttcagcatatctctatcccagtatggtggggtttcttgttgttgttgtttttgttttgttttgtttttaatattgtaaatgttataggtttcaaagattatctatttgggaacttgggcataaactcaacatatatacttctcatgcttccaagtactggaagcatgtggaatctgagtggaaaaatcatttaaatttagctttaaaaattaaaaaattaaataacgttg

SEQ ID NO: 53350 - DNA, 714 bp, Homo sapiens
cagagcgagactccatctcaaaaaaaaaaaaaaaatttcccatcctgccagccagcagttagctagaagcaggttctgatcttggttctgccacagactggctgcgtgagtttaggcgtgttacagaatctctctgatctacttctgcatctttgaaaaatwtggataatgatacagcctgaccattctcctttgatcataccacttttctcatggcatttaatatggcctactataattacacatggctttatctcccctgtagaccaaaccaagagctcctgagggcaaaggcctttgcttatttactctgaaacgcagcccagtgctagctgtgctagcagacacattgtcaatgccagcttctaccctttctgttggattcccacttgctatgaaaatcctttcctttgttctacaaagtacactgttcttcaaatcatgaagtaacccagtttcaaaattttagttttactttgtaagtttcagcatatctctatcccagtatggtggggtttcttgttgttgttgtttttgttttgttttgtttttaatattgtaaatgttataggtttcaaagattatctatttgggaacttgggcataaactcaacatatatacttctcatgcttccaagtactggaagcatgtggaatctgagtggaaaaatcatttaaatttagctttaaaaattaaaaaattaaataacgttg

SEQ ID NO: 53351 - DNA, 552 bp, Homo sapiens
tgtagtgaagacccatcagtcccaggcaaacccagatgtttaatcatcctgatttacccatgatccctctcagaagtggtccaggagcaaagctgcagcagagagaattcgtaagactgatcttgcagcaatttctcctggttctctgaacaacactgatcatggttctttcctggcagctctggtcccttagacgaggctgacagtttcctaraaagaaacaatccctcaggtcattaccgttttcatttcagagttaatcaaattcatcaaaaaagatttaccagatggttattatttgcaaaatacagtgacaaatgtggctggagacatgaaagtattaaaaaactattcctgccctcaaaaaaaaaaaactaatttaattgtgaatacaacacaaaaatctgcaggatgaaaaaagcctaagtaataataaaactgacacagagggcaagcgtttaaaaaatcgcaactcagaatatgattaattgcaaatatatccttggaaaaagagtggcttttagactcagaaaattcattttgttttgtttt

SEQ ID NO: 53352 - DNA, 847 bp, Homo sapiens
attttcaaatattgcatattttgacatgtaaaaatttgttagttttattttttcaaccgatctgacctgtatagttgggcttgaggaagcttcctcattctacatgttactatggattttctaatattaacacagggttgtattttttccatataactttctattgaatttctttttccatatgataggtggtgaaggtttagcccagtaaagcagagaggttaagaggttagattgggggctctggagccagacctatgtagatctgagtcctggctctggcacttgaaagccgtgtgaccttggttaagatacttagtccctctctgccaaatggagaaataagggcacctaccccatagggtagttgtgtgattacacaagttaatacacttcaatcagtagcaagaaagtgaatgtcaagctgtatttgttcaggcagccatatggtagccccacgtccttagtaaactgaggtattgaagtatcttctttttctttcagaaaatatttgtcaagcaccttctgtgttcwaagaactgttctagagctttgcatgctatggaggtctagaaattcacattatggtggcaggtgacagacaatacaaagagataaagcaatttcatatagtgataagctagggaggagtgctaaaaggagccaaggtgtagtggtgactggaaggtgaccagggaaaccactgtagggtttctaagtgatgagatctgtgacaaatccctgtggtcagcagcaggcattggatatgtaactttattctgtcccattgatcttgtagtcaaccctggtctgttctgtattggtttaattacataatctttgtaat

SEQ ID NO: 53353 - DNA, 661 bp, Homo sapiens
ggcagtgttgtagatgtgttctctctcgtagtttcagaagctttgccgttggttttcttgagtgttctaagtatatgagcatatttttctctatgtaatgataattttagaaatattttcctattcctaagatttttaagtggcttttttcttaaaatcaagaataggtattgaatcttaytgaatgccaatttagcatatttaaaagtggctacatagattatttgatatttttaatgtggtattaacagatctaatacaaattaattttcatataacctataatacaaacttcgtagtgttgtagtaaattattcctttaatgtactgagtaacttcatttttcagtatagcataatgactgagagtgtgaattctgaagtcagacctaaatttgaatcctagcttcttcacttacagactatttggagaaattacttaatctttcttatctggttttctcttctacaaaattagatagtactagtgcctactaaagaaatactacatgtaaaacacttaacacagtgcctcatacataataagtttttttttaatgcacacacctgcatatccatagtttttgttattttatcttagattttatatctgaattcttaggtaagattgaactgcagttttgtgtatatatactgtcttt

SEQ ID NO: 53354 - DNA, 924 bp, Homo sapiens
gagcctcgagtttattcaatgggataaaagttgcctggtaaattgggctgagaggattttttcccagaaggccatcacaaggcattttgatgtacttatcatttacaagagcctagaggaatctaaaagtgattttgatttcaaatactatagaacccagttattatatagcttattaatactgagcttcaaataaccatcagatatattctgagacacacacatatgcacacacatacacatacacacacatacacacacacacaccctctgtacaggcttgtaatatgaggcctgtgatggtgatgtctcatgttatttagggagtcgggttctaaatttctacaaagatgaaaattgtgtacagttaaaggtgcatttggaaaatcccttcaaatgcccactagcacagtgaggtgcttgcaccgtgagaggtaggaagtaaatctgattacttcagctctcacatgccccttgcaggtgaggatgggcagaaccaacaccmtgtcagccctctttttcactcttcttgctgagggcatggagatgaattcactttagttaactgtataggttatataatttcaccttgatcagctcacccccaggagggttagtcctgtctacaaatacaaaagccactcgtgtcttttttgtaggaaaaattcctcactacctggtaaggaagaccctccattgtctcagccactaaaaacactcccagtgtcttccatccctttttcttcccctttctctcctaaaaagactgactttggcttttgaaaattggttaaaccttctctctctccctcttttctctctttctcattagcatttctaagtgtaatgttcaaagcttccaatggggacaatgccctgaaatttcagacagctccaaaggactccttcccacgctgatgtagg

SEQ ID NO: 53355 - DNA, 709 bp, Homo sapiens
agcacattgggaggccaaggcaggcagatcacttgaggtaaggagattgagaccagcctggcaaaacatggtgaagccttgtctctactaaaatacaaaaaaattagcctggcatggtggtgtgcacctgtaatctcagctacttgggaggagttgcttaactgagggaggagagttgcttaaccgaggaggtggaggttgcagtgagctgagatggtgccactgtacttcactgtactgccttggtgacagagcaagactttgtcttaaaaaaaaaaatctttcttctcctaggtgctatgtaggaggaatgagractctagcggaggtgtgggatccagtgttttgtgttcatgaaagaaaaaaacacacaacatttgttgtgctataattttggaggatcctcttttgacagaaatttctgggccaatctaggtaactctgacaactactccattttttcagagaatgatgttctactgatctgaaatggatcaacctggactggtgctttcagatacatacctgttcacctgccctgatgcccagtttttgtagtcttcttctgggagctctaagacaaatcagagagcagaaaaatacgatatattattagatcacaaatgtactgagtcatcagggtatttttagaagaaattggggtattttttgaaaaagagtcaaaccagtttaataataaaggtaatat

SEQ ID NO: 53356 - DNA, 599 bp, Homo sapiens
gagcctgagtctctctctgtcgcccaggctggagtgcagtggtgcaatctcggctcactgcaggctctgccttccgggttcacgccattctcctgcctcagtctcctgagtagctgggactacaggtgcctgccaccatgcccggctaattttttgtatttttagtagaaacggggtttcaccatgttagccagcatggtcatgatctcctgacttctttcttgatccgcccgcctcagcctcccaaagtgctgaaattacaggcatgagccactgtgcccggcctgctacttctaatttcttaattaactttatcaggcttatttccttcaactgatgtcaacttggctttttagaacagttattctcaaagtatggttcttggacaagtaccatcaacatcccctggaaactgmctagaaactgaaattctctgccccaccccagacctactgaacaagaaactgtggggcccagaaatctgtgtttaacaaaccctccaggtggttatgatgcgtgaagtttaaataaacaactgtcttagatgagaactttatcactcaggaactttttgcaattatccaataaaacaaacatgg

SEQ ID NO: 53357 - DNA, 942 bp, Homo sapiens
tgttttatctggcccaaaaagcccatttgtcagcctttggtcttttggcctaagtttggctcagatgaggactgggtgtgccaagctttaattctctacgtgaatgataaaacccatactcacagaggatgtgggttatgttctttgttggattagtgatttaaccccatgttcccccttaaagaggaagagcacagtaaagagccctcacccagtgaaaagccctgggatccccaacacgcttgcccctcccccaaacatctcacaaggtagaggacagggagatcgggggcaagaggaaggtcgaggaaagaggaatctggggatcatgaaggagctaaacccagtgctcccttaaatccttatccaaacttgaggaaagaattagaacaatgtaagaaggacattgagaatttccctatttcttctgaacagtagacgtctaataagtactctcttagagaagtccctatgggacagggaggagttgggtttgtgaatgcrcctctaacaagtactgaggttaggaattttaaaaaggaaatgaggccattcttggaagatcccctcggtttagcagagcaaacctcagcttagcagagatcccctcggtttagcagctagatcaatttttaggacccaatttttatacttaggctgagatgatgtcaatcatgaatattgtgtttactggggaagagaggggaataattataagggcagccataaccatttgggaaagacagcgtcctcccaggcaagaagtcctgccaactgagcagaaattcctaaatgcagatcctggatgggataacaataaagagatcgggcccaaatgcaggacctaagggaactaataattaaagggattaaaaagtccactcctaggacataaaatgtctcaaaagcatttgagattcaacaacaaaaaaggaggagact

SEQ ID NO: 53358 - DNA, 1126 bp, Homo sapiens
aacccattaatcctgcaattcagaaatgaattaatttattcatgaaggcagaactcttatgacccaattatctcttgaagaccccacttctcaatgctgcccacattggggattaaattttaacatgagttttagaagaaacaaacatttaaaccatagcaaatgtccactatgagacaattactataatatatatttacacacacatatcctttttattcttacaaaaataccattttttgtaaacaaataaaatgatgttcagagcagctaaaatattatcctagaataatcaataaatgggcaacaaggacaagtctcaaatttaacaatttggttgctaatttaggtttcttggactaattgatatcyatggtgattttatgccccaaactcctagtctgttaatgaactgaaatctaacgccacaataataatttgtatacattattttaaaaatacaatcctaatgtcagaccaatgcattggttagtgttttaaacaggagatgtttaaagaatgtttacatccatgttaatataaactgatttattctgaagtgctaagagcgtcaaatcctgttgaagaactttgcagttttcaggaattattggtaaaaatattaaaaataatgctagaagggggccaacatagctaattagaagcagctatggtgtgtggcagtcacagagaggaacaaaaggggtgagtaaatacagcaccttcatctgaagtattcaggtactcacattgagactgacaagagaaacaatgtgattcacagagaacaaagaaaagctgggcagggcgatcacccacctagaagtgacatggagcaaagggaacccccacactcacccaagggaagccataagtgaatatgtgacccaagaaactacacttctcccattgatctttgcaaccctcggatcaggagatcccctcctgagcccatcccctcctgagcccagtcaaccagggccttgggtccaacacacagatctgtgtggagtcttggcagagcagctggtcaggcactgatagggacccaggagctttatgtactcggcctcgggatacctgacaaatgtgacttcaactcaggcaaggcaggagctccatatat

SEQ ID NO: 53359 - DNA, 718 bp, Homo sapiens
ccacacgcccagtcgcctcttggccacttccaggccaggggtgtgcacactagtgatgaggtccactctcactcgggggaaggtgatccagggaggaggcccattcaggccagggactcagggaattccaggtcccaggtacttggagcatggtctaaaatgaaggccagggctctgagtggatatgtccctgtggcccaggggatttcttaccttgtggggaaggtcatggctggagaaaggccagagaggggccctctggtatatggggtatctggcaggggcttctcttgctctggtctaagggccacacagctcattctctaggcaattccactcattccctttctccaggagattgagcatactttttgaataggtggcaattaaggaacagcccaaccttccaaggcaggcttagatttaggttctggagagaaatgggagccaatatttggaaggtaggacagacctaccyaactaggacctgcatatctatgcgagtgtgtttgtccctctgtgcatcaatgagtgtgtgtgtgtgtgtgtgtgtgtgtgtatctatctgcagggatggggggtgagaaagtttatggggccaagtctaagacccagcctacactgtaacgtgagttttatctgtgacacttctggggtcaggccggctcctgctccctggccatctaccattgaagccagcctgtcctttgagcctagg

SEQ ID NO: 53360 - DNA, 528 bp, Homo sapiens
tttttttttagacagggtctcacttttgttgcccaggctggagtgcagtggcaccaccacrgttcactccagctttgacctcccgggctccatcgatcttgccatctcagcctcccaaatagctgggaccacaggtacgcaccaccacgccaggctaatttttgaatttttaaatttttcatagggaccgagtctcaccatgttgcccagagtggtcttgaactcctgggctcaagcgatcagccttcctcagcctcccaaagtgctgggattacaagcgtgagccaccactcccagcttcactcagaattttaaaatcaattttcccaagtagaaatctgtattttctgaatactcctaaaatgaaataatttagtagcattaaaggaattgtatgtagcatttggatgggtcggagagatctgagtggtcttttctctagaatccctgaaatcacaagaaaacatgagttctaaaggcgagccatctttgaaattctattacagttgttatcattttttctgaata

SEQ ID NO: 53361 - DNA, 943 bp, Homo sapiens
tagcacttagtaagatttcaggaagtgtcagcggctattattaatatctaagtctttattttgggattctgacattacaatttactttttaaaaatggccagcattgtttttacttcatttatccaggtacatatgaatgtcttgttttcctgaataagactttagcttttcaagaaatgcacagtgcaaagattgagaaagtttgaaatagagagaaaaagaaaaaaagtcctaacaacacaagttttcctgtattcatccttgtctttctttacttgcatgtgtttgcatagctataatgatcgtccatatgtaaatttatatcctaagttgtgcgtttatgttaatttttatattggtatttggtctttgtagttgccatttttggtgtctgcttattactcccttgagtgaatgtcctgaaatttctgtgatgattcctttattattggacatttgggggtatttctaattttttgttatcataagcagcatgattgtagacattgtctttcacatggtgtttttcatattttgactttttccttaamgttcatggccaggagtgcattgccaaattgtatttgccaactgacaatgccatcagcaaaccaaaaatacgttttattgcacccgaagtagcaaagctttctagcttttggttatatatattatgcaaacttgcaaaaagtaaccccattgccttttgatttgcatttctttcattacttgtgatgaacagttttctctcttactggagctagttgttcttcctcttttatgatttttcaaaaccattatgatagcttcttgaattaccttaaaaatggttttctgtgtacctcggagcactattacattgtcatcaatagttatttagtgcctaccatgtgcacagaactgtccaggcacttgctgtgggcttgctaatgcaggagagct

SEQ ID NO: 53362 - DNA, 491 bp, Homo sapiens
ttatgatctgagttagtggttaacatcctgtatgaaaagataggatttgcrtaactgaaataatttaactgacttcatgagtgagggtttttctttttgtttataggttttgggctggaggatagttgcaagtattgtttggtcagtgctatttctacccatctgcaccacagtatttataattttcagcaggattgatttgtttcatcctatacagtggctgtctggtaggtgatactcaacttggggagaaagttataggacctacttctcaacataaaaattgcattatgtttcaagcagtttattttcaattactgcctatgttatattgacacatcaaaacattcactttgagataattttaagatgtctccttcgtaacataaatcacctttttattatgtaataagattaataagcttgtcaaagactgtgatcataggaacgaaaagatcattagaagaccccataaatgaaaacttagtttc

SEQ ID NO: 53363 - DNA, 835 bp, Homo sapiens
ttgtaaatgttattgtaaaattattttatatgtcaacattaagaacaaatgacttgctctgtggtgataatacaaattttggtagagctcagtgggtaagtgccatgatgcaaacaatattcttactaaattaagaaagcctacagaacagaaaggttattggagtcggttgcagcggacatatatttcataattgcatccaaaatcctaatactcttcaaattggaatagaagtgttgttgtaaaaatttacatgcataaacacacacacacagactagctgaactacaatttttgagatggagttgacattgaacttaaaacatatttcagcatggtaatagattctttctcttttatctgcctgtattcaatagaattttagaaagtttgaacttttgaagaaatactttataaatcaagcttagtgtcctataattgtgttgagtttcttgtgtgaatgagtccttyaaattttgttctcattttgtccaaaatcagttggaaatacttaatctaattattaaacaaaaggagtcttccctaaagtctacgtttttaatatattatcttgtgggaataatcttttattagaaatcttattcagaattatataaatgtatatttattacacaaattcaaatgagagattccccatctttgcaacatctaaaactggtgaatacaaataataatttgaggcattttatttgataagttttatcttgaaaatatttctcaaatgagttttatgacacataaaatacaacttttaaaaagatttttaattaaagattactttataaaatatattctgcagaaaaataccattggc

SEQ ID NO: 53364 - DNA, 974 bp, Homo sapiens
cccagtttaaacaaataaagaaaaccaaatttaaatccatttcttatccaagttgtggcaattggcttaagagtcttcaaagatagcagatagattcttacagacactgtggtagtagttattaagaaattattttaggcagatagagaggaaaaaaaggggtccttggaagattttttttttttgcagctcttgtctagcacgaaagttctggctcttagaccctgctggccacctttgatatgcaaatgccagccataagaaactggtccacccaacatggtgattcccaccattgtcctctcgcccttgcccccacatgtgcctggcagcatggccacccccacatatccctacgtgtgtggaacatcatggcgccctgcatttgagtattaaaaggctagsgtggaagggccagttttttcgggggctacgtgaataacatccctagtcaaaccaatcccctgagccctatgcaaatcagacaccgcctcctccagccatcaaatatagctggctgatattacctgaaagtggggttccctctttctgctttggaggcccctccctctgtctgtgcacaggggagcttcttctttcccccttctttcttgcctattaaactctctgctccacatgtgtccgtgtcattttctccaattcaactcgagacgaagaacccggtgtttttccacttatcggagccttatcaatactttactagctatcttgttaaactatctgttgttgatactctagtctacatatctggtgaattttttttctgagaaatatagatttggtactagaaattttttccgtgcatgcctaaagtcggaagttcctatttggaatttgttgtccaatatagtttagaaatataagataagactttgtgcgcgtccgtgtgaagagaccaccaaacagccaaacagactttgtgtgagcaacaaggctgtttatttcacctgggt

SEQ ID NO: 53365 - DNA, 974 bp, Homo sapiens
cccagtttaaacaaataaagaaaaccaaatttaaatccatttcttatccaagttgtggcaattggcttaagagtcttcaaagatagcagatagattcttacagacactgtggtagtagttattaagaaattattttaggcagatagagaggaaaaaaaggggtccttggaagattttttttttttgcagctcttgtctagcacgaaagttctggctcttagaccctgctggccacctttgatatgcaaatgccagccataagaaactggtccacccaacatggtgattcccaccattgtcctctcgcccttgcccccacatgtgcctggcagcatggccacccccacatatccctacgtgtgtggaacatcatggcgccctgcatttgagtattaaaaggctagggtggaagggccagttttttcgggggctacgtgaataacatccctagtcaaaccaatcccctgagccctatgcaaatcagacaccgcctcctccagccatcaaatatagctggctgatattacctgaaagtggggttccctctttctgctttggaggcccctccctctgtctgtgcacaggggagcttcttctttcccccttctttcttgcctattaaactctctgctccacatgtgtccgtgtcattttctccaattcaactcgagacgaagaaccyggtgtttttccacttatcggagccttatcaatactttactagctatcttgttaaactatctgttgttgatactctagtctacatatctggtgaattttttttctgagaaatatagatttggtactagaaattttttccgtgcatgcctaaagtcggaagttcctatttggaatttgttgtccaatatagtttagaaatataagataagactttgtgcgcgtccgtgtgaagagaccaccaaacagccaaacagactttgtgtgagcaacaaggctgtttatttcacctgggt

SEQ ID NO: 53366 - DNA, 617 bp, Homo sapiens
tgtattattattttactaatatctgtagctattttgttttttgctttggttattgtttttttcccttttcttagctatgagctgatcattgctccttctcacctcctgccatgatactgtcagttaccttagttaacaagctgaatatttagtagaaatgatgcttctgctcaggaatggcccacaaatctgtaatttgaaatttagcaggaaatgacctttaatgacactacattttcaggaactgaaatcattaaaattttatttgaataattatgtgctgaaatttgagtatctgatttttctagaccttccctcctattcctgcccaacctagataagaattatgaaatgttctgtgtttattgctattgctttataatgtgatggtcagggaccattttgatgcaaaactgatctctcagcagtacatttgatgttattttgcacaggctataggtttttgtttgatgagtgtttccaaagaactatttttctctgttagatagcatatcaagtataaggtaaacatattttcagagaaaacttcattttaacactaaaaattagactcttgtgatrcagaattaagtataaattttacttggcaaaaactc

SEQ ID NO: 53367 - DNA, 1118 bp, Homo sapiens
tcagccctgcctcatcaaatactcagattgttcatggtagtgaggattttagacgctgaaattagagtgaaggatgaaatctacaagatctacaaaattgagacaaaatcagagttgtgtgaatttgtcacatctgcccagatccaacatcttgagagtaggattagggcgccacaggcatggcctgagactaggaagagagccttgctcactgacccatcccttgtctgggcttccaagtggaactagagtttcactcaacctacatgtgcctataggtcctccctgtggcaatgacatctctcagctcagtaagggccacttgcagtaggaatatgaccctaaccagaagactcagtggatccttatcaccttcatagaaaggtactcaccatccatgtcaacagccaagccaacacgctgttgctccaatacrtaaaaggcacttctgtagggctggcatgagtcagtcagttcaagacaacctgaaggagttgaataacatctatccagtgagtcctgcaagacttcaggccctttctcatccagcagctccctgctgagcctggaaaagtgggaaaaagtaaagaataagccagggggaatcagaaaccacacagccccagctagatttcatggctaacgtaaggaagagtttgaaaagaaaaaggacagatccattaatgaggtaacaaattattgcctttatgttgggatagaacagggccaggtagaaaacaatgaaagagaaagacagagagagagagacagagacagagacagagacagagagaaagtgacctagtgaattggccaggtgacatactggtaagggagtcaaaggacactctgacttagtgccctcatgacacacagcaaactgtgatcatgaaaagagtgagctcaatagttttccataaaatatgctcaaaattcgatgcagtggccatgagagtacagcttttgaagtatggtcaacctatggtacgttaggaaatgataaggggaggaagaaatggaaacctaaacatctactgcaatgaaaaccaacagcaatgacagtaggagtaattcagccttcgctgaaaacatgtcatcaaacacactctggtttccct

SEQ ID NO: 53368 - DNA, 598 bp, Homo sapiens
ctctattagttccactgggggaaagagaaagaaacatgatgaaaattgtcatttaaaacagagaaagagggaaggcacatgaacaagtggtcacagagcaaagagaaaagccagaaagggaccagaaaaaagaaattccttaaagaaaaagccaaaagtatcaaaagcccgacaagacaaatttgattatttgaaaaagatgttgacaatggcttcataaaagttgtgttaatttttttaaagaagatttaatgagaatggtgcaatgagaatcctgaaaaggtaataatttgagtartacatggaaggcatgtgaatatattgttagtgtagacaacactttggaaatatttggttgtaaagagttagaaagaagttagaaaggttgagggagatctagggtcctaatagagatttttttgtgagtgatttttgttttggtttgaaaatggaaaaatgtgattataaaaaatgtgtaaggtatgattatattagaaagaattattcaagagagaggggctaggtataaaaagagataaattatagagaaagaactaccaagaaggtaagaaaacataagacctggaacacagggagc

SEQ ID NO: 53369 - DNA, 535 bp, Homo sapiens
tatcaaacgactgcagacatgaatgaatgaatgaatgaatgaacgctttagcctgacttcataccacataggtaagtttcaggatgttagcacagctaaaaagcaatagggcaaattacaaaacaaaaaaagaaagccaaaaaaatacaaaactgtcatgagcacgcctggcctcgtagcaacccaccaatgggactggaagagtcacgtgaacacacacccatttgctggctttagctcatgtcctggctgtacaggacttgcctctgtttcgcagccatattgctgtttaatttattcagggagaattcacatagcataaaactgagcactctaaagtgagcaatccctggcacttagtgcactcacagtgtcatacaaccagcctcaccctctagctccaaaacaccccttctcacccgagtaaaaccctggccccatgaaacagtgtctccccagcccttacagccaccagtctgtctctgtggmttcacttgttctgatataaaatgggtggtaccatatgtggcctctc

SEQ ID NO: 53370 - DNA, 683 bp, Homo sapiens
aaaaattgccaggcgtggtggtgggcgcctgtaatcccaactactctggaggctgaggcacgagaatcgcttgaacccgggaggcggagtttgcagtgagctgagatcctgccactgtacttcagcctaggcgacaagagcaaaactctgtctcaaagaaaaaaaaaagatgctggccaccttcagagctggcgtcagtcattcagatcatatctgtgcctattgctcagtaaagtcagggaatcaggggatctgagtggggggatctgccagcctcctcctccccctccccactcttgacttccttatggtcyaggctgtggctcattccaaacatgcctcctttctgatcaaggcactcctccctccgggaagccctccctagccatttcagtccacacaccctgttctgagtatcacagagcaagccttgtgcagtttggcccgcgggattctgtcattattatttccttggtgtgttaagtagctatagccaccccttccctgaggcagaccacaataagcatttctttttcccatgagggttggcaggtgtggctgcactcgctaatgcgtctgtagggtcaactgacggaggttggccctggctgggtggctctgattcaaataatgggtccagctgagtctggctcctcgttgagggttgggcctagatctgctcc

SEQ ID NO: 53371 - DNA, 2888 bp, Homo sapiens
  misc_feature (1)...(2888): n = A,T,C or G
tgaagtcagtccagagaaacgcaataaatgtcaacggtgaggatggtgttgaggcagaagtaggaccacactttttcctatcttattcagttgataacaatatgacctaggtagtaatttcctatgtgcctacttatacacgagtacaaaagagtaaaacagagagactgctaaattaaagggtacgtgaagttcttcatagtaactccgtaaactggaacactgtcaaaaagcagcagctagtgaattgtttccatgtatttttctattatccaataagtgaactatgctattcctttccagtctcccaagcacttcttgtccccatcaccacttcggtgctcgaagaaaaagtaagcaaatcaaggaacacaagctaaagaaacacacacacaaaccaaagacaactacagcgtctgcaaaagtttgctagaagactgaaactgttgagtataaggatctggtattctacgatcatgagttcacttcagagtttgttcaagacatacgtttcgtaaggaaacatcttagttagaagttattcagcagtaggtaccatccctaagtatttttcaccaaatccgtgacaataaagagctatctaaccagaaaaattagcgagtacgggcaccatccatagggctttgtctttacgcttcattagcacttaccatgccttacaatgtctaggattgaccctgatagcatttcgaaaacaagctaatgctttgtccagttcttcagtgaagacaactcacgccctaatgcgctataggcataagcatcatttggatccacttcgagagttctctggaagaattgaatcgcaatatcgtgttcccgtttgcagaccgaaacagtttccctgcagcacaccaggcctctggctggcgaatttttatccatgtctgtgaagtctttggacagaactgaaagagcaacctctttcggaggatgccaaagtgttgtagagtagatctccatgccttcgactctgtaattctcaatcctcctaacctctgagaattgtctttcagcttgcgtggactctgaaagtttacaataggccntttccgatttggcacagtacccaaccggtattgcagtggtgagaagctagatggctcaagatgctgatagcttctttgccgtggtaagaacacaaagctaaataacctttccccctttcacgaagaaggctcatcaagccttccgctgctgctttttgtagattaaaagcctgaatctgaggcgcgattgcggctattttcccttctgaaatgacggaagagtccaattttgtcacttccaggctatcacttatgttcggtggagttattgctcctttattagttttacttttggttcttctgtttgggattttaggtggaaacttcatttttaattttctcctaattctcctcggttgtggagctgtcactagtcaagagtcgtgaatttcttcgaggncggtgcatttgggggagatgccatagtggggctcaatacctgaggtgttgcccttgtcggcggaccagaactttgtgtttttgcaaggactggagttacctttcggctctttcccctctgcgagaagacagacggtgttccggtttggccgattctggcaacaggcttttctgaaggggctccggtggatggcacgtcagtgacagacggtgtctcataccagtgcagttttgtcaatagggtccgtctccgggacttggggtttctaatggcaaaatgccaacacttggggttaatggactaacagctgctggtcctcctaataaacttcgaccagtttttggtttatgttgaacctgtttagatcatatggaagttcctgttcccagtgggacagtatcaggtgaaaggacagctgaatcgatagaagacactggggagtctgtattcaaggagtactttgaattggaagattctaaattccatccgtttcattcgacggtgtcctggggtgtttccgtaagaacggtctcgggctgtctgtgacataaactaggacgaggtccaagtgttgtggcgcaacacttggacaggcagttgctaaagctctctagagaggtgaatcaaaatgtttggtcaggatctggcttttcccccctatttcacatcatgattcaaagggacaccagaggaaaggatttcaacgaaggctcttttggtcacattctgatcctttggtaagccgatctgtcttgcaatatacatgtcccgacgatggaaggggaaagcgagctgaatcaccaaactcaggaacgataatatcatcgtggcttttctgcttatgaaacactccacccgataagatttgatccccttctgcaagcttgctgagatcaacacaacatttcgcaagcaggcatttgcattgcggggtagtacaactgtgtcctttcaagagtctatatgttttataggcctttcctgagcggtaagaacaggtcgccagtaagaacaaggcttcttctgagtgtacttctgcataaaggcgttctgcgggggaaaccgcatctcggtaggcatagtggtttagtgcttgccatatagcagcctggacgggtccctgcagcaccgccatcctcgaggctcaggcccactttctgcagtgccacaggcacccccccccccccatagcggctccggcccggccagccycggctcatttaaaggcaccagccgccgttaccgggggatgggggagtccgagacagaatgacttctttatcctgctgactctggaaagcccggcgccttgtgatccattgcaaaccgagagtcacctcgtgtttagaacacggatccactcccaagttcagtggggggatgtgaggggtgtggcaggtaggacgaaggactctctt

SEQ ID NO: 53372 - DNA, 1171 bp, Homo sapiens
ggggtataaattgagtatagtctattggctttctttttttgaaggttttcagaggactaggactctgtacagtgtctttgttgttgaattcttgctcttggtttcacaggggaagaattagtaaagtgatttttggtggtgtaatctctactgcgatccagtagatagcacttgagagcagtgggatgtagataggttctttaccatgcagttcctttgtgtatcttctttatttgcaactatgttctgtggtacaggtctgttcatgagtcttgagagactcacttccaatcactggcactatgcccattattattactatcattatctccttttttttttttttttttttgagacggagtctcgctctgtcgcccagagactggagtgcagtggcaggatctcggctcactgcaagctccgcctcctcggttgatgccattctcctgcctcagcctcccggctagctgggactacaggcgcccgccaccacacccgactatttttttgtatttttagtagagacggggtttcaccgtgttatccaggatggtctcgatctcctgacctcgtgatccgcccgcctcctcctcccaaagtgctgggattacaggcgtgagccaccrcgcccggcctattactatcattatcattattgtcattgttgttaggtgtttcaagctgtggggctccctcagggagatgtcttctagaaaaataccctgcatctttaccataacagccctgtggaaggaggtgtgcctagggcccacgccagcctgtgaacctgtgtgaatctggcctctcagtttctgaagagtgtgggttcctcccccattcaactgcccagcacagatcccagcttggcactcctgaaccacaggccacagcactggagtgccacgacttgcttatgactccctcttcctgatgcttagggccaggttccaagtgtggtgagggatctgagggatttctgggccgccagaatgcattcaggtggagccaagcatccaggttgggtagcagaaactacaatgtatacatgcttctcccaggaagccaggcaggggccatgtaagaggctggtggacaggcatgcctacaggatagacatgtcccaatcctgcgggtaagcaggccttgctttctccctgcagtttagctgggg

SEQ ID NO: 53373 - DNA, 1244 bp, Homo sapiens
ttataaatagcaaaatcattgaaaaatctccagggccttcacataaagcatgcaatttctgaaatattgatattaatagcattttacctatgaaaatttagcctaggaaagcctgaacatctcttctgatttgattgctcttcccatgatgatcttgtaatagtgttgaagtatttaaaacatatagagaaagatatcttaaaatttttattgtatttttttctaaatttaggatctgatcttgggaaggcaaaatcaaaagaacggttagagaagatttaggcactagattaagacgtcatgggagaccaagaaatattactttgttatctatttaatcgaagtaataataaaataaaatattttgaaataaacatagaagaaggtaatatgattacaagagtagatagcttttttataagggagatacctttgctttttgttttttaaaataagatataataagttcaaaacaaagcagaggaaatgattctggggagatagatagggaatctctgttatctgggaggcttacacagaagctaaacagtagcctctttttaacccttgctaagagctctaagaccaatttattattttagtagagataaagataaattctagttttgctttaatagaatatgtggccataaaattttcatgagtttttattatttctttttacttatttttatttatttatttttatttttattattatyatttgagacagtttcactcttgttgcccaggctggagtgcaatggcgtgatcttggctcactgcaacctctgcctcctgggttcaagcgattcccctgcctcagcctcctgagtagctgggattacaggcgcctgccaccacctctggctatttttttttatttttatttttagtagagacgggtttcactatgttgaccaggctggtcttgaactcctaacctcaggtgatccacccgcctcggcctcccaaagtgctgggattacaggcatgagccactgtgccaagcctatttatcatcaatttttaagcccattaaaactgggccaaatttggcaaaatgttaatacatttcatagcttattttcagactcaggcattataaatcaaggcaaataaaattctctttcagtaaactttctacgacattctatatccattcaagttttgcctttttatcctttttcatgttgtagaataaccagacaatttcacacaacagtgcatcccattttccttgc

SEQ ID NO: 53374 - DNA, 1368 bp, Homo sapiens
tacctaggcaattcacagattcatgagaactaacacatattttctgtttagacaattatgtttcgggtactttgttgcgtgatgaaagctaacatatacagattggttttattctccctagcacagtgtcctgcacaattaccctcaataaacaactacagaatgaacaagtggaatgaaaacatttcaagtatatggaaagaaaatgtcaatattcttagtggtgcaagctggtcatcacccttataaatcactgatatcaaaatgagaaaatgatccacagtagccactggtgccttgcatggtcagaggtccagttatgagaacatccagcacttcaaaggtctgagtgtgcgctagtggcctctgtgaattaatttcattgctgagattattttctcctgcagttccaatctcatatttccattgttcctaatttataatctgatgcaaaccatgcatctttacttgtcagatcttatcaggtggcttcccaaattcctattcttgctctcagctatctaactttgcttttctcattttgtaaaccccctgcctctcatccatccttccttccttcctctgactctacacatcgcaaatctgctccagattaggcaagcccctgactgctgtttctaaagggagcagattataatattgctttaaattatattaaaagtgggcatatttctaagcccctctgggtgcagacacaaagtccctgccatgtttccatatttattgtctagatttgtggtcctacacttgctgatcatcctacattgggaagcaaatgacagatggaaacagatgggctggcccagtgccttctctagcagcatggtctagctmtgccacgtgagaaggggaagccaactaaagacatgtctctattatggaaagcagcctcccctagccctctgacattattataccacagaatacttccaactggtcacgtgtgctaaggtagaaactgacgagagatcgctgagaggctgaaactcaagttactcagagcttaggagatgaaaaccatctttttaaaaggttctcaaaaggagttgcaattggagcctctagaacagtggttctcagtgttggctggccattgggatccttcatggaccttaagaaagaccgaagcctgaatcccaaccatagagattctgatttacttggcttcaatctatttgaaacttcccaaggtgattctaatgtgcattcatggctgagaaccactgacctagaagatggtagtgagaaggtcatgaatagtggtaaagcaactgtatcaagtaagagccccaattaagtaactgcagctgaccttatcatcactattccctaccaggaactatgaag

SEQ ID NO: 53375 - DNA, 1368 bp, Homo sapiens
tacctaggcaattcacagattcatgagaactaacacatattttctgtttagacaattatgtttcgggtactttgttgcgtgatgaaagctaacatatacagattggttttattctccctagcacagtgtcctgcacaattaccctcaataaacaactacagaatgaacaagtggaatgaaaacatttcaagtatatggaaagaaaatgtcaatattcttagtggtgcaagctggtcatcacccttataaatcactgatatcaaaatgagaaaatgatccacagtagccactggtgccttgcatggtcagaggtccagttatgagaacatccagcacttcaaaggtctgagtgtgcgctagtggcctctgtgaattaatttcattgctgagattattttctcctgcagttccaatctcatatttccattgttcctaatttataatctgatgcaaaccatgcatctttacttgtcagatcttatcaggtggcttcccaaattcctattcttgctctcagctatctaactttgcttttctcattttgtaaaccccctgcctctcatccatccttccttccttcctctgactctacacatcgcaaatctgctccagattaggcaagcccctgactgctgtttctaaagggagcagattataatattgctttaaattatattaaaagtgggcatatttctaagcccctctgggtgcagacacaaagtccctgccatgtttccatatttattgtctagatttgtggtcctacacttgctgatcatcctacattgggaagcaaatgacagatggaaacagatgggctggcccagtgccttctctagcagcatggtctagctctgccacgtgagaaggggaagccaactaaagacatgtctctattatggaaagcagcctcccctagccctctgacattattataccacagaatacttccaactggtcacgtgtgctaaggtagaaactgacgagagatcgctgagaggctgaaactcaagttactcagagcttaggagatgaawaccatctttttaaaaggttctcaaaaggagttgcaattggagcctctagaacagtggttctcagtgttggctggccattgggatccttcatggaccttaagaaagaccgaagcctgaatcccaaccatagagattctgatttacttggcttcaatctatttgaaacttcccaaggtgattctaatgtgcattcatggctgagaaccactgacctagaagatggtagtgagaaggtcatgaatagtggtaaagcaactgtatcaagtaagagccccaattaagtaactgcagctgaccttatcatcactattccctaccaggaactatgaag

SEQ ID NO: 53376 - DNA, 783 bp, Homo sapiens
agactagattcagaaatgttaataccttttaaataggagctccagaaagagggactagagaggttggatgtggggaacgctaagattaatagagaaggaaatttctcaagtctacaaaagacaaaagtcctcatcctgaaggggcccacttcatgacaagcagaacagaaaatgatagactggctgggctgaaacttagaacmtgaaggatggagaaaaggaaaacagattactcctaagagaaagcagactaatattagatttagctacaacactgcatgttggaagatcttcagagacccaggggaaatatttttagagatctaagggacacatgtttgaatcggctaaagccatcattcaagtgtgaaggtaaaatatgtaaagacaatttcagacatccacagatgagaaaatgagtcaccttccatcctacctgtaggaggaggtacttcaacacaatgaaaataaatccaagagaaagctacagattcaagaagcagtggtgagtaaaggaattagaatttgctgctaagtctaaatggaactggaactaaaagctcaagtggtattaacattgcaggtggggaggagaaggagaggaaggaagtccaagtgggctaaggtttgtgctttgccgagcataatgacaaggggcactacacttacacaggctataagggaaaataaaataatggacagatgttggagttaaaatttaaaggtaagcacttaatcagaaattaaatgaagaagagctggtcaattgataaaaaaggaaaa

SEQ ID NO: 53377 - DNA, 658 bp, Homo sapiens
acaagaaacagagctctaatttgaataaataatccaattcgaaatctgtcactgttttttttttctttttttgagacagagtctcgccctgtcacccaggctggagggcaatggtgtgatctcggctcactacaagctccagctccctggttcaaatgattctcctgcctcagcttcctgaatagctgagattacaggtgcccggcaccacacccaggtattttttgtatttttagtagagacagggtttcaccatgttggccaggatggtcttgaacagctgaccccgtgatctgccctccttggcctcccaaagtgctgggattacaggagtgasccactgcacccggccactgtttttatattttactgtctaatcagattcaaagacctgtgtcatctgacaggcacatttccccctaatttgctatgaatattaaaattctaaagagaaatcatgtgacggttttcagagagattggtgtctattccaataaggccccttctctgacacctggatctcattaccagatcctaggctgtttcttgtcatttctggaacttgtcctgagtatttgcagagttggtcagactttgggggagtaactcatactaacccaaacctatcagacaaatgtataatgcaaatcaccaatgt

SEQ ID NO: 53378 - DNA, 640 bp, Homo sapiens
ttttgcatggctaaaattgcatcactaaattttgagggccgtttttaacttacagtttaccatgatttcttggctgacaaatcataggtgaccatttctcaccattctcccatgagaaccccgcactgcaaactacctgtcatgtccaaacttgtcctggggctcaaagcttgtcagggattaaggagaatgaagcccgaaagtgccttagggacatcctgtcttcactgctgtcatagagccagggcctgggcagcacaaggccacatgctttctgagcccaggccagtcccagcaagctcttmtggaagcacttttttttttttttgttttgagacggagtctctctcttgttgcccaggctggagtgcaatggtgtgatctcagctcactgcaacctctgcctcccggattcaagcgattctcctttctcagcctcctgagtagctgggattacaggcatctgccactacacccagctaatttttggtattttaagtagtgacggggtttcaccatcttggccaggctggtctcaaactcttgacctcaagtgatttgccagtcttggcctcccaaagtgctgggattataagcatgtgccaccatgcctggccttttttttttttttttttttttt

SEQ ID NO: 53379 - DNA, 537 bp, Homo sapiens
ggctccctctcttctctcctcttcccagaaagaaactgccatcaggaggtggcattaattaacaatgaacaccagaggaggcatcgggccaggcaggtgacgccagcttaggaagcacctgatgcactggtccccacgggaccacatgccaggagagccacgggctgtactcaggcatcttgtctattgaagaagatactaaatcaactgcttatttatttatttttatatgtattttttgagacaaggtcttactctgtcacccaggctggagtgcagtggtgcgatctcggctcactgcaacctctacctcccaggttcaagcaattctcctgcctcagcctcccgagtagccgggattrtaggcacccgccaccgggcccagctaagttttctatttttcagtagagacggggtttcaccatgttggccaggccggtcttgaactcctaacctcagttgatccacacgcctcagcctcccagagtgctgggtctacaggcgtgagccaccatgcccagccttattttatatata

SEQ ID NO: 53380 - DNA, 537 bp, Homo sapiens
ggctccctctcttctctcctcttcccagaaagaaactgccatcaggaggtggcattaattaacaatgaacaccagaggaggcatcgggccaggcaggtgacgccagcttaggaagcacctgatgcactggtccccacgggaccacatgccaggagagccacgggctgtactcaggcatcttgtctattgaagaagatactaaatcaactgcttatttatttatttttatatgtattttttgagacaaggtcttactctgtcacccaggctggagtgcagtggtgcgatctcggctcactgcaacctctacctcccaggttcaagcaattctcctgcctcagcctcccgagtagccgggattgtaggcacccgccaccgggcccagctaagttttctatttttyagtagagacggggtttcaccatgttggccaggccggtcttgaactcctaacctcagttgatccacacgcctcagcctcccagagtgctgggtctacaggcgtgagccaccatgcccagccttattttatatata

SEQ ID NO: 53381 - DNA, 2918 bp, Homo sapiens
ctggagcaggagaggcttcggcaacaggatgagaggctgtggcagcaggagactctgcgggagctggagaggctgcgggagctggagaggatgctggagctggggtgggaagccctgtacgagcagcgggccgagccacgcagcggcttcgaggagctggtacgttgccccacctggggaggctgccctcttccctagccctcaaggcctttgtttccccacctgtaaaatggggcattgtagccttcacatgaaatggtacttctaaaggcatctgtgagccagagccccgctctgatggctgtgggagagaggggatatttttctaacctgcctccacccttcccggtgccatgggaggcagacactaagttctggggtctccagttttagtgggtggccactgattgcttctctctgtccagaacaacgagaacaagagcacactgcagttggagcagcaagtaaaggagctggagaagtcgggtgagctgaaagagactgtaacctccgacccatccaagaagatgtgggaggcgggcaccagcctctggggaggggaggtgccaggccacaggcagctgcagcctggggacaggtgaccccagcaccctccggggcagtcctatgactgtttcttgcttcctgccctctgacttttagaggtgggtagccctggggccctcccaggtctggacatcatcatcatcccagctagaggcatggagccccccaatcacagaggaagagacagtggtataagaggctccttatgtcgggtgtggtggctcacgcctgcaatcccagcactttgggaggctgaggcaggacaatcacttgaggtcaggagtttgagaccaacatggccaacatggtgaaagctcatctctactaaaattaaaaataataataataattagccgggcctggtggtgcatgcctgtaatcccagctactcaggaggctgagacacgagaatcacttgagcccgggagatgaaggttgcagtgagctgagattgcaccactgcactgcagcctgggacacagagtgacactctctcaaaacaaaacaaaacagaaaaacaaaaaagactccttagattcaaactggattccggcctcggttccactggtcataattcaactactttgcatctctaagtctctgtttctttaacttcaaaaggaagttagccttttccttgcagaggtgctgaggattaaatgagataatacgtggaaacattaggcatgtagcacacttagcagatggtggttggctccgcctgcttttccaccagtctgtggcctacagtttacatgctgggaaaaaggacgtgagatttgatgctagggaaggaggcatggggttctaggcaagggagacagtctcttaggcctggagcaaggggccaggggcctgggcaggccacagagccccacagtgccctcgctaccctattaatgggccaggaatctggaagccagccaccacatgtcctcatgcccagggtcttccggcaggtggagctgaagagccaagaggctccgagtctgcagcagcagccagaccagtacctggagccccagtcccacaaggagcttggatgtgcggacaagcagggtggtgagtagagccctcaggcggggtgggcaggcaggagcaggggaggctcgcactgtgcccagattcccaccccctccctctctctgaagatcttagtgagctgagcctcactgatagcatggaggctgcaccgggagaggacagggagggttctcccccatgacaaccccactgcacagcagatccagcagctgcttcctctaatgcaggactccccaggagcacccaggcttgagtggagaagctgttggtacaggagaggcggcaggaggagcagaagaggctgcatgccattcttttcgggctgcggagaacagggagctaaacatcaccatcatctaagagcgggtcaagaaattgaaaaaaaaaaaaacaaaacatttaaggggttaatatcctacacaattcatttacttcatttgaatgttagagccacttatgtttatttgtgtttctaatttatagtttaaatttatttgtgtttctaatttataatttaaatttatttgtgtttctaatttatagtttaaatttatttgtgtttctaatttataatttaaatttatttgtaaaaagttaaatgagagtgggtctttctctcatgttcactctggcatcttttagcatttttttaatttgataattataggacgttagcatgcatatcgagtttgcccttatgtggtgggagttcaaacacacaaagacccactgtatgcacacaactgttcttgctggtttgggataggctgccatgcttttttaatgttagtacagcctgtatattcattacggaattcagataaaatttccttatgttctgctgttatgtttgatcgaatcctaatcacagtgagctcttcattagctcaatatgkggtttgccctcaagtgcgcggtctattactttgtaatatgccactgtgagtactgacatttacagttgtttaaaggtggagcactggaaacagcctttccccctttttctgtgtattggggatgggagtaataacattttggggaggtttttaaatctcccagaagaggaaagtggcctgctttggcaggtgtgtgcaggatagaatatgtttcatttgttccggtgccaagaatgagcgctgtactacggtagttcccttaggatttgtatgtgctctgggctcatgaagatactgcctcatgagctgtggcagttgtactcttttttgatgacctgaaaagggattatttctgaggaatgaaaggctcccatcatgactgtggatgtggaaaaccttttctagctgaga

SEQ ID NO: 53382 - DNA, 546 bp, Homo sapiens
tctgggyatctctggcttctgtggatggaggccccatgggaatggcagatctggggtgggagctgagcttccagggtttcatctcatggggatagaatggaagacttcccttgccctccttcctgttgcccgagtgtggagccatctttatctcatcaggcatctgcagtgactgggccaacaactccagtggcactgagctctgtaaatgaaagaggtgagagaaaaggcatgaaaagcagcccaacccaagttgggaggctggacctgtggttcctgaggaggcctgggctccagtggcaagctgctggggcgcttccaccccacactccatccccttgttttcggacgagccgtagataataacaattccgctgaagaaactgatggcgttgcagttttgggaggttatcccaccctagtgggcggccagaagaacccaggctactaatctttagctcgggggttatttaactggtctgacatagtctcctcctcatgtgcatagtcatttgggaagaatcagttaccatgagaggttcagac

SEQ ID NO: 53383 - DNA, 622 bp, Homo sapiens
ttgctacttaaggacagccgggctgacgctccagctgctgtggccggaggtgcagccccgtcaggacggctccactccctggcgcctcacagactctggggctgcggtgaggtcgccctgaagaccccctggtgaggacgcttgaacccgggctgtcacctgagcacaggctgccactctgagcttttggggcgccctgtgcctgtcgggctgatgctcctctggctcccggccacctggggctgacaccggttctgtgggtcctgatatgttcacctgtcgccactcctgtggccacagctacccatgaagcgctttgggagcctcaggagcaacaagaaacacaaggaccaaaatcgaagcacggagaggcgccagtcggagcctcatggccttttcggtaggactctgcccattcccgagcccctggtggtctgtccttgggagggaaccccacggcgtgtgtgcacaccctcctaagcagtagctgtttccagccactctcttccaactgggrtataacatcaggcggtggttagaggaatacgtgggaagtgtttccttgctgatggcagtgctgctgtggggagccgcctgacaatactctttctgaagctgtttc

SEQ ID NO: 53384 - DNA, 2082 bp, Homo sapiens
ttttacactcattgagtcaggcatcatcatacatgctagagtaagcaataatgtttttcttctggaaactctttagggaactatttaagtgcttattgttaacgtgtcttaaatcttacagagtagctttgagattgaggtctaaaaacatcaacagcaagataataccacacagaactcccatctcacaggtctctggatctcaaactatgcaaaactaaaaactaagcaacattctatggatccaacacttccattatgcttaatgtttgtcaacgttgttttarataattggtctactccattttcaggaatctatcggtaggtcttttattttcttcacagattacttaatatcatggaaaatatcctcttatatactgtttaagctgcacactattcaattgtataatcttactgcagtcagagctgcaggagtctctccccaaatgtggggctatgctcctagaaattagcatggttgagaaaaaaaaatctgtctgtgtttggcaagaacaacgtatcataaaataggaggtttggtgggaagtaataaaggcgttacatatataagtgcacctacacacgcagagaaatttagtttcagaaggcagctgcttccaaaacgaacaagacataattcatgttacaaaccaggttctaccagtaactgtcctctttaaccaccttatatttttcagaaaaacttggtgtacttttattttcttccaaggcagaatctccaaaaattttggtattatgtaactctatcactttaagcattttattaaaactagtccttgctggatttaaatgccatgcccttttccttgaaatgcctccttctccccagtcccttaacaccctttcactaatttccgtttttcagattttagcaaattgcttatatcctcaagcaaattgcttgagaaaatgtccacatgacattttctcaaaattgcagttggcctttgaacaacacgaggtgttggggtggcagtctcccccgctgtttaaaatccatgtataattttgactccccagaacttaaatactaatagcttactgtggacaagaagccttatcgataatataaatagttgattaacaaatattttaatgttacatgcatcgtatactgtatttgtaaaatacagtaatctagagaaaagaaaatgttcttaagaaagttataaggaacagaaaacatatttactagacaataagtggaagtgggccacagtaagtcttaattctccttgtcttcacatggtgtaggctgaggaggaggaggaagaggagaggttggtctcactatctcagaggtggcagagaaagaaaatccatgtacaagcggatccatgcagtaccaaccctgttgttcaagagttaactgtagtataatgcataggcactttttcttgccctgctcttctagccattcttaccaacacaacatcatggtttgcgctacactgagcatatttaaaaatgactgaggacttaaacgtttgtgatacaaatccagtgctatatcatctcagcactatttctggaaaaacaagttgctgaactaaaagtgggaattcacccaaaagtcttgtgaaatctattcatgggtctagtgtgatctaccagatgaggctagtgtgattctgtgtgttcgttttattgaaatgcaatgtgaaggtggttttatggagctctaagaggacatcttggtcttagaagtgtacagcatggactctgactcaaatgctgcttagctggccttcttctggggacttgtgtatatacagagacaaacagcagacaaaagccaagacagacagaaatgcccatgagtgatttcttgcctgaggcctgttcagagctgggaatggaggctttcttcttactttatgcgccccctggtaccacctaggtgaagatagcaggaaggcaagatcaccttaaaacttctggatttaacccgttcaggacagtagtccacataaacattggcaaaaatatcattttcatgtatgctttgcaacctgtgacatcaattcgtgggattagataaagtggactgaaattgca

SEQ ID NO: 53385 - DNA, 2082 bp, Homo sapiens
ttttacactcattgagtcaggcatcatcatacatgctagagtaagcaataatgtttttcttctggaaactctttagggaactatttaagtgcttattgttaacgtgtcttaaatcttacagagtagctttgagattgaggtctaaaaacatcaacagcaagataataccacacagaactcccatctcacaggtctctggatctcaaactatgcaaaactaaaaactaagcaacattctatggatccaacacttccattatgcttaatgtttgtcaacgttgttttaaataattggtctactccattttcaggaatctatyggtaggtcttttattttcttcacagattacttaatatcatggaaaatatcctcttatatactgtttaagctgcacactattcaattgtataatcttactgcagtcagagctgcaggagtctctccccaaatgtggggctatgctcctagaaattagcatggttgagaaaaaaaaatctgtctgtgtttggcaagaacaacgtatcataaaataggaggtttggtgggaagtaataaaggcgttacatatataagtgcacctacacacgcagagaaatttagtttcagaaggcagctgcttccaaaacgaacaagacataattcatgttacaaaccaggttctaccagtaactgtcctctttaaccaccttatatttttcagaaaaacttggtgtacttttattttcttccaaggcagaatctccaaaaattttggtattatgtaactctatcactttaagcattttattaaaactagtccttgctggatttaaatgccatgcccttttccttgaaatgcctccttctccccagtcccttaacaccctttcactaatttccgtttttcagattttagcaaattgcttatatcctcaagcaaattgcttgagaaaatgtccacatgacattttctcaaaattgcagttggcctttgaacaacacgaggtgttggggtggcagtctcccccgctgtttaaaatccatgtataattttgactccccagaacttaaatactaatagcttactgtggacaagaagccttatcgataatataaatagttgattaacaaatattttaatgttacatgcatcgtatactgtatttgtaaaatacagtaatctagagaaaagaaaatgttcttaagaaagttataaggaacagaaaacatatttactagacaataagtggaagtgggccacagtaagtcttaattctccttgtcttcacatggtgtaggctgaggaggaggaggaagaggagaggttggtctcactatctcagaggtggcagagaaagaaaatccatgtacaagcggatccatgcagtaccaaccctgttgttcaagagttaactgtagtataatgcataggcactttttcttgccctgctcttctagccattcttaccaacacaacatcatggtttgcgctacactgagcatatttaaaaatgactgaggacttaaacgtttgtgatacaaatccagtgctatatcatctcagcactatttctggaaaaacaagttgctgaactaaaagtgggaattcacccaaaagtcttgtgaaatctattcatgggtctagtgtgatctaccagatgaggctagtgtgattctgtgtgttcgttttattgaaatgcaatgtgaaggtggttttatggagctctaagaggacatcttggtcttagaagtgtacagcatggactctgactcaaatgctgcttagctggccttcttctggggacttgtgtatatacagagacaaacagcagacaaaagccaagacagacagaaatgcccatgagtgatttcttgcctgaggcctgttcagagctgggaatggaggctttcttcttactttatgcgccccctggtaccacctaggtgaagatagcaggaaggcaagatcaccttaaaacttctggatttaacccgttcaggacagtagtccacataaacattggcaaaaatatcattttcatgtatgctttgcaacctgtgacatcaattcgtgggattagataaagtggactgaaattgca

SEQ ID NO: 53386 - DNA, 2082 bp, Homo sapiens
ttttacactcattgagtcaggcatcatcatacatgctagagtaagcaataatgtttttcttctggaaactctttagggaactatttaagtgcttattgttaacgtgtcttaaatcttacagagtagctttgagattgaggtctaaaaacatcaacagcaagataataccacacagaactcccatctcacaggtctctggatctcaaactatgcaaaactaaaaactaagcaacattctatggatccaacacttccattatgcttaatgtttgtcaacgttgttttaaataattggtctactccattttcaggaatctatcggtaggtcttttattttcttcacagattacttaatatcatggaaaatatcctcttatatactgtttaagctgcacactattcaattgtataatcttactgcagtcagagctrcaggagtctctccccaaatgtggggctatgctcctagaaattagcatggttgagaaaaaaaaatctgtctgtgtttggcaagaacaacgtatcataaaataggaggtttggtgggaagtaataaaggcgttacatatataagtgcacctacacacgcagagaaatttagtttcagaaggcagctgcttccaaaacgaacaagacataattcatgttacaaaccaggttctaccagtaactgtcctctttaaccaccttatatttttcagaaaaacttggtgtacttttattttcttccaaggcagaatctccaaaaattttggtattatgtaactctatcactttaagcattttattaaaactagtccttgctggatttaaatgccatgcccttttccttgaaatgcctccttctccccagtcccttaacaccctttcactaatttccgtttttcagattttagcaaattgcttatatcctcaagcaaattgcttgagaaaatgtccacatgacattttctcaaaattgcagttggcctttgaacaacacgaggtgttggggtggcagtctcccccgctgtttaaaatccatgtataattttgactccccagaacttaaatactaatagcttactgtggacaagaagccttatcgataatataaatagttgattaacaaatattttaatgttacatgcatcgtatactgtatttgtaaaatacagtaatctagagaaaagaaaatgttcttaagaaagttataaggaacagaaaacatatttactagacaataagtggaagtgggccacagtaagtcttaattctccttgtcttcacatggtgtaggctgaggaggaggaggaagaggagaggttggtctcactatctcagaggtggcagagaaagaaaatccatgtacaagcggatccatgcagtaccaaccctgttgttcaagagttaactgtagtataatgcataggcactttttcttgccctgctcttctagccattcttaccaacacaacatcatggtttgcgctacactgagcatatttaaaaatgactgaggacttaaacgtttgtgatacaaatccagtgctatatcatctcagcactatttctggaaaaacaagttgctgaactaaaagtgggaattcacccaaaagtcttgtgaaatctattcatgggtctagtgtgatctaccagatgaggctagtgtgattctgtgtgttcgttttattgaaatgcaatgtgaaggtggttttatggagctctaagaggacatcttggtcttagaagtgtacagcatggactctgactcaaatgctgcttagctggccttcttctggggacttgtgtatatacagagacaaacagcagacaaaagccaagacagacagaaatgcccatgagtgatttcttgcctgaggcctgttcagagctgggaatggaggctttcttcttactttatgcgccccctggtaccacctaggtgaagatagcaggaaggcaagatcaccttaaaacttctggatttaacccgttcaggacagtagtccacataaacattggcaaaaatatcattttcatgtatgctttgcaacctgtgacatcaattcgtgggattagataaagtggactgaaattgca

SEQ ID NO: 53387 - DNA, 1111 bp, Homo sapiens
gtgatggatgtgttaatttatttgattgcggtaatcattacacaaggcatatataaatcatcacattgtacaccttgaatctgttcagtccttatttaaaaattttttaaaattaaagcatttgcggctgggcacggtggctcatgtctgtaatcccagcactttgagaggctarggtgggaggatcacttgaggtcaggagttggagatcagcttggccaacatggtgaaaccccatttgtactaaaaatacaaaaattagctggatgtgctggcatgcacttgtaatcctggggagactaaacaagaattgcttgaacccaggagacagaggttgtagtgagcagagattgcatcactgcactccagcctgggtggggagactctgtctccaaaaaaaaaaaaaaaaaagcatttgcaacagggaaggtaaactacagtgataacaaaatactactcattgtagaaaagacaaagtacaaatagccataggcccccaaatgtgaaatgactttttcttttcttttctttttttttgtctgagacagagtctcactctgttgcccaggctggagctcagtggcgcgatcttggctcactgcaacctccatctcccagattcaagctgattctcctgcctcagcctcccaagtagctggaactacaggcgcccgccaccatgcctggctaattttttgtatttttagtagagatggggtttcaccatgttagccaggatggtctcgatctcctgacctcgtgatccacctgcttcggcttcccaaagtgctcggattacaggtgtgagtcactgcgcccagctcccagattcaagccgattctcctgcctcagcctcccaagtagctggaactacaggagcctgctaccacgcctggctatttttttgtatttttagtagagacgggggtttcaccatgttagccaggatggtctcgatctcctgacctcgtgatccgcccgctttggctttccaaagtgctgggattacaggtgtgagtcactgcacccagctcactttttctttaatttttgctataagctcacctgatgaaaaaaagagctggaaggattagcagctatgtgaggcta

SEQ ID NO: 53388 - DNA, 1354 bp, Homo sapiens
attgttcctgcctttctttcattcttttttgatggcagaaatgawgatctttgattctagagtcggaggtgggcaggagagtgttacaggtcttacataatgcatctttcacatcttatttttaaacgcgggcataatcagggctgggcagaggctgggcttggtttgcacccgtgtgtggggagaggcggttgcctgccctgcagtgctagcccaggggtaggtggggacaggcagtcctgtgcaactgaatgaaaattactagaggaagcttcccccacttccaccccttcctaaatataacctggagggagtttttcctaattgttcccttatggtgaaaaatgtgttgagagagggcaggacaaggaaggccctgcccacccagccaggggtctcttggtggcgccctgggaggcctgcccactgtttattagtggatgttaataaactataggggacaaaccacgggggtggtgtatgaacagtaactcaggtacccaagatgaaataggggtgctctgccagatgtggggaggtggcagacatggagggggtgtcgccatctggttcttctgtacacccttcctggggcttccctccaggcaggagaccctggggcagacagagatgagaaggtgaggccttctccatggttaggaacatgcgatccaaggtgggatggggatgcgaggctggtgcagggatcgcaggttctgatgatgatgggggttctgcctgggaggtgaggaagcatgggtacaggctggcggggctggtgagtcgagatcatgcttgctcctccatctgttcctgtccatggcttctagatttccaagagaagccagtcacttgggtctttatgggaaatctcttagagatgagaagaagaggtctgccttggtcaggggacagtgatagtaaggtaggtaggaagcctggcaggtaggaagcctgggtgtggtgggagagggggtgattggagcgtccaggccactcaagtgtggtgggtctggcaggaaaggctgggagggcactgacaggggacctgcatcctccgtgtggggcgtacgcaggcctgtgtactccgagtggctgcagggctgcttcctggcagtgagctccacagggccagaaggtttttgtacatgatacctgaggcttcatgtcacctccactacgtgcctggtattcatgacggtgtggtcccctcctgccccagcatggaagacagagcctctgtgagacccgccttgcactttggatgatgctaaggaaggttgcgaggctggccttcctgcctgcctacccgagactcaagcagcaggactttcataattaatatgaattaatg

SEQ ID NO: 53389 - DNA, 550 bp, Homo sapiens
atctctttgtcttctgagaagcaactctaaacacatgcatgcatgcattcgcctgtccagtctatttttcttagaagagaatgacccttccctccctccatgaaatacagaattttgctttttgaagctgcgaagcatggcattttacagaagagctgaccttttagcacagtacctggataacactatgaaaattgctggggtagacagagcaaaggcagaggttgcaggatggggagtgacagagaaggtgacatcctcagctgaagtgtgaaggcattcacaaagattagagcagtctcatattctcaactaaggcatgtacataaagawgatgccacttggggcatcagataaagatatagaaagttcacaaagttgttgtcaccttctgttacagaaggggaatcatcagggtatatggtaactcagctggtcactacactggctgtattttccagacataatttctcaatgccacacctctatggggcacctacaggaatgtcaatcatttcgcaggcatgcctggccccaaatgcatgactgg

SEQ ID NO: 53390 - DNA, 550 bp, Homo sapiens
atctctttgtcttctgagaagcaactctaaacacatgcatgcatgcattcgcctgtccagtctatttttcttagaagagaatgacccttccctccctccatgaaatacagaattttgctttttgaagctgcgaagcatggcattttacagaagagctgaccttttagcacagtacctggataacactatgaaaattgctggggtagacagagcaaaggcagaggttgcaggatggggagtgacagagaaggtgacatcctcagctgaagtgtgaaggcattcacaaagattagagcagtctcatattctcaactaaggcatgtacataaagatgatgccacttggggcatcagataaagatatagaaagttcacaaagttgttgtcaccttctgttacagaaggggaatcatcaggstatatggtaactcagctggtcactacactggctgtattttccagacataatttctcaatgccacacctctatggggcacctacaggaatgtcaatcatttcgcaggcatgcctggccccaaatgcatgactgg

SEQ ID NO: 53391 - DNA, 634 bp, Homo sapiens
  misc_feature (1)...(634): n = A,T,C or G
acaagtgatctaaagagcacccttttttttttttgagaaagggtcttgttctatcacccacgctggagtgcagtggtgtgatcatagctcactgcagcctcgaactcctgggctcaagcgattctcctacctcagcctcctgagtagctgggattacaggcacccaccaccatgcccgactaattgtttataatttttctacagacggggtcttgctatgttgcccaggttggccttggactcctggcctccagtgatcctccttccttggcctcccaaagcaakgggattacaggtgtgtgccaccgcgcccggcccaagagcacccaattcaaacttcccacccccaactcatcatcatctcgttttcccacagcaattctcactatttaatattatgttttacctttttactagcttcctgtctgtctccccatcaacatgacttgtgccaagacaaggatcttggctgtcaacagatctcgctcaaaagtcttggctgctcaaaagtccctgcatctagaacgattcctgacacatgaactgaagagttcatccaagcaagggaccctaaagagggctttttgagagtgtaaaacgtgcgccaggcgtgagggcangacacctgaacagg

SEQ ID NO: 53392 - DNA, 649 bp, Homo sapiens
tttttggaggattgggagagggcatgcactattttctgggttgagcagttgcttattattgttttgttcaggagtcttgttttaatcaaggcctgttttcaggggacatcataatttaaccaggcttttaatcaacaacccaagaaattctaataatgtaaagactacttcaacagagcattcttctagctttaagcataaatttcagaatgcgccagccagagttttawgaaatagtaattattatttattgagtgcctatgtgttccaagtatttttcatatattatttcatttaagtcttagagccatcctcaaggcagttatcatttttcccactttaaagttgagagagttgagattcagagataataagcaacatgtccaaggtcatgttatagtacatggtggagccagaactcaaatgcacgttcccttcatttcagagcctgtgctctttctgtcaccttactgctttcacaactgcactgttctaactgtgctttctggaatgttttgctgaatcgttgccatagggcccagataggcagaagaggaatgttgtgaaaagtgctcctttgaggcagatcctgacctactgcagtgatctttccctagagaagactcacagaactggcaatcattgcacc

SEQ ID NO: 53393 - DNA, 602 bp, Homo sapiens
gggggagcccagctgggccccagggacagtgcagggagatttgtggggtggggcagcatgcccgccrctccgatcgggcttccctgggccactctgtgacctcctatcctttaaagcatttaatcctagagatgcccgatgccaaggatcacaccccttgatttgcctggctcagaagagaatctgacaggctaggaacgaacgagtgaatgaatgaacaaatgagaaagtgaatggatggttggggcaaatgcagcatctgggatctggctttgaggagggtgcctgtgaccttggcctgggtgcagccagaccgcagagcagggacactgaggggtgcagagagggacccgagagggcatctgcacagctgcagaggcagcaggcggccaagccagctcccgcagaccctgaggcccaggccctgggtggctgcagagggtcaggcagaccagcctgggggtcagaggtcaggctcaccagaatgggggcgggacggcatgaacctcattgatcagatagtagccaagtgtcaggagccctcactaaccctgtgccagggccgggcggggcgcctggctcacacacgcatttgttcattt

SEQ ID NO: 53394 - DNA, 554 bp, Homo sapiens
tgtgttcagagaggtacatggatgattggaaagtctgactacttgggatcaaatactatgcccttaacatctgatgctaacaaatattaccccaaaattaatacatgaacctagactgagctgtactttttttttagggaaatgaatggcattctatgataagcttatgagtgtttccttcatttaaatactggtaatatgaatttaaatataattggagttgcttattaaaattttcatatacttttgctctttttaataatgattatagttatgtttttacacaagtgctatatacccaagatagaaaacttgaaaaactccaaaaagtacaaaaaaagaattatttataataatatatycactcaagtcaaatgctattcacattttggtgtgagtctttcatagataagagagagatggagacacacacacacacacacacacacacatatgtatccaaaaatatagaagttatataaaacattaataatgtatagcaaaatttaatatctaggtacttctaaaaaattttgtgtcaatttttcagtctt

SEQ ID NO: 53395 - DNA, 644 bp, Homo sapiens
tgaaggcagactatgataaattaaggatgtatattgtgaatcatatgttatagagtaaaaaatattttttaaaagagacatgagtaatatatcaatactggaaataaaatggaatcatataacatactgaataaaaaagaatagtcaggacaagaaaggaacaatgtaatgaataaacaagatttaactgaaatgttaaagggagagtgctggagttcagggggaagcagaaaggcatctgtggtggttggaaggccagggggtcttacatgcccagattactacagaaagccattcaactgcaaagataaacaactaggaaggaaaaaagaaacaaaagatattcagaataaccagaaaacaatcaataaaaagacagggataagtcctcacctatcaataataaccttgaaggtaaatacattaarttccccatttaagagatatagatagcctaaatggacaaaaagaaataatagccaactatatgttccctataagaaactcacttcacctgtaaagacatacatagatgggatgtgaaggatggaaaaagatatttcatgcaaaggtaaaccaaaagcaagcaagagtagctatgcttatatcagacaaagcagacttcaagtcaaaaactgtaaaaa

SEQ ID NO: 53396 - DNA, 639 bp, Homo sapiens
tttatttagacagtgatttctatttttctttcaaagattatatttttgtttccaaatgggagaggtgttatggggcgatagagaaaggatccagggaaaattgcatggtaaaattgctcctgggaaagaccagcttagggtatccatgattgtcgcttctgtagccctgagcatgtttctccccttggagcatcctctgaagtcttggtcagagtcgttgaagagacatgaaccttttcagcattttctgctttgctttggcaggattgtttactgcctatcaagctgacttacaaaaaatactagttctgttgtttttcatttttaaaagcaaattgcttcagctcttcgtaaataactccttaaaagaaaagccatggatgacagatgaggaagcatagttgggaacagagcgcggcactcgctcacgatcatagtgtcaggtcacaggaagccctctgagccccrggggtgggggcagcctctttaaagtgattatggagcaagaggagcttgaacagtggcactctgagggttgtcttgggccagcttggagatcaggtcctgggctccagaagacatcgaggctggttctacctggatgttgcatccgtaggtatcaaagtaggagatgctttc

SEQ ID NO: 53397 - DNA, 569 bp, Homo sapiens
aaccaattggaggaaaaggaatcccaacatttaggacaaactgtagcctcttctgagatggmccagtggaagtctgtatctgggagctggcacgctggcctcacctgcagcacactcacctgcgtgtagtgggtgcaggtggcgttgcgagcacactctcctgccgcgtggctgtaccgctgcccctctgcaaaccataggctgaccacttcaacaaaggacgccaagcccgcgggcagcagctgcatgttccagcccacttgcagggtgcgccacaggccggacgccaggctcggggttgggattccacagagggctgccctggcttgagccagttgggccaggctgtcactccagtcctgggggcagcacaaacagacatctgtgggaggcctttgactgctgggccaggcctcaaagattcaactcccctgccatctctgagcatccaccgggtgccaggtcaggtggcaaagagagcactggatgaggagtcctgctggaggaagcactggtgttgtctgatgtccctccaggaggagcccagctcctctcacgactgagcctcc

SEQ ID NO: 53398 - DNA, 757 bp, Homo sapiens
cactctcaaatacacctgattttggatgataactgatatgctcatcctagtgaggagacttgggtagcccctgcttcaccaatctggcagggggcagaagtgctccgcagacattggctgcaggaaaggaaccagttggtcccaagaacagaaccctccttcctttttctcagttctgtgccctgtccatgagttactgacatgttcacatttatctgcaagctctccctccttcagtctttcccctgtccgcactctagcggggtccagctggattctaagcagagagaaatattctttccattgttctggatacacctgggacaaagctcccctagacctacccaggcccatttcccctgctctgcagttttcaccagtgtgcacatcagaatccgatggcagacatcctcacaacgcacacgccaaggctgctaatggatacatgggatctgaagagcgagccaaggtaagcacarggacattcttcatactattgcttagaaagtcttaaagtggcagcatcatgctaaatatccaccagtcaacaattaagtggataaaatatgctacaatcacataatatcactgtgagctgttagaaggaatgagacagttttatgtaaccaggaaacaaagtcaccacaaacaggtgaaaaaagtgacagaataatcaggtcccatttttattaagtgaaacaaaacagcatgtgtgctcatatataagacaggcatagaaaatctgaaaggatgcaaa

SEQ ID NO: 53399 - DNA, 1167 bp, Homo sapiens
attacctttcagaaaaatattctattttatttttatcataccaaacccagtccctttacatttaactcatcaacaccttggcatgagctctcacggagtgtacttcattaatccctcaccctttcaatttgatcattcttctttctcttccaggaaggaattttatacttcatcgatctgaaaaatagctacttatcttttaatactcagtctaaaggtcatttccaggatgattttaactccatcccacacaatggacaatgcaacaggattgacttcactgttttagcatatctaccactttattgcaytaaattgttttctgctttttcctcagtgagtgtgaaaactcaatgagagaaggggaatatctccttcatttctgtacttctcagcacataaaaagagtattttttaaaataaagtattttagtcctagatgtatgtcctagagttttctacctttctctaggtttattatatcaataataaattgtgtgtgacataagacctgtatagaaatgtttacagtgacattgtttatatggctggaatggagccactgtaatttatggggaggggagcatagatacattttggtagaatcatacagcagaatgctgtgcatcactgagaaggaatgtattgaggctaaatgcatcaacaagtatgactataacacccataacgccaaaagcaagctacagaaaataatcaccatgcagtgccatgtctctaaagtacaaattacaaaattttatatagttttatgggtttctacatagtgagtgaaagcataatatgtttgggaatgatgaataccagtggcagggttgtggttacttctggatgtgttggggcaggtgaatgtcatctaggaggacaaaccaaaggcttcagctggcagggagtgctcaggaattcattactctactttttataactttacaaatgtttttcatgaatacctaatgtaacagttacttttatatgtcaacaggactaagtaatgcccagataatggataaaacagccaggcacggtggctcacgcctgtaatcccagcactttgggaggccgagacgggtggatcacctgaggtcgggagttcaagaccagcctgaccaacatggagaaaccctgtctctactaaaaatacaaaattag

SEQ ID NO: 53400 - DNA, 1167 bp, Homo sapiens
attacctttcagaaaaatattctattttatttttatcataccaaacccagtccctttacatttaactcatcaacaccttggcatgagctctcacggagtgtacttcattaatccctcaccctttcaatttgatcattcttctttctcttccaggaaggaattttatacttcatcgatctgaaaaatagctacttatcttttaatactcagtctaaaggtcatttccaggatgattttaactccatcccacacaatggacaatgcaacaggattgacttcactgttttagcatatctaccactttattgcactaaattgttytctgctttttcctcagtgagtgtgaaaactcaatgagagaaggggaatatctccttcatttctgtacttctcagcacataaaaagagtattttttaaaataaagtattttagtcctagatgtatgtcctagagttttctacctttctctaggtttattatatcaataataaattgtgtgtgacataagacctgtatagaaatgtttacagtgacattgtttatatggctggaatggagccactgtaatttatggggaggggagcatagatacattttggtagaatcatacagcagaatgctgtgcatcactgagaaggaatgtattgaggctaaatgcatcaacaagtatgactataacacccataacgccaaaagcaagctacagaaaataatcaccatgcagtgccatgtctctaaagtacaaattacaaaattttatatagttttatgggtttctacatagtgagtgaaagcataatatgtttgggaatgatgaataccagtggcagggttgtggttacttctggatgtgttggggcaggtgaatgtcatctaggaggacaaaccaaaggcttcagctggcagggagtgctcaggaattcattactctactttttataactttacaaatgtttttcatgaatacctaatgtaacagttacttttatatgtcaacaggactaagtaatgcccagataatggataaaacagccaggcacggtggctcacgcctgtaatcccagcactttgggaggccgagacgggtggatcacctgaggtcgggagttcaagaccagcctgaccaacatggagaaaccctgtctctactaaaaatacaaaattag

SEQ ID NO: 53401 - DNA, 1167 bp, Homo sapiens
attacctttcagaaaaatattctattttatttttatcataccaaacccagtccctttacatttaactcatcaacaccttggcatgagctctcacggagtgtacttcattaatccctcaccctttcaatttgatcattcttctttctcttccaggaaggaattttatacttcatcgatctgaaaaatagctacttatcttttaatactcagtctaaaggtcatttccaggatgattttaactccatcccacacaatggacaatgcaacaggattgacttcactgttttagcatatctaccactttattgcactaaattgttttctgctttttcctcagtgagtgtgaaaactcaatgagagaaggggaatatctccttcatttctgtacttctcagcacataaaaagagtattttttaaaataaagtattttagtcctagatgtatgtcctagagttttctacmtttctctaggtttattatatcaataataaattgtgtgtgacataagacctgtatagaaatgtttacagtgacattgtttatatggctggaatggagccactgtaatttatggggaggggagcatagatacattttggtagaatcatacagcagaatgctgtgcatcactgagaaggaatgtattgaggctaaatgcatcaacaagtatgactataacacccataacgccaaaagcaagctacagaaaataatcaccatgcagtgccatgtctctaaagtacaaattacaaaattttatatagttttatgggtttctacatagtgagtgaaagcataatatgtttgggaatgatgaataccagtggcagggttgtggttacttctggatgtgttggggcaggtgaatgtcatctaggaggacaaaccaaaggcttcagctggcagggagtgctcaggaattcattactctactttttataactttacaaatgtttttcatgaatacctaatgtaacagttacttttatatgtcaacaggactaagtaatgcccagataatggataaaacagccaggcacggtggctcacgcctgtaatcccagcactttgggaggccgagacgggtggatcacctgaggtcgggagttcaagaccagcctgaccaacatggagaaaccctgtctctactaaaaatacaaaattag

SEQ ID NO: 53402 - DNA, 639 bp, Homo sapiens
aatgaccagtgggtcaatgaagaaattaagaaggaaattgaaaaattccttgaaacaaatggaaacacaacatacccaagcctgtaggatacagtgaaagcaatacaaagaggaaagtttatagctataagtgcctacatcaaaaaagtaaaaaaaaaaaaaaaaacttcaaataaacaacatagtgatgcatcttttgaaacaagaaaagtgcaaacccaacccaaaattagtagaggaatataaatagtaaagatcagagcagaaataaatgaaattgaaacaaggcaaacaataaaaaagatcaatgaaaataaaagttggttttttgaaaagataaagaaaactgacaaatctttagccagactaagcaaaagacrggagttctatacaagacattgagactctatccattcgtcacaacttgaactcagtcatgaagcctgagcatcaattttttaatgcttccctctcatttatacctatgtaattttcctctctggaatcattaagttattttattgtcttagtaaaatatatacacatagatgtacctaatttattctctattcatcttccataaaaactgtataactatcttttcctgctctctccagcagggacaatttccctttatca

SEQ ID NO: 53403 - DNA, 603 bp, Homo sapiens
tggattgattccaaaaggcttaatgtttgcacaagagaatcccaaatcagatctaaaacataatcactgcttgagttcttagccttcctattagctattagattctgctaattatactctaaagtgtgaggagtgtttgctttgtttcttgaatcaaagcaccagtctttcctaaaatgcattgccaacttatagccattttcaaactattcaagtgagtcgatggaatctctctccagagacagtattgcaaagtggttgtgaacataacctttgggctagaaagagctgaatttgactaagaaatctctactgactttgcgtaaattattgaactccccattgcytcaaaagtgaggatgagaagtgtatcctaagaactaaatgttataagggataaaaagtgcctagtatagagcctggtacatgttgaagtactgtaggatgatcatcattatctatgtgttgttgcttaattctagtaaatatatgataagtatttgatatagtacatacatgatccattctgaattgctagactgatccctcagccaggaaatgaaggcatgaagcctttatttatttatgtctactatagtcagt

SEQ ID NO: 53404 - DNA, 642 bp, Homo sapiens
tctcaactttgggtagaagaaagtaaaaaacaaaaacatgtatcctggaatatgaggaaaagataaacttgaaactgttggaggctggtgcagggctggagagggcagtcctctaaccgctggcagaggagcctagagccctggagttcaccacctgcagagttcaacctgcccctcccacagactgagataagaacattattgcatgtccttggcttggcagtttcrctcccatggttatttggtttgtgggatccttccccaatgcagcccaatcaagagaatacagacctcctaccctttaggggaactgatgtttaatgtttgagccacactatgaaactcccttagagaattttcaatcaattttagttactactgatggttcctgatcattagcagacaaatgccttagtatgagactggttttgtccctaacatgtttataaacccagtatcagtgttggtttaaattcacatcttttaatgtttaattggctttctttaattttagccttgatcgaaaaaaaaatccagaaccttgggaaactgtggaccctactgtacctcaaaaggtattgttaaattaaaaacaaatgatttatattttgcccaaaccttagcacctttgtgagcaaaata

SEQ ID NO: 53405 - DNA, 642 bp, Homo sapiens
tctcaactttgggtagaagaaagtaaaaaacaaaaacatgtatcctggaatatgaggaaaagataaacttgaaactgttggaggctggtgcagggctggagagggcagtcctctaaccgctggcagaggagcctagagccctggagttcaccacctgcagagttcaacctgcccctcccacagactgagataagaacattattgcatgtccttggcttggcagtttcgctcccatggttatttggtttgtgggatccttccccaatgcagcccaatcaagagaatacagacctcctaccctttaggggaactgatgtttaatgtttgagccacacyatgaaactcccttagagaattttcaatcaattttagttactactgatggttcctgatcattagcagacaaatgccttagtatgagactggttttgtccctaacatgtttataaacccagtatcagtgttggtttaaattcacatcttttaatgtttaattggctttctttaattttagccttgatcgaaaaaaaaatccagaaccttgggaaactgtggaccctactgtacctcaaaaggtattgttaaattaaaaacaaatgatttatattttgcccaaaccttagcacctttgtgagcaaaata

SEQ ID NO: 53406 - DNA, 642 bp, Homo sapiens
tctcaactttgggtagaagaaagtaaaaaacaaaaacatgtatcctggaatatgaggaaaagataaacttgaaactgttggaggctggtgcagggctggagagggcagtcctctaaccgctggcagaggagcctagagccctggagttcaccacctgcagagttcaacctgcccctcccacagactgagataagaacattattgcatgtccttggcttggcagtttcgctcccatggttatttggtttgtgggatccttccccaatgcagcccaatcaagagaatacagacctcctaccctttaggggaactgatgtttaatgtttgagccacactatgaaactcccttagagaattttcaatcaattttagttrctactgatggttcctgatcattagcagacaaatgccttagtatgagactggttttgtccctaacatgtttataaacccagtatcagtgttggtttaaattcacatcttttaatgtttaattggctttctttaattttagccttgatcgaaaaaaaaatccagaaccttgggaaactgtggaccctactgtacctcaaaaggtattgttaaattaaaaacaaatgatttatattttgcccaaaccttagcacctttgtgagcaaaata

SEQ ID NO: 53407 - DNA, 642 bp, Homo sapiens
tctcaactttgggtagaagaaagtaaaaaacaaaaacatgtatcctggaatatgaggaaaagataaacttgaaactgttggaggctggtgcagggctggagagggcagtcctctaaccgctggcagaggagcctagagccctggagttcaccacctgcagagttcaacctgcccctcccacagactgagataagaacattattgcatgtccttggcttggcagtttcgctcccatggttatttggtttgtgggatccttccccaatgcagcccaatcaagagaatacagacctcctaccctttaggggaactgatgtttaatgtttgagccacactatgaaactcccttagagaattttcaatcaattttagttactactgatggttcctgatcattagcagacamatgccttagtatgagactggttttgtccctaacatgtttataaacccagtatcagtgttggtttaaattcacatcttttaatgtttaattggctttctttaattttagccttgatcgaaaaaaaaatccagaaccttgggaaactgtggaccctactgtacctcaaaaggtattgttaaattaaaaacaaatgatttatattttgcccaaaccttagcacctttgtgagcaaaata

SEQ ID NO: 53408 - DNA, 634 bp, Homo sapiens
tggagtcaaagcatttcacaatttatagaatgtatttccatctacaatcacagatactaacactatacccctagtcctagacatttccagcataaaactctgacaccgagatgctgagaactccacaaataygtcacagggtcacagtcaacctacatggcttttcttgggaaacaacagtagtaacaaaataaggaagcaaaacttagatttgtcccttcacttttacctagatatatggcatatttttaaggcattgtatctacaactgagaagactctaccactaattttatattacagcaacgtctgtcagcattcaaaagtcaactctcaggttgacaaagagcagcaaaggaccatagccactgtggctgtgagtgtgttctatggcagaaagactgtgcaagaacaaccaacggtgatatttaaaacacttcaccaccaacaggatagatgctgaccaggggctgggtcctctctggcctctagtgtactagacattaaccttttagctcttggattgtgagaagtttcagcaagtcagggcagtgtcatttaccaaacaacatggaaatatttcaatattttgacatgatatatcatcatactgctgtgtactagctacctattag

SEQ ID NO: 53409 - DNA, 536 bp, Homo sapiens
tgtgtgacttactttactgtgatagttgttttattgtggtagcctggaatcaaacttgcaatatattcaagatatacctctaattaatttgaaaagaaaaaatataaaattaatagaagcaatgtgaaaaacatattaaatttttatccagggtaaatgttgactattattcttacaacttcaaaagcctaaataatattgtaagaaattaatctacttgcagtgaaaattgatgttctggctgggtgtggtggctcacacctgtaatcccagcactttgggaggcygaggcaggcagatcacgaggtcaggagacccagaccatcctggctaacacggtgaaaccccagctctactaaaaatacaaaaaactagctgggcaaggtggcgggcgcctgtagtcccagctacttgggaagctgaggcaggagaatggcgtgaacccaggaggcggagcttacagtgagccaaaatcatgccactgcactccagcctgggcgacagagcgagacaccatcccaaaaaaaaaagaaaaa

SEQ ID NO: 53410 - DNA, 536 bp, Homo sapiens
tgtgtgacttactttactgtgatagttgttttattgtggtagcctggaatcaaacttgcaatatattcaagatatacctctaattaatttgaaaagaaaaaatataaaattaatagaagcaatgtgaaaaacatattaaatttttatccagggtaaatgttgactattattcttacaacttcaaaagcctaaataatattgtaagaaattaatctacttgcagtgaaaattgatgttctggctgggtgtggtggctcacacctgtaatcccagcactttgggaggctgaggcaggcagatcacgaggtcaggagacccagaccatcctggctaacacggtgaaaccccagctctactaaaaatacaaaaaactagctgggcaaggtggcgggcgcctgtagtcccagctacttgggaagctgaggcaggagaatggcgtgaacccaggaggcggagcttacagtgagccaaaatcatgccactgcactccagcctgggcgacagagcgagacaccrtcccaaaaaaaaaagaaaaa

SEQ ID NO: 53411 - DNA, 551 bp, Homo sapiens
agatgggacatgcacattatgggaaattaaagaggttcaatgagtgagcatgaatgggggatgatcagtagagatggttggaggggttggcaggtgccagttggcttgggggcttgaaagccataaaaaggagccagggctttgtcttatgaagaatgggatgccaataaaaggattcaggcagagaatttgtatgatctgattgatgtttcagtgaactcactccactaatatgattgtgagtgggccattgctgtatagagtccggaaaacaagtgatgtatccagaagtagagtgtgggcagggaagatggagaatagatagatccaaaacatagttagggaatagaatcagttggaattattaggataatccagatcactccttttgtcccatcttcacactccccattaccatgccgaaaatttggattcctaggtatcttacctcactgggagcaaataccctggtctgacttactactatatttagactsgtaaatttctcattgtctattaataagctatatttcttattgcacacttcaaac

SEQ ID NO: 53412 - DNA, 637 bp, Homo sapiens
cagtttcctccctttcagttagatgatttgtatttaatatttactaaaaccaaagaaaatgtaatttccatgactgagaatatatctttttaaatatttatttggcatatagctcttctgtagcataatttgtgatgctacatttgatgtcatcttagaccagattatattctatgattttagtacagygtgacataatagaaaatgggctttggaattaaaagacctaatagtttttaaatatgccatttactagttgtgggatttggagtgagtttctttagaggaagtgtccaggattgtgatatttgtttcttctgtacttttccaaactttattttattggaattcttgcaatatggagggagtcctatggtttattattgctttaacagcatggctattttataacatgtttactatagcaaaattatgtcttctactgcgctatgttgtcgcttgtgttaagactttttcattgcattgtatttcattttcatttgcagatcagtgagagacttttttttctgatgggtggtgaatatcccaccatgtggacgaatgagtttttccacctccccacatcatttctatagagcctcagatatttcgttaacaatgaaagtaatctacctgt

SEQ ID NO: 53413 - DNA, 529 bp, Homo sapiens
aaaacctatcactaagcttcttttttcagctataaaattatagatgagaccaagtggcaacctcataccaaaagccacagaaagctctggtatatgacacaggatttacacttggctttgaggatgaaggtctgttgaatagtcgtcctgctgatgtatgcttaggttaagtggaagaagcatgctaggttgcaaaaagaacattaaaacaaggtcctaattgctcaaactgaggcagaacctcatatgctccccaaaacacatggctgtgagcctccttgccaggtaaatacccttgcaaggtatttctggattcactcttttggatctttcaggtgcttttcttttaatcaacttaaaaaaatcaatagctaaatgtattggttttgcgatttgccagatacgattctagtctctttacagacattatgtctaatccttacaaattacttatttctttttttttttttgccagttgacaaaaaaattatcaactcatatatrccaaatctcacccagagtaatatcc

SEQ ID NO: 53414 - DNA, 574 bp, Homo sapiens
atttctagcaattataaggatatattaggtatggctgctgcaatagagaagacaaaaattttaaaatattaaacttggttccattgatatttgcataagtcccttgacctatccaggccttagttttgcattagtcaaattcagggattgagagataatcttagggatctttccaactttaagatagtattatttccttccttccttccttccttccttccttccttccttccgtccttccttccttccttccttccttccttcctctctttctctctttctcttyttgacagagtcttactctgtcacccaggctggagtgcagtggtgtgatctcggctcactgcaacctccgcctcctgggttccagtgattctcgtgcctcagcctctctagtagctggataacaggcacccaccaccatgcctggctaatttttgtatttttagtagagacggggtttcaccatgttgaccaggttggtctcgaactcctgacctcaagtgatccacccatcttggcctcccaaagtgctgggattacaggcgtgagccactgcgcctggccaagatgg

SEQ ID NO: 53415 - DNA, 574 bp, Homo sapiens
atttctagcaattataaggatatattaggtatggctgctgcaatagagaagacaaaaattttaaaatattaaacttggttccattgatatttgcataagtcccttgacctatccaggccttagttttgcattagtcaaattcagggattgagagataatcttagggatctttccaactttaagatagtattatttccttccttccttccttccttccttccttccttccttccgtccttccttccttccttccttccttccttcctctctttctctctttctctttttgacagagtcttactctgtcacccaggctggagtgcagtggtgtgatctcggctcactgcaacctccgcctcctgggttccagtgattctcgtgcctcagcctctctagtagctggataacaggcacccaccaccatgcctggctaatttttgtatttttagtagagacggggtttcaccatgttgaccaggttgrtctcgaactcctgacctcaagtgatccacccatcttggcctcccaaagtgctgggattacaggcgtgagccactgcgcctggccaagatgg

SEQ ID NO: 53416 - DNA, 1625 bp, Homo sapiens
tggtgctgttgcagtgattttagcaaacttctgctcttcattctaatacaacttcttgcaagtcctagtcaatccccacaaattagtttcatggagaacaacattctaaatctagatccatctagatcttcagaggccgtatttgctctaaaacttccttggtggctcacacttgtagtcccagtactttgggaagccaaggcaggtggatcacctgaggtcaggtgttcaagaccagcctggccaacatggtgaaacctcgtctctactaaaaatacaaaaattagccaggcgtggtggcatktgcctgtaatcccagctactcgggaggctgaggcagaagaatcgcaaaaacccaggaggtggaggttgcagtgagctgagatcttgccactgtactctagcctgggcgacacaacaagaacctatctcaaaataaaataaaataaaacttccttgggccaagtgcaatgggtcatgcctataatcccaacacattgggaggccaaggcagaagaactgcttgagccaagaagttcaagaccagcctgggtaacatagtgacatcccatcactacaaacaattagccacacatggcggtacttccttggtcatctcatgaaaaatagtgaataaggaactaaaagtagaatgagtagatacagtaaaagataattctgatacttgcccgaaattctatgttaacaggatttttaaataagttctctccctcaactatacatgtctcccatctctttgtctcattagctatttagcatcttacacaagaaatgtcccttactaagaagtcttctgtgcaaatcagtcaagtcgctgatagtttggctacagaccaaacttctaatgaggtgcttcccagattgtgtgccctagtctgaaatggacactcaacactcaaggacacaggacactcaaaaaaagggggagctctgaagtccagagtcttagggaatcattaacaaaaacttattttggataagcaatttatgctgcttctgatatgacaaccctgagacatacgacagtaaataaagcttgtttagcccagcacatatccaacttcctagaatcctgtgcatttttcacaacacacttatcccctgaagaagaggattgcgcaatttgtactgcagctggaaaacgctgccctcagctacaagttcttctcctacagtcaggaccacctccctcccacgcactttgccatcagaaagatattacatgctgggtctttcaacggcaaccacagttccaaaccaaggaaaggtgctacggaagattactcaaccttctcggattatacgctttttccatcaaggaggtcacaagaagggcatttccactttcgggtcctatggcgtggcaccactgtctactaatttagtgaaatgtacctcaaaaggaaggggactttacccatattgtcccctcataagtcattctccccaggagacacctggcaatgtctagagacatgtcatgaccgcaagtggagggcagcagccatgggcatcctggaatgcacaggacagcctcccacaaccaagaattatccaagttgccatgagaagctaagaagctccgccctatatctgtctcctcc

SEQ ID NO: 53417 - DNA, 518 bp, Homo sapiens
aaagttttaatttgagaaagtctgtttaaacattttatttattcatttcttttttcttcaacttttatttaagttccagggtacatgtgcaggtttgttacayaggtaaacgtgtgcaatggtggtgtgctgcatgtatcgacccatcacctaggtattaagcccagcatgcattagctattcttgttgatgctctccctccccgagcccctcgacaggccccagtgtgtgttgttctctgccatgtgtccatgtgttctcaattatggataattaacaagtgttttgatgacttatctttcaatgctgtggttacagctcaacctgggtgtgggaatcatgaggagcactaatctgcatgtctaaaacagagcaggattagtttccaactgcatatttgaatgaattcctgttgctcgaaaaatttcatgtttttgagacttttctgtataaaacaagctaaatgtgtcatgtaaaactccaaaaacagagttgtaagcactcaatacagacttaca

SEQ ID NO: 53418 - DNA, 1479 bp, Homo sapiens
agtcaaatcttttcaataatattctcactgtggtcctagatctgcctcttgggtaacaagtaaataggtaacaaatcaaatctctttttccttctctttggcaccctttaagacataaaggggctatagggacactttggcaaaatttaccaagattctgtataaacataaaaaagaaggctagaatatcgccataaaaatggaatgtcttggtttgcatagtttccagaaataaaactaattctaaatatagtgtattctaaatcagaataatagctttgaggttatttgaagactgaaacatggaggagccatgataccacgcaactttctatcattagactcgctcagtctcctggccttatgagtccttctctcataggatccctgttactctcccactggatagggaacagggaagaggtggcagaaagaaagggaggagaaggagtcgagagaagtaaagcccacaaatccaggagaaaggaagtgtctagagtggaattgggaatatggggaattagactctgatgcatatggaattgtgactctctaataaacattttttacagttggaaataacattgcagtataaagatttgtatagaattctttaatagaagaccagaaaataaaaggcagagtgtgtagaaggatttgctgaaaataaatcgggaggcaagagggtcttaaggttgtcattgcttgttagtgcttggctgccctgggaggcttggaagtgaacactaatggcttattgggacagaaaaggttttcctgcatcagcatactcttctttctaaccctaactcaatcccctggggrgcggggagtcaaaatctcctttagtcattacaaaaagtatgtttattgagctatttcaggtcactcgacatttatcaaacccctcagaaatttcctggtgaagaaacagtcctgtgactttagataaaaaattaaagaaaaataaagttatggcaaatggtaacctctcaccatgtaatgacaaaagtggttcaaatccaattcaagtctgttaaaggtcctcagggtttagtaagatgtgtcagcctacaaggtgcaaaagtgagattattgttttcctcactagctaggaactgaggctattctagaagctgaaataatcatttggtaagaggtcattttttttttcattggttgcttatttatttgctatttttattttttagagcagggtctcactctgttacccaggctggggtgccgtggtgcaatcacagctcacttcagccaggaactcccaggctcaagcaatccttccacctcagcccctcgagtagctgggactacaggcatgcaaccccatgctggctaatttttttttttttaatttttgtagagataggatctcgctatgtcattcaggctggtcagaagtcatgttcttaaccacaaaatgtaagtcaattgaaattacagttctgtttgcaaggcatg

SEQ ID NO: 53419 - DNA, 1479 bp, Homo sapiens
agtcaaatcttttcaataatattctcactgtggtcctagatctgcctcttgggtaacaagtaaataggtaacaaatcaaatctctttttccttctctttggcaccctttaagacataaaggggctatagggacactttggcaaaatttaccaagattctgtataaacataaaaaagaaggctagaatatcgccataaaaatggaatgtcttggtttgcatagtttccagaaataaaactaattctaaatatagtgtattctaaatcagaataatagctttgaggttatttgaagactgaaacatggaggagccatgataccacgcaactttctatcattagactcgctcagtctcctggccttatgagtccttctctcataggatccctgttactctcccactggatagggaacagggaagaggtggcagaaagaaagggaggagaaggagtcgagagaagtaaagcccacaaatccaggagaaaggaagtgtctagagtggaattgggaatatggggaattagactctgatgcatatggaattgtgactctctaataaacattttttacagttggaaataacattgcagtataaagatttgtatagaattctttaatagaagaccagaaaataaaaggcagagtgtgtagaaggatttgctgaaaataaatcgggaggcaagagggtcttaaggttgtcattgcttgttagtgcttggctgccctgggaggcttggaagtgaacactaatggcttattgggacagaaaaggttttcctgcatcagcatactcttctttctaaccctaactcaatcccctggggggcggggagtcaaaatctcctttagtcattacaaaaagtatgtttattgagctatttcaggtcactckacatttatcaaacccctcagaaatttcctggtgaagaaacagtcctgtgactttagataaaaaattaaagaaaaataaagttatggcaaatggtaacctctcaccatgtaatgacaaaagtggttcaaatccaattcaagtctgttaaaggtcctcagggtttagtaagatgtgtcagcctacaaggtgcaaaagtgagattattgttttcctcactagctaggaactgaggctattctagaagctgaaataatcatttggtaagaggtcattttttttttcattggttgcttatttatttgctatttttattttttagagcagggtctcactctgttacccaggctggggtgccgtggtgcaatcacagctcacttcagccaggaactcccaggctcaagcaatccttccacctcagcccctcgagtagctgggactacaggcatgcaaccccatgctggctaatttttttttttttaatttttgtagagataggatctcgctatgtcattcaggctggtcagaagtcatgttcttaaccacaaaatgtaagtcaattgaaattacagttctgtttgcaaggcatg

SEQ ID NO: 53420 - DNA, 1115 bp, Homo sapiens
tttgcagaggatatagaacgttatcagaaaacaaccttccaaggcaagagcaaatgcaccctatctaagcacagcttttctccaattcttatttacctaaggagatgaatagttgccaggaacattgtttgcacaagggcaggagcctgccagatctgagaacacagcaaaatttttattttgtcaaaaatcttatattcagcttacaccattcattgcaggtgaacatacaacagtgcatttcagtttagggaaatgtttacagtcatctggttctctttattcctgggaacaaggttacctcacttggaacacataaccagtgccaagttgtccatccctaagcaatatcgcttccttctactttctagaagttcttcagattgtggaagagagacttttcagagttctttgccctcattccctcctccagaaattcatgcctttgtataatctcttccccttcagagccagtaggctaacctaatgagttatttttaaccagtagaatacagcaaaaatgatagattacaagagattgtggcttctatcttgctagcggactctctctgtcttctctgcttgcacactttgttgaagcaagctaccatcccagaggcaaggaacacaggccatcagtttagcagccttgaggaactaaattcttccaactaccacataagtttggaagtagattctccagtccagccttcagatgagaccccagccatgccaacatcttgattgcagccctgtgagagaccttgaaatagaaccatttctgatctcctgacccacagaaactgtgaaataaatatgtgttaaggtactaagtttgtagtaatttgttacgcagcagattgtaaataacacgcagataaaaccagacagaacagaaaaataaaatggctttaactctagaaagtttccccatgtaaaattttgaaaatgctactctgcstaaggtcaaactgtcatacatatatacgtatgaaaacacagaatggtgtctggaagggtaatgccaaattaaatctttatccaagaggaatgaaaaccagtattcacacaaaaacctatgcacaaaccttgtgaatatattaaaaaccagtgaa

SEQ ID NO: 53421 - DNA, 544 bp, Homo sapiens
acagaagacaatttttagaaaaagtgttttaagccaaacaatttcttgcccttggtataaagcagcagcatgcagaaaacactaattacggtttcaatctcaatggaatctaggctggtccttagcatcagtctgagtgataaatcccttattccagaatacacttaggaagaactactaaggatatatttttacctatttcaaakaagaaaatgagaaaaggcattgattttaaaaaaagaatacatgttacagtttgtacttactttttagcaagatcatattctttagcttcataatacagctttgcaaaatagaatcctctcgttgacttctaaaaaaaattaaaagttgttttacatttcatacagaaatattttccaacattttttcaaaagtagtaaaaatctgccctaagtttatgttcaaatatgccattttcattcacttaaaaattttttttaaagcctgacaaatgcataattccatgttttataatttcctatcacaaaacaaaaaatagagctgggtgcagcggctcatg

SEQ ID NO: 53422 - DNA, 614 bp, Homo sapiens
atttgcataggaagttatatatagtgtaagtaatacatatgtgtgtgtgactgtgactgtgtgggtatgggtggatggtacaaatcatgcccaactgtaactattaagaatgctaaaaaaaaaaaaaaaccctaagaaccaaatattatcaaactgtcaaagtttaactcaactttcagccagccttctttttttctgtatttgcacagttataatcaaacagttaaatcttgcttactacatgttgactttccagcagagatgtgtgtggtcataatataaaacaagaaaaataggagtctatcatatctacaaatagaaggagaatattaaggtggacagaagcagcagaaacaaaatattcttatcaggcraataaatctaatgtaaaaccagcaggctgtggagagaatagaaatttttccagtagccccttaacaagaccttggccttctggatccttggctgtgaatcagagtgttctggacacgtgattcttataaatcaatgggaggagacattccccctgggtcttccaactcactgtaagtagctgaatatatgtttaattcttcataaacacgatcctctggaacctgataagggaaaaatca

SEQ ID NO: 53423 - DNA, 614 bp, Homo sapiens
atttgcataggaagttatatatagtgtaagtaatacatatgtgtgtgtgactgtgactgtgtgggtatgggtggatggtacaaatcatgcccaactgtaactattaagaatgctaaaaaaaaaaaaaaaccctaagaaccaaatattatcaaactgtcaaagtttaactcaactttcagccagccttctttttttctgtatttgcacagttataatcaaacagttaaatcttgcttactacatgttgactttccagcagagatgtgtgtggtcataatataaaacaagaaaaataggagtctatcatatctacaaatagaaggagaatattaaggtggacagaagcagcagaaacaaaatattcttatcaggcaaataaatctaatgtaaaaccagcaggctgtggagagaatagaaatttttccagtagccccttaacaagaccttggccttctggatccttggctgtgaatcagagtgttctggacacgtgattcttataaatcaatgggaggagacattycccctgggtcttccaactcactgtaagtagctgaatatatgtttaattcttcataaacacgatcctctggaacctgataagggaaaaatca

SEQ ID NO: 53424 - DNA, 546 bp, Homo sapiens
ttttgtttttcccatgtcttcgtcttgaagtttcttgagctaggcggcttttcaagctgaatggctgccggtgttcctgaagggtgtgcactttcaacctgaattaggccattgtgcctattattgggatcatgaattaatgatacttgtcagtcattatcttgagagctttttgttgtccttaaagacagttcattttgcttgctattgtgactgtgacaatttggttctcagtaaaagacagtttacatgcgagtggaaacctttgtgttttgtagtgttctgctatgagttatgttttcctcagccaagttccctgaaagaaaacacccttcctgttctcccctcaatccattatttctaccrtgacaggtttctcaagcaaacaggaaaaccatcaaatgtaacaaacctttttctttatgtagcgcttcacagccgagcacagaggctggcccccataacaggcaacattaccaccttagttaaacaccgttatctctgttctacagaggtgaaaagatttccctggtggtattagaaaaa

SEQ ID NO: 53425 - DNA, 603 bp, Homo sapiens
cagcctcactcccaagttctggaattttcacattgatattcttgcctgtgggtaattgctagttgaatttctggggcagggagagaagctagggaactcctgttccaccatcttactgatgtcactytcccaacattattttaagtcttaaagaatagaataacttcactgacatctgggaatattactattattacttgttgaaatgttggaaatgtgctaggtaattttggtggcaggctccagtggagctttgggaaggccttattataaagtagtaatctactgagatgctctgaaacttgggaaactctgaatattcttgggttacttgagtttttaattatatttctcccaggtccccattttgcatttcatttactatcctttcccccagtttattcacttttgctcactggaatgtccaccacaatcctagtgatattttaagataaaaattattgtaaatgtatcttaatattccaatttttttttttttttttgagatggagtctcactctgtcacccaggctggagtgcagtggcgtgatctctgctcactgcaagctccgcctcccgggttcacgccattctcctgcctca

SEQ ID NO: 53426 - DNA, 1398 bp, Homo sapiens
cagaacatatcatcaagctctgctcctattaatgacttaagagcagctgactcgattcactccattaccttctgagggaggaggcagagagcaggaacagaagctgcttaggggcagagaactctcctggatgccaggataggaagggccagtctcttcccagctctctggagtcccgttctgggctaactttgatggatgggtggcaatggggtatcagtctgttgcttctccattcagtggatccacataacgggtttcaggaaaacggcctgactttccagggtttcctttctcttctacctgcctccagactgacccaagcaaatgttttaggtttcctgatctcccttctcagctccccttaatactgtcagggatttcttctagttgtctagcttgaggttccctcctttactatagcaatcccatgtcttcacagcctgggcctggtakaaacttttatatattgtgctggtatcctattgtttttagctccttctctttaaagagaaaggatacactttctctttttttcctgctctttcttttttccttctttttctgtgtctcccatgcctgcctccttaggcagagctgctgcctttctgccttggcctctagggtagccactcttttcttcttgggaatgtttccaactttgatggctgataggttgttttcacagtttgttgtcgttttctaccagttcagctcatccctcttctccctaatgtccttgtggagccagaaaacagcagcatgtttccaaggactctgagcctgggcattttaagagcctaccttcccccatcatttcagtttcatctgcaggctgcagagtgagcagacgcatgtatggcaccggcagagcggctcgtaatgactcaagatgaacaggtcgagctcaaaggcacaacagaaacccatttgtaatggagttgtttttctttcaaatccttaagaacataagcaacctatcttatgatagaagagtgaagggggaggggagggattgagtcagagtttgttttcatttcaggaggcccgtctttcagcatgttctcagcctagggtgggcttggattttagtcacatttagatagcaatgcttatgccttcactgcgattttaaattgtagtaaaatatacataagatgtgccattttaactatttttaggtatgcagtttggtgacattaaatacattcacactgttatgcaaccatcaacaccatccatctccagagttttctcatcttcccaaacagaaactccatacccattaaacatgagctccccatacccccttcctcctagcccatgacatctttccactatgatttgacttggcttcttaaagcaccattctgaccacagagcctctatttcttcttc

SEQ ID NO: 53427 - DNA, 589 bp, Homo sapiens
gtttcgccatgttgcctaagccggtctccaactcctgggctcaagcagtccacccgccttggcctcccagaatgccaggcttacaggtgtgagccaccatgccgagcccgcattgctgttttttatacactgaactgaaactgttcrtaattcattgcagagcacacggacattcagcagtaattattttttgtcttggattcctggtagtaaagaatgcttgatccttcctgcttctgccccaacccatgctagttcttactgttgtgatcagttattagatatttatttggggcacttactctgtgctgctagcacgtgatttccagataaggctgtgatcaggaatagagcaaagtcttgaatcttggtcacctcagcaccattctctaggtagttgtgactgatggtgataactggctgtaggttttgttaccagtaaataaggcagctaagctgtcatctgcacaatgcaaactgaaatcatcctgcagttttttaagtggatagtaggacattccctccattgcaagatgatttgctaggagagttttaaatagtgctgaagacacacgagaacaaagccttc

SEQ ID NO: 53428 - DNA, 585 bp, Homo sapiens
gctccaccattccatgagcaaaatgatagcaacatctttgtagatgtgtaggtggaaactcaaagtgagctataaactttttttttttttkgagacagagttttcctcttgtccaggctggagtgcaatggcgcaaacttggttcactgcaacatttgccaccctggttcaagtgattctcctgcctcagcctcccaggtagctgggattacaggtatgcatcaccgtgccaggctaattttgtattttttagtagagatggggtttcaccatgttagtcaggctggtctcgaactcatgacatcaaatgatccacccatcttgacctcccaaactgctgggattataggcatgagccaccgcacccagccaagctttttgatccgtagaaaaatgttggtgatgtagggaatattaggattttgaaattctgactatcctctcaacagctgcacaagactaacctgttcatcgtctgttatttttgtagattacaacaatccatttaactactatgaaacggttctggagtgacactgttgtgaagaggaaattccagcggagctactggagcaagcctttgat

SEQ ID NO: 53429 - DNA, 585 bp, Homo sapiens
gctccaccattccatgagcaaaatgatagcaacatctttgtagatgtgtaggtggaaactcaaagtgagctataaactttttttttttttggagacagagttttcctcttgtccaggctggagtgcaatggcrcaaacttggttcactgcaacatttgccaccctggttcaagtgattctcctgcctcagcctcccaggtagctgggattacaggtatgcatcaccgtgccaggctaattttgtattttttagtagagatggggtttcaccatgttagtcaggctggtctcgaactcatgacatcaaatgatccacccatcttgacctcccaaactgctgggattataggcatgagccaccgcacccagccaagctttttgatccgtagaaaaatgttggtgatgtagggaatattaggattttgaaattctgactatcctctcaacagctgcacaagactaacctgttcatcgtctgttatttttgtagattacaacaatccatttaactactatgaaacggttctggagtgacactgttgtgaagaggaaattccagcggagctactggagcaagcctttgat

SEQ ID NO: 53430 - DNA, 778 bp, Homo sapiens
caacccagggcaatctccccatttcaagatccttatcttacatctgcaaagtcctttttcccatgtatggtcacacaatcacaacttctggggattaggaggtagaaatgattgggggactgttatttagcccaccacacctgtgcacttacccgggcaagtggttcaactctacctggaggagaggggaggggctgaggaaaggcagccccagcagaggtcagggccccatgagacaaccatccaagaagagcatccagaaatagcaatggcccaatgaagtggggagattaggtaaatacagaaaactgagcaaataaacaaatctactgagcattatttttcttcctgtctgagaagaatgacacggatgtgggatrggaaaagctagactaaatcctgtggtattggtttgggaagagttaccccatacatatagatataaaaataaatgttgatgtaaatgtgtgtatatgtatacatacatgcattgcgcacacacacatatatatatagcctagattatccactgaagggactgagatttactccaaaacgtgagttctgggctacattagtttactaggactgctgtaacaaagtaccacaagttggatgattcgaacagcaaacatttccagtctcaccattctggacgctagaagtttgaaatcaaggtgtcggtgaggccatgctccccctgaaggcactgcggaaggccctgctacaggcccctctcctcacttctgagaatcccgtggcttgtggcagccaaact

SEQ ID NO: 53431 - DNA, 544 bp, Homo sapiens
aggaaacattgcctggttcgggtcatacaagcatgcctttgccccagttttgacgtaagagcaccgatgattttcttctgctgtcctgactctcagaccttttctttggacggtggtgctgactccattccccgctcccattggccgaatgtgactcaggctggaccaatcagagccttgcattcccctggccatagtggttggttccagatcaagccacacctaaatccacgccctaaactcttctgtcacttgagcttgtacatgtcctctttgcttaagcagttttgggttgggtttgctgtcgcgtgcaaccgtaacagcattgaagatttatccacacagagcctggtgcctgtgacagtgtgcccgtataaggccagctgccaagaagacgcgagcctagcatccagccttgagtttctatgcaactgtgttgactggagacttctgaggagagaagaggcctctaggagacaggctagggtgggaagygttaagacagggtaggtgccatcaggagcctccaaacctgccccagagc

SEQ ID NO: 53432 - DNA, 1129 bp, Homo sapiens
tggtctagtcactatgcacactttatgccagagagagtgtgagtgagtgagtgtgtgtgtgtgtatgtagcatttcctttgtggaaggtatactgctaagagttttatgtgctttatctccgttcatcttcataagaccctatgacctggatagaattattacctcaattttactgataagaaaattgaggtgtattgttatattacctattttacttgtttctgaggttctgttgaataagagatgtattaatgatagcttttggggggagaagaaaactacaaaattaaacatacatactgattttaacacacctatttgaaaagaatgtaaatgtgaaatagaggatatgtatataattgtctccattttacagatagggaaaccaaagactaaggttaaattactgcagaagatgatgtcaaagactrtcttcctaaactacatgttatagtgcctctcactgtgggtgaaattgtgatgacactttgtgattaataatagtctaggaaatcagccaggtgtggtggctcatgcctgtaatcccagcactttgggatgcccaggcaggcgtatcatctgaggtcaggagttcgagaccagcctggctaacatggcgaaacctcatctctgctaaaaatacaaaaattagctggatgtggcggcaggtgcctttcatcccagctctttgggaggctgagggagggagaattgcttgaagttgggaggcagaggttacagtgagccgagatcttgccactgtattcagcctgggcaacagagtgagattccatcaaaaaaaaaaaggtctacaaagtctgaattatgtgcttatattgctatgcagttacaagagaaaggctgtgtagtactgaaattggcttttttttttaagcctctcccttgacttccatcctgaccaccaggctaccctcatctcctgaaactggtgctattagatcctataatccagttaggctgaaacattcactcttccccaagtacattgtcttcttccttgcctcataccttagtagctgccaggagtgttttattatacttttgtacctgtctacctccatctccactcctctttctgtcctcagatactgtaaggccctggcaaat

SEQ ID NO: 53433 - DNA, 551 bp, Homo sapiens
agaggatgatgataaaaacaatcacgcagataaggacaatcatcttcacgttcttccaccagaattttcgagccaccttctgcgatgtcgtcttgaagtgctcagactgttggggaaaaggcagagtgagtgacccagtggctcctcccactggaacaagattataagagtacaagtgcagcccacaggccatactttttttttttttttgagatggagtctcgctctgtcrctcaggcagtggctcgatcttggctcactgctgcctccacctcctgggttcaattgattctcctgcctcagcctactgagtagctgggattacaggtgcccaccaccacgcccagctaacttttgtatttttagtagagaggaggtttcaccatgttggccaggctggtcttgaactcctgacctcaggtgatccactcgccttggcctcccaaagtgctgggattacaggcgtaagccaccacgcctggccttgtttgtttgttttttgagacagtgtctggctgtgtcacccaggctggagtgcagtggcacaatct

SEQ ID NO: 53434 - DNA, 583 bp, Homo sapiens
tccacaggagtgggtgcgggtcctgtggctttgctggaggtagggctggggcctcctgcagccccaggtcactggtctatgattgtcaccatcgggtggtggctggcctggagagtgtctcctctcgcgggtggagtcaggggcctgggtttcaggttgggggcttggggacttcagtgagaagacaggccaggacctggccatggacaaggggacagcaggagagaagggggtgctgcccccagctgggaccccagagccccccacctggttcccatctcctctgcctcctcccctttgccaagaggcctcaccaccagcaccccaagtccccacaggctggtgccccgcgaggccccgggcacttcctccaggaagccttctcccacccctgcagctcagccacacccagcggcccccagccagaggaggggcacctgggaccagacaagcctgggctcggggcagaggtgccttcctgctttctgggcgtgtggggagggggttcccagaaatgccgaggaggcctggccggcagcccgaggggagagcccctggcgcttcctgcttggtgagsaggcag

SEQ ID NO: 53435 - DNA, 587 bp, Homo sapiens
tatttagaaatattagtgggttatataatcaaacatgtttttgaagttgcttaaattctcttatttctcagaaatgtaaatgagtattaagtttggttgctttacataatcacatatttctcagagacttttctcacttaaaaaaattctttttgttttcatttttgtctgactgagttcattcaaaggactgctaattgagatctgaaattctttccgctgcttggtctaatctcttgktttaatccaaattctatctaaaatttctgtagtaaatctttcaactacagaagttctgtttggttctttcttaatatagccatgtcatccttcaactctcggatcatttttagttgttgcttaagagccagggctggtagatcagatcatactcagccaagctcacccttgctgtatttccatgcatccataacagtgctttggggaagggaggtgagtggagggagatatgacttacttttcagtttattcctgggcctgggtggtgttcccttcaactactggtcctgcatccacatattctttgccacaaggagggctttggtgagctgtgttccctcttccct

SEQ ID NO: 53436 - DNA, 587 bp, Homo sapiens
tatttagaaatattagtgggttatataatcaaacatgtttttgaagttgcttaaattctcttatttctcagaaatgtaaatgagtattaagtttggttgctttacataatcacatatttctcagagacttttctcacttaaaaaaattctttttgttttcatttttgtctgactgagttcattcaaaggactgctaattgagatctgaaattctttccgctgcttggtctaatctcttgttttaatccaaattctatctaaaatttctgtagtaaatctttcaactacagaagttctgtttggttctttcttaatatagccatgtcatccttcaactctcggatcatttttagwtgttgcttaagagccagggctggtagatcagatcatactcagccaagctcacccttgctgtatttccatgcatccataacagtgctttggggaagggaggtgagtggagggagatatgacttacttttcagtttattcctgggcctgggtggtgttcccttcaactactggtcctgcatccacatattctttgccacaaggagggctttggtgagctgtgttccctcttccct

SEQ ID NO: 53437 - DNA, 555 bp, Homo sapiens
gatatgagtaaaacacccaggcagggcaatggaagttgtgctgtgggaacagccagagagacagtcttgggaaagattggcagacaagggcacacatggatgagatgcaccttggtcctgtcacaatggcagccttgctgtctcctgacccagcagacagtaggagttgccaccatttacagcaagatggagtgccttgggggattggtgcttayggttgcattttgctgctgctgcacagtacaatgaagccttctgagctccatgtagttaaagttgtgcctctacttgtttcctgggtagatccccctgccataccaaagtttgtgagaaatcctgcagttaggatgtcagaggtccactatgggactgtgttgtgccagggttccttcactcacctcttccttttgttggaggtgggaggcaatcctcttgctagtgactctgaacaagctgcccagctttctccctctttaacagtggtgtctgtgttggctgtctatcaattttttgatgttttccctcaagagatctgtttgagtcacacaactaata

SEQ ID NO: 53438 - DNA, 555 bp, Homo sapiens
gatatgagtaaaacacccaggcagggcaatggaagttgtgctgtgggaacagccagagagacagtcttgggaaagattggcagacaagggcacacatggatgagatgcaccttggtcctgtcacaatggcagccttgctgtctcctgacccagcagacagtaggagttgccaccatttacagcaagatggagtgccttgggggattggtgcttacggttgcattttgctgctgctgcacagtacaatgaagccttctgagctccatgtagttaaagttgtgcctctacttgtttcctgggtagatccccctgccataccaaagtttgtgagaaatcctgcagttaggatgtcagaggtccactatgggactgtgttgygccagggttccttcactcacctcttccttttgttggaggtgggaggcaatcctcttgctagtgactctgaacaagctgcccagctttctccctctttaacagtggtgtctgtgttggctgtctatcaattttttgatgttttccctcaagagatctgtttgagtcacacaactaata

SEQ ID NO: 53439 - DNA, 555 bp, Homo sapiens
gatatgagtaaaacacccaggcagggcaatggaagttgtgctgtgggaacagccagagagacagtcttgggaaagattggcagacaagggcacacatggatgagatgcaccttggtcctgtcacaatggcagccttgctgtctcctgacccagcagacagtaggagttgccaccatttacagcaagatggagtgccttgggggattggtgcttacggttgcattttgctgctgctgcacagtacaatgaagccttctgagctccatgtagttaaagttgtgcctctacttgtttcctgggtagatccccctgccataccaaagtttgtgagaaatcctgcagttaggatgtcagaggtccactatgggactgtgttgtgccagggttccttcactcacctcttccttttgttggaggtgggaggcaatcctcttgctagtgactctgaacaagctgcccagctttctccctctttaacagtggtgtctgtgttggctgtctatyaattttttgatgttttccctcaagagatctgtttgagtcacacaactaata

SEQ ID NO: 53440 - DNA, 555 bp, Homo sapiens
gatatgagtaaaacacccaggcagggcaatggaagttgtgctgtgggaacagccagagagacagtcttgggaaagattggcagacaagggcacacatggatgagatgcaccttggtcctgtcacaatggcagccttgctgtctcctgacccagcagacagtaggagttgccaccatttacagcaagatggagtgccttgggggattggtgcttacggttgcattttgctgctgctgcacagtacaatgaagccttctgagctccatgtagttaaagttgtgcctctacttgtttcctgggtagatccccctgccataccaaagtttgtgagaaatcctgcagttaggatgtcagaggtccactatgggactgtgttgtgccagggttccttcactcacctcttccttttgttggaggtgggaggcaatcctcttgctagtgactctgaacaagctgcccagctttctccctctttaacagtggtgtctgtgttggctgtctatcaattttttgatgttttccctcaagagatctgtttgagtcacacaaytaata

SEQ ID NO: 53441 - DNA, 597 bp, Homo sapiens
ttttaaattttgacttgtgtcacatatgagaatataaagtatatctgtacaataaaggaaaatgaaacatcaaagtatctacctcaggttaagaagcagaacttggccgggcatggtggctcacacctgtaatcccagcactttgggaggcagaagtgggaagatagttgaagccaggagttggagaccagcttgttcaataaaggaagacctcatctctaacaacaaccacaacaacaaaaaatcagccaggcacggtggcatatgcttatagtcccagctactggtgcagsctcgaactcctggtctcaagccatcttcccacctcagcctcgtgttctagtgaacattgttatgatgcagtgtctcctattctgcatgtgcaggagtatttttacagtatgtacctggagtggaattgcttggtcattgggcatgtgtgtgttcagctctattgagtggcatcaaactgttctccaaagcagttgtactaatctataccctcaccagcagtgaatagtcttcccattgttcttcctcattcgaaactagatattcacagccttttaggtttttgttagagtatgaagtggtatc

SEQ ID NO: 53442 - DNA, 597 bp, Homo sapiens
ttttaaattttgacttgtgtcacatatgagaatataaagtatatctgtacaataaaggaaaatgaaacatcaaagtatctacctcaggttaagaagcagaacttggccgggcatggtggctcacacctgtaatcccagcactttgggaggcagaagtgggaagatagttgaagccaggagttggagaccagcttgttcaataaaggaagacctcatctctaacaacaaccacaacaacaaaaaatcagccaggcacggtggcatatgcttatagtcccagctactggtgcaggctcgaactcctggtctcaagccatcttcccacctcagcctcgtgttctagtgaacattgttatgatgcagtgtctcctattctgcatgtgcaggagtatttttacagtatgtacctggagtggaattgcttggtcattgggcatgtgtgtgttcagctctattgagtggcatcaaactgttctccaaagcagttgtactaatctataccctcaccagcagtgaatagtcttcccattgttcttcctcaktcgaaactagatattcacagccttttaggtttttgttagagtatgaagtggtatc

SEQ ID NO: 53443 - DNA, 1015 bp, Homo sapiens
tgtccaacaccttagcagggataactggaatcctaatgatatctttctccaggtgctgtctctctcaggttagcttgggctttttcagtggctggatctcaagaggaaagggttccaagagagcaagctccattgtgtaagccgctggttgcatcctgtttgctaatatcaaaattgccaatgtcacatcagtcaacatgtctaggactagattcagtttgggaagagctacagaagatataaatatcaggtggtgtggtacattggagccaccaaaataagtctgccatcagataaacaattaattcctcgcttttatgagcatggaattggtgctagatcataaactgactatcctcattttaccaactttccgttaattgttttctgtgtcagtttttcatatttccaagttgaaaccccctaaacacaacatttttttccactgctcattttttaccaaaattcaaacttcatgaaaccctggcatttcatcctttgccttccatcctcatggccaccatcaaagtccacatctttattatcttacrtgtgaacagctgtaataacctttccagttattaattctttaaacaccacttttagcctgatgcatttcttttcaagaacctatggtatgtttatagtccagattgcattaaacctaacctttctgttatagggcccttttctgaggcccttatttatcttgctctgcaccatttatataactattttctggctgagcacagtggctcattcatgtaatcccagtactttaggaggcagaagcaggtggattgcttgagctcaggtgttggagaccagcctgggcaacatggcaaaatgccatctctaccaaaaatacaaaaattagccaggtgtggtggtgggtgcctgtggtcccagctacttgggaggctgaggcaggaggattgctggagccagggaagttgaggctgcagtgagccatgatcatgctactgcactccagcctgcatgacagagtgagatc

SEQ ID NO: 53444 - DNA, 547 bp, Homo sapiens
agcaacaattgaaaaaatggagctgtgtcttctcagtaagggcttgattctgatactagagawcagcgatgtgagttgtgtggtctttgacaaactcagtcttctgagactggtttctttatctgtaaaatatacataagaatttgtatcttgcagagttgtagtgaagattaacagtgtgttaaacatctagcaggtgaacacttgataaattgcattttcttttcctttttggagaaatagagggcttttatgtatttatttatatttcacaggtatgaaaatgacaaaaagttcctctgagaaggagttctcaaattcaaaagttaaaagtaatccttaacactccagtaatatatttttttttttctttttaaggtaggaataccctctgttgggaaactgataaacaaaattttagaaatcggtcacaaataaaggatctaagtaaaattatttcacaaagtaaagccttttaaatgtacattaataaaaggtgtagtctctataggcctagggtttgcactgaagtttttctatgtggttt

SEQ ID NO: 53445 - DNA, 547 bp, Homo sapiens
agcaacaattgaaaaaatggagctgtgtcttctcagtaagggcttgattctgatactagagaacagcgatgtgagttgtgtggtctttgacaaactcagtcttctgagactggtttctttatctgtaaaatatacataagaatttgtatcttgmagagttgtagtgaagattaacagtgtgttaaacatctagcaggtgaacacttgataaattgcattttcttttcctttttggagaaatagagggcttttatgtatttatttatatttcacaggtatgaaaatgacaaaaagttcctctgagaaggagttctcaaattcaaaagttaaaagtaatccttaacactccagtaatatatttttttttttctttttaaggtaggaataccctctgttgggaaactgataaacaaaattttagaaatcggtcacaaataaaggatctaagtaaaattatttcacaaagtaaagccttttaaatgtacattaataaaaggtgtagtctctataggcctagggtttgcactgaagtttttctatgtggttt

SEQ ID NO: 53446 - DNA, 547 bp, Homo sapiens
agcaacaattgaaaaaatggagctgtgtcttctcagtaagggcttgattctgatactagagaacagcgatgtgagttgtgtggtctttgacaaactcagtcttctgagactggtttctttatctgtaaaatatacataagaatttgtatcttgcagagttgtagtgaagattaacagtgtgttaaacatctagcaggtgaacacttgataaattgcattttcttttcctttttggagaaatagagggcttttatgtatttatttatatttcacaggtatgaaaatgacaaaaagttcctctgagaaggagttctcaaattcaaaagttaaaagtaatccttaacactccagtaatatatttttttttttctttttaaggtaggaataccctctgttgggaaactgataaacaaaattttagaaatcggtcacwaataaaggatctaagtaaaattatttcacaaagtaaagccttttaaatgtacattaataaaaggtgtagtctctataggcctagggtttgcactgaagtttttctatgtggttt

SEQ ID NO: 53447 - DNA, 647 bp, Homo sapiens
tatccttttctcaaaggaaggataatttcacacacgcagggcacttttacaaatargagtcacttcacttgcagcaccttccttttagcacaagggtcagcaaattagcaccttgggccaaatccagcccactgcctgtttttgtaagtcaagtattttggaacacagccatgcttattcactttacagtccacagtgtcaattagctgggtgtgatgttgcacacctgtggtcccaactagtagagaggctgaggtgggaagatcactagagctcagaaagtcaagacttcagtgagccatgatcacacaactgcactccagcctgggaaacagagtgagaccctgtctcaaaaataaattaatttatatagtccacaaagcctaaaatatttactaactggctctttgcagaaaaagctggccaactcctggtttagcagatgaaagatcctttgatatattttaataaaagttttacccaatatactgaaacgtttatattaaatacagatccccatgtacaatcccttggcaatattcagattgagggtccaatatttcagcactcaggcactgacaataaaaatttaatgactagcaatcttgttgctaacaaggtacagcatcaatatagcatgtagcttc

SEQ ID NO: 53448 - DNA, 647 bp, Homo sapiens
tatccttttctcaaaggaaggataatttcacacacgcagggcacttttacaaataggagtcacttcacttgcagcaccttccttttagcacaagggtcagcaaattagcaccttgggccaaatccagcccactgcctgtttttgtaagtcaagtattttggaacacagccatgcttattcactttacagtccacagtgtcaattagctgggtgtgatgttgcacacctgtggtcccaactagtagagaggctgaggtgggargatcactagagctcagaaagtcaagacttcagtgagccatgatcacacaactgcactccagcctgggaaacagagtgagaccctgtctcaaaaataaattaatttatatagtccacaaagcctaaaatatttactaactggctctttgcagaaaaagctggccaactcctggtttagcagatgaaagatcctttgatatattttaataaaagttttacccaatatactgaaacgtttatattaaatacagatccccatgtacaatcccttggcaatattcagattgagggtccaatatttcagcactcaggcactgacaataaaaatttaatgactagcaatcttgttgctaacaaggtacagcatcaatatagcatgtagcttc

SEQ ID NO: 53449 - DNA, 647 bp, Homo sapiens
tatccttttctcaaaggaaggataatttcacacacgcagggcacttttacaaataggagtcacttcacttgcagcaccttccttttagcacaagggtcagcaaattagcaccttgggccaaatccagcccactgcctgtttttgtaagtcaagtattttggaacacagccatgcttattcactttacagtccacagtgtcaattagctgggtgtgatgttgcacacctgtggtcccaactagtagagaggctgaggtgggaagatcactagagctcagaaagtcaagactkcagtgagccatgatcacacaactgcactccagcctgggaaacagagtgagaccctgtctcaaaaataaattaatttatatagtccacaaagcctaaaatatttactaactggctctttgcagaaaaagctggccaactcctggtttagcagatgaaagatcctttgatatattttaataaaagttttacccaatatactgaaacgtttatattaaatacagatccccatgtacaatcccttggcaatattcagattgagggtccaatatttcagcactcaggcactgacaataaaaatttaatgactagcaatcttgttgctaacaaggtacagcatcaatatagcatgtagcttc

SEQ ID NO: 53450 - DNA, 666 bp, Homo sapiens
gggtactgatatcaatctccagctctgggattaatggggaaaggcaatacacacctgcaaacaagtgcatttctcttgcctttaagatacaaactagatcttgaggtctgtaatgaattgaaatgtgtccctatcaccgaaaatgttgaagttcttacccccagggtgtgtaaatgtgcccttgtttggaaagagggttttggcaggtgatcgagtcacaatgaggtcattagagtggcgcctaatcggatatgactgtgtccatatcaaatgggaaatttgtacacacagacggacacacagacaggcacacaggaagaatgccatgtgaatatgacagcagagrtcagggtgatgcatatttgatgattacctgcaaaccaccgggagctaggagggaggcctggaacacatccttccctcaccgccttcagaaggaaccaatcctgctgacacagtgatcttggacttccaaattccagaactgggaaataaatttctgttgtttaagccatccagcttgtgctactttgttacagtggtcctagcaaatgaatacaaggtcactggatgtcgtcagcacaaaactgccaggtcagatagaaacaatatagaactctgcattgccatttactagcagcatgactttgggtcatgagcttgcct

SEQ ID NO: 53451 - DNA, 642 bp, Homo sapiens
aacagtctgtattttaactttttatgatggtcccccacaaccttttgcttggctgtctgcatatgcaggcttgacaatctgcatgcctgtgacaggtggcaagctgagccaagttctcaggtcacaaaatgagacaaacaggaaaacgatagcagtccatggaggagaaaggatcaatagcaaatgggtacccacaaatgtacacaagagtcacaatccaagcaaataatatgcttttgccaaactgaatttggaaaggaagaaataaagacaaatttttaccttttattcttgaccaggcactgcaggtagagggctgagaaaactgacttcggtaaaagattttaaccttttgttgttggctttttgtcagttgtcccargactttatttgtaggctctggaatgcatcaggtgtttcagtcatcccattcttgttacaagaactgtagagattgaaaaggggtgatacattttctccccattataaaatgaggtgcagaagttaatataagtgcaagtcttaggccagtttggggagatcttaaacttctcaaaatgccaatgaagttgccacccctataacaaaagacagctaaaaagataaaaaggtaacaaatttattaaggtgcataatgcatgc

SEQ ID NO: 53452 - DNA, 1101 bp, Homo sapiens
tgtgacatcagtgcaccttagagacacctttacatgccctgtcagagtagggagacacggcccaggtcacaccccgaagggcctcagtgggcctttggacctcaatgccatggacccaaatatccctacatggcttgtgaccggctgagatcctgcctgggctcctaaattccctgcagcctgaatgagactgaggtctccatctccatctgctcctccatcactgggctgtaggtacacatggccccagggagctcagagctcgcccagatcccctgcaggcaagctcagagcagcaggactgcagttacgcagaccttcactcacatcctggctctgtcactcctgctgctgtgattctaggccggtaacataacctcgctaagggtcagcttcctcatctgtaaaatggggatgatgacacacaccccacagaattttgcaagagtgaaatagcagaggtaacgtgttcatgcatctgctgtcagtgctccatatgcacacgctgtcctgtgtgcacgcatgccggctcacacataccctaagctgcacggaagtcatggacgtgcaggtgtgtgcacactcaaccacactgaaggcacacctgcataaacacacaagggccacactagtcagtgatatgggggacctcgtgtcaacacttagaggcagacagtgaaggactcaatctatcataagacaaatgccctcctaaattcaagtcttcagcacccacttccaacaatcttctaacaccctctctctcccaggtctcctcctcccccagccaatgccatgcagccctcctcctttgctgtcctaagaagaagggcctccgcccacatgtgcacattggagacagactgtatgtagctcatgtgttcaagaaaccagagcaggtggaggcccaggcacgacactggggagcactcccagcrcgggaagtaattttctcagtgaacgacaaagcctctttgtgtgcacatgttcatgtgctgagcacacacccagtacgcacacacctaccatatgtcttaagagtttatagaaattgtggttcaaccactgccctggtcccatctcaatcatgagggagggaga

SEQ ID NO: 53453 - DNA, 1101 bp, Homo sapiens
tgtgacatcagtgcaccttagagacacctttacatgccctgtcagagtagggagacacggcccaggtcacaccccgaagggcctcagtgggcctttggacctcaatgccatggacccaaatatccctacatggcttgtgaccggctgagatcctgcctgggctcctaaattccctgcagcctgaatgagactgaggtctccatctccatctgctcctccatcactgggctgtaggtacacatggccccagggagctcagagctcgcccagatcccctgcaggcaagctcagagcagcaggactgcagttacgcagaccttcactcacatcctggctctgtcactcctgctgctgtgattctaggccggtaacataacctcgctaagggtcagcttcctcatctgtaaaatggggatgatgacacacaccccacagaattttgcaagagtgaaatagcagaggtaacgtgttcatgcatctgctgtcagtgctccatatgcacacgctgtcctgtgtgcacgcatgccggctcacacataccctaagctgcacggaagtcatggacgtgcaggtgtgtgcacactcaaccacactgaaggcacacctgcataaacacacaagggccacactagtcagtgatatgggggacctcgtgtcaacacttagaggcagacagtgaaggactcaatctatcataagacaaatgccctcctaaattcaagtcttcagcacccacttccaacaatcttctaacaccctctctctcccaggtctcctcctcccccagccaatgccatgcagccctcctcctttgctgtcctaagaagaagggcctccgcccacatgtgcacattggagacagactgtatgtagctcatgtgttcaagaaaccagagcaggtggaggcccaggcacgacactggggagcactcccagcgcgggaagtaattttctcagtgaacgacaaagcctctttgtgtgcacatgttcatgygctgagcacacacccagtacgcacacacctaccatatgtcttaagagtttatagaaattgtggttcaaccactgccctggtcccatctcaatcatgagggagggaga

SEQ ID NO: 53454 - DNA, 596 bp, Homo sapiens
ttattttttaatattttattaaatttcatacacattgaatamaatttcaaagtataaaaacaaaatgaagatatcctaaatactaataataaaattaaaccactttttaaaatcttcattattactgaaataaaaccagtaaaatattattttttatatatattttctttttctcccactttatgctttggatctgtaatgattaaaaactcagtttttctaaccttacaagtctctgctttattatattcacagttttgagtatgattaattgacaatctcaaaaaaagagtatctgttttaggaaggattgatttttcttctctctgtgcttctacagaagtagtttgaaagcaagtataatgtttttcactgtcggctgcaacaaactgaaccactttagcatttcttttttttttcaccttggtcttctaatgttttagccaccctcagcaagtgatataatcaactctttctgtatcgttgaacaagggacaacaactaccggttgcaagtcaccaaaaacatggtgtgattagtgtgctatcactaatttcatggattctctgattcgtttctccttaacataggggctt

SEQ ID NO: 53455 - DNA, 640 bp, Homo sapiens
atcatgtggactgttcatgtctctcacctttaagtagagagttcgggcaccatggaaaataatttggttattgtacatcagaggtgtaatgaagtggctgactccattttgtggtgtttgactgctcatggttttcaagcacagttcctcttctccttgtgccttacatctgggtaagtggatgagaaagtccaggttctctctccttttgcactggcaagaagttcaaatcatgtaagttcaggcccctgtaggaatcctcattccagctctgccctttaaatatttaaaaactccaaatcactttttacctggatctctcaaatccttttcacacctgtttgggaagtcagctctgcatcccatgtaagtcttattatgggaacattttataaccttttcgtgcacctgtagcatcatcagtgtcaacatccaaacaaacttttggagaagcagtcacgtaaagagttggtgaccagatgcgattgctyattcctgcaatcctagctacctaggaaaatgaagtgggatgatgacttgtgttcaggagttagaggctgcagtgaaatataattgcaccaccccactcgagcctgggcaacagagtgagatcttgtctcaaaaattgaaaaataaaaag

SEQ ID NO: 53456 - DNA, 577 bp, Homo sapiens
tcaaactttgtggtcatttagaccaccttcttgagaaacactgtcctctgaggacactcgctccatctcagtattgaagaaatcatcaatctaatctcacataatgggatgctgctatttcaacatccagatctcccttcagaacaagcacctttagtgctttttctcttgtgagttttgagaagacttacttttcccaaccaaagaaaagattatttttggagtaatagaggttttccttgctgattgccactcccagtctgtgggcctggagagggcaggttagatttgargaacttataccttagtgttttttttcaaagcttgaaatgtgttaatattttcgaccctatcatccatgctgttcaagacacatatctggaagttgaggcctgcctgtttctccattcccatccatcagtcatcatctgttttctaaaagctttttgaatgtatccacatttattgccttgtttggtttagagtagcattctcaattcttaccttgcatcacaactatctggggacctttaaaaaattgatacccagatgtcactcttaaatacaatttatctgg

SEQ ID NO: 53457 - DNA, 545 bp, Homo sapiens
cagtagtgtattattcatctttgtatcccttacaacacttaccataaagccttacacatygagccactcaataaacatctaccgaatgaaaggagagtctgatacagatagaaactatatttatatatattgggtatatgtataaatatatacatatattatatataatttatttatttctataccttgttcctcaaaagatatatggcctcaatttaaagaatagaactattctaatagggacaaattatatccaacaactataaacaataatttcaaaaaaatttaaaagggagagattgacatgagactaaaccatttagaaacactcgaatcacaatcagttaaaaattccaagcttccctatctgcacaggatggcctattgaatacccatgcttgcttaagtattccaaacttcggggtgatcactccaggctgaaattcccttgtctatttctctaagattggggccaatctgaagcaactcccagatctgagaaatagaagacaaaggtggaagctatcattcacccagactgaatt

SEQ ID NO: 53458 - DNA, 545 bp, Homo sapiens
cagtagtgtattattcatctttgtatcccttacaacacttaccataaagccttacacatcgagccactcaataaacatctaccgaatgaaaggagagtctgatacagatagaaactatatttatatatattgggtatatgtataaatatatacatatattatatataatttatttatttctataccttgttcctcaaaagatatatggcctcaatttaaagaatagaactattctaatagggacaaattatatccaacaactataaacaataatttcaaaaaaatttaaaagggagagattgacatgagactaaaccatttagaaayactcgaatcacaatcagttaaaaattccaagcttccctatctgcacaggatggcctattgaatacccatgcttgcttaagtattccaaacttcggggtgatcactccaggctgaaattcccttgtctatttctctaagattggggccaatctgaagcaactcccagatctgagaaatagaagacaaaggtggaagctatcattcacccagactgaatt

SEQ ID NO: 53459 - DNA, 545 bp, Homo sapiens
cagtagtgtattattcatctttgtatcccttacaacacttaccataaagccttacacatcgagccactcaataaacatctaccgaatgaaaggagagtctgatacagatagaaactatatttatatatattgggtatatgtataaatatatacatatattatatataatttatttatttctataccttgttcctcaaaagatatatggcctcaatttaaagaatagaactattctaatagggacaaattatatccaacaactataaacaataatttcaaaaaaatttaaaagggagagattgacatgagactaaaccatttagaaacactcgaatcacaatcagttaaaaattccaagcttccctatctgcacaggatggcctattgaatacccrtgcttgcttaagtattccaaacttcggggtgatcactccaggctgaaattcccttgtctatttctctaagattggggccaatctgaagcaactcccagatctgagaaatagaagacaaaggtggaagctatcattcacccagactgaatt

SEQ ID NO: 53460 - DNA, 545 bp, Homo sapiens
cagtagtgtattattcatctttgtatcccttacaacacttaccataaagccttacacatcgagccactcaataaacatctaccgaatgaaaggagagtctgatacagatagaaactatatttatatatattgggtatatgtataaatatatacatatattatatataatttatttatttctataccttgttcctcaaaagatatatggcctcaatttaaagaatagaactattctaatagggacaaattatatccaacaactataaacaataatttcaaaaaaatttaaaagggagagattgacatgagactaaaccatttagaaacactcgaatcacaatcagttaaaaattccaagcttccctatctgcacaggatggcctattgaatacccatgcttgcttaagtattccaaacttcggggtgatcactccaggctgaaattcccttgtctatttctctaagattggggccaatctgaagcaactcscagatctgagaaatagaagacaaaggtggaagctatcattcacccagactgaatt

SEQ ID NO: 53461 - DNA, 543 bp, Homo sapiens
gagttgtctgatttaatcagtgtagacaactgatctgaataacatgaacctcctatmtaattttatcaatagctttgagaggtttggggatatattactgacacatcttcagtggttcacttcattttctttgtgattgcctgtcaaccttccattttttatgatgaaaaacccatctgtgttatgatgaattggctttgtttccatgttatgtcctacacctaatacattattatttagagctgtaattaaacattactaaacagtttaatagggtgtttcatagttcaaggtaagactaactttattcagcagggaaaatctgattttattatttactttatttgaggtcagattattttcaaatagttaaataaagttaaatatattcaatatgtacataaacttgagaactctaaagagaaaattcctccccaaacaactacatcatagagctaggaggaggaaaaagccccaagttgtatttccaaaaaaacaaaaaagaaatatttaattagagtaatttatagatttaaagaactg

SEQ ID NO: 53462 - DNA, 543 bp, Homo sapiens
gagttgtctgatttaatcagtgtagacaactgatctgaataacatgaacctcctatctaattttatcaatagctttgagaggtttggggatatattactgacacatcttcagtggttcacttcattttctttgtgattgcctgtcaaccttccattttttatgatgaaaaacccatctgtgttatgatgaattggctttgtttccatgttatgtcctacacctaatacrttattatttagagctgtaattaaacattactaaacagtttaatagggtgtttcatagttcaaggtaagactaactttattcagcagggaaaatctgattttattatttactttatttgaggtcagattattttcaaatagttaaataaagttaaatatattcaatatgtacataaacttgagaactctaaagagaaaattcctccccaaacaactacatcatagagctaggaggaggaaaaagccccaagttgtatttccaaaaaaacaaaaaagaaatatttaattagagtaatttatagatttaaagaactg

SEQ ID NO: 53463 - DNA, 1108 bp, Homo sapiens
tttattatttattatttgttacctcttttattctcttattttctttgcctattttattttggattatttaaataatttgtatccatctattgaggttttaactatacctcttttgtagttttttaatggtttttatttaaagaacattctttagcattttttaagacagtcagctggtgacaaattctctcttagttttctttcatctgaggatgtttttatttcacctttattcctgaaaaatattttcactggctatagagatctgggttgacagctcttttttttcttttcagcactttaaaaatgttgtccacttccttctggccttcagtgttttagatgagaaatctccaattatttatataattgttttccctaaagaaacatgtcatctttctctggttgctttcagaaatttttctttgttttaagttttcagcagatttattatgatgtgtctgagaataaatttatttgaaytgggcctatatggaattcatttacaaaagcattgatgcaaaagcctgtgagtgctgaaggaaatgagcagctccttctaacctcaatacagatctgacctccataaaaataagagggagaaagagggggattggttagaaatgctctttgtactgttctaagttccaagaaatgtttgttcttgagccaaggtcatcaaccgctagagttctatatctttcagccatgggcctgaattagtactttcaccatgcttggttactggctgggagcagctcttgagaattacagctttggcacaaatatggtagtggatccagaggaacagaagctgagattgttgactatttatgctccttgcagcgggagatctgaatggtacagcttcccggctgccatattggatttactttgtaaaatatcatgctgacagctgcatggagagtagcatacagaaaccacggaaggagccgggacagtagttaaactacagcaactactaatgaaagagtactaacgagtgatagtgtcaaaattggcagaagagctcagatttggagtatatttttaacatagggccaacagaattttctgaaggcatagcttttgcatatgggataaaagt

SEQ ID NO: 53464 - DNA, 1280 bp, Homo sapiens
tagcaagatgactattacagtcttatataacataaacataattatgtacattctgttacctttgccacatcccatagcacctgggagcaagtcacagatggcacccacactcaaggggagaggattacacagggatgtgaatgccacatcttgggggccaccttatgagtcttgctacaacgactatatttactggaagaatgctcattgttgcttgaagtctccttggaatctttccttgtggtgcacatgtccttttgattttattccacctttgattgtcccatagcaaaacaaagaacccacttacactaatctcattttgttcccatccaatctctttcttagacttcagatatttagcttgacttaattatgtttacatttctagacatgctaatatgataagttatctatgaaataatacaggcagtaagagggaaaagataacctgtgccaactttgtttcaaagagaactttctcagaaattcatcttcttcaacaaaccacattgtctgagtcctgtccagccttctggactgatgattgagccctgtgaagggagggactacagatcaaagtcaagggggacgttttcatacagggtacctgaaagaagcctgagctgattagtgaggaacccccagagaatgaattgcttggaaagtgtgagacctgagacaaaccaggaagtggttgtgacatttgggcttactcccaaacctagagtgggaagtgaggaactctttcatggattttgggcacacacatgcagtaatagcaggaggcatggaggaaaggtgaggtctatagacatttaatttctgaccgtgtatttctgatttattttatttgtcatgagcagggttttttaaaaaaattttcttttttaaagaaaggtgaatgaaaaatgaacacatggttgagataaaagaaacaaacttttttttcgtggaaatcttgtgtatgtttgaaaatggtcactgaactttcctcttcccttcagatttccttgagtaggcatcrtgctgccccctgaatctctcctgtgggtattttaatcatgtttctctggatccattctggtaaccatatggaagacccattagaactctgctcagtagacagtgggatgaaatcagactaaggtgaatcttggaccttgtaaggaatttaatttcaaaggacctgtgaggagtcataacaccaccctcaaggaaaaagatacagtgattccctgtgtcatgatttttactgtaaccatatgtttttaattggg

SEQ ID NO: 53465 - DNA, 535 bp, Homo sapiens
ttttaccaaatgggcattttctcccaaaatttctgctagctccaccaggcaggggagcagcctgtggtttctgtctctcggggttcccagcagccacaccgcacacatgatggggactgtccttgcagcgcgacacacacagcctgtcccacagcgtacacctatatccctccacaggccacttctgcaggccaggagagcctcgttgtgcccaccacacattaccaggggcagccaggcgtgccgggaggcactgacggaaagcaagrcactcccgtgcataaaccatatcctgctctcagcatttcaacacaccatctcccccagagaagtacaccacagggaagagaaaaaagaaaacttagcccgagacccgttagttctcagggaatttatgacgtgaaaccctcacgcctcccttcctgcccaggcggcctgtatttccgtgcggcctgtcctcctggaatcattcggagaccatgccttcgcccagagccacctcactgaggtctagacgttccctggacggcaagct

SEQ ID NO: 53466 - DNA, 598 bp, Homo sapiens
ccagcataaagggcagccccttggtgtggggtgcaagccccatccaaacactgggcccctctggcctcatttcacaccagccacactgtgtgcccgttctgtacccaggactcccttcctggcccccttggactgattgttttgagatggagtttcaggcagatcacaaggtcaggagatcgagaccatcctggctaacatggtgaaaccctgtttctactaaaaatacaaaaaaattagccgggcatggtggtgggcscctgtagtcccagctgctcaggaggctgaggcaggagaatggcatgaacccgggaggcggagcttgcagtgagccgagattacactactgcactccagcctgggtgacagagggagactccatttcaaacaaaataaaagtgatgagaagcaaaagctgtgtaaggctggtggctcccctggttcttgggttatgaagtggcagggtctctcttgagctgagatttgtagttcctggttaaatgccagggtttaatgggcgtgctagggaaaatgttttttagtgagtggtaaatgtctccctggtgcctgcggtggtaattacttcaatggcaccatc

SEQ ID NO: 53467 - DNA, 503 bp, Homo sapiens
ggacatgatttcattcattttyatggctgcatagtattccatgatgtatatatgccacattttctttatgcagtcaaccactggtgggtaattatattagttcacgactcatgactttgctattgagaagagtgtgcaatgaatatatgagtgcagttgtctttttgatacaatgatttctttttttggggggttacatactccgtagtaggattgctggatctaatggtagttctatttttagtctagaaataacatttattcattcatctgctcaatattatgcacgtttaaggagtacttactgcgtactgaactacaatgaacaaaacaaaaatctctgcctttatgtaaccttaaaggggcagacagaggataaatcagtgctccaagcacttgtggcattaacttacttaatccttacctcaaacctgtgaaataatatctgttgcgctcctaagtctaagatgatgagagagagccacaaactggttagatttgcc

SEQ ID NO: 53468 - DNA, 503 bp, Homo sapiens
ggacatgatttcattcattttcatggctgcatagtattccatgatgtatatatgccacrttttctttatgcagtcaaccactggtgggtaattatattagttcacgactcatgactttgctattgagaagagtgtgcaatgaatatatgagtgcagttgtctttttgatacaatgatttctttttttggggggttacatactccgtagtaggattgctggatctaatggtagttctatttttagtctagaaataacatttattcattcatctgctcaatattatgcacgtttaaggagtacttactgcgtactgaactacaatgaacaaaacaaaaatctctgcctttatgtaaccttaaaggggcagacagaggataaatcagtgctccaagcacttgtggcattaacttacttaatccttacctcaaacctgtgaaataatatctgttgcgctcctaagtctaagatgatgagagagagccacaaactggttagatttgcc

SEQ ID NO: 53469 - DNA, 503 bp, Homo sapiens
ggacatgatttcattcattttcatggctgcatagtattccatgatgtatatatgccacattttctttatgcagtcaaccactggtgggtaattatattagttcacgactcatgactttgctattgagaagagtgtgcaatgaatatatgagtgcagttgtctttttgatacaatgatttctttttttggggggttacatactccgtagtaggattgctggatctaatggtagttctatttttagtctagaaataacatttattcattcatctrctcaatattatgcacgtttaaggagtacttactgcgtactgaactacaatgaacaaaacaaaaatctctgcctttatgtaaccttaaaggggcagacagaggataaatcagtgctccaagcacttgtggcattaacttacttaatccttacctcaaacctgtgaaataatatctgttgcgctcctaagtctaagatgatgagagagagccacaaactggttagatttgcc

SEQ ID NO: 53470 - DNA, 428 bp, Homo sapiens
ttttaaaagcactttgactacttgataggcacttggggacataacacacgcataagacagagtcctggcttcaagatgcttgtaactttgggttcgacctaaaggaaacatgattgtagaacagtttggtgtttgtgaggtattttgatttgcccggaaatgggacacctaacccattaggtaaagacttatgaatgtgcaatgaaaaaaacagtcatttttaaaacatcatttgggtcagatcttattgagatgtcttcttccttccctgtccttccctcccttcctctctttctctttctctctctagctgtaaatcattggcaggttatttaaccttggaaacttkaagtttctcttgttttataaagagataacattactaccttgctgatggagatcttgtgagaattaaatgacagaataga

SEQ ID NO: 53471 - DNA, 516 bp, Homo sapiens
ttttatttaggtaatacaataatttttaaaaaattacaaccaggatttaaaaatcagaaatattcacataaaaatgtcgatttttcagtttcttttagagaaaaaaaaaatgatctaatggcccgagtctgagctcacatggtaattattatatggaatgagcagggtctttattttgccttggcactcaccactctacccatggacattcagatttgcaatccctgatgcataytgtatatttggaagcatttaagatgttaaactttgtatatttagttatctacttaagatgagccaattctcattagtcatgttgtttatcaaagctatttaaatgaaatacttaaaaattcttttggtgataagcctttttaaaaaaattcaacaagttaatcattaatctttgggaaatattttttcccataccgtccatgaatggcaacagctattaacaaatatttatattattttattgaataaaaaataagctaacactattttaaatatttttca

SEQ ID NO: 53472 - DNA, 573 bp, Homo sapiens
tgttatagcaattcttaacttgcttaagaatttggaaagtcttacaaataagggcaggactgggtggagaaaatggagaggtctgattatctttcatgtaatccccacataatttggtgtctgcaggagacacttttatttgtttgctataaataactgggagcttgccagtggtgaagaagatatccagagaacattgtgaatatatacttagtttctccaacctggacagaccaggagcctttatgtcaagatcctgcacggataattcccctyaggtggagagctggtggtttttccaagcacccagccacaactgccactgcattctatttctttaatgctcaatcagtgcccctggccatttgatgatcattcctccctaatgttgtgaggtatttagtccaaatagtacaatccatgtttgctttctttctcttctagtaaaatgtataggttgctgtaatagcctgtgtctgccccagaccacaatcataaaaataataataaattacctcgctgtctctgggttttctttcaggctcaacatgtggtttgtggcttatggggtat

SEQ ID NO: 53473 - DNA, 550 bp, Homo sapiens
catgtacggtttcacttctatgccagtgcctcatctatgcctcagacctaataatctttatgtgacgtcattactacgtactacagtcatatacaatctatagtgctatatgtagccaagagagagagatactgtgaaatatggtcaggaatgaagagattctatgtcagtcagtccaaaaaagatagaaatttagtacagaaaaccaaccaactatggaaatgaatagtaagatagtaactaaatatgtatagrtgtgtgtatatgtatgtgtctgtgtgcatatatatatatatatatatatatatgcacacacacataggcatgaagtgccaaactatttttaaaagtatgaacttggtctataaagattctaaataggtcagtggaagactgggtcaaatctgagattccactttgaccttttgatctttatctgaaagaagtcagatgatttcccttttctggtacaagcctgtaagttagcacaacattttatttccctggactatgtgaagtatatagtagatatttaggacagagagaaacc

SEQ ID NO: 53474 - DNA, 641 bp, Homo sapiens
caccataaatatttgtccaaataataaatgaataagtaggcgtagagaaacggtgggtgttcctgagtagtatgagcgggtgtagacatgagtgtgtgcatggcaggctgtgaggttctgtgtagattgcatagtatacctgtgtgtggagcagtggaacatgattgtgagggtgggttgactgtctaatatcagggaaagaggttagtctttttctattggtcatgaagctgtggaaacaacatactgaaattgattattttgaaaattaatctgtttatattacaagagtgaatttgatgaggaaaggatttgtagagctttgcatccttaataactaacagaaacaggkctgcctttcaagaatctggagtaggagctagtttattaaacagtgacttaatattttcaaactagagacaataagggtcaaatccctacctcatagagacatggaaaatggaagctaataagttcctatgataggttgtgtaacccccatgcaggtttattctgtgaggatgctaaatataccaatcagactgctccttcatttaggaaattgcacaatgaagctttaaagattaaaatttaatgccttccatgagttcatctgaattaaaatgttttttgaaaaccca

SEQ ID NO: 53475 - DNA, 660 bp, Homo sapiens
gcatgatctcagctcactgcaacctccgcctcccaggttcaagcgattctcctgccttggcctcccgagtagctgggattacaggcacgtgccaccacacccagctaatgtttctatttttagtagagatggggtttcaccatgttggccaggctggtctcaatctcttgacctcgtgatccacccgccttggcctcccaaagtgctaggattacaggcrtgagccactgtgcccagcctcattggcttttttaaaggttttcttcgtgcagcagagcactctcctgatgctcctggctggtgctcatcctgctggttttcacttcctcggttgtattccagtccagccctgccacagccccgcatcagtggctctgcctgcgattcgagttctcccgtgtccccctgaccaacaccactcggcctccccttttccaagatgtggttttgcttcatattgggttctatcgggttgttacgacgagatggatgagggacagatgctagtataaagtggccagtttaataagtggcccatttattagtgaatatttgcatgttatgatagatttttctttctcccctatcttgtaactgcagggaaatggaaaatgaatattcaaaaggtcaggcccttaaaatatcaagaaaagtgattgg

SEQ ID NO: 53476 - DNA, 539 bp, Homo sapiens
ttcgctcattacagacgaaaccacctcctctcttcccagaatcatctttcttctggacaaggaaatagtttccccatatgacagaaaagaaagctaagcccctaaaggaggtatttacagaaggctcaggtagacaaaatggtgtaagaggactcaagaaagacagaagagggggcaacaatgagaagaccttgtgagagccaccagaaggagctgcagaagctgggcagagctcagggacctcaaggatggcagaggtgcaggggcgaggcctgctcccctggctccttgcacctgtgtcggtgccatggtccaaagggtaatggctgtattgattggtccgtaagttatctgtgcctggggatggccaggggacgctcctctcacygggaaataaaagcttcgaccatcaggggataaatgcagtgggagcagatgagccgtagagagattgatctgctgtactggatggtgaccctgcagtgtcaaagagtcaacagagagcaggagagagatggaggagtggaaggcctcagccc

SEQ ID NO: 53477 - DNA, 1186 bp, Homo sapiens
cctctttttcctaattctaaaggtaatatacagtgattgcagacattttgtaaaatacagaaaaataggccaggcacggtggctcacacctgtaaccctggcactttgggagggtgaggcaggtcgatcccttgaggtcaggagttcgaaaccccgtctctgctaacaatgcaaaaattagctgggagtagtggcaggcgcctgtgatctcaactactcgggaggctgaggcgggagaatcgcttgaatctgggaggtggaggttgcagtgagcttagatcacgccactacactctagcctgggcaacaagagcaaaactttgtctcaaaaaaamaacaacaacaacaacaaaaaaaaccagaagaatataaatcagataagaattacttggtatggaatcatccagaaattataacatatttaattttggaatattttcttcttttttaaataaagtaatgaataagtacttaaaatggatgggatcataatatatatattgtttgtagccttatagtttccctcttagtatattgtgagcactgacacatatccttacatgatttttaataattccacaaaataggtatataaatcacaactctatttggggttatttacattgtttacagctttggaattaaaaataatgcaatgggcaatggctggcaagctggccaaataggaacagttccagtctgcagctcccagtgagatcaacgcagaaggtgggtgatttctgcatttccaactgaggtacccggcccaactcattaggactggttagacagtgggtgcagcccatggagggtgagcagaagcaggatgaggcatcccctcacccaggaagcacaaggggttcaggaactccctcgcctagccaagggaagccatgaggcactgtgccatgagaaaccatgcattctggcccagatactatgcttttctcatggtctgtgcaacccacagaccaggagattccctcgggtccctacatgactagggcctagggtttcagcacaaaattgggtggccatgtgggcagacactgagctagctgcaggaggtttttttttttttctttcatacccagtggtgcctggaacgccagcaagacagaactgttcactcccctggaaagggggttgaagcctgggagccaagtgatctagctcagtggatccc

SEQ ID NO: 53478 - DNA, 636 bp, Homo sapiens
gagatggaatcttgctctgtcacccaggctggagtgcagtggcatgatctcagctcactgcaaggtctgccttccaggttcacgccattctctggcctcagcctcctgagtatctgggactacaggcacccgccaccacgcctggctaatttttttgtatttttagtagagacggggtttcaccrtgttagccgggatggtctcgatctcctgacctcgtgatccacccaccttggcctcccaaagtgctgggattacaggcgtgagccaccatgcccggcctgccaggcattattttaagagctttgaataattaaccaattgaatctttgcaagaaccccatgaaataggtcctgttgtacacagacccactttacggatgaggaaccagaggcacagagagattaaataatgttgccaaggtcaaatagctcctagggtgatgaagacagcattcaagtctccaacagtggcaatccgactggaaagactgaactttcactgtcaccacagggcctctcacaagcagcagttgcaactatgaagaaatgcggttcccctgccttggagggaggagaaatatgaacactcattcacatcaacagggagggcactgaggtttacctgaggcacag

SEQ ID NO: 53479 - DNA, 1669 bp, Homo sapiens
acaaatctagttagcttctgttagttaagaattcactggttctctgatcatttcaagtgacttgaaagtagagagagagagactcatgtaagacacagagctgagccagtttctatgattagaaggaggtaacctggagtgggaggacctaggggatgaaagctgcataaccatccttgactgtcttctttatttactcctatgatgtttcaatcagttattttgtacttctctatttaacaacttaacatcacagccttaataatctttacatatttatattgcattcaaataattaaggaggtttcacttatgtgatgtcctcaggcagcaagtgaccatctgccttacaccatctcgcctacaaatttacatgggaactccgtgtatacgtaaactcttatgcataacaaacaatcacataataacggcattcaacaaaaagcatgcatttctgtattgggtctgcaggtcagctgggttggctctgcagtctatgtattcatttgacaggtctatcttaaggggacagcaggtttcagggtgaaagttcttwaacagaatgtcagaaaaacaattgttcaagcccataattgcagaagcacatggtgagtttttgtttgtattacatgtcacatctgctgacatccctcaagccaaaacaagtgacatccaaacccaaagtcaagagacagggaagtacactcgtgccacggaggtagatggggaggaaattaatacttttgaataataatctaatatacctttctgtgatctataaattatgtatttttaaaccaaagttacacaataaataatactgtaaaacatgtagtacaactatagtttgaacacctaccatttcaaaacaacttctggtataacagtggttcttcgggcttacagaggtgtacaataatttcatgtggaataagtgattttaaaaataaataacggccctaattctacatataaggatttccattatttgtaatatccaaattgatgtctttgatgatttgttgatactatatagagtaaattggtgtttatgtctaattcccaaatgaattattgatattatcatccatttagttaagcaacaagtctttatttaggcattactacgtgtatgcactctacccagtcctagcaatacaagataaacagaaacagaatggtacccaatttcttgtaactcacaggttggtagaaaacaaacacattaagtgattgtgattttttaagttgatattaaaaaggttaatattaaaaaatacaaggtgttgtgaaagcctacagcagagggaataacacaaatctaagaggtcaggaaaggcctttataagcaagtgaactttcagttagaactgaagagtgagtaggaatacagcagatgagaaatgtgagggaggatattcctgccttgaaatgaacatggcttttgtgaacagcaaacggaagttgcaagtcccagatggcttctgtgcaatatagaagaaaggagaacaatacagattaagctggaaaggtagacaaagatgagatcatgaagcactactcaggaatatattacagaaattgctgaaggcctcagtcaatggcactggttgaaaagttttagacagtgggaaatggccatggagatcagcgatgaatagaagtcaaa

SEQ ID NO: 53480 - DNA, 691 bp, Homo sapiens
agaaagatgaaagaaagaaagaaagagagagagaaggaaagaaaaagaaagaaagaaaaagtaaggaagaaagaaggaaagaaagaaagacagaaaacatgtctatgtgtctttcattgaattctcttaaagatcctctgaggtgtgtagagaagttttatcatcatgattttaaatgaataaaataggacgggcgcggtggctcacacctctaatcctagcactttgggaggccgaggcaggcggattgcctgggctcaggagctcgagaccagcctgggcaacatggcaaaagtctgtctctacaaaaaatacaaaaaattagctgggtgtggtggtgcgcgcctgtaatcccagctactaaaaatacaaaaaattagctgagtgtggtggtgtgtgcctgtaatcccagctactcgggaggctaaggcacaagaattgccttaacccgggaggcacaggttgcagtgagccaagattgtgccactgcactccagcctgagtgacmcagcaagactctgcctcaaaaaaaaaaaaaaaaaaaaaggtagatagatagatagatagatagatagatagatagatagatagatagatagataaaatgaagtacagggagtttcaccaaaagaagcacagatcctctacttagctcaggaagtttctctttttggtcgtaacatgacttcca

SEQ ID NO: 53481 - DNA, 691 bp, Homo sapiens
agaaagatgaaagaaagaaagaaagagagagagaaggaaagaaaaagaaagaaagaaaaagtaaggaagaaagaaggaaagaaagaaagacagaaaacatgtctatgtgtctttcattgaattctcttaaagatcctctgaggtgtgtagagaagttttatcatcatgattttaaatgaataaaataggacgggcgcggtggctcacacctctaatcctagcactttgggaggccgaggcaggcggattgcctgggctcaggagctcgagaccagcctgggcaacatggcaaaagtctgtctctacaaaaaatacaaaaaattagctgggtgtggtggtgcgcgcctgtaatcccagctactaaaaatacaaaaaattagctgagtgtggtggtgtgtgcctgtaatcccagctactcgggaggctaaggcacaagaattgccttaacccgggaggcacaggttgcagtgagccaagattgtgccactgcactccagcctgagtgacacagcaagactctgcctcaaaaaaaaaaaaaaaaaaraaggtagatagatagatagatagatagatagatagatagatagatagatagatagataaaatgaagtacagggagtttcaccaaaagaagcacagatcctctacttagctcaggaagtttctctttttggtcgtaacatgacttcca

SEQ ID NO: 53482 - DNA, 873 bp, Homo sapiens
agtagaaaattctcaaaagaaaaattatgagaaaataaatgcacaagataaaaataattttagaaagataaaaagggtctacaaaccctctaaatttagcacatttttcattcatctttactaaggcaaatacctacatatatttacattcataattagcttagaaaaaaataggatattgctcaaatatttatgtgtcataatatctgaccttaaatttatacagacacatacaaaagaatgcatgtaaaagtttttgattcaaatgtctgtataagttttcaattcaattcaaatgtaacacactcaagaatgtggtataattggtgttagttttaagagcctcacagaattttatgtttcccattactcctagcaatattgtttcataattatttcatggaatttgctttaaatttgagttcaagccattttcagaccataaaartaaatggaacatgccaatgcaataaaaatcatttcctaacaaaagctgaaattattcatttttattttgtatgaaacttttagtataatgacttttctctgacatctgattaaacactaaagtatgctctgcttctctgaaataatggactggaatgaataaatctgtctaccagcaacctcatttcacaacaagttttattgtctacctttaactggaaagagatatttcctttctcatgtaaactttatcctataatggctgatttataacttttagccgtttcattctgtccttttaaatgtgtgcaaataatactttaaagaactgagcacttatttaaatgcaaaggaaaaatcttaatgtataattttatgtttgtatatttgcagaagagctaaaagaaaaatatcctatttgtgtac

SEQ ID NO: 53483 - DNA, 2607 bp, Homo sapiens
aaggaaacatcttagttagaagttattcagcagtaggtaccatccctaagtatttttcaccaaattcgtgacaataaagagctatctaaccagaaaaattagcgagtaccggcaccatccatagggctttgtctttacgcttcattagcacttaccatgccttacaatgtctaggattgaccctgatagcatttcggaaacaagctaatgctttgtccagttcttcagtgaagacaagctcacgccctaatgcgctataggcataagcatcatttggatccacttcgagagttctctggaagaattgaatcgcaatatcgtgttcccgttgcagaccgaaacagttccctgcagcacaccaggcctctggctggcgaatttttatccatgtctgtgaagtctttggacagaactgaaagagcaacctctttcggaggatgccaaagtgttgtagagtagatctccatgccttcgactctgtaattctcaatcctcctaacctctgagaattgtctttcagcttgcgtggactctgaaagtttacaataggcccttccgattttggcacagtacccaaccggtattgcrgtggtgagaagctagatggctcaagatactgatagcttctttgccgtggtaagaacacaaagctaaataacctttccccctttcacgaagaaggctcatcaagccttccgctgctgctttttgtagattaaaagcctgaatctgaggcgcgattgcggctattttcccttctgaaatgacggaagagtccaattttgtcacttccaggctatcacttatgttcggtggagttattgctcctttattagtttcacttttggttcttctgtttgggattttaggtggaaacttcatttttaattttctcctattctcctcggttgtggagctgtcactagtcaagagtcgtgaatttcttcgaggcggtgcatttgggggagatgtcatagtggggctcaatacctgaggtgttgcccttgtcggcggaccagaactttgtgtttttgcaaggactggagttacctttcggctctttcccctctgcgagaagacagacggtgttccggtttggccgattctggcaacaggcttctttgaaggggctccggtggatggcacgtcaatgacagacggtgtctcataccagtgcagttttgtcaatagggtccgtctccgggacttggggtttctaatggcaaaatgccaacacttggggttaatggactaacagctgctggtcctcctaataaacttcgaccagtttttggtttatgttgaacctgtttagatcatatggaagttcctgttcccagtgggacagtatcaggtgaaaggacagctgaatcgatagaagacactggggagtctgtattcaaggagtactttgaattggaagattctaaattccatccgtttcattcgacggtgtcctggggtgtttccgtaagaacggtctcgggctgtctgtgacataaactaggacgaggtccaagtgttgcggcgcaacacttggacaggcagttgctaaagctctctagagaggtgaatcaaaatgtttggtcaggatctggcttttcccccctatttcacatcatgattcaaagggacaccagaggaaaggatttcaacgaaggctcttttggtcacattctgatcctttggtaagccgatctgtcttgcaatatacatgtcccgacgatggaaggggaaagcgagctgaatcaccaaactcaggaacgataatatcatcgtggcttttctgcttatgaaacactccacccgataagatttgatccccttctgcaagcttgctgagatcaacacaacatttcgcaagcaggcatttgcattgcggggtagtacaactgtgtcctttcaagagtctatatgttttataggcctttcctgagcggtaagaacaggtcgccagtaagaacaaggcttcttctgagtgtacttctgcataaaggcgttctgcgggggaaaccgcatctcggtaggcatagtggtttagtgcttgccatatagcagcctggacgggtccctgcagcaccgccatcctcgaggctcaggcccactttctgcagtgccacaggcatcccccccccccccatagcggctccggcccggccagccccggctcatttaaaggcaccagccgccgttaccgggggatgggggagtccgagacagaatgacttctttatcctgctgactctggaaagcccggcgccttgtgatccattgcaaaccgagagtcacctcgtgtttagaacacggatccactcccaagttcagtggggggatgtgaggggtgtggcaggtaggacgaaggactctcttccttctgattcggtctgcacagtggggcctagggctggagctctctccgtgcggaccgctgactccctctaccttgggttccctcggccccaccctggaacgccgggccttggcagattctggcccttcctggcccttcagtcgctgtcagaaaccccatctcatgctcggatgccccgagtgactgtggctcgcacctctccggaaacattggaaatctctcctctacgcgcggcc

SEQ ID NO: 53484 - DNA, 2607 bp, Homo sapiens
aaggaaacatcttagttagaagttattcagcagtaggtaccatccctaagtatttttcaccaaattcgtgacaataaagagctatctaaccagaaaaattagcgagtaccggcaccatccatagggctttgtctttacgcttcattagcacttaccatgccttacaatgtctaggattgaccctgatagcatttcggaaacaagctaatgctttgtccagttcttcagtgaagacaagctcacgccctaatgcgctataggcataagcatcatttggatccacttcgagagttctctggaagaattgaatcgcaatatcgtgttcccgttgcagaccgaaacagttccctgcagcacaccaggcctctggctggcgaatttttatccatgtctgtgaagtctttggacagaactgaaagagcaacctctttcggaggatgccaaagtgttgtagagtagatctccatgccttcgactctgtaattctcaatcctcctaacctctgagaattgtctttcagcttgcgtggactctgaaagtttacaataggcccttccgattttggcacagtacccaaccggtattgcagtggtgagaagctagatggctcaagatrctgatagcttctttgccgtggtaagaacacaaagctaaataacctttccccctttcacgaagaaggctcatcaagccttccgctgctgctttttgtagattaaaagcctgaatctgaggcgcgattgcggctattttcccttctgaaatgacggaagagtccaattttgtcacttccaggctatcacttatgttcggtggagttattgctcctttattagtttcacttttggttcttctgtttgggattttaggtggaaacttcatttttaattttctcctattctcctcggttgtggagctgtcactagtcaagagtcgtgaatttcttcgaggcggtgcatttgggggagatgtcatagtggggctcaatacctgaggtgttgcccttgtcggcggaccagaactttgtgtttttgcaaggactggagttacctttcggctctttcccctctgcgagaagacagacggtgttccggtttggccgattctggcaacaggcttctttgaaggggctccggtggatggcacgtcaatgacagacggtgtctcataccagtgcagttttgtcaatagggtccgtctccgggacttggggtttctaatggcaaaatgccaacacttggggttaatggactaacagctgctggtcctcctaataaacttcgaccagtttttggtttatgttgaacctgtttagatcatatggaagttcctgttcccagtgggacagtatcaggtgaaaggacagctgaatcgatagaagacactggggagtctgtattcaaggagtactttgaattggaagattctaaattccatccgtttcattcgacggtgtcctggggtgtttccgtaagaacggtctcgggctgtctgtgacataaactaggacgaggtccaagtgttgcggcgcaacacttggacaggcagttgctaaagctctctagagaggtgaatcaaaatgtttggtcaggatctggcttttcccccctatttcacatcatgattcaaagggacaccagaggaaaggatttcaacgaaggctcttttggtcacattctgatcctttggtaagccgatctgtcttgcaatatacatgtcccgacgatggaaggggaaagcgagctgaatcaccaaactcaggaacgataatatcatcgtggcttttctgcttatgaaacactccacccgataagatttgatccccttctgcaagcttgctgagatcaacacaacatttcgcaagcaggcatttgcattgcggggtagtacaactgtgtcctttcaagagtctatatgttttataggcctttcctgagcggtaagaacaggtcgccagtaagaacaaggcttcttctgagtgtacttctgcataaaggcgttctgcgggggaaaccgcatctcggtaggcatagtggtttagtgcttgccatatagcagcctggacgggtccctgcagcaccgccatcctcgaggctcaggcccactttctgcagtgccacaggcatcccccccccccccatagcggctccggcccggccagccccggctcatttaaaggcaccagccgccgttaccgggggatgggggagtccgagacagaatgacttctttatcctgctgactctggaaagcccggcgccttgtgatccattgcaaaccgagagtcacctcgtgtttagaacacggatccactcccaagttcagtggggggatgtgaggggtgtggcaggtaggacgaaggactctcttccttctgattcggtctgcacagtggggcctagggctggagctctctccgtgcggaccgctgactccctctaccttgggttccctcggccccaccctggaacgccgggccttggcagattctggcccttcctggcccttcagtcgctgtcagaaaccccatctcatgctcggatgccccgagtgactgtggctcgcacctctccggaaacattggaaatctctcctctacgcgcggcc

SEQ ID NO: 53485 - DNA, 2607 bp, Homo sapiens
aaggaaacatcttagttagaagttattcagcagtaggtaccatccctaagtatttttcaccaaattcgtgacaataaagagctatctaaccagaaaaattagcgagtaccggcaccatccatagggctttgtctttacgcttcattagcacttaccatgccttacaatgtctaggattgaccctgatagcatttcggaaacaagctaatgctttgtccagttcttcagtgaagacaagctcacgccctaatgcgctataggcataagcatcatttggatccacttcgagagttctctggaagaattgaatcgcaatatcgtgttcccgttgcagaccgaaacagttccctgcagcacaccaggcctctggctggcgaatttttatccatgtctgtgaagtctttggacagaactgaaagagcaacctctttcggaggatgccaaagtgttgtagagtagatctccatgccttcgactctgtaattctcaatcctcctaacctctgagaattgtctttcagcttgcgtggactctgaaagtttacaataggcccttccgattttggcacagtacccaaccggtattgcagtggtgagaagctagatggctcaagatactgatagcttctttgccgtggtaagaacacaaagctaaataacctttccccctttcacgaagaaggctcatcaagccttccgctgctgctttttgtagattaaaagcctgaatctgaggcgcgattgcggctattttcccttctgaaatgacggaagagtccaattttgtcacttccaggctatcacttatgttcgstggagttattgctcctttattagtttcacttttggttcttctgtttgggattttaggtggaaacttcatttttaattttctcctattctcctcggttgtggagctgtcactagtcaagagtcgtgaatttcttcgaggcggtgcatttgggggagatgtcatagtggggctcaatacctgaggtgttgcccttgtcggcggaccagaactttgtgtttttgcaaggactggagttacctttcggctctttcccctctgcgagaagacagacggtgttccggtttggccgattctggcaacaggcttctttgaaggggctccggtggatggcacgtcaatgacagacggtgtctcataccagtgcagttttgtcaatagggtccgtctccgggacttggggtttctaatggcaaaatgccaacacttggggttaatggactaacagctgctggtcctcctaataaacttcgaccagtttttggtttatgttgaacctgtttagatcatatggaagttcctgttcccagtgggacagtatcaggtgaaaggacagctgaatcgatagaagacactggggagtctgtattcaaggagtactttgaattggaagattctaaattccatccgtttcattcgacggtgtcctggggtgtttccgtaagaacggtctcgggctgtctgtgacataaactaggacgaggtccaagtgttgcggcgcaacacttggacaggcagttgctaaagctctctagagaggtgaatcaaaatgtttggtcaggatctggcttttcccccctatttcacatcatgattcaaagggacaccagaggaaaggatttcaacgaaggctcttttggtcacattctgatcctttggtaagccgatctgtcttgcaatatacatgtcccgacgatggaaggggaaagcgagctgaatcaccaaactcaggaacgataatatcatcgtggcttttctgcttatgaaacactccacccgataagatttgatccccttctgcaagcttgctgagatcaacacaacatttcgcaagcaggcatttgcattgcggggtagtacaactgtgtcctttcaagagtctatatgttttataggcctttcctgagcggtaagaacaggtcgccagtaagaacaaggcttcttctgagtgtacttctgcataaaggcgttctgcgggggaaaccgcatctcggtaggcatagtggtttagtgcttgccatatagcagcctggacgggtccctgcagcaccgccatcctcgaggctcaggcccactttctgcagtgccacaggcatcccccccccccccatagcggctccggcccggccagccccggctcatttaaaggcaccagccgccgttaccgggggatgggggagtccgagacagaatgacttctttatcctgctgactctggaaagcccggcgccttgtgatccattgcaaaccgagagtcacctcgtgtttagaacacggatccactcccaagttcagtggggggatgtgaggggtgtggcaggtaggacgaaggactctcttccttctgattcggtctgcacagtggggcctagggctggagctctctccgtgcggaccgctgactccctctaccttgggttccctcggccccaccctggaacgccgggccttggcagattctggcccttcctggcccttcagtcgctgtcagaaaccccatctcatgctcggatgccccgagtgactgtggctcgcacctctccggaaacattggaaatctctcctctacgcgcggcc

SEQ ID NO: 53486 - DNA, 2607 bp, Homo sapiens
aaggaaacatcttagttagaagttattcagcagtaggtaccatccctaagtatttttcaccaaattcgtgacaataaagagctatctaaccagaaaaattagcgagtaccggcaccatccatagggctttgtctttacgcttcattagcacttaccatgccttacaatgtctaggattgaccctgatagcatttcggaaacaagctaatgctttgtccagttcttcagtgaagacaagctcacgccctaatgcgctataggcataagcatcatttggatccacttcgagagttctctggaagaattgaatcgcaatatcgtgttcccgttgcagaccgaaacagttccctgcagcacaccaggcctctggctggcgaatttttatccatgtctgtgaagtctttggacagaactgaaagagcaacctctttcggaggatgccaaagtgttgtagagtagatctccatgccttcgactctgtaattctcaatcctcctaacctctgagaattgtctttcagcttgcgtggactctgaaagtttacaataggcccttccgattttggcacagtacccaaccggtattgcagtggtgagaagctagatggctcaagatactgatagcttctttgccgtggtaagaacacaaagctaaataacctttccccctttcacgaagaaggctcatcaagccttccgctgctgctttttgtagattaaaagcctgaatctgaggcgcgattgcggctattttcccttctgaaatgacggaagagtccaattttgtcacttccaggctatcacttatgttcggtggagttattgctcctttattagtttyacttttggttcttctgtttgggattttaggtggaaacttcatttttaattttctcctattctcctcggttgtggagctgtcactagtcaagagtcgtgaatttcttcgaggcggtgcatttgggggagatgtcatagtggggctcaatacctgaggtgttgcccttgtcggcggaccagaactttgtgtttttgcaaggactggagttacctttcggctctttcccctctgcgagaagacagacggtgttccggtttggccgattctggcaacaggcttctttgaaggggctccggtggatggcacgtcaatgacagacggtgtctcataccagtgcagttttgtcaatagggtccgtctccgggacttggggtttctaatggcaaaatgccaacacttggggttaatggactaacagctgctggtcctcctaataaacttcgaccagtttttggtttatgttgaacctgtttagatcatatggaagttcctgttcccagtgggacagtatcaggtgaaaggacagctgaatcgatagaagacactggggagtctgtattcaaggagtactttgaattggaagattctaaattccatccgtttcattcgacggtgtcctggggtgtttccgtaagaacggtctcgggctgtctgtgacataaactaggacgaggtccaagtgttgcggcgcaacacttggacaggcagttgctaaagctctctagagaggtgaatcaaaatgtttggtcaggatctggcttttcccccctatttcacatcatgattcaaagggacaccagaggaaaggatttcaacgaaggctcttttggtcacattctgatcctttggtaagccgatctgtcttgcaatatacatgtcccgacgatggaaggggaaagcgagctgaatcaccaaactcaggaacgataatatcatcgtggcttttctgcttatgaaacactccacccgataagatttgatccccttctgcaagcttgctgagatcaacacaacatttcgcaagcaggcatttgcattgcggggtagtacaactgtgtcctttcaagagtctatatgttttataggcctttcctgagcggtaagaacaggtcgccagtaagaacaaggcttcttctgagtgtacttctgcataaaggcgttctgcgggggaaaccgcatctcggtaggcatagtggtttagtgcttgccatatagcagcctggacgggtccctgcagcaccgccatcctcgaggctcaggcccactttctgcagtgccacaggcatcccccccccccccatagcggctccggcccggccagccccggctcatttaaaggcaccagccgccgttaccgggggatgggggagtccgagacagaatgacttctttatcctgctgactctggaaagcccggcgccttgtgatccattgcaaaccgagagtcacctcgtgtttagaacacggatccactcccaagttcagtggggggatgtgaggggtgtggcaggtaggacgaaggactctcttccttctgattcggtctgcacagtggggcctagggctggagctctctccgtgcggaccgctgactccctctaccttgggttccctcggccccaccctggaacgccgggccttggcagattctggcccttcctggcccttcagtcgctgtcagaaaccccatctcatgctcggatgccccgagtgactgtggctcgcacctctccggaaacattggaaatctctcctctacgcgcggcc

SEQ ID NO: 53487 - DNA, 2607 bp, Homo sapiens
aaggaaacatcttagttagaagttattcagcagtaggtaccatccctaagtatttttcaccaaattcgtgacaataaagagctatctaaccagaaaaattagcgagtaccggcaccatccatagggctttgtctttacgcttcattagcacttaccatgccttacaatgtctaggattgaccctgatagcatttcggaaacaagctaatgctttgtccagttcttcagtgaagacaagctcacgccctaatgcgctataggcataagcatcatttggatccacttcgagagttctctggaagaattgaatcgcaatatcgtgttcccgttgcagaccgaaacagttccctgcagcacaccaggcctctggctggcgaatttttatccatgtctgtgaagtctttggacagaactgaaagagcaacctctttcggaggatgccaaagtgttgtagagtagatctccatgccttcgactctgtaattctcaatcctcctaacctctgagaattgtctttcagcttgcgtggactctgaaagtttacaataggcccttccgattttggcacagtacccaaccggtattgcagtggtgagaagctagatggctcaagatactgatagcttctttgccgtggtaagaacacaaagctaaataacctttccccctttcacgaagaaggctcatcaagccttccgctgctgctttttgtagattaaaagcctgaatctgaggcgcgattgcggctattttcccttctgaaatgacggaagagtccaattttgtcacttccaggctatcacttatgttcggtggagttattgctcctttattagtttcacttttggttcttctgtttgggattttaggtggaaacttcatttttaattttctcctattctcctcggttgtggagctgtcactagtcaagagtcgtgaatttcttcgaggcggtgcatttgggggagatgycatagtggggctcaatacctgaggtgttgcccttgtcggcggaccagaactttgtgtttttgcaaggactggagttacctttcggctctttcccctctgcgagaagacagacggtgttccggtttggccgattctggcaacaggcttctttgaaggggctccggtggatggcacgtcaatgacagacggtgtctcataccagtgcagttttgtcaatagggtccgtctccgggacttggggtttctaatggcaaaatgccaacacttggggttaatggactaacagctgctggtcctcctaataaacttcgaccagtttttggtttatgttgaacctgtttagatcatatggaagttcctgttcccagtgggacagtatcaggtgaaaggacagctgaatcgatagaagacactggggagtctgtattcaaggagtactttgaattggaagattctaaattccatccgtttcattcgacggtgtcctggggtgtttccgtaagaacggtctcgggctgtctgtgacataaactaggacgaggtccaagtgttgcggcgcaacacttggacaggcagttgctaaagctctctagagaggtgaatcaaaatgtttggtcaggatctggcttttcccccctatttcacatcatgattcaaagggacaccagaggaaaggatttcaacgaaggctcttttggtcacattctgatcctttggtaagccgatctgtcttgcaatatacatgtcccgacgatggaaggggaaagcgagctgaatcaccaaactcaggaacgataatatcatcgtggcttttctgcttatgaaacactccacccgataagatttgatccccttctgcaagcttgctgagatcaacacaacatttcgcaagcaggcatttgcattgcggggtagtacaactgtgtcctttcaagagtctatatgttttataggcctttcctgagcggtaagaacaggtcgccagtaagaacaaggcttcttctgagtgtacttctgcataaaggcgttctgcgggggaaaccgcatctcggtaggcatagtggtttagtgcttgccatatagcagcctggacgggtccctgcagcaccgccatcctcgaggctcaggcccactttctgcagtgccacaggcatcccccccccccccatagcggctccggcccggccagccccggctcatttaaaggcaccagccgccgttaccgggggatgggggagtccgagacagaatgacttctttatcctgctgactctggaaagcccggcgccttgtgatccattgcaaaccgagagtcacctcgtgtttagaacacggatccactcccaagttcagtggggggatgtgaggggtgtggcaggtaggacgaaggactctcttccttctgattcggtctgcacagtggggcctagggctggagctctctccgtgcggaccgctgactccctctaccttgggttccctcggccccaccctggaacgccgggccttggcagattctggcccttcctggcccttcagtcgctgtcagaaaccccatctcatgctcggatgccccgagtgactgtggctcgcacctctccggaaacattggaaatctctcctctacgcgcggcc

SEQ ID NO: 53488 - DNA, 2607 bp, Homo sapiens
aaggaaacatcttagttagaagttattcagcagtaggtaccatccctaagtatttttcaccaaattcgtgacaataaagagctatctaaccagaaaaattagcgagtaccggcaccatccatagggctttgtctttacgcttcattagcacttaccatgccttacaatgtctaggattgaccctgatagcatttcggaaacaagctaatgctttgtccagttcttcagtgaagacaagctcacgccctaatgcgctataggcataagcatcatttggatccacttcgagagttctctggaagaattgaatcgcaatatcgtgttcccgttgcagaccgaaacagttccctgcagcacaccaggcctctggctggcgaatttttatccatgtctgtgaagtctttggacagaactgaaagagcaacctctttcggaggatgccaaagtgttgtagagtagatctccatgccttcgactctgtaattctcaatcctcctaacctctgagaattgtctttcagcttgcgtggactctgaaagtttacaataggcccttccgattttggcacagtacccaaccggtattgcagtggtgagaagctagatggctcaagatactgatagcttctttgccgtggtaagaacacaaagctaaataacctttccccctttcacgaagaaggctcatcaagccttccgctgctgctttttgtagattaaaagcctgaatctgaggcgcgattgcggctattttcccttctgaaatgacggaagagtccaattttgtcacttccaggctatcacttatgttcggtggagttattgctcctttattagtttcacttttggttcttctgtttgggattttaggtggaaacttcatttttaattttctcctattctcctcggttgtggagctgtcactagtcaagagtcgtgaatttcttcgaggcggtgcatttgggggagatgtcatagtggggctcaatacctgaggtgttgcccttgtcggcggaccagaactttgtgtttttgcaaggactggagttacctttcggctctttcccctctgcgagaagacagacggtgttccggtttggccgattctggcaacaggcttctttgaaggggctccggtggatggcacgtcaatgacagacggtgtctcataccagtgcagttttgtcaatagggtccgtctccgggacttggggtttctaatggcaaaatgccaacacttggggttaatggactaacagctgctggtcctcctaataaacttcgaccagtttttggtttatgttgaacctgtttagatcatatggaagttcctgttcccagtgggacagtatcaggtgaaaggacagctgaatcgatagaagacactggggagtctgtattcaaggagtactttgaattggaagattctaaattccatccgtttcattcgacggtgtcctggggtgtttccgtaagaacggtctcgggctgtctgtgacataaaytaggacgaggtccaagtgttgcggcgcaacacttggacaggcagttgctaaagctctctagagaggtgaatcaaaatgtttggtcaggatctggcttttcccccctatttcacatcatgattcaaagggacaccagaggaaaggatttcaacgaaggctcttttggtcacattctgatcctttggtaagccgatctgtcttgcaatatacatgtcccgacgatggaaggggaaagcgagctgaatcaccaaactcaggaacgataatatcatcgtggcttttctgcttatgaaacactccacccgataagatttgatccccttctgcaagcttgctgagatcaacacaacatttcgcaagcaggcatttgcattgcggggtagtacaactgtgtcctttcaagagtctatatgttttataggcctttcctgagcggtaagaacaggtcgccagtaagaacaaggcttcttctgagtgtacttctgcataaaggcgttctgcgggggaaaccgcatctcggtaggcatagtggtttagtgcttgccatatagcagcctggacgggtccctgcagcaccgccatcctcgaggctcaggcccactttctgcagtgccacaggcatcccccccccccccatagcggctccggcccggccagccccggctcatttaaaggcaccagccgccgttaccgggggatgggggagtccgagacagaatgacttctttatcctgctgactctggaaagcccggcgccttgtgatccattgcaaaccgagagtcacctcgtgtttagaacacggatccactcccaagttcagtggggggatgtgaggggtgtggcaggtaggacgaaggactctcttccttctgattcggtctgcacagtggggcctagggctggagctctctccgtgcggaccgctgactccctctaccttgggttccctcggccccaccctggaacgccgggccttggcagattctggcccttcctggcccttcagtcgctgtcagaaaccccatctcatgctcggatgccccgagtgactgtggctcgcacctctccggaaacattggaaatctctcctctacgcgcggcc

SEQ ID NO: 53489 - DNA, 671 bp, Homo sapiens
tgtcaaaaccctgtctcttaaaaaacacaaaaattagcagtgcttaaaggtgcrtgcctatgatctcagctacttgggagactgaggcaggagctacttgggatcgcttgaacccaggaggtcaaggctgcagtgagctgtgatttcaccactgcactccaacctgggcgacagagcgagaccctatcgcaaaaaataaaataaaatgcataactggaggaagacagaaatagtaaagggttgccttgtgatgagcaggaccagagggaggatggtcgctgggtccacgaagctcacggtgagcagagagcagctgcctctgctcctgttggtgcaggagccaggctttcaaggaggcaggattgggagggtaactgcctgaggcaatgagcagttgtggttcctgcttacatgggcttggttagcacaaattgtagggttgagacataggcagatgggggtttaagcaggcttctggggcctaatcagggacaagcagcataaagagaaagaggaaattggtaaatcattcagtcttgtgaccttggacacacatccttgtgaccctgggcaccttgcctgtgaccctagatacctagcctttcctgggctcccagccttatgacctcgacgctcacccttgtgaccttgagtacccagccttataacct

SEQ ID NO: 53490 - DNA, 550 bp, Homo sapiens
aaatattgcctaaatattatatttaaggcagcattttggagagaaaaaatagtaattctatggggactgaggagtatagggaaagaaagagacggagaatggggagagagagacacacatagaaagacagagatagagagattgaaagagaacaagagagaatagcaatatgttgatttctgatgtaaatctctatagcctaaatcttggcatctttataagaaatgagttctaggagtctggagaggcacatctcttagggaacagatcagaaccttcaccccttgaagaagggactaattcaaatgacacagatccttttgaaactactattatacaagtggttgccatcttcacctttagtggcctaagtaatccactatcactactactaatatctgcttgtcatgtcatccaggtggttatatggaaaacttcttttagcatttctgtgcctccatcaagcaatatggtctcaatgaggtgaaatcttaattaacaaaaaaactyatttacttatttttattttttatctaattagtgctcaata

SEQ ID NO: 53491 - DNA, 599 bp, Homo sapiens
gaaataaatagtattgaagaataacatatacagaaaagtattaatatacagctcgtaagtgtacatctcaaagaaatgttataaattgagcacacctatgtagccaaaaccataccaggagacaaaaacatgaccagcacttcagaagcccctcttgtgccccctcccagccactatgcccaccatggttccccacccttctgactcctaacaccatggagtagtctgggcttcagtcactctggcagtgatagtgatgcataacatttatggagcgctaaatgccaggccagacttcaggctcaacttacactcacttttctataaatcctcacaatagttctatgaagtggttatagttctggcactcccattttacatttaaggagattgaggctgggtgcagtggctcatgcctgttatcccagcactttgggaggctgaggtggttggatcacctgaggtcaggagttcaagaccagcctggccaacatggtgaaaccccgtctctactaaaaatataaaaattagctgggcrtggtactaggtgctactcaggaggctgaggcaggagaattgcttgaacctgggaggcggag

SEQ ID NO: 53492 - DNA, 550 bp, Homo sapiens
tagagtctttgcttttctgacatagtatcttytgcttatctagactacagcaacttggtgtatcattctagattgtataaattatttatagatttgtaactctgcttttgcaacacagtccttttgtttctttttcttcattgtcccaggtttcttttatacatcatcattcactatgttaaaagttacaggtattatagtgtttgcattaataacccataacaagatattgttttgctttgttaaactagaagcaacattttgtgcttgttaatcttaaaaagtagaaatgaataccttgaactattatgtggagctatgtatttttctttctctcagaaaaaaatattggtgcttaagttctcgtttaaaaaaaatagagcttcttactcatttggaacaagttttaacaattgatgttcataatttttcaggtaatgatccttataacaggggcacacaaggcatttgccctgtacaaagcaatagaagaaggagtcaatcacatgtggactgtttccgctttccagcagcatccccggactatttt

SEQ ID NO: 53493 - DNA, 764 bp, Homo sapiens
ttcgatggcatttaaggacttaactgtagttacaattgagtgcttactatgtgtcttgcacctctgaatatttaacgtattacctcatttaatcttcacaacaacaacttatgtaggtagtagtataatctcgattttactgaagaggaaacaaaggttaatctggccacggtcaccttactagtgagtggttggaacagatatttgagaacaggcaacatggcttcaaaatctaagctcttgcctacccactaactactccctttcaacgaaagactagtaggttatttgaacctgaataccctgaaagtaacaagcaaattttataattttctttctgttgtcagcatattacaaattgcaatgaaaattctttgttttcccaccaattatttagaagattgtgttttcagaacttttataaaagcatcttttggaacttcaacgttgccaattttcctcagcttttttttcccttctgcttgtctcttcaaaagcttcatttttcgggtaatatcaccaccatactgaaaaatattttaaaacattggaagtctaagtcactctaaagagaaacaatcatatgattacagcggcatcagtacaaccttaacaaccataccaaattattatcsataaggcagacatctctctaatcttcctagcagatctaattttactgtcttctcaaagaatgatacaggatttaatctggatggaggtgaagattcccaaggaaacctagtataataatatgcatgtca

SEQ ID NO: 53494 - DNA, 596 bp, Homo sapiens
ccctagttgcacaggagaagcatacatgcctaggtcttgcctaaaaccatattgccacattctttgggtcaacaacttgactgcacaatctgtagttttttttcatcatgagtagagtctgcaataggcctttcctgtgttcgtaagaccagttacatctaactgaagggaagaataagaaacagcctgctgttgttcttccctcaaattaatgaacaggagtgcagtgggtcttcatgtgaataagaagacaaaagggaagctcagcaaacctgcttaaatctatagtgttagcaggccagcttggcagccatgaataatctatatattgtattactggagtgagcacaatgggctaagaaggcaaaccaaaatccagacacatctaaggagataattcaaagtgtataggcatgcacacattctgcacattttttttcatgctctatacgaggcttttacactaaatttttaaaacacaggatgtgattcctgacattctatcaaccattttattaggtsatatgtatcacaaatcataaagatcaaatctctactatagccctaccaccctgaatgcacccaatctagtctaa

SEQ ID NO: 53495 - DNA, 643 bp, Homo sapiens
caatttttgagaaattaaaacaaacctttttttttttgaaacaaggtcttgctatgttgcccaggctggagtgcactggtgtgatctcagctcaccacaatttctctacctctgtactcaagtgatcctcccacctcagcctcctgagcaactgggactataggtgtgttccaccactcctcactaacatatatatattttttgggtaaagatggtctttcaccatgttgcccaagttgttcctgaactcctgggctcaagtgatccacccaccttggcctcccaaagtgctgggacaaaacaaatcttacaagtaattatatattggtatgcatatatcatccctggccactttctgctctacttcttcagagatcttatttacatgatttgctccaatgagttgtttaataattaagaaaagagtatatttggaatgtttaaggaatttgagctgaggaatattgaagagctcatgagagtgtggggtgcggacaaaagcatggactttsaggccagattgatctggatttgagttctgacccagagtcctgccttgtaaattagagtttaaaatacgtattgtatagatttgagtgagataattctgaatatgagactgctttgctgtgtgcttggcaca

SEQ ID NO: 53496 - DNA, 609 bp, Homo sapiens
ctgtcccccagatgtcgatggaaagattgacactatgtcccaggtgaggtggtcacttaactactctcacccttttgatccaagtgtggcagataatttttaaatagtggcaaaatattgaaattaatatcctctctttcgtgtttggttttaggcacacacacacacacacacacacacacacacacacayatatatatatatacatttttcttttttttttaaactgtattttacatgttttctgcagaagttgctgtctccttaaaacattctcggaaaacaaaaactttaagagattttcctaagttttataaatcagaatataacattgagaggaatagattacgtcaaggtaaaatgaatggaaggataaccattagaagcagtgaaccagagggaagagaaggccgaaattaaatttatgtttggaatatgttccaaatgaccatgtttagaaattttaatgtaatattataaaatactctcatatatctctaagaatcctgaggaagctaaaacatcatgatctcatttaaaataactgcctctcccaattttcccctagtggtccacaatctaagttttgattttgcaggcataatttta

SEQ ID NO: 53497 - DNA, 1781 bp, Homo sapiens
tcaagcatgcatggattgacaaaggaggagttttttttcttctctgaaggcactgccctcggtgtgagggttggggaggaaagtgagatttcctagctatcttagagtttagaaccacagagcacagaggaagtgaaagcagaaggggagcctttgctcctcctcacacagcaacagagcaggagagctgcatgctgaaaagagctgcacacaaaaatgcttgtgcatgccactcaatttcttctgcttccaaacacttcagtttacttagttgcactgaagcacattttacacgggactaaaggaaaaggaatatgtcacggtaaagtgggggcatggtgtatccttatgttttgcaagaagaaaatctgagcttcctttaaataaacaatcatttatttatgaaggcatctttttgggacaaaatgacaagatccttatttcctcattgtctgtgagtcagagcaataatttccctttaatgctgggggtcaaaagatgacatatctgatcaccattcaccagatacatatttgagaaacaggaggacagacttcagtgacagaatagagcttagtgtgtgagaatgtgtttggctgcaagtaagaaacctgacttggccaggcacggtggctcacacctgtaatcccagaactttgggaggcccaggtggacagatcacgaggtcaggagtttgagaccagcctggccaacatggtgcaacctcatctctactaaaaatacaaaaattagcatggtggtgggtgcctgtaatcccagctcgggaggctgaggcaggagaattgtttgaacccgggaggcagaagttgcagcgagccaagattgtgccattgcactccagcctgggcaacagggtaagactcagtctcaaaaaaagaaagaaagaaagaaagaaagaaaagaaaccctgacttatagtagcatacttttctgatgtaaaaattaagtggtttctggtattggttcagcagttcaatcatgttgaggcatgtatctctccaattcccttgactttttctctcactgttccaagatagcttctttagacccaaccatatgtcaacatctaagtcaggataaagtgaactaggaaaaaggatgcataccagccacatctgtctatttttatagggaaaacaaagtatttcccccaaattttccccagcagagttctgagtgcatcacacagccacctctgtctgcaagaaaggctgggaagcccagcatcagggttgtcaggactggctgtgatccatcacctggagctctgttaccctgagcaaaactggatcctgttattaaggacaaaggttggaagcgttctgggaaggcaaataaaagtgtctatctaacacagtaacttggaaagagtaaggaatttattctagacaggactgagttccaagtcccaacactattattgataagaaataattatagagaagtagaagaacttgggaccagccatctggaaacctgagtccttcgtctctcttgtgtctccaagaatgaacccagttgactagaagactctgagagtttcttccagcccaacagtggctcgttccaggctctgatgtgtcatgactagggtttggaaggggcatggtttctgcccttacgaccaatgagcagtaggtgctgctgggtctctccccttccccaagtcatcttatcaccttggaaagtgttgtatgaggcayagaggagaggcacttttgagcacattaagatcaaacagacttgagtttgagtttttg

SEQ ID NO: 53498 - DNA, 659 bp, Homo sapiens
tctgtgatagtgtttcttactataagacattcaattagctaaatatggtcatctaccattacctgaaagaacattattataacagagagagaaaactggaactttccatcaactttccacccagaaaaagaattggtcaccagaattctaaagagtaatgtatggcagacacatgaaaaaaatgctcatcatcactggccatcagaraaatgcaaatcgaaaccactatgagatatcatttcacaccagttagaatggcaatcattaaaaagtcaggaaacaacaggtgctggagaggttgtggagaaataggaacacttttacactgttggtgggactgtaaactagttcaaccattgtggaagacagtgtggagattcctcaaggatcaagaattagaaataccatttgatccagccatcccattactggatatatatgcaaaggattataaatcatgctgctataaagacacaggcacatgtatgtttattgtggcactattcacaatagcaaagacttggaaccaacccatatgcccatcaatgatagactggattaagaaaatttggcacttacacaccatggaatactatgcagcataaaaaatgatgagttcatgtactttgtagggacatggatgaagctggaaaccatca

SEQ ID NO: 53499 - DNA, 659 bp, Homo sapiens
tctgtgatagtgtttcttactataagacattcaattagctaaatatggtcatctaccattacctgaaagaacattattataacagagagagaaaactggaactttccatcaactttccacccagaaaaagaattggtcaccagaattctaaagagtaatgtatggcagacacatgaaaaaaatgctcatcatcactggccatcagaaaaatgcaaatygaaaccactatgagatatcatttcacaccagttagaatggcaatcattaaaaagtcaggaaacaacaggtgctggagaggttgtggagaaataggaacacttttacactgttggtgggactgtaaactagttcaaccattgtggaagacagtgtggagattcctcaaggatcaagaattagaaataccatttgatccagccatcccattactggatatatatgcaaaggattataaatcatgctgctataaagacacaggcacatgtatgtttattgtggcactattcacaatagcaaagacttggaaccaacccatatgcccatcaatgatagactggattaagaaaatttggcacttacacaccatggaatactatgcagcataaaaaatgatgagttcatgtactttgtagggacatggatgaagctggaaaccatca

SEQ ID NO: 53500 - DNA, 659 bp, Homo sapiens
tctgtgatagtgtttcttactataagacattcaattagctaaatatggtcatctaccattacctgaaagaacattattataacagagagagaaaactggaactttccatcaactttccacccagaaaaagaattggtcaccagaattctaaagagtaatgtatggcagacacatgaaaaaaatgctcatcatcactggccatcagaaaaatgcaaatcgaaaccactatgagatatcatttcacaccagttagaatggcaatcattaaaaagtcaggaaacaacaggtgctggagaggwtgtggagaaataggaacacttttacactgttggtgggactgtaaactagttcaaccattgtggaagacagtgtggagattcctcaaggatcaagaattagaaataccatttgatccagccatcccattactggatatatatgcaaaggattataaatcatgctgctataaagacacaggcacatgtatgtttattgtggcactattcacaatagcaaagacttggaaccaacccatatgcccatcaatgatagactggattaagaaaatttggcacttacacaccatggaatactatgcagcataaaaaatgatgagttcatgtactttgtagggacatggatgaagctggaaaccatca

SEQ ID NO: 53501 - DNA, 659 bp, Homo sapiens
tctgtgatagtgtttcttactataagacattcaattagctaaatatggtcatctaccattacctgaaagaacattattataacagagagagaaaactggaactttccatcaactttccacccagaaaaagaattggtcaccagaattctaaagagtaatgtatggcagacacatgaaaaaaatgctcatcatcactggccatcagaaaaatgcaaatcgaaaccactatgagatatcatttcacaccagttagaatggcaatcattaaaaagtcaggaaacaacaggtgctggagaggttgtggagaaataggaacacttttacactgttggtgggactgtaaactagttcaaccattgtggaagacagtgtggagattcctcaaggatcaagaattagaaataccatttgatccagccatcccattactggatatatatgcaaaggattataaatcatgctgctataaagacacakgcacatgtatgtttattgtggcactattcacaatagcaaagacttggaaccaacccatatgcccatcaatgatagactggattaagaaaatttggcacttacacaccatggaatactatgcagcataaaaaatgatgagttcatgtactttgtagggacatggatgaagctggaaaccatca

SEQ ID NO: 53502 - DNA, 659 bp, Homo sapiens
tctgtgatagtgtttcttactataagacattcaattagctaaatatggtcatctaccattacctgaaagaacattattataacagagagagaaaactggaactttccatcaactttccacccagaaaaagaattggtcaccagaattctaaagagtaatgtatggcagacacatgaaaaaaatgctcatcatcactggccatcagaaaaatgcaaatcgaaaccactatgagatatcatttcacaccagttagaatggcaatcattaaaaagtcaggaaacaacaggtgctggagaggttgtggagaaataggaacacttttacactgttggtgggactgtaaactagttcaaccattgtggaagacagtgtggagattcctcaaggatcaagaattagaaataccatttgatccagccatcccattactggatatatatgcaaaggattataaatcatgctgctataaagacacaggcacatgtatgtttattgtggcactattcacaatagcaaagacttggaaccaacccatatgcccatcaatgatagactggattaagaaaatktggcacttacacaccatggaatactatgcagcataaaaaatgatgagttcatgtactttgtagggacatggatgaagctggaaaccatca

SEQ ID NO: 53503 - DNA, 953 bp, Homo sapiens
aaactaagactttttcaaaaaacaaaacaaaaaaccctgagaaatataaagatccttagaataaaattagaaccrtaagtccacactatgcacaaatgtgagcagcaaaaactctgggcaaaacccctcatttcaggcaaaaataattgggaaagaccacagtggtctaaggagcgtaagaatcattctcattatttttaacactttttctgagctcttcaccctaagggtggcaccagccatacagaaacgcatcgcaggcagctaaagctctgaaagaaatccaaacgtctgactagaataacaatgaaaggagcctctgtgagccagagagatgtggggaatccaggaaaagatgagccagagaaagggtttcccgtaattttgcacatgaaccagcacaacttctagctcacacataagagagattcagggaagcacagcaaaggctctgagaataaattaaaatataaactgttgccaaagctccaaactaactaataaatggtctgtggataggaaagacccaaagtagcatagcacagtctttgaactgatactggaaatactattcacaggtgagaaaacttgtggtttagaacctaaccagcctgacagtctaccaaaacaaaaataaaatcagcattcttccaaggattttaacaggacttagaaacacaaaatataactccaaaattactcaaatgagagcatcaggaaaatgtgatccaaaattgagggaaaagacaatcaaaagtaatttgtaagggaagcataactatattaaaaaaaaacagacatagagagtaagaaaagggaaaattacaggtcagtgtcactcatgaaatagatataaaaatcctaagccaaaaattagcataccaaagccaaaaacaaagctcagatgataaatcattaccaagttgggttttttccagaaattcaaagttaaa

SEQ ID NO: 53504 - DNA, 646 bp, Homo sapiens
cagagtgtagccctgaggatcaaatgtggtcacgcgcgtgcacgcactgtgaagatggggccagctttcccggggagaggcatgacagtggcaaacactgtcctacttttaacagacaccgtcctacttttaacagacaccacacatcggctctgtcccaggtacatgctcgtgaatgcagccgaaagtacagaaacttccaaatgatagaacctcagcttagtgctgggaaatgagtgaaaaccaaacaccctcgacacacacccttaaagaagacagtcttaatctgttaagcgttgcagtcccaagtgagagcaaatgttgcaggcaagggaaagggataacttggattttcgggtggatcacctgaggtcaggagttcaagaccagcctggccaacatgggaaacctcatctctactaaaaatgcaaaaattagctaggcttggtgrcaggtgcctgtaatcccagctactcaggaggcccaggcaggggaattgcttgaacctgggaggcgggggttgcagtgagcctagatcatgccactgcactccagcctgggtgacagagtagggtctttctcaaaaaaaaaaaaaagtaactgaaagaaagtaccaaatcaatattttactcaatgatttatgttc

SEQ ID NO: 53505 - DNA, 1150 bp, Homo sapiens
acccctttgctattgaagagtacgcagcactactgcattactaatcaatgattggacatcatttttttctttactattcaatttcattaattatctatatcaaaataagcctcaaaatacttctaatatctcttgtatgaatccatttatctcctggtcttttctactctcctgctgggctttcatcagatctcacccaccatagtgagaaaacctactaactattccatcccatcccatcatacttctaaggaattttttttaaagattactttggaaatctaatcatagttgttctctgcatgaaaacctacagttatttccatctctcttgggaaacgttacagtttctaatgtcggtaggctccagccctactcatttttttgtgtgtcttcaaacaaatcttattttcttgccttcctgatcttctgccctctgcatacaatgggccctttggctggaaaatcctcctctctaaccctactgctcgtgctcactttctgcttcttcccaaggctaactcatcctcccggtctcaactgcaaaattcttctttgcagcctagactccaccctctcctcccaagcaggtttagtccccagcccacatttttccatggagtcctctactttccttctcctaggcctttataaaaaaattgcttttgctttttaaaattattattatttttaattggmaaatcaaaattatgtacatttgttggggtacaaagtgatgttttgatatttgtatacaacgtagtatgattaaaccaaattaattaacagatccaccacctcaccttcttatcatttttgtgatgaaacatttgaaatttactcccttagttattttgaattgtacaatacatcataattattggagatagtcactccactacgcaatagactccaaaggtattccatctgtttacctgaaactcttgggccatcatctccccattccctccttccttcccactcccagcctctagttactgtcattctattttctgcttctatgagtttgacattcttagactccacatataagtgaaatcatgtgatatatgcctttctttctgtccctggcttattttgcttagcataatgtcttccaggttcttccatgttacaaatgacaagattt

SEQ ID NO: 53506 - DNA, 1150 bp, Homo sapiens
acccctttgctattgaagagtacgcagcactactgcattactaatcaatgattggacatcatttttttctttactattcaatttcattaattatctatatcaaaataagcctcaaaatacttctaatatctcttgtatgaatccatttatctcctggtcttttctactctcctgctgggctttcatcagatctcacccaccatagtgagaaaacctactaactattccatcccatcccatcatacttctaaggaattttttttaaagattactttggaaatctaatcatagttgttctctgcatgaaaacctacagttatttccatctctcttgggaaacgttacagtttctaatgtcggtaggctccagccctactcatttttttgtgtgtcttcaaacaaatcttattttcttgccttcctgatcttctgccctctgcatacaatgggccctttggctggaaaatcctcctctctaaccctactgctcgtgctcactttctgcttcttcccaaggctaactcatcctcccggtctcaactgcaaaattcttctttgcagcctagactccaccctctcctcccaagcaggtttagtccccagcccacatttttccatggagtcctctactttccttctcctaggcctttataaaaaaattgcttttgctttttaaaattattattatttttaattggaaaatcaaaattatgtacatttgttggggtacaaagtgatgttttgatatttgtatacaacgtagtatgattaaaccaaattaattaacagatccaccacctcaccttcttatcatttttgtgatgaaacatttgaaatttactcccttagttattttgaattgtacaatacatcataattattggagatagtcactccactaygcaatagactccaaaggtattccatctgtttacctgaaactcttgggccatcatctccccattccctccttccttcccactcccagcctctagttactgtcattctattttctgcttctatgagtttgacattcttagactccacatataagtgaaatcatgtgatatatgcctttctttctgtccctggcttattttgcttagcataatgtcttccaggttcttccatgttacaaatgacaagattt

SEQ ID NO: 53507 - DNA, 1150 bp, Homo sapiens
acccctttgctattgaagagtacgcagcactactgcattactaatcaatgattggacatcatttttttctttactattcaatttcattaattatctatatcaaaataagcctcaaaatacttctaatatctcttgtatgaatccatttatctcctggtcttttctactctcctgctgggctttcatcagatctcacccaccatagtgagaaaacctactaactattccatcccatcccatcatacttctaaggaattttttttaaagattactttggaaatctaatcatagttgttctctgcatgaaaacctacagttatttccatctctcttgggaaacgttacagtttctaatgtcggtaggctccagccctactcatttttttgtgtgtcttcaaacaaatcttattttcttgccttcctgatcttctgccctctgcatacaatgggccctttggctggaaaatcctcctctctaaccctactgctcgtgctcactttctgcttcttcccaaggctaactcatcctcccggtctcaactgcaaaattcttctttgcagcctagactccaccctctcctcccaagcaggtttagtccccagcccacatttttccatggagtcctctactttccttctcctaggcctttataaaaaaattgcttttgctttttaaaattattattatttttaattggaaaatcaaaattatgtacatttgttggggtacaaagtgatgttttgatatttgtatacaacgtagtatgattaaaccaaattaattaacagatccaccacctcaccttcttatcatttttgtgatgaaacatttgaaatttactcccttagttattttgaattgtacaatacatcataattattggagatagtcactccactacgcaatagactccaaaggtattccwtctgtttacctgaaactcttgggccatcatctccccattccctccttccttcccactcccagcctctagttactgtcattctattttctgcttctatgagtttgacattcttagactccacatataagtgaaatcatgtgatatatgcctttctttctgtccctggcttattttgcttagcataatgtcttccaggttcttccatgttacaaatgacaagattt

SEQ ID NO: 53508 - DNA, 552 bp, Homo sapiens
ctttccatttcttttcattaaacttttgggttataattataatttattatttgtgttataataggcacaaaatcttcaaatgctataatattttgcattttttatgaagagcaaagtacactattcacatatttctgccacttcctgctttttaaattttaaatgtgtacgttttttgccagttaccrattaaattttttctcttttctcatctacctaaatatatccttcatatatattacagtcatcccttgacatatatagtaggatgtttgttccaggacaactcatgtgtacccaaattcatgcatacttaattcctctggttgcccccgtggaaactacctatagaagtaagatctccatatgggtgggtttctccttctgtttggttggacacagcctcacactcgtgaacagatgcaactacaaactacgttgtccacctcctccctgtgtagattaacagtatgattttgtctgtatgtaaccggttaaatatttccccccatctgctctcacatgaattctgctaaaaaatcacactctata

SEQ ID NO: 53509 - DNA, 438 bp, Homo sapiens
ggttgtttatattaaatttaacagaattaagcaacatacagtagcgatttattctgtgggctctggagtctgcctgtaagggtttgagctctagctcagcgacttctttactgtgtgaacattgatatgtttactttaatctctctaggccttagttttctggattttgaggcttaaatgagttattamttgtaaaacacttaggagagtctctgctatgtaataagtgttcccaatatatagattttatttcatctagttgaatttagagagtagcaagccactcccttcccgccccacccccgaaaaaaaaaaaaaacacaccaccaccaacaacccacttttagtgtggcaccatatctaagaaggtattctccaagacttctttatgtgaagtagttcagccttggcagagttaaaagttttcagttataatct

SEQ ID NO: 53510 - DNA, 438 bp, Homo sapiens
ggttgtttatattaaatttaacagaattaagcaacatacagtagcgatttattctgtgggctctggagtctgcctgtaagggtttgagctctagctcagcgacttctttactgtgtgaacattgatatgtttactttaatctctctaggccttagttttctggattttgaggcttaaatgagttattacttgtaaaacacttaggagagtctctgctatgtaataagtgttccyaatatatagattttatttcatctagttgaatttagagagtagcaagccactcccttcccgccccacccccgaaaaaaaaaaaaaacacaccaccaccaacaacccacttttagtgtggcaccatatctaagaaggtattctccaagacttctttatgtgaagtagttcagccttggcagagttaaaagttttcagttataatct

SEQ ID NO: 53511 - DNA, 438 bp, Homo sapiens
ggttgtttatattaaatttaacagaattaagcaacatacagtagcgatttattctgtgggctctggagtctgcctgtaagggtttgagctctagctcagcgacttctttactgtgtgaacattgatatgtttactttaatctctctaggccttagttttctggattttgaggcttaaatgagttattacttgtaaaacacttaggagagtctctgctatgtaataagtgttcccaatatatagattttatttcatctagttgaatttagagagtagcaagccactcccttccygccccacccccgaaaaaaaaaaaaaacacaccaccaccaacaacccacttttagtgtggcaccatatctaagaaggtattctccaagacttctttatgtgaagtagttcagccttggcagagttaaaagttttcagttataatct

SEQ ID NO: 53512 - DNA, 563 bp, Homo sapiens
gaggaacaagaacacgaggaattgccttaaaagggagctggtcaggtctcgccagaaaagttcacgcaataacaaaccagtcgcccacaacagacatctccacattttcccagagctgtcccccagccaggcggccggagtgaggggatgctgacggtgacaatgctatcaatttccattttgcttttgccaaatayggaaaaggacacttcaaagacttttaaaaataacttccaaacaactcaagggtgaaaaaaaagaaagaggtaaaaaattaccgtctgcctgcttgagaatagcgataatgaaaataagtgatagaaataagaacagctgcttttgcacacgttatgtcatctgctccttagcactctatgaagcaggcagaacaggtcatggtatccccatttcatagataaggaaactgagacccagaaacataggatacaacagagaggaaatgatcaggtgggtgagaagctatgtttgtctggccccaaagcctgggttccccaaagccctctgcaggctgatatgagcctaaccccagcccggctcctggc

SEQ ID NO: 53513 - DNA, 563 bp, Homo sapiens
gaggaacaagaacacgaggaattgccttaaaagggagctggtcaggtctcgccagaaaagttcacgcaataacaaaccagtcgcccacaacagacatctccacattttcccagagctgtcccccagccaggcggccggagtgaggggatgctgacggtgacaatgctatcaatttccattttgcttttgccaaatatggaaaaggacacttcaaagacttttaaaaataacttccaaacaactcaagggtgaaaaaaaagaaagaggtaaaaaattacmgtctgcctgcttgagaatagcgataatgaaaataagtgatagaaataagaacagctgcttttgcacacgttatgtcatctgctccttagcactctatgaagcaggcagaacaggtcatggtatccccatttcatagataaggaaactgagacccagaaacataggatacaacagagaggaaatgatcaggtgggtgagaagctatgtttgtctggccccaaagcctgggttccccaaagccctctgcaggctgatatgagcctaaccccagcccggctcctggc

SEQ ID NO: 53514 - DNA, 563 bp, Homo sapiens
gaggaacaagaacacgaggaattgccttaaaagggagctggtcaggtctcgccagaaaagttcacgcaataacaaaccagtcgcccacaacagacatctccacattttcccagagctgtcccccagccaggcggccggagtgaggggatgctgacggtgacaatgctatcaatttccattttgcttttgccaaatatggaaaaggacacttcaaagacttttaaaaataacttccaaacaactcaagggtgaaaaaaaagaaagaggtaaaaaattaccgtctgcctgcttgagaatagcgataatgaaaataagtgatagaaataagaacagctgcttttgcacacgttatgtcatctgctccttagcactctatgaagcaggcagaacaggtcatggtatccccatttcatagataaggaaactgagacccagaaacataggatacaacagagaggaaatgatcaggtgggtgagaagctatgtttgtctggccccaaagcctgggttccccaaagccctctgcaggctgatatgagcctaaccccagccyggctcctggc

SEQ ID NO: 53515 - DNA, 1410 bp, Homo sapiens
ggcttaccaaaggatcagaatgtgaccaaaagagccttcgttgaaatcctttcctctggtgtccctttgaatcatgatgtgaaataggggggaaaagccagatcctgaccaaacattttgattcacctctctagagagctttagcaactgcctgtccaagtgttgcgccacaacacttggacctcgtcctagtttatgtcacagacagcccgagaccgttcttacggaaacaccccaggacaccgtcsaatgaaacggatggaatttagaatcttccaattcaaagtactccttgaatacagactccccagtgtcttctatcgattcagctgtcctttcacctgatactgtcccactgggaacaggaacttccatatgatctaaacaggttcaacataaaccaaaaactggtcgaagtttattaggaggaccagcagctgttagtccattaaccccaagtgttggcattttgccattagaaaccccaagtcccggagacggaccctattgacaaaactgcactggtatgagacaccgtctgtcattgacgtgccatccaccggagccccttcaaaaaagcctgttgccagaatcggccaaaccggaacaccgtctgtcttctcgcagaggggaaagagccgaaaggtaactccagtccttgcaaaaacacaaagttctggtccgccgacaagggcaacacctcaggtattgagccccactatggcatctcccccaaatgcaccgcctcgaagaaattcacgactcttgactagtgacagctccacaaccgaggagaataggagaaaattaaaaatgaagtttccacctaaaatcccaaacagaagaaccaaaagtaaaactaataaaggagcaataactccaccgaacataagtgatagcctggaagtgacaaaattggactcttccgtcatttcagaagggaaaatagccgcaatcgcgcctcagattcaggcttttaatctacaaaaagcagcagcggaaggcttgatgagccttcttcgtgaaagggggaaaggttatttagctttgtgttcttaccacggcaaagaagctatcagcatcttgagccatctagcttctcaccactgcaataccggttgggtactgtgccaaatcggaagggcctattgtaaactttcagagtccacgcaagctgaaagacaattctcagaggttaggaggattgagaattacagagtcgaaggcatggagatctactctacaacactttggcatcctccgaaagaggttgctctttcagttctgtccaaagacttcacagacatggataaaaattcggccagccagaggcctggtgtgctgcagggaactgtttcggtctgcaacgggaacacgatattgcgattcaattcttccagagaactctcg

SEQ ID NO: 53516 - DNA, 1410 bp, Homo sapiens
ggcttaccaaaggatcagaatgtgaccaaaagagccttcgttgaaatcctttcctctggtgtccctttgaatcatgatgtgaaataggggggaaaagccagatcctgaccaaacattttgattcacctctctagagagctttagcaactgcctgtccaagtgttgcgccacaacacttggacctcgtcctagtttatgtcacagacagcccgagaccgttcttacggaaacaccccaggacaccgtcgaatgaracggatggaatttagaatcttccaattcaaagtactccttgaatacagactccccagtgtcttctatcgattcagctgtcctttcacctgatactgtcccactgggaacaggaacttccatatgatctaaacaggttcaacataaaccaaaaactggtcgaagtttattaggaggaccagcagctgttagtccattaaccccaagtgttggcattttgccattagaaaccccaagtcccggagacggaccctattgacaaaactgcactggtatgagacaccgtctgtcattgacgtgccatccaccggagccccttcaaaaaagcctgttgccagaatcggccaaaccggaacaccgtctgtcttctcgcagaggggaaagagccgaaaggtaactccagtccttgcaaaaacacaaagttctggtccgccgacaagggcaacacctcaggtattgagccccactatggcatctcccccaaatgcaccgcctcgaagaaattcacgactcttgactagtgacagctccacaaccgaggagaataggagaaaattaaaaatgaagtttccacctaaaatcccaaacagaagaaccaaaagtaaaactaataaaggagcaataactccaccgaacataagtgatagcctggaagtgacaaaattggactcttccgtcatttcagaagggaaaatagccgcaatcgcgcctcagattcaggcttttaatctacaaaaagcagcagcggaaggcttgatgagccttcttcgtgaaagggggaaaggttatttagctttgtgttcttaccacggcaaagaagctatcagcatcttgagccatctagcttctcaccactgcaataccggttgggtactgtgccaaatcggaagggcctattgtaaactttcagagtccacgcaagctgaaagacaattctcagaggttaggaggattgagaattacagagtcgaaggcatggagatctactctacaacactttggcatcctccgaaagaggttgctctttcagttctgtccaaagacttcacagacatggataaaaattcggccagccagaggcctggtgtgctgcagggaactgtttcggtctgcaacgggaacacgatattgcgattcaattcttccagagaactctcg

SEQ ID NO: 53517 - DNA, 1410 bp, Homo sapiens
ggcttaccaaaggatcagaatgtgaccaaaagagccttcgttgaaatcctttcctctggtgtccctttgaatcatgatgtgaaataggggggaaaagccagatcctgaccaaacattttgattcacctctctagagagctttagcaactgcctgtccaagtgttgcgccacaacacttggacctcgtcctagtttatgtcacagacagcccgagaccgttcttacggaaacaccccaggacaccgtcgaatgaaacggatggaatttagaatcttccaattcaaagtactccttgaatacagactccccagtgtcttctatcgattcagctgtcctttcacctgatactgtcccactgggaacaggaacttccatatgatctaaacaggttcaacataaaccaaaamctggtcgaagtttattaggaggaccagcagctgttagtccattaaccccaagtgttggcattttgccattagaaaccccaagtcccggagacggaccctattgacaaaactgcactggtatgagacaccgtctgtcattgacgtgccatccaccggagccccttcaaaaaagcctgttgccagaatcggccaaaccggaacaccgtctgtcttctcgcagaggggaaagagccgaaaggtaactccagtccttgcaaaaacacaaagttctggtccgccgacaagggcaacacctcaggtattgagccccactatggcatctcccccaaatgcaccgcctcgaagaaattcacgactcttgactagtgacagctccacaaccgaggagaataggagaaaattaaaaatgaagtttccacctaaaatcccaaacagaagaaccaaaagtaaaactaataaaggagcaataactccaccgaacataagtgatagcctggaagtgacaaaattggactcttccgtcatttcagaagggaaaatagccgcaatcgcgcctcagattcaggcttttaatctacaaaaagcagcagcggaaggcttgatgagccttcttcgtgaaagggggaaaggttatttagctttgtgttcttaccacggcaaagaagctatcagcatcttgagccatctagcttctcaccactgcaataccggttgggtactgtgccaaatcggaagggcctattgtaaactttcagagtccacgcaagctgaaagacaattctcagaggttaggaggattgagaattacagagtcgaaggcatggagatctactctacaacactttggcatcctccgaaagaggttgctctttcagttctgtccaaagacttcacagacatggataaaaattcggccagccagaggcctggtgtgctgcagggaactgtttcggtctgcaacgggaacacgatattgcgattcaattcttccagagaactctcg

SEQ ID NO: 53518 - DNA, 493 bp, Homo sapiens
atagttctcccaggcaggatacaaaacatttcgtcttctggccggagatggattcactgccctccctgcagacacgcaggctcacacacggagcactgggaagtacacatttactgtactgcatgccgactgccttgaagaaactgtagctaaccaccttattagtattcttgcctccaccgtgtctcacttgcagcatcagagggctgagcaaatgcagtagaacagggacagacacagctctggcaatcatctcaatgcaggctgccgaatgttgggggtgggggatgcagcacttcgagattaataaccttgccataatccggggcacctgcaagcagacacctctgctgattgacctgctmctggcttgatgcatctgcctgggggagagggatccggaatctacctagtcctggggcccccctgattttggatgttcatttgatccttcacagatctgggaaggtaacagcgagccgtaccatctgca

SEQ ID NO: 53519 - DNA, 799 bp, Homo sapiens
agaatggatttcccagctgagaggtaattggtgcttaggcagggaaggggtgaggagagagacatattctggaaggcaaagtagagagaaaaggaattgctaagggaatttgattaatgaacgaagacggacaactttttagttatcgaaaaaggccttcccttggcaattctaaatcactcccacattattggaataattaagccaactcgactctctgctttgccaggaaaaagaaaatgccaaccccaaatggaaatgtatggctaaaacacacattcasgcacattgaaatacaatgggtgtgagcagctctccatttgttcaatacactattgaacaaagtcacaatgctttttttagggcaaaatcaatgtgaattgtcctaaggagcagtggctccacgctgatcccccaaccatgaaacttagacgattcccttgtaatttttaaactgttttaagcactcttgattttgcccaaagaaatcattcagaacttgttaggataggaattcacttgcttcaggttattttacaaaactcattcattcttggcaggcaaagcacatttagaaaagactgagaagacttcgtgcaaagagaaactctgtacctgcatagaattcgggactgtagactgcacccacaactggattcaatttccagccttaaaacaaatacacaaaaacattattatcacatttgattcaacatcttatataattgcaaatgaatcacaaatcaaatgggttaaagtatctcattttgtattttaaaatgtaaaggaggtgtcgttt

SEQ ID NO: 53520 - DNA, 529 bp, Homo sapiens
atggctggtctcgtctgaagggaccaaggtagcttcccctgtgtctgatgctttggacagggctctccagcatgcaggtctcagagtatcctgaattcttacrtggcaattgattttccaggaaaaagagtcccaacaagtttggcttcacattcatcctctaaagaaacatttcctacttggatggagcaccttatagatggaacatcagacccaatacatatggaaaaaattaagataatctagcccaaataagttggaaaacattgccttctctagttccctcttggatagtgaaaatgcacatgagcatattaaaggtcttaaaagtcaagagcacaatttaacctgctgcctcaaacacttcctaaccggttttggcctatcagtataaaaattatttgacacttggaaataaggcaaaaatgttgtgatatggtttggctctgtgtccctacccaagtctcatgtctaattgtaatcccccagtgttggaggtggggcctggtaggaggtgattagatcatgg

SEQ ID NO: 53521 - DNA, 601 bp, Homo sapiens
atgatacagcaaatttttcataaagctaaatttattcaatttaaatgagtatctttaattataacattttaaaatttattttccatttttagagagagtctcactctggtgttgagaggtcaggagtttgagaccagcctggccaacatatagtgaaaccccgtctctactaaaaaatacaaaaattagctgggtgtagcgccacatgcctgtagtcccagctacttgggaagctgaggcaggagaatcgcttgaacccagagggcggaggttgcagtgagctgagattatgccactgtactccagcctgggcaacagagcaagactccgtctctcaaaataaaaaataaataaaagagaagacaggtgacaccataataaaaaaaaaaggacagatgataagctgatcaagtttccttcaggtgacatatatatgctatactctcaagaaacaatagaaaaagttactggttttttcaacttactcccttacatttttatgtatttcaaagcatgtgatccaaggggtagaatattaagcctcaatgttactactctacaatamaggaaaatgtgggagttagaatggactgaattctca

SEQ ID NO: 53522 - DNA, 631 bp, Homo sapiens
aagaagaggaagaaaaacttcaagcggcattttctctagagaaacaagatcttcacctagttcttgaaacaatatcatttattttagaacaggtatttttattgcatcaaattttctagccatgatttgtttactacatatttgtattgttatgatatctatgacattctgttttttttaattaaaaagtatgcaagatggaagctgtgaatgtattttagttaagaatttcagtgtaaaaatatttgaatattgtaaagtatttaaatatgaattgagacttcattgatttgagacagttatacaagattttaattcattggtacttggtataatggaaaaatggacatattttacttaagatattaaatgatttgggggatatattgactaggatggtaagtaagacatttagaaaagaagtattgtcatattatgtgccactaagctgccttctgcatccctttttctcatctaaattcacttcctgatttaagctcctattcaaggctcatctcctttacttgagctgtgaccccttatacttcctttatttggatttttaaaaatccttggctcatcacagtagagcacattgttagtctttcagcagttcatatgygttagttat

SEQ ID NO: 53523 - DNA, 608 bp, Homo sapiens
ggattctgaaaaagaacaagactttaggggaaaattaaggaaatctgaatgaagtgtagagttcagtgtaaataatgtgttggtactggttcactggtgtgaaacatgtaccacagtaatgttagcaggggaaacaggtgtggagtgcacaggaactctccttaatattcttcagacatttctrtaactctgaaactatcctaaattaaaaagtttactttaaaactgatccctgaaatttgacttgatcgcctgggaggctcaagtacccttcactgagaacacggaaggggacgtgggaggaaaatcatgaagctctatctcagacatgaggctggagcacccatcagacactcagcatagacagcaaggaggcagctctggagtggggctcagcaaagagctctgacctcatgaaacaaacctaggagccatcagcagattggatctctgtaagcagatgggggtcacctagaataagaaggaatatagagaagggcctgaactcacaggggttggggagggaatggggagatggtggtcaaagggtataaacttttggttataagatgaatattttctggggctgtaatgtacagcacggtgac

SEQ ID NO: 53524 - DNA, 555 bp, Homo sapiens
caggttattttgagttgctgccttctctatctttgacttctccctcagtggctgaggagcaaacctagaaggctggaaagcttcctagaagccctcaactttgagaaactactcacacccttaagccctgggattgtttgtgcctgaacactctgaccttttttttttccttaaacctttccaaactttcagcagagtgttgtccagtcacacatgcaggcttttctctaagcaaactttcagcagctatttatgacatttaacatcttttgccatctggagaaggtgatagttttcaaaaccattctgccctggttccttttgtttagctgttttcccctcaatttctctctcttctttcacttaactacaagcagcaaggaggaaccagggagtaccttcagcastttgcattgaaatctccttggccacataagcaagtttgtcacaagtactgctttccacaggactgtgggatacaattttgttagggtttctttcacctcttaacaaggatatatcttcctccaataacatgctccctacttaattctg

SEQ ID NO: 53525 - DNA, 629 bp, Homo sapiens
ttttttcactcataatttaatgctttggtagaaagccagactagaaacaaaggctagtcaattttaacgctraaaatgaaggcagatttttttcatttgaaatgtaatcactagaaatggtcgttaatttttcttcctaaactaatttccagtagcagaacagagtaccatacatggcctattagcaaagggttgtgagagagtaagtataggaaagtgtttgaaaatgtaagaaatgaaacaatttcaaaatcacttttatattataattatcacaaaataatagaagcgtctgtgtgtgtgttcatgtgcacatgctcagatggaacatcatatacatttatcatattcctaattatagtaagatctcatataaggcttattatgtaccttcatgaaaattcaggcagttgtcatcctttaagcgccaaagcaacaaatcaaaattaaggaaccagagttgctaacctccaggaagccatgtggagcctactgatgaatggagatgatgaggctgcagagtgatgagtggaaagagtgctgacttcctatgggtaattcgcaactctcagcttcttcttattctctttaaacttgtactttacacaggtggaagaaagaacagcaga

SEQ ID NO: 53526 - DNA, 629 bp, Homo sapiens
ttttttcactcataatttaatgctttggtagaaagccagactagaaacaaaggctagtcaattttaacgctgaaaatgaaggcagatttttttcatttgaaatgtaatcactagaaatggtcgttaatttttcttcctaaactaatttccagtagcagaacagagtaccayacatggcctattagcaaagggttgtgagagagtaagtataggaaagtgtttgaaaatgtaagaaatgaaacaatttcaaaatcacttttatattataattatcacaaaataatagaagcgtctgtgtgtgtgttcatgtgcacatgctcagatggaacatcatatacatttatcatattcctaattatagtaagatctcatataaggcttattatgtaccttcatgaaaattcaggcagttgtcatcctttaagcgccaaagcaacaaatcaaaattaaggaaccagagttgctaacctccaggaagccatgtggagcctactgatgaatggagatgatgaggctgcagagtgatgagtggaaagagtgctgacttcctatgggtaattcgcaactctcagcttcttcttattctctttaaacttgtactttacacaggtggaagaaagaacagcaga

SEQ ID NO: 53527 - DNA, 604 bp, Homo sapiens
tgaacttcctcagctgtagtgtcacagatgcagggaggcaggcacacagagaaacacttctcttcattaataaaggagattaaccttaacatttcttggcagctgttcagcaggcggcttgttatcacgacaagcattttttttaaagactcacaatgataaacaatatgtcacaacagctgtcaaagtgtgttttatgcagtgactttccataygtagcttaggggggttttttttagaattgtccctgtgactaaccatgtcctgttggctgaaggcagctatagagggtgatatggtttggctgtgtctccacccaaatctcatcttgaattgtagctcccataattcccatgtgttgtgggagggacctggtgggagttaattgaatcatggagtcagtttccccctactcttcttgtggtagtaagtctcacaagatctaatggttctataaggaggaacaccttttgattgattctcattttctctcttgctgctgccatgtaagaagtgtctttcgccttctaccatgattgtgaggcctccccagccgcatggaactgtgagtccattaaacctctttttctttataaattacccc

SEQ ID NO: 53528 - DNA, 604 bp, Homo sapiens
tgaacttcctcagctgtagtgtcacagatgcagggaggcaggcacacagagaaacacttctcttcattaataaaggagattaaccttaacatttcttggcagctgttcagcaggcggcttgttatcacgacaagcattttttttaaagactcacaatgataaacaatatgtcacaacagctgtcaaagtgtgttttatgcagtgactttccatacgtagcttagggggkttttttttagaattgtccctgtgactaaccatgtcctgttggctgaaggcagctatagagggtgatatggtttggctgtgtctccacccaaatctcatcttgaattgtagctcccataattcccatgtgttgtgggagggacctggtgggagttaattgaatcatggagtcagtttccccctactcttcttgtggtagtaagtctcacaagatctaatggttctataaggaggaacaccttttgattgattctcattttctctcttgctgctgccatgtaagaagtgtctttcgccttctaccatgattgtgaggcctccccagccgcatggaactgtgagtccattaaacctctttttctttataaattacccc

SEQ ID NO: 53529 - DNA, 604 bp, Homo sapiens
tgaacttcctcagctgtagtgtcacagatgcagggaggcaggcacacagagaaacacttctcttcattaataaaggagattaaccttaacatttcttggcagctgttcagcaggcggcttgttatcacgacaagcattttttttaaagactcacaatgataaacaatatgtcacaacagctgtcaaagtgtgttttatgcagtgactttccatacgtagcttaggggggttttttttagaattgtccctgtgactaaccatgtcctgttggctgaaggcagctatagagggtgatatggtttggctgtgtctccacccaaatctcatcttgaattgtagctcccataattcccatgtgttgtgggagggacctggtgggagwtaattgaatcatggagtcagtttccccctactcttcttgtggtagtaagtctcacaagatctaatggttctataaggaggaacaccttttgattgattctcattttctctcttgctgctgccatgtaagaagtgtctttcgccttctaccatgattgtgaggcctccccagccgcatggaactgtgagtccattaaacctctttttctttataaattacccc

SEQ ID NO: 53530 - DNA, 604 bp, Homo sapiens
tgaacttcctcagctgtagtgtcacagatgcagggaggcaggcacacagagaaacacttctcttcattaataaaggagattaaccttaacatttcttggcagctgttcagcaggcggcttgttatcacgacaagcattttttttaaagactcacaatgataaacaatatgtcacaacagctgtcaaagtgtgttttatgcagtgactttccatacgtagcttaggggggttttttttagaattgtccctgtgactaaccatgtcctgttggctgaaggcagctatagagggtgatatggtttggctgtgtctccacccaaatctcatcttgaattgtagctcccataattcccatgtgttgtgggagggacctggtgggagttaattgaatcatggagtcagtttccccctactcttcttgtggtagtaagtctcacaagatctaayggttctataaggaggaacaccttttgattgattctcattttctctcttgctgctgccatgtaagaagtgtctttcgccttctaccatgattgtgaggcctccccagccgcatggaactgtgagtccattaaacctctttttctttataaattacccc

SEQ ID NO: 53531 - DNA, 535 bp, Homo sapiens
ccttagctgttcaaggtgagtaatctgactgattattgaaagactaagcaattctgacatgagagcaacccttatggagtcaggcataaaaataaaagtaataataaagaagaaaacacctgagaagaaacatcagaggttacacactgtagaggaagacagactccacagaattcatctaaacaaggcattaaccaataaacaagcaaacacaaacaatacctggaaaaaataaattgaggttttctctattatagtatctagaatgctcagtttttaacaaaaacttatgagactgcaaagaaacacaaaagtacaatccatacacaagaaaaaagcagtcaagagaaactgtctactagaggacctagatgttggacttagcagacaaagatgttaaacagctattataaatcagttcaaagaactaaagaaaattatatttataagttaatggaaagtgygacaacagtaactcactgagtagagaatatcaataaagagataaagattgtggaaaaaaaaaagaaagaga

SEQ ID NO: 53532 - DNA, 535 bp, Homo sapiens
ccttagctgttcaaggtgagtaatctgactgattattgaaagactaagcaattctgacatgagagcaacccttatggagtcaggcataaaaataaaagtaataataaagaagaaaacacctgagaagaaacatcagaggttacacactgtagaggaagacagactccacagaattcatctaaacaaggcattaaccaataaacaagcaaacacaaacaatacctggaaaaaataaattgaggttttctctattatagtatctagaatgctcagtttttaacaaaaacttatgagactgcaaagaaacacaaaagtacaatccatacacaagaaaaaagcagtcaagagaaactgtctactagaggacctagatgttggacttagcagacaaagatgttaaacagctattataaatcagttcaaagaactaaagaaaattatatttataagttaatggaaagtgtgacaacagtaactcactgagtagagaatatcaataaagagataaagattgtgraaaaaaaaaagaaagaga

SEQ ID NO: 53533 - DNA, 634 bp, Homo sapiens
caatttacttggttttcaactttttgggatgatataaataatgctttatcagccatctttgtacatacatctttgtatatatgagggactgtttttgaaggatatgtatttagaagggaaggttctgcatcagtggctataaacctttgaaatttcaatagctagcatcaaagtggtcttctaagagaagttgcccctaatttatgccaccactgtcctcacacacttgtcaatatgggccggaattaatagtctaatctcataagtgaaaaatctctcatagtcatttgaatgggaatgtctctcattattagaaaggttattgaccatttgtaagtccttttcttaattttgtattgggttgttgatcttttcctatggctttgaaataactatattttaggaaattggctctttgcttataagatgtactgtgaatttttttatttgtcagtttatcttttattccyccaaaaccgtgttcatggctgttgtgctgtacagatgttttacatttttaagtaatcatatgtgttaggagagaaacccctgtgaacattttacagtatcacttagctatttataatatccccagaaggaggtgaggaaggtaaaatattggtggggagaaacc

SEQ ID NO: 53534 - DNA, 838 bp, Homo sapiens
ttctactctcctcctacttaataagtcaaaagggcacgttatagcatcttggtatatacaacaaaagcaaagatttaccttctctaggttaagttaccttctctaggcaagagaaaaaattctgcggtgttacattagaaattttgcgggtaagaaagtgagatattataatgaatagctcccttttggtaccaaaacccaattcagcactcttggttaccagaactcaataaaaattaactttagaagcacaagtaatagaaaaaagtggagtggggacaagaacagctccaagaattagaactggggactttactgggataaagtctctctcttcccatctttcctgtctgcttctttctacttattggtttcatatactcttatattaagtcaagctttttccaggattcagcaaacaaagagagaacagagccatgggatcartttcagtttagtgagtgaaaatcagtttccctgttagatagtttaagaaccttcctatagaggaattctcttggtcttgtttgagccaaatggtaatgcctgggccattcagcatgcccgaccactatcactgggttctataactggtgtggattgtcacagaccctttgctagggtcagtgtgaagagaatactgtgactaacaacctctaagagaattatgtggtcggaacttgtgaggaccagtttgctaaaggaaatatgacttgtttctagaaaaagaggaaaaagtgatgggtagatggatagacaggaagcagaaaaaaatagtagttgttcaatacagattgactgtattagttttctgtgctgaaaaacaaattactactgg

SEQ ID NO: 53535 - DNA, 1716 bp, Homo sapiens
ggtattttttatctccatttaataaatgatataaaaacagtttatgaagatacagtaacattcttaattgtacagctgtgatacttatagcaagtaagtagaggcaggattgaagctgaggatggctgacttcaaagaccgtacattttactactaatttatgtagtttcccaagagctgtttttaaaatccatttaatatgtctaatagctttagccctacctattacaaataatgggttacatatctaacacactagctgaaaagttcgtttctgaaaaagtctcttttctgtgtcatgtggtcaaagagttttatatgagtaatggatatggtcttgtagacttttggataaatccttaaggaaaaagccaactgtgtattttcaatacactgaaaagcagtgtattagatatatagctgaaattattataatgataatgccttagatttataagcactctacagaatccaaatccttttgtatttgttttctcattctaatccttccaacaaactagaaagtaggcaaataaggcatctggatccacgactggggaaaactgaggcttcatgaaattaagagatttttccaaagtcatgaaacgaaaataaatccagaagaaacggcaaatggaatgttttacctatgtaaattgctctttgcaaatcaacacttcaaaattccactctgcggtcaccttttaatatcttatgttattttctcrgtcgcttcttttcaattacgctcacttttctccacagtacttttgcatatttcagctttttatatatactgtgctcctgttagaaagtgttctgcactaactgataaaatccaaactacttttgcaaagcctgaaaaggtctagacacatgataccaatgctattcttgggctacccatttaagttatgtatcaagtctaaatttaatcaaggccacattttatttatacatttcatgcattaaactcatttaaacttttagtcagatttcattagaagaaatactaccgtgtacatcatgcagtagtaaagctaatgtgcttcaagaatttgaaaggagttggagatcgggggtctgatttcaaaatttctttttctttctctccttagtgcttgcagcaggtctgtgagcagcacacagtttgtttcctaggacactaatacagtcagcatgctctgtacaaatgtgtaaacacagacattccctgtaatcagggaggttggtgtcttaaggcaagattatgtttttttaggaaatgcaatttatgttcaggattaaatttctcttgcagactgataacgtctgaggttcagggagatgataataagtgttgtgtcctaaactgcctgccctgaatctgaagccttgaattagtcttcctgtatagccctcattcttatgaccccaaattaggtagttcttcatgtcttagaaagatgagagaagtaaataatataaaaagacaaaatacactttaaaaaatgtaaagcatctataaacctcatggtggttacaaggaaatacagagacataaggaaaaaatacagatgacaccatggctaatatccttcttcacaattcaggaaatttaaatttgtgtctggtactttggtattcgtgaaattgagatggagatgggcagaaagttagacaatattcttataatcgctttagtcttctcatggaatgatcctaacactataaaac

SEQ ID NO: 53536 - DNA, 643 bp, Homo sapiens
tttaaagtgtacaaacaccatatcaacattaaagtccccatatgaacatgaagacctaaggttttcttggtttagtctgaagaagcttccaacacaaggctggattaggaaagatgaaaatgaaataaaagttggaccgggactgggcgcagtggctcacgcctgtaatcccagcactttgggaggccaaggcgggcagatcctgaggttaagagattgagacaagcctggccaacatggtgaaacaccgtctctactaaaaatacaaaaattagctgggcatggtggcaagtgcctgtaatcccagctactcaggagactgaggtaggagaatcacttgaacctgggaggcggaggttgcagtgagccaagatcacaccattccactccagcctgggtgacaagagcaaaactccatctcaaaaaaaaagttggactgggarccttacagagttcacacatatttgtaacattcttcagatgtcatgtgcacaaattggagttattagtccaatatttataaagaaaaatcatattttgaatgtagccaaataacttcctaattaaaatgatatgatccttagaaggtttttggggaggaggtaatggagagaggatcagaattaggaggatcaaagtagaa

SEQ ID NO: 53537 - DNA, 1217 bp, Homo sapiens
atcttctttttaaaaaattcaaaacctgccactactgagccgagtcctcccaggcaactaccagctggagctgagtattcaaggcagctgctggccagttcctcaccatcccccagcccctgaccactcatttatcttcacgtcgttctcttgacctctgtaagaacctgagtttgtgaagttctcatcagggccttatgggaaggagccagcaaagcacaatgggaagctggcctggagaaaacacctttttgcagggggaggaggctgctgaaagggggacccacagttaggctgagatcacacatcgattcttaggttcaatgccaaaagcaagcaaagaaacaagcagacacgagcaaactcacccttgttgcttaaacctctcaacatcttctccaggattcctgcctccgatccaaagaatctggctacaacaagaaaacagcctttgattaagttcgacaaaacagcccatgactaacagggacactgcatccaattcacctgaactcggggaagtgcttcgtgaaatgcgacaggacctcgtctatttgaatggccagctctcgagtgggggtgatgattatggctccaacctacccacatggaaggaagggacacagtcagcagcacaagggactcccagagaggaactcataggccctccgccctctaccacacaaaggaaagttccagagaaacagtagttcccagactttctcagcagcatctctgagcacatatcaactactttgaattacggttactcgtcatcatatactgcagttatgctctttcaagtcatgaagaacagtgaattagtcaatgctgaaccactgctcacaggggaaacacagggttaggttcctgccagtctttgggcatgacatttttgtcaaccaatcaatacataaacctattttatgtctgtttgtgcttaaaagactctatttaacatatactattgattcattctcattgaactcgtggccaacagcacattaactcatgccttagcttgtgcttctctagcacrgggattttctctgcacgtcataaccttcttgcacccaggaacactagactgcactacatcacggggccatttcaaaaaccaaaatcaccaacataaagcacaaaaatgtgcaaaatggccgggcgcggtagctcacacctgtaatcccagcactttgggaggccgaggcggaaggatc

SEQ ID NO: 53538 - DNA, 639 bp, Homo sapiens
tgtgagagcctcttgtttgcaaccctacccaactctgcagtgaaagagttggaaagtgctggaggttggtaaaccatggcaactggcaagtgctacaaatcacagcccccgcacttcactttactagtttaccagcacactactaaaacagtctccttattaaattcttgcaaataatctcattttgaatatgctttcttattcctgcctggacactgactaatgcaagaacacaattccttttttggtggggagtgcagtggtgtgatcatggctaactgcagcctcgaactcctgggctgaagtgatcctcctgcctcmgcctcaggagtagctaggactactagtgtatgccactacattaggctaatttttttgtttaattaaaaattctttttgtagagataggatctccctgtgtttcccagggtggtcttgaactcctggcctcaagcgatccttccactttggcctcccaaagtgctgggataacaggcatgaagcactgcgcccggcctacaattcatttctctttcttttttttttttttttggaaagggagtcttgctgggtttaacaggctggagtgcagtggcgtgatctcggctcactgcaatctccgcctcccgggttccagca

SEQ ID NO: 53539 - DNA, 541 bp, Homo sapiens
cccttagtttgaagtggccacagtcctaaacatgtgatttccccaatctcccgcatctatggatgaaatgtgttccataaaatgtaactaaaagtaaagcctgttgacagtttttgaactttcaaggaagatataccgagggcagcaaaacaggggacaaagttttccagtaactatggtgctacataaatggcagcctgtgagtgctttctaaggagtcrttatttcattcaactactggcaaaatgcttgtcccaaactaagagagatacttgaattggttaggccataatgttgaaaagtatcaatttgttgtttaaatacttacaatgattccttgccttgtaataaaattagtttcttaaaaatatctctgtaagctcactttttgaataacccacaaatagcaccttaatatctaaggagggatgatttataatcacaattacctgggttttgtatccttggaatttttgcttgcagaaggaaatttgtcccagtatttcactagggtaagaaaatataagcacctaccacaata

SEQ ID NO: 53540 - DNA, 600 bp, Homo sapiens
atccacccgcctcggcctcccaaagtgctgggattacaggyctgagccaccacgcccagcctcattctcttactcttttaataaatcagtatgtatcatgtgacaaacctgtatctgccaatatgacaaacccttgtcaataattctcctggaagatgcttctggcaacccagaaccagaaaataatttttccaaagagttgattatcttagactaaactaatgactcaagttggttttacaaatagggaacactctgtaaatactcatggacatatctaaacctgaacatacattctcatgaagcacaaaaatcatcatatatggttacagtccccaaacaaggctgcagaagaatttaacattcgtaacaatgtacagctagtataattacattttgtgcaacctcgtaattctttaacagtacaactgaagtgatgagaaggtacatactgatataaggtaacatagctctgtgttctagccaaaactagaactcaggatccattatttttaatctaggaacttttatgtgatgaccatttactaggaagggttgggagtaaaaagcataaggcaattgatatagagaaacaaggat

SEQ ID NO: 53541 - DNA, 600 bp, Homo sapiens
atccacccgcctcggcctcccaaagtgctgggattacaggcstgagccaccacgcccagcctcattctcttactcttttaataaatcagtatgtatcatgtgacaaacctgtatctgccaatatgacaaacccttgtcaataattctcctggaagatgcttctggcaacccagaaccagaaaataatttttccaaagagttgattatcttagactaaactaatgactcaagttggttttacaaatagggaacactctgtaaatactcatggacatatctaaacctgaacatacattctcatgaagcacaaaaatcatcatatatggttacagtccccaaacaaggctgcagaagaatttaacattcgtaacaatgtacagctagtataattacattttgtgcaacctcgtaattctttaacagtacaactgaagtgatgagaaggtacatactgatataaggtaacatagctctgtgttctagccaaaactagaactcaggatccattatttttaatctaggaacttttatgtgatgaccatttactaggaagggttgggagtaaaaagcataaggcaattgatatagagaaacaaggat

SEQ ID NO: 53542 - DNA, 646 bp, Homo sapiens
ttttctagaactgtrctgtgtagtatggtagcaactagccgtaagtggttattaaaatagaaatttaaaacttggttcttcatttgcactagccacatttcaagtgctcagtagccacatatgtcattttggacagcaccttggaccaacctcctctctgtcatactggacagcacagataatagaactctctcatcactgcaggaagttaggttagacagtacgttagactcccctgagattggtcttagaagggaaggggaggtagtaggatggtttctttaggggaggtgagaagatgaaccatagaggaccactgaaccagttttgagagtacgggagtgacagcagtgctggggctgaggagttcccaggttccagttccttttacagtggctatatttgggagctggatggttaacgttacttcatgttagaacatcaagtatgactttaagtggtgtggttatatacatgtttcttgttctttccagttcctctgtaaaatatcccaggtgcgcttgggaaaaatgtatggtcaatgtggtaattcacacaaaggaatattattttgaattcctgaagcagccagcaatatcaaatgcagtgtgactaattttagaatcaaactagtagtaaaaatgta

SEQ ID NO: 53543 - DNA, 609 bp, Homo sapiens
tattgttattaatttttatctattgggcttaaaattcagactgttttaaaccaagagtatagctgtgcccatgaaggaggaaacttgagtgtcaagtatcttacctaaacctcgagtttttctttttttttcctccttcttctcattgatgtaacatgcatttttacttcaaacaatggcatatatgttttagccacagatgactcagaaatcgaaagttagaagacaatcgttagttttctccaagaacacaaagctctagaacaaaattttaatcttctagytcccatcttgattaatgcgaaggcatttgtctatccaagctcactgtgtaaaggtcatgtgatgtatgccatataacatcacaatgctagcaatatgaagtacttcaaatttatttctactccattaactttaacagtgagaacctttcacattttcaagtgaaactattgattccacagtgaaattaatgttccacaatacatatataaaagcatttctgccactcaattttcttatcctgttccaggcaagccaaaaatctttcactcgggtgcctgtttggagtctccttctctcaatcagtggattctaccatcttttcca

SEQ ID NO: 53544 - DNA, 1614 bp, Homo sapiens
gctttgtgagagtatcttaaataactctatatgagaagctggtataaaagaaattgtggttgtgacagctctcacccttccattgatctccagcgttggtcaaatttagccatcatgtttttcctggattctggtgattatcctggagttcctcagtcaacaatgtaccttccttttttctcctgttgctacaaatgacattcattcatttataatccctccatgtgaaagtgtattcttattttatactccacagataatctaatctgatgttaatttttactagaaattgggtaattctttagccaagtatgaaaagagcatcctgtaatctttattttatgcctccaattctttctctcatacttaaaaaaattcacatacatgcataaagtatttttcacataagttacaaagaagtctcacactttggggaaactaaagttttttgatatgaaaaggtaggcttctgtttccaacactcctgaaattcctccttgtgttcctatattcttgtggttggaattcctcaattagaaatcatttgctagaaactgaactatcaagatcacagtttgaaagtctaagtttaagacagaaggcagaggacagaggacagggttgcacgtctacactcagaaaccagataagacaaagccattcgcaggctagaaggggatgctgaaagtcaaaaagcatgggcctctgccagaggaaccatcattttccctcatgccatgagtgtgtggagttgagtgagtaaagaattgttcatattatttgctcctagatgaggatcactaactcatagtgatttcttatagtcatcattcgttcagtgtgaagtgatgtttgtctgtgtcctgaaattctgcaaaggcatttatggagcccagcctgctgcaggcagtcatccagccacaagtccagggtatggataagcttcaaggacaaggaatgggtgctctggacaagtgaggcatgtgcagaacayggagaaaaagccttgcccctagagtaggattcagtggattcagttcacaactctcagtctggatgtgacctatacatgatatttctttttgaaaaaagttatgaattataaaagttttttaattgttggtaattaaaattttctgcaataaaaaatatatatattggatttgcacctaaaaaattatacctaaaaatataaatctattatatatcaccaataaaatccactctctgtaacagtgcaaggttttactgtttaataattgtagtctcagagttggatacatatagacatacaaagatttagataaacagggaaaatctctaacaaccttccaagaactcagtctattttacattattttaatgaaatagcaattaatatttcatgcagtcttttcacaaagtaaaacaaaatgtggtatacgaatacaattttctggaatttatagaagctctgacaatttgtttcacatttgctcctaatatgcaacatagtaagaatttatttttctaatttatttctatgacaattaaaattgtatatacttacagagtaaaaattctgttttgatatatgtatgtattgtgtaatgtgtaaataaagttaattatgca

SEQ ID NO: 53545 - DNA, 545 bp, Homo sapiens
cccccaaaaagaatcttagggaaggsctctgactggcctaccatggatgattaggacaacctctggaccaatcacggtgggcaggggaatgaggtaccttcccagccacggtcacatgcactcgccatggcctggagaacagatctgatatgggaatgaaggggaaggggtgggaagggcaggatcaccatgaggcagtaagccaccaagtttgtatcctccctgttcacaaggatggtgcacctgctgtgtgccagcccttgagccctttgtgctgagcatgcatactcacatgctgcctcaccttaagtcttcacaactcttcatccaccagctgtgtatggattgggttggggaggccctggtgaggagggggctgggggtgctctgcttcctgcagccccatcttccccaaagcagtagagggagtttctggccactaaataagtgcccggtggatctgactctgtgcagcggagctttccagggaggctgttgacaaggggacgcatttcatgaggctggacagcgagacaacttggtgc

SEQ ID NO: 53546 - DNA, 1103 bp, Homo sapiens
gactttgatgctgtctacattggatactaagacatggatgctgtctacattggataccaagaggtcaatgctgtctacactggatgtcaagacatggatgctgtctacactgtataccaagatgttgatgctgtctacactggacaccaagatgtcaatgctgtctacactggacaacaagacatcgatgctgtccacactagataccaagactttgatamtgtctacactggataccaacatatggatggtgtctacactgcataccaaggtgttgatgctgtctacactggacaccaagacgttgatgcttctacactggatactaagatgtcaatgctgtctacactggataccaagacattgatgctgctatgctggataccaagatgctgatactgtctacactggataccaagatgctgatgctgctacactggataccaatacatcaattaagtctacactggataccaagactttgatgctgtctacactggataccaagatgggtgtttcacgttggccatctaatcctcaaagcaacagaatgaggtcagtatcatcatatgcatttcctagatgagaagcctgaagtccaaagagtggaagctatttccaaataaatccaagtctcatgacatggagaagagctgggatgcaaattcaagagcgcatgattctgaagcaaattatttccctccaagtttctgctctcattgccagacaacaccttctcaggggtcatagcttcagccacaagcaaggtgtgtggacattggaagagttgtttgtcccccagggatgtggagcaggtgctcttacgtgtcccagtgagatgcaggagctgtgtgctgatcttgtcatgccagggacacatccggagtctgtgctgggctcaccccacgtctgccaccagcctttcgcacagcaggaaatcaacaacgacttggtaaagacaatgggctctgccaagctgcttactttaaagttcacctgacacatttacactcagggagagtgacgatgtctggagagcgaacgtgaagaatgaagactacagctgatgacattgcatattgaaaatctgccaagagagtaga

SEQ ID NO: 53547 - DNA, 2354 bp, Homo sapiens
tataaaaattgaaattcataaaaatatctctctaattgctcttttcccctctgctattttgttaaaggtaaaaaagtactaaaatctgtcagcttttcaagctatagtttattatagctaagtgagaatcatatgtcaccttagaaagaaatatagacctgataacatttaaatgaatccgttcctcattgtctcatattaagatttctgagatgaattcccaagggaaagttttatgaattatgtaaaatatattatttgtggctgaaataagttcctggatgagaaagatgaaggcctattaaccattaaccttggggagaaaaaaggaagtccctgacatgatgagaaataaagtcctggggcttgcccactgcagcataaacccagggcccttgcctcaggtggggcccaggtagcagaggatgccgtccccacaagaggatgcctcttttgatctgcagttttgcctgattggacagagtctagacagtggtagataattccctttcagtggttaatgtcagtgcatttattagtccttcatactaaacaaatcaaagatccactagtctcaaggtcagatctttcagtgagtgaggctatctgaactatttctttaaaaatccgtggacaacttgtatccagatttgctttctgtagagcagcactgcatttactccaaacagcagtaggctcttcctaactcagtgactttcaacagtgccttcttctcttggatatgcagctgtcacagtggtggtcttgtgctgtttaatacaagtacaaaatccccttattccatttctttatttggtgagagttaagaaggatatcttttctagctgtaatggctcatttgtagttctctttgaagaccgataatgggcttaccgcctcttctcgcccaggctgctttaatttgtgtagctaataaccccgggcttcttcctctcgtttctctcacttggtttttgatttgcatcagactgcctgagcccatgtcctatttggaggaaagctgagggaaatgcataaataatgtctaaaataaacttgtaaagtcaagtatcagttacattgaagatctaggggtgatcttgggcacctaggttgaactttgaaaaaaattctgtaggatccttgggagagggggctctgctgagcagcagaggaaggcagtgggaagaggcactggatagggaggcttctctaggaggcccagcagaacacctttgatttagtgcaaaaggcaaagtcagctgatggtcttggaaggaagtgtaacatgaagaggcattaaaaggactgtcctctctttagaggagggagggaaaaggggggctggggagggagasagcagatggtaaggctttgtgatgtttccgctttccctaaaaactctcatatcgtggtgcccaggaatctgccatccattcctttctgccattaaactcaaaccaacatatacatattttagaccatttaaattccgccctcttacagcacgtattataattgctcagttaatttggcattaaggtatccgaaaatgtcaactgtgtacatacaatctttgttgggtgtttggctcttttccttgagagcaaatacaagagccatccgtccaaccaaagctttagaatcagtttctgtttgctgaaaaatctggtttttatttgtttaggtcctaacgccagccccgatggtctcattccgtggacgaggttttgtaaggtgaggactgtctgggttttatgctctctaagtcctttttgctcttggttgaggttctcatgtttcttgctgtgatagttacttaactgtttgcttattttggcgtgttcttctctggccaaggagcccctcggcgaagttgtttacttttcttcagtgcaggaggttggtctccgagcaggagtctgacaggaagcacctgcctgagtgataacattctttcatatctgaaatgaggcttctgttcactcacgctggacccctgcccagcagtgttttagccatttctgtgtgaaatgtatgttgtgggctgggtggcgcagcctgaccagccagacgagtttaacggcctgctcgagcagaggggcccactgcggggaacatttagattctgctggagtcaccagacagtgcggaccagcttgcactgctggattttgctagtgtggggcagcttgtgtttccgtgagtcacgctggaggtcacccccaggctagcttgctactgtttggaaagggaagcagagcccggcccagggaagtggagagctctggagagctcctggtctgaatgctgataagagcggggagggaacttgatattccctgccaggggag

SEQ ID NO: 53548 - DNA, 564 bp, Homo sapiens
tgtgaagtagtagaaaataaatggacaacataaataaggattttttttcaaaatcaagcaatcattttgatcaggcttagcacttaatatatttattgttaattttatagtaatgcacagtttaaaccagttttgtctttttttttttttttttttttgaggcagagtctcattctgttgcccaggctggagtggagtggtagtggtgtgatctcagctcactgtagcctctgcctcctgggttcaagcaatctcatgscttggcctcctctgagtagctgggattataggcgtgtgccaccatgccctgctaattttttgtatttttagtagagatggtgtttcaccatgttggccaggctggtctcaaactactgagctctggccatccgccagcctcagcctcccaaagtgctaggattttacaggagtgagcgactgcatccagcctaaaccagtttttattgaaacttcatgtacttctattagtttaaatatttaacaaagtaaacttatgctatattggttaagtttagagattttagagattataaaatcctattg

SEQ ID NO: 53549 - DNA, 527 bp, Homo sapiens
acaatagtgaaagttagcagaattagaacttaagtgtttggaattacagaacaatttgagaaggagacacatttgtttaaaacactggtgaaaaaaactgtggaagtacaatatgcaatcttgaaaaagtatataggctagaacttgaaatgcaggaaataaatattaaaatacaaaataaatggctatattaaatagtagactatacccagctaaaagggattcataaattagaacataaaactgaggaagttttgtagatgsaacaaggagtgaaaagacataacaatttgaaaaggatgttaaaatgcataaagaataacatgagaagagccggaatactcacaataaaaagaataaagagacaatgaataaggcattaaaatagaagatcttaaggtcaagactgtacagttactacaaaagtataaaatcatcagcatcaagaaaaacaagaaagtctcaaagatgttaagtaaaagcaatcctacaattacacacatcataatgaaactacagaaaactaa

SEQ ID NO: 53550 - DNA, 583 bp, Homo sapiens
gaatcctgacctgcccctgattagctgtgtggccttgggcaggtcactcaactgttctggagtcccggtttttatctataaactgagaagagtatttccaaatcacgtatgtaaactacctggcacacagtaggcgctttttaagcagtagtcaatgtaattccaaattacccttaaatggagagggattgtctttggggggctgctctggagctgtgattctcagactttcacatcagttactggggagcttgtttaaaatgctgtctgcatttgttctgattcaaaccttaggcattttaagaaagagagctttagggctccataagaggtaatgacacgcatttggccaggtcagcatcctctaagtacctgccttgccacggggcatgtcttaagtggctgcaggtgcgttgaattgtcctgctgttcatacatgaattcaggtggccccatgtggggggctacwttctatgtgctcctccaaataatacctgatgtttccagggagcttgactctgtataaagccctgcaccattaatacgaccctgtcacatccattatctagtgcgatccttacaa

SEQ ID NO: 53551 - DNA, 620 bp, Homo sapiens
ttgtgccattgcactccagcctgggtgacagagcgagactgtctccaaaaaaaaaaaagtttatacatatacatacacacacacacacacacacacacacacacacacaaacataatttgactgaaaacaggatatggggagagagggtggttagacagttgcctaaaaaatgtgactccttgaattgtttactttgtggaaaataccagatttaacatattgcttgaaaaagaagcagtgacaatttttttcttgtaaaaaggtattttagaaatcaaagttggaattttagaaatggggtattctttaaaacaaattttatttctaagaaagtttggaatttttcactaatgaagtccatatgcaakggttcatatttaaagagatggagaaacggattgttgtctgaaattcagtcacctcgtccccataccaccgcagctgcatgcgggcagtacttcctgcacctcccactgcagacaggctgaggttgtgtgttctctcacctgagctgcagctcactggaagcaggcggggtggttggcaccaaacgcaccctgggcccttggatgctggggagggggttcagggtgcagaccacggccggcccatctcttca

SEQ ID NO: 53552 - DNA, 627 bp, Homo sapiens
catccttctgatagctttgctgaaaagccagttcaacttaccccgtttatacatgttgaacttgcctagatgcctgacctttgtcagattttgaagagaagaaagtaaaggaaaggagaaaccttctctccatccaacttttactacacatgaagtggtaggtcagcattaaatgactwtttatctgtttctgccttgtgtatcagaatatggattttcctaagtgacatcaagcttaaaaaagaaattagctagtaaatgttttcctatctattgacacaaagtaaaattatgatggctttaaacaatgcattctcagccgggtgcggtggctcatgcctgtaatcccagcactttgggaggctgaggcaggcggatcacgaggtcaggagattgagactatcctggccaacacggtgaaaccccatctctactaaaaatacaaaaagttagccaagtgtggttgtatgcgcctgtagtcccagctacttgggaggctaaggcaggcgaattgcttgaactcaagaggtggaggttgcagtgagccaggatcatgccactgcacttcagcctgaatgacagagcaagactccatctcaaaaaaaaaaaaaaaaaaaaaaaaaaaaa

SEQ ID NO: 53553 - DNA, 627 bp, Homo sapiens
catccttctgatagctttgctgaaaagccagttcaacttaccccgtttatacatgttgaacttgcctagatgcctgacctttgtcagattttgaagagaagaaagtaaaggaaaggagaaaccttctctccatccaacttttactacacatgaagtggtaggtcagcattaaatgactttttatctgtttctgccttgtgtatcagaatatggattttcctaagtgacatcaagcttaaaaaagaaattagctagtaaatgttttcctatctattgacacaaagtaaaattatgatggctttaaacaatgcattctcagccgggtgcggtggctcatgcctgtaatcccagcactttgggaggctgaggcaggcggatcacgaggtcaggagattgagactatcctggccaacacggtgaaaccccatctctactaaaaatacaaaaagttagccaagtgtggttgtatgcgcctgtagtcccagctacttgggaggctaaggcaggcgaattgcttgaactcaagaggtggaggttgcagtgagccaggatcatgccactgcacttcagcctgaatgacagagcaagactccatctcaaaaaaaaaaaaaaawaaaaaaaaaaaaa

SEQ ID NO: 53554 - DNA, 627 bp, Homo sapiens
catccttctgatagctttgctgaaaagccagttcaacttaccccgtttatacatgttgaacttgcctagatgcctgacctttgtcagattttgaagagaagaaagtaaaggaaaggagaaaccttctctccatccaacttttactacacatgaagtggtaggtcagcattaaatgactttttatctgtttctgccttgtgtatcagaatatggattttcctaagtgacatcaagcttaaaaaagaaattagctagtaaatgttttcctatctattgacacaaagtaaaattatgatggctttaaacaatgcattctcagccgggtgcggtggctcatgcctgtaatcccagcactttgggaggctgaggcaggcggatcacgaggtcaggagattgagactatcctggccaacacggtgaaaccccatctctactaaaaatacaaaaagttagccaagtgtggttgtatgcgcctgtagtcccagctacttgggaggctaaggcaggcgaattgcttgaactcaagaggtggaggttgcagtgagccaggatcatgccactgcacttcagcctgaatgacagagcaagactccatctcaaaaaaaaaaaaaaaaaaaawaaaaaaaa

SEQ ID NO: 53555 - DNA, 625 bp, Homo sapiens
gaagggaaacttcatctgtatttctagcccctcccatcgcttgcatgaccacctgagctccatgtcctgtcagatcagcagcagcattagattgtcataggagcacaaactctgttgtgaagtgtgcatgcgagggatctaggttgtgtactccttatgagaatctaatgcctgatattctgttactgtctcccatcaccccaggtggacagtctagttgcaggaaaacaagctcagagatcccactgagtctacgttatagtgagttgtagaatcatttcattatatattactatgtagtaataatagaaataaagtgcacaatatatgtaatgcacttkaatcatcctgaaattattccctcattcccagtctgtggaaaaattgtcttccacacattcactctgttttttggtagaggcagggtcttaatatattgcccagtctgatctcaaactcctggcctcaagtaatatacctctgtcagcctcccaaagtgctgagattacaggcataagccaccaccctcaaccaagactttcttaaaccaaataaaaattaagtgagattacttgagcccaggtggtcaaggctgcagtgagcctgattgcaccactgcactcca

SEQ ID NO: 53556 - DNA, 1476 bp, Homo sapiens
gctttaaaacagacttcaaaaaaatcatttaagtttgataaaattaagctgttaaacctggctcttgtgcctttttaaaggagaaaatatttgattcttcaatttcttttgtgacatcttttcctaaacatgtgttataattctcaagtatatattttgtcttccccactagactggaagcttcttgaaggcataatgtgtctgattaatcttgstatctaacttagtacctaaaataatcccttacagtaatgcaaacatttatatagatatcttattcaactttgcatcctcatagcactatatacagtgtctaatgtttatgaaactaatttcaaaaatgtatggtaatttagacagcttaattgattaggtaattcagataatatgctgagtgaacatgagctttgaagtcaggcctgagttaaatcctggatgaaccactttcctaactctgtaaatttagacagttgattaacatctcaaagattcactttcctcactagtaaaatggtaagtaaaatcctcacttattttatagtgaggaaatgtttgtagagtgcttagcacaatactggataggcaatcgtcgctttatgttagtaagttatgaagataaaaaatgttatttagaatcaaatggtattttataaaaatgttactttttctgttgctcctgttgtaattttttaggctgttgtcatgtcaaaaggggatactaagtttccaatctgttcttgagtatacagtaatgcggtcaataactttagttggtgcctccaacaagtattatccgtggatgaggttacatctgggtactttggaatatgatagaagcaacatctggtgtgcttttatacagctcatgaagtcagtgctttagaaactgaattaaaatgtttcaagggttttcttcctatttaatgctgtgatgttgctaatcccgtcctcctcttaaagctggtgatcctcctcacattaacggccattgatatagtttggataattgtcctcactcaaatctcatgttgaaatgtaatcctcagtgttagaggtggggccttgtgggaggtgtttgggttatgggagtggattcctcatggcttggtgccttcctctgggtagcgagttcattttcacgagatctggttgttcaaagtgcatggcacctcccctactctcccttgctcctgccttcagcatgtgaagtgcctgctcctgctttgccttctgccacaagtaaaagcttcctgaggcctctccagaagcagatgccagcactatgcttcctgtacagcctgcagaagcatgagccaattaaacctcttttcttataaattacccagtcttgagtatagcaatgcaagagtggcctaacacagccatccttgatatttatggaaccctctcaggcttaatagttgactcaagcacaatgaataagtggtcccctgtctttgtgaattcatagataaa

SEQ ID NO: 53557 - DNA, 557 bp, Homo sapiens
gaagtattttatttgattatatgcatccctttgggcagcaacagaatgatttgcacccgacttttctgcctttaaatctggtgaacttcccactagattgtggcccctgttgacactcactttaatctgttaaaagcctgtgcagcatttaaaagttaattgagrtctcccttaaatcatggagttttataacagcactccagtcacagagacgactctgtattctgaaataatcaacaatcaactagatcactgtacatcacctactactcatggagcctctcctatgtttacatatatttttaaataaaactatggttaagtaacctctcataaggttatatcgtttctctcctattactttctctaaaaattgataggagtctatatgtagaaattagcccattattttgaatttagcgggtgctgatctgagactatttcctcaggtaccaatcttctatttacaatgggcttacaagatatagttgggatcctgaagacttgtgaagtgatatctgaatgatacataattaatgagattcaggaaggagaat

SEQ ID NO: 53558 - DNA, 557 bp, Homo sapiens
gaagtattttatttgattatatgcatccctttgggcagcaacagaatgatttgcacccgacttttctgcctttaaatctggtgaacttcccactagattgtggcccctgttgacactcactttaatctgttaaaagcctgtgcagcatttaaaagttaattgagatctcccttaaatcatggagttttataacagcactccagtcacagagacgactctgtattctgaaataatcaacaatcaactagatcactgtacatcacctactactcatggagcctctcctatgtttacatatattkttaaataaaactatggttaagtaacctctcataaggttatatcgtttctctcctattactttctctaaaaattgataggagtctatatgtagaaattagcccattattttgaatttagcgggtgctgatctgagactatttcctcaggtaccaatcttctatttacaatgggcttacaagatatagttgggatcctgaagacttgtgaagtgatatctgaatgatacataattaatgagattcaggaaggagaat

SEQ ID NO: 53559 - DNA, 557 bp, Homo sapiens
gaagtattttatttgattatatgcatccctttgggcagcaacagaatgatttgcacccgacttttctgcctttaaatctggtgaacttcccactagattgtggcccctgttgacactcactttaatctgttaaaagcctgtgcagcatttaaaagttaattgagatctcccttaaatcatggagttttataacagcactccagtcacagagacgactctgtattctgaaataatcaacaatcaactagatcactgtacatcacctactactcatggagcctctcctatgtttacatatatttttaaataaaactatggttaagtaacctctcataaggttatatcgtttctctcctattactttctctaaaaattgataggagtctatatgtagaaattagcccattattttgaayttagcgggtgctgatctgagactatttcctcaggtaccaatcttctatttacaatgggcttacaagatatagttgggatcctgaagacttgtgaagtgatatctgaatgatacataattaatgagattcaggaaggagaat

SEQ ID NO: 53560 - DNA, 557 bp, Homo sapiens
gaagtattttatttgattatatgcatccctttgggcagcaacagaatgatttgcacccgacttttctgcctttaaatctggtgaacttcccactagattgtggcccctgttgacactcactttaatctgttaaaagcctgtgcagcatttaaaagttaattgagatctcccttaaatcatggagttttataacagcactccagtcacagagacgactctgtattctgaaataatcaacaatcaactagatcactgtacatcacctactactcatggagcctctcctatgtttacatatatttttaaataaaactatggttaagtaacctctcataaggttatatcgtttctctcctattactttctctaaaaattgataggagtctatatgtagaaattagcccattattttgaatttagygggtgctgatctgagactatttcctcaggtaccaatcttctatttacaatgggcttacaagatatagttgggatcctgaagacttgtgaagtgatatctgaatgatacataattaatgagattcaggaaggagaat

SEQ ID NO: 53561 - DNA, 546 bp, Homo sapiens
tgccttgttaaagcaaactaaatatggcctgggaaggactccatacttctgtatttgagtccttgtggacgaactgcaacctaccttagtgtgcagacaagattgaaaccctaatttaggattacagcctgtaacaatagctgagtctcagccaatctcagcagccacacttcaaccattcatacagtgctgagtgttcagactgtgttcaaataacacaaatgccaagctgtaaccaatccasctgtttctgcacctcacctctgatttctgtacgtcacttccctttttttgttctgaccatgaggtacccctggagcctctctgaatctgcagtaattctgggggctgcctgatccgtgaatcattcattgctcaattaaactcctttaaatttaattctgctaaagtttttctcttaacagcccatttatctattcaacacattttattgagctctgttctggtcactatgctgggcaacggaagagagaaattaataagacttaattcctgcctttgaattgctcacagtgagatgggaca

SEQ ID NO: 53562 - DNA, 587 bp, Homo sapiens
atctgtgttcaggttccttccctcacatcttcctgggaggatgggagcggcagtctgactgcctcacagtaccactctgacattggtcactccttcagagtctcttatcggtgtacagaggacaaccaactccaagtaagggggccagggggtacacatgacgcagmtgacacttcctattctagtatcacctcctactcctccccagacaacacaggtgaagtcttgagggggaaaattagtcatagaaagcgggcaggagaggcattgtgggtgctgagtaaagtggagaaagtgagaagaaggggctgggcacggtggctcatgcctgtaatctcagcactttgggaggctgaggtgggatgatcactagaggtcaggagttcaagaccatcctggccaatatggcaaaaccccgtctttactaaaagtacaaaaattagggctgggtgcggtggctcatgcctgtaatcccagcactttgggagatcaaggcacgtggatcacctgaggtcaggagtttgagaccagcctggccatcacggtgaaacctcgttgctactaaaaatacaaaaattagccaggca

SEQ ID NO: 53563 - DNA, 587 bp, Homo sapiens
atctgtgttcaggttccttccctcacatcttcctgggaggatgggagcggcagtctgactgcctcacagtaccactctgacattggtcactccttcagagtctcttatcggtgtacagaggacaaccaactccaagtaagggggccagggggtacacatgacgcagatgacacttcctattctagtatcacctcctactcctccccagacaacacaggtgaagtcttgagggggaaaattagtcatagaaagcgggcaggagaggcattgtgggtgctgagtaaagtggagaaagtgagaagaaggggctgggcacggtggctcatgcctgtaatctcagcactttggraggctgaggtgggatgatcactagaggtcaggagttcaagaccatcctggccaatatggcaaaaccccgtctttactaaaagtacaaaaattagggctgggtgcggtggctcatgcctgtaatcccagcactttgggagatcaaggcacgtggatcacctgaggtcaggagtttgagaccagcctggccatcacggtgaaacctcgttgctactaaaaatacaaaaattagccaggca

SEQ ID NO: 53564 - DNA, 574 bp, Homo sapiens
aattagcaagtgtgttatatggacattttctttgtgtaacaacaacacaggtaaaaataaacaactttctaaatattaataccacttttaaaagctattctgaaattctttatccttacaagtatttggtgaaaaggtgaggtaattttattggcataaatgtatatctcataattatcaacaaacaaaatgaattccaactgtaatactcagacacgttttgcatgaaaagtaacctggaatggcaaatgcaatagtatctccttattttttaggccattaaaaatcattgctggctgggcgcagtggctcatgcctgtaatccagcactttgggaggccgaggcaggtggatcacctgaggtcgggagttcaagaccagcctggccaacatggtgaaascccgtctctactaaaaatacaaaaattagccaggcttggtggtgcatgcctgtagtcccaggtactcgggaggctgaggcaggagaatcacttgaacccaggaggcagaggttgcagtgagctgagatggagccattacactccagcctgggtgacagagcgaaactctgtct

SEQ ID NO: 53565 - DNA, 566 bp, Homo sapiens
aaagatagttattgaacacttagaatgtgccaatcacagtgctacatagtggagatggatggtaaacaaaatagacatggggaaacttgaaaaggtaattgaaatacaatctgacctgttctgataaggacaagcaagcaccaattacgggatgatttagaagggagactagaactagtcttgacaagtcaaggaagttttgtcagagatgaagcatgagtagggattatttacattactgtaggaagaatcaataacatcctcaaaaactcagaaataaaaagatacagtaattcagtgaactacaagaaataatgcatgacagggagtgagtcgagtacataaaagsaaggatgtgtatagtagaaaatagtttgagggggcagagcaggtaggaagtgtgtctggggcttctggcagccatcccacaccctaaatgtaaagaaacataaagctcagatgatgtcattggttgctaggattcagctatgcatgaaaccaaagataagactctgggtaacacctacatttactacattcacaaagaggcagtgtattcattagca

SEQ ID NO: 53566 - DNA, 556 bp, Homo sapiens
ttttttttgagacagagttttgctctgtctccaggctggagtgcagtggtgtgatctcggctcacttcaacctccacctcccgggttcaagccattctcctgtctcagcctcctgaatagctgggattataggtgcyttccaccacacccagctaatttttgtatttttagtagagacgggattttgccatattgaccaggctggtctcgaactcctgacctgaggcaatctgctggcctcagtctcccaaagtgctgggattacatgcgtgagccaccatgatcagcctttgtttattgtttaaaccatcactcttcctacctacttccatcaaccatgttggccaggatggtctcaatctcctgaccttgtgatccacccaccttggcctcccaaagtgttgggattacaggtgtgagccaccgcaccctgcctctgaggctttttcttctgtccccaggaggactccaatagaaaaacgtacagagatgctgggagcctgctagaattggacatttgtatcacctgccccagctgtgttttgttgagctgaag

SEQ ID NO: 53567 - DNA, 556 bp, Homo sapiens
ttttttttgagacagagttttgctctgtctccaggctggagtgcagtggtgtgatctcggctcacttcaacctccacctcccgggttcaagccattctcctgtctcagcctcctgaatagctgggattataggtgctttccaccacacccagctaatttttgtatttttagtagagacgggattttgccatattgaccaggctggtctygaactcctgacctgaggcaatctgctggcctcagtctcccaaagtgctgggattacatgcgtgagccaccatgatcagcctttgtttattgtttaaaccatcactcttcctacctacttccatcaaccatgttggccaggatggtctcaatctcctgaccttgtgatccacccaccttggcctcccaaagtgttgggattacaggtgtgagccaccgcaccctgcctctgaggctttttcttctgtccccaggaggactccaatagaaaaacgtacagagatgctgggagcctgctagaattggacatttgtatcacctgccccagctgtgttttgttgagctgaag

SEQ ID NO: 53568 - DNA, 556 bp, Homo sapiens
ttttttttgagacagagttttgctctgtctccaggctggagtgcagtggtgtgatctcggctcacttcaacctccacctcccgggttcaagccattctcctgtctcagcctcctgaatagctgggattataggtgctttccaccacacccagctaatttttgtatttttagtagagacgggattttgccatattgaccaggctggtctcgaactcctgacctgaggcaatctgctsgcctcagtctcccaaagtgctgggattacatgcgtgagccaccatgatcagcctttgtttattgtttaaaccatcactcttcctacctacttccatcaaccatgttggccaggatggtctcaatctcctgaccttgtgatccacccaccttggcctcccaaagtgttgggattacaggtgtgagccaccgcaccctgcctctgaggctttttcttctgtccccaggaggactccaatagaaaaacgtacagagatgctgggagcctgctagaattggacatttgtatcacctgccccagctgtgttttgttgagctgaag

SEQ ID NO: 53569 - DNA, 556 bp, Homo sapiens
ttttttttgagacagagttttgctctgtctccaggctggagtgcagtggtgtgatctcggctcacttcaacctccacctcccgggttcaagccattctcctgtctcagcctcctgaatagctgggattataggtgctttccaccacacccagctaatttttgtatttttagtagagacgggattttgccatattgaccaggctggtctcgaactcctgacctgaggcaatctgctggcctcagtctcccaaagtgctgggattacatgcgtgagccaccatgatcagcctttgtttattgtttaaaccatcactcttcctacctacttccatcaaccatgttggccaggatggtctcaatctcctgaccttgtgatccacccaccttggcctcccaaagtgttgggattacaggtgtgagccaccgcaccckgcctctgaggctttttcttctgtccccaggaggactccaatagaaaaacgtacagagatgctgggagcctgctagaattggacatttgtatcacctgccccagctgtgttttgttgagctgaag

SEQ ID NO: 53570 - DNA, 621 bp, Homo sapiens
gatctcccagagaaacccttaatggccaaaaataggtgatctgataccttgtggttgatcaaaaagagtgtaaaaaagttttatttttatttatttatttttgagacagagttgcactctgttgcccaggctggaatgcagtgaccatcactttgcccgtggctttgtgtgtcacctatagggagggtgactgttaatggtgctgagaccagaggaagttctggagaactgtttgagaaaatctatgcagctcactgcagcctccacctcccaggttaaagcaattctcttgcctcagtctccctagtagctgggattacaggcacctgccaccatgcccggctaatttttgcatttttattagaggcyaggtttcaccatattggccaggctggtcttgaactcctgacctcatttgatcctcctccctccacctcccaaagtgctaggattacaggcaggagccaccatgcccggccaagttttatctgtattccccactgaagtacagctccaataagcttaaattatgtctttgaattaaaagaagaaagttaaaaagctgtatcttcgtaatgctctctgtttattagttttacctggagttgagtaaacatttta

SEQ ID NO: 53571 - DNA, 621 bp, Homo sapiens
gatctcccagagaaacccttaatggccaaaaataggtgatctgataccttgtggttgatcaaaaagagtgtaaaaaagttttatttttatttatttatttttgagacagagttgcactctgttgcccaggctggaatgcagtgaccatcactttgcccgtggctttgtgtgtcacctatagggagggtgactgttaatggtgctgagaccagaggaagttctggagaactgtttgagaaaatctatgcagctcactgcagcctccacctcccaggttaaagcaattctcttgcctcagtctccctagtagctgggattacaggcacctgccaccatgcccggctaatttttgcatttttattagaggccrggtttcaccatattggccaggctggtcttgaactcctgacctcatttgatcctcctccctccacctcccaaagtgctaggattacaggcaggagccaccatgcccggccaagttttatctgtattccccactgaagtacagctccaataagcttaaattatgtctttgaattaaaagaagaaagttaaaaagctgtatcttcgtaatgctctctgtttattagttttacctggagttgagtaaacatttta

SEQ ID NO: 53572 - DNA, 848 bp, Homo sapiens
catcctaaygtactttcttatactttaacacttttgaaatataggtgaaatcttatagttgttatatacatttaatgtgattgtggttttaacaaaaacctattcaattgaaagctttaattaaaatttgtagtatcatagactgtgagcagtatgataattatagcagtaacagtaaaattttttctttcctatttttactgcaatacctctgatagttctatatttaagtatagtaatactaaaagcttgcatttatagataacttaatatgtagcaaggattatcctaagagcattatatttattaacttatttaatcctggagaaaacccttagaggaggtactgtttttatgaacatatttctgatgaaggaactgcaatatggtaatttgctaaggcttacccaactggtccatggtagaacgtgagaaggaaaggatcagtgtctatcttcagagaccaagcttaatcctttgctatccaaacgtcttagtatagcagttagctgaccgttttaacagctaatagtgatcattattctgttaaacttacaatgcttcatatctaatttttaaatgaaatttttttaatgaggaaagggctttagcttttattgaatcaattccaagtgctgaaataatcatataaatgttatttgtcatacaaatatattttgcctatttctcttttataaactgaataaactatcttataagattaaaaaaacctcattttagatagaaatatagaaatatgcttaatataaagcttttaaaagctggggtgttttattgacaatatgaatattttttgttattatttatggtgtgtttttaccttaatt

SEQ ID NO: 53573 - DNA, 629 bp, Homo sapiens
acattttcatgcacacttcattatgtccagcagtgacagattcctgaaataaatcatctgagttctgctgcctgatttgggttggagatctttaatggttctacagaagccagctaagaaacccataaaatatccctgaagcatttatggtgtttttctgaatatttaataggagctgctggaaaacttcttcacacgttactgagactggtaggtggtttgctgttttatttgaaggacaatgtatttgataatcttgctttgcataaaatgcttctctaaagaagaaaagttatacttaaggatgtcctggggtgaggaccatgatatagagagcttgggatgggaattcaagccgacagacaggagcagcatcaatgactgagacaccctcayagaccatccatgcccctgaggtctctgcctggggatgctcctcctgaacctccaggacgtgcaaagtcacccttcaatgtgccccaaaggagctgcttggccaggcaaaacccctcttgtgaagagccctcttcagggtagggaaaggagctctgggtaaggaaggcaaaatggggcaaggtgtggggattaggcctggtagagaaggtcttggagttcctttgttactctct

SEQ ID NO: 53574 - DNA, 281 bp, Homo sapiens
agggtcccacaagactacagtcaaggtgttggccagtgcgtgggtctcatctcaaggttgactgggaagatccatttccaggcttatgtggtttcagcagaattcacttccttacagttgttgggggtttcagtttcttgctacccctagttcttaggtatatrccaacgcagccgcttgcttcttcaaagacagtaaaggacagaatcttctcagagaggagaagtccaaacctgtgtaatgtattatagacatgccatcttatcgtctttgccctattt

SEQ ID NO: 53575 - DNA, 637 bp, Homo sapiens
cgcaggctgccaatggagatgccgatgagcttctggagctgtccgcactgctgcagccccgggctggccggggcccctgcgccaccctcagcggccgctgcatcacccccgccaccgccctccttcttctctcccatcgcctccgcgcgcagtgccgcyctatgcaggccacagcggccgaggcagggagcccggggctcgggcgcctaggcaaggaacccccgagccgggagagctggaccgggagcgcccctcggcgctgcccttgccaggacgccagtagagctggcagcggagtctgccgctcccgccctcagagccgcggcggcgggagcagaaagccgcggcggcaaaaagccgcggcgacggggggcaaaaagccgcggcggcgcaggcaaaaagcttaggcggcgggggcaaaaagccgcggcggcaaaaatgcgcggcggcggggcaaaaagccgcggcggaagaaagccgccggggcgggggcaaaaagccgcggcgggggggacaaaaagcagtgggagctggggcaaaaaaaccacaaaaagccgcggcggcggggaccaaaacgccgcggcggcggaggcaaaaagctgcaaaagccgcggtgtgggggcagaaagccgcagcg

SEQ ID NO: 53576 - DNA, 891 bp, Homo sapiens
tgtcaaacaaccttatttggcattggatagtgtaagtaattttttgccctgacaaaatatatttaggtacccacttgagcaaaacttataatatagatttaatcatatattcactgttatcatcgacttcattgtgttcttctacctctgcctgatgcacctcttgattattcagcattgttgccaagcatttgctgttagtagctgataacattcatcttcttttgctaaatatttctcatatacaagaagatttaagactgtttatccctgtagttggaagatttttcctctaaaagctgtttatacttttcctagcacgaagacctgcttatatgccacacaagtgtctcttaaaaagttagtcactcaatgccctgctaataggagtgaaaaagacactagaaacaaaaatcttttctaaccagaaaaccacttttgtataaattttgagctccttgcaccacagtgactacagtgtgcctcactaaggtaaacatagaaaatggtatcatttattgtttcaaattaatagggtaattgtaaatatgataagtttatcgaagatattacagaagtatacattttaagacaaccctagaaataattcttttaagagcatgttacaattattattttaaaatgcattaytcctaccctaattttagttggaagagatgtatgaaaattacaatgattgtactgcatagaatatgtcatttttgtttgattttttaattagcagtttaatttgtgcagtgtcgaatataagagataattctgataggtttgtcatcacagagtctctggcagttaacatgaatacaaaatattaaatgtattacttaccgcagtaaacggtcactagtcagtaggttgataattcgcatc

SEQ ID NO: 53577 - DNA, 612 bp, Homo sapiens
tgtaatgaagcagtgagaacatggtctgttgagtggaactcaggtctgaggagccctcttccttctgccttcactgccccaggtgaggtccggccgagacagaacacaaatacagggcccatttacagagggacgggtgagtttagggaacagacacgagaaactgaggcacccagagagcactggaaagggttctgctccccagggctggcctggcatggaggggacaaagtgtgcggagcccagggagggccgttcgcatgaggcccagtcttggatgcggcacttggtcgtctgctgcctgtgtctcccgttggactggactagcagcccgaggtcccgggggtccaggtgatgcggctgtagaggtggtcctaggggcacagagccatcagaggagggtcagcatgggtggaaagaggatgccaggccacagaggagggtcagcacgggtgggcagaggaggacaggccacagaggagggtcagcacrggtgggcagaggatgccaggtcacagagctgatgggaaggatgaggcacggacgccgtggtggcctcaggaatggaatgatggccgtgggcccatttctagcgtcctttgcacacctcct

SEQ ID NO: 53578 - DNA, 598 bp, Homo sapiens
ctgcagtgagccatgattgcaccactgcactccagcctgggtgatagcacaagacactgtctcaaaaacaaacaaacaaacaaacaaaaataaaaaacaacaacaacaggccaggtgcagtggctggtgcctgtaatcccagcgctttgggatgccaaggtaggaggatcacttgagccttagagttcaagactagcctgggcaacatagggagaccccgtctctacaaaaaacaaaaataatttttttwaaaaaaaatcagaaatccacaaggacaaagaactcacccccccccatccttcctaccatcctccctaccatcagaataggaagttaaaactatcacttcagacatgctctttgattcagatgaaggtgagacttggctagattatggctttgactcagaaccatgggcaaagttcatggtttgggagtttctgcaggaagcttggggacgttcagctgttttagctgaacttgactctgagttccaagtctatgaaattccaaaactcaaagcaaaacaaaggcaccctcaaggttagggatcatatgctatccatctccaccccctggcacccagcgtggcacccac

SEQ ID NO: 53579 - DNA, 619 bp, Homo sapiens
tccttaagctgttgccccatcagacttgtgtgtgcttttagggcccagtgcatcttgttagctgactcccctcacagacaatactgggaatggggcagggattgcgcagaacagtttgtaacacgtggtaggaggaagtttaagggatcacaaatggggaagggatatccttttctcagcgggccccacaattgaaacatttcaaagtatggctcagagaaaatgcgttttaacatgagtttgtgtttctctaggggactcccagttgttgagttgaatatgatggagcatcagattttacctaatacagcagaactccyaaaaagttacagccatatgcaggacggcagtactcagcatggtctttatgcacaggaactaaaggaaaaagagatcgagtcacaaaaattcaggaagagggggtaaatgtggattgtatggaatgaaaaataaacattctcaaggatgtgtgactctgtgtctgtgtgtgtgtgtgtgtctttgtgtttgtgtgtgtgtgtgtgtgtgtgtgtatgtttatccactttattcgggtgtcataatgaattgatcaatccacgtgctttattctcttcatggaaataaccagtctgcgttg

SEQ ID NO: 53580 - DNA, 2490 bp, Homo sapiens
catggagctgtcatttcctatgataacaaggacttgttctaaaacacctcctgaaggacttgcccgaggctattttaaagtgaactttttaacaattatgttgaattactacgcgaaaataacaagacatatagtatagtaaatatataaaccagtaacatgcttctttactatcaagttttatgtaccatacacaactgtgtgtgctatacttttatacaagtggcagtgcagtaagtgtgtttacaccagcatccccacagacacatctgtaaggcattgcactatcactttacgaaggctacgacatcattgggtgatagaaattttttagctcccttataattttatgggaccactgtggtatgtacggtttgtctttggccaaaacattgttatgccgcacatgattgtatttagaatatagagttgctctccttacacacatttttggctgacataatctcctggattcaaatatatttaatgtttcaatactttataatgattatgcttattgatgctcctatgttgtcctatatttgggcaatgggagcaaatgcaggatagcttttaagtgttcttgacatgacctctaatctttgacaattttcttatttctggtatgaaaatatttgtattatttttatcatataactggaatcagctatttctcctagaaatcttcatccctactagtgagaaaaacaggggacattaatctcactgctattaaattcatcataatttctatcctctttcaggacataaacctaaaaaatacacatatgtatatattttagtgataaaatatatacattcattctgtttttctagatcatatctaagcttctggaattttacttatgtgattttatatttatgtgccattgatacttacaaccttgattaataactgtgttgtcttaattaatggtttgcttcaacgtacgtgccagtttcaggagacaataccagcattactaacaacaatatgattagaaaaaaacaggtttttttggtggtgttgttttgggttttttgttgttgtttgttttttgtttgcttgcttttttgagacagagtttcactcttggttgcccaggctggagtgcagtggcgcgatctcagctcaacacaaccactgcctcccgggaccaagtgattctcctgcctcagcctcccgagtagctgggactacaggcatgtgctgccatgcccggctaattttgtatttttagtatagatgtggcttctccatgttggtcaggctggtctcaaactcctgaccgccttggcctcccaaagtgctgggattacaggcataagccaccaggcccggccaaaacatgttttttttttttttgtaaatgttcttcttccttttaagacatattctatcaatcagattagtgtttcaaaatcactgagataatggctctctattgcactatgcaaacaacttgctacagttaaacttgtattttactccattttttaagatttactcttttaatatattttgttttacaattacggaatgcatgttcatgtgcctaaagttaattccataaaagtccaccttttttttttttttttttttttttgagacagaggacagagtctcgctctgttgcccaggctggaatgcagtggtgcgatcttggctcactgcaacctctgcctctagggttgaaacaattctcaggcctcagcctcccgagtaactgggattactggcacatgccatcgcaccttgctaatttttgtattttttgtagagacggagtttcaccatgttggccaggcctgtctcgaactctctacctcatgtgatcctcccacctcggcctctcaaagtgctgggattaccttcatgagccaccatgcccagcctttttttgtttgtttgttctctttacgctgctttttatttccctttctctctctctgtctcacacacacacaattctatctgaattttgatttatccttttattttgatttgtttgcagatttgtttttaaataaaacacacacacattatacatgtattatctcatccatccatttttgaataaatggaaacacactagtaacaatagtatccatttcactttatactttattccagaaatttgttatgtatatarcttgtcttcattcttttctaaactccagagtattacattgggtgaatatactatagtttattcaattaatctttattaaaggatttttggattttatacagttcttcactattggtttaaagatgttctttcttagttttattcattgtatgtttaatttctttgtattttttgttttattaatctatttgcctgatctatcatttttttcttatagctatgtttgttaacccataaatttgtttcgtttttataattacttccaagacgttctaaaatttcagcctatattttccattatactgaatagtcaatgaataacttggttacaatgttt

SEQ ID NO: 53581 - DNA, 561 bp, Homo sapiens
catgggggcgagtgtgtggggtggaattggcttatttgtttatttttatttttctgtcctcttccacagatggtgacgttagaattggcttgtataaatgacrggtagaaccatcttatatagctttatgtaattaccaaaataaacttataaaacaaaaatattttgtatttttattattttattgctcctttcctctttacagcacattgtcttaagaacaaaatctcagtttatgatttcatttttattttttctgccattttcagctttacaatatttgcaacatattataatcttctcatattggtgaatttttactgatcacagctttataaaagtatgcataaaaaaaaccatgatgaataatggctagaagcttatccaaattaaatattgacatgaaaatttacacttacttaaaaatattagtaaatatttcatatgatactttatatatccagatacactggactgtgtaattatctaaaataaagtcatgccatatgattcaatggaattatagttaaataagctcattttatcctaaggcagagtaga

SEQ ID NO: 53582 - DNA, 550 bp, Homo sapiens
ttttcttttagtgggaataatgatgccactttaatgattaaataaaataatgtatgaaaagtatctacagcactaattttcactaagttgactgcattaaagttactatgtatggcctcacagattaagtacatcacaaattcattattcatatagacccaaatacagcaatcctactatatttgttttcattttctgagcaacaatgaaaacacagagtaaaagggaaggaaaaaaatgaagtaacatctcttaaaataaaaaaataattagtaccttgaactctaaacactttggaaaataaagcyttctatgaaaaaagggaaagcaaaacaaaatatataaagcaaccaacaattaaattgtcttagtataaaacagaagagaagaggagaacattacaaataataaaagtatactgtgttttgaaatacaaaaatgaatgcctcaataattttcagatatgcattgggaaatgaattcttacagtttgaataataaaatacaatctgcagaagtgtttaaaataaacaaatatactctggtttgt

SEQ ID NO: 53583 - DNA, 602 bp, Homo sapiens
cagtgtggggtgaaaaaaatgaggagataaaatcaatagtaaagaagaggagtggatacttttcttgcatgtttcacaactaaatctggacttaaggacagttagatatattggatttattatctgaatcttatctcattgcattaggtaataaaaaggccagttgtagaacaaagaatcagtaaatatgtcacagagcacaaagcttaacctgaaaggagtctatttttttttttctattcagcacgtctcagtttgcaaaaaacatttcaataaagtttctgtgcaacagagggtaattaggagaaaatgaccttgaggtttatactgcttttaaaacagccacttggtaaatctttgcaggcatgaatgtcagcttaagatagatgtttataagaaaactgtgaaatgcaatatacgaatggaaacttcatcttcatkgcaaatcttaggcctaaagctcactctttatcctctgataccgataagcatacaacagctttcctaagaattagtatatgagtctgttaaaataactagtttaaagctcccattttcaaaataggttctgcttttttagaaaaatcatattcttaagtcta

SEQ ID NO: 53584 - DNA, 667 bp, Homo sapiens
taagaacgtcagtcctattagattaagacctctctctcttttttattttttttttggagacagattctggctctgtcgcccaggctagagtgcagtggtgcaatctcggctcactgcaacctccacctgctgggttcaagcgattctcctgcctcagcctcccaagtagctgggattacaggcacccaccaccacrcccggctaatttttttttatattttcagtagagatggagtttcactgcattagccaggctggtctcgaacacctgacctcaggtgatccacccacttctgcttcccaaagtgctgagattataagcgtgcagcaccgcacctggccagaacccactcttatgacctcattttaccttagtttcttctttaaagggcctgtctccaaatgcagtcacgttgtgggtgagggcttcaatataggaagtttcaagggacacaattcagtccataacacttggtgccttggttacttctttataaaacggagatctaataaaatgtttcttatgaagttgtcgtgaggaataaatgagttgctctatatgaagctcttagaatggtgcctggcacacaataaatgttatccaaaagttatccattattgaactgttatctaacagtctgggtcctcaaattttatgtttgacctt

SEQ ID NO: 53585 - DNA, 667 bp, Homo sapiens
taagaacgtcagtcctattagattaagacctctctctcttttttattttttttttggagacagattctggctctgtcgcccaggctagagtgcagtggtgcaatctcggctcactgcaacctccacctgctgggttcaagcgattctcctgcctcagcctcccaagtagctgggattacaggcacccaccaccacgcccggctaatttttttttatattttcagtagagatggagtttcactgcattagccaggctggtctcgaacacctgacctcaggtgatccacccacttctgcttcccaaagtgctgagattataagcgtgcrgcaccgcacctggccagaacccactcttatgacctcattttaccttagtttcttctttaaagggcctgtctccaaatgcagtcacgttgtgggtgagggcttcaatataggaagtttcaagggacacaattcagtccataacacttggtgccttggttacttctttataaaacggagatctaataaaatgtttcttatgaagttgtcgtgaggaataaatgagttgctctatatgaagctcttagaatggtgcctggcacacaataaatgttatccaaaagttatccattattgaactgttatctaacagtctgggtcctcaaattttatgtttgacctt

SEQ ID NO: 53586 - DNA, 667 bp, Homo sapiens
taagaacgtcagtcctattagattaagacctctctctcttttttattttttttttggagacagattctggctctgtcgcccaggctagagtgcagtggtgcaatctcggctcactgcaacctccacctgctgggttcaagcgattctcctgcctcagcctcccaagtagctgggattacaggcacccaccaccacgcccggctaatttttttttatattttcagtagagatggagtttcactgcattagccaggctggtctcgaacacctgacctcaggtgatccacccacttctgcttcccaaagtgctgagattataagcgtgcagcaccgcacctggccagaacccactcttatgayctcattttaccttagtttcttctttaaagggcctgtctccaaatgcagtcacgttgtgggtgagggcttcaatataggaagtttcaagggacacaattcagtccataacacttggtgccttggttacttctttataaaacggagatctaataaaatgtttcttatgaagttgtcgtgaggaataaatgagttgctctatatgaagctcttagaatggtgcctggcacacaataaatgttatccaaaagttatccattattgaactgttatctaacagtctgggtcctcaaattttatgtttgacctt

SEQ ID NO: 53587 - DNA, 549 bp, Homo sapiens
aaataaatccttaaatgaatacatcatattgaaagtacacaaaagaaaaaggacaccaaaaaggaaaatccctaaagaacagccagaaaaaacagagcagcagttagcttgacaactgactttctaagagcaacaatggacatcagaataccacagaatggtatctttaatacgctgaaagaaaaaatacctgtcaacctagaactttatactcagcaaaaataactcttaaaattgattaaaaaaagaaagatattttggggcaaataaaaacttcaaatatgttaccayagacctttcctaagtgaaatactaaaaaggatcctcaggcagaatataagtgttttcagatggcatgtctgagttgcaagaaggaatgaaaagcctaaagagttatatatggtttaatcactgattgtacaaaacaataataacaaattgccaagactaaagtcaaataacataaaaatataataacatcacaggtaaggaggaggcaaaaggagtccaagtgtcctaatttcttctattatgtaagaaaaggtacag

SEQ ID NO: 53588 - DNA, 691 bp, Homo sapiens
ggaaattaattgaaaataatacagtgttgtgaggtgggatgaagatgatttcctttaaggaaattatgccaagtgttttgaatcagccaaggataaacaaatgcagactatcatttgatggaggtattataaactgataacatgattcgaagtataagaatggcaaattgtgaagaatgaataaaattacagagataaatagcaaaaatgtgaaactaaaataaagaggaacagtgagtaaacggggttagctgagaatatggtttaacagggcatactctattcatttatgaagaaattttaatcctcaaaatgctacttgtcttagtctgtgtaggctgctgtaacaaaataccacaagctgagtaacttataaacaacagaaatttcttacagttgtgcaggctgggaagtccaatatcaaggcagattcagcatctggggtgaggttcacccttctggctcatagatggcaacttcctgctgtatccccatactttggaaggggccaatgagctctctgggrtctcttttatgagggctcaaatcccattcatgagaatcttgtcctcatgacctaatcacctccccaaggctctatctcctaacacgagtagcttgggggttaggatttcaatatacaaatttggggggacataaacagtcagtctgtgacattgccatttcatca

SEQ ID NO: 53589 - DNA, 691 bp, Homo sapiens
ggaaattaattgaaaataatacagtgttgtgaggtgggatgaagatgatttcctttaaggaaattatgccaagtgttttgaatcagccaaggataaacaaatgcagactatcatttgatggaggtattataaactgataacatgattcgaagtataagaatggcaaattgtgaagaatgaataaaattacagagataaatagcaaaaatgtgaaactaaaataaagaggaacagtgagtaaacggggttagctgagaatatggtttaacagggcatactctattcatttatgaagaaattttaatcctcaaaatgctacttgtcttagtctgtgtaggctgctgtaacaaaataccacaagctgagtaacttataaacaacagaaatttcttacagttgtgcaggctgggaagtccaatatcaaggcagattcagcatctggggtgaggttcacccttctggctcatagatggcaacttcctgctgtatccccatactttggaaggggccaatgagctctctggggtctcttttatragggctcaaatcccattcatgagaatcttgtcctcatgacctaatcacctccccaaggctctatctcctaacacgagtagcttgggggttaggatttcaatatacaaatttggggggacataaacagtcagtctgtgacattgccatttcatca

SEQ ID NO: 53590 - DNA, 691 bp, Homo sapiens
ggaaattaattgaaaataatacagtgttgtgaggtgggatgaagatgatttcctttaaggaaattatgccaagtgttttgaatcagccaaggataaacaaatgcagactatcatttgatggaggtattataaactgataacatgattcgaagtataagaatggcaaattgtgaagaatgaataaaattacagagataaatagcaaaaatgtgaaactaaaataaagaggaacagtgagtaaacggggttagctgagaatatggtttaacagggcatactctattcatttatgaagaaattttaatcctcaaaatgctacttgtcttagtctgtgtaggctgctgtaacaaaataccacaagctgagtaacttataaacaacagaaatttcttacagttgtgcaggctgggaagtccaatatcaaggcagattcagcatctggggtgaggttcacccttctggctcatagatggcaacttcctgctgtatccccatactttggaaggggccaatgagctctctggggtctcttttatgagggcwcaaatcccattcatgagaatcttgtcctcatgacctaatcacctccccaaggctctatctcctaacacgagtagcttgggggttaggatttcaatatacaaatttggggggacataaacagtcagtctgtgacattgccatttcatca

SEQ ID NO: 53591 - DNA, 506 bp, Homo sapiens
ggaaacaatcctattrtatgttattggtttgctaggcgaagaccacctctggaaggcctcacaagaagcaaggattgccttcaggaaggggaactaggggatagagtcggggggagactttcattgtatatattttttatattgtttgactttagaatgtgtataatctgtattttttaagtagtaaaattaaaatatttttaaaagataaaaaacaggctgggtgtggtggctcatgcctgtaatcccagcactttaggaggccaagccaggtgaatcacttgaggtcaggagtttgagaccagcctgggcaacatggtgagaacccatctctcctaccaaaaatacaaaaattggccgggcatgggggctcgcgcctacagtcccagctacttgggaggctgaggcaggagaattgctcgaacccaggaggtggaggttgcagtgagccgagattttgctgttgcactccagcctgggcaacagagtgagactcggtctcaaaa

SEQ ID NO: 53592 - DNA, 2540 bp, Homo sapiens
taaagtaatacatgtacatatgcatgttacatatcaaaaaagttgtaatgtaggtaataagataacccataatcactcaaataataacttgattttagctttagttattaaaaatcaaatatagtatatgatgctagtaactttgcataaggataaataacttacaactaaggagataaggaagatttttctcattctaatttggattagacactagatagacattaaagacataattaattctatgtttagaaggtagggaaaacagagttctaggtagacaaattgagcaaagccatatacaacagtgaaaatataaaaaagttttttggaacacagtgagtatactttcttcattgccggctcttctaacatcagcagaggatggggtgtgatgtttttaaataaaaatagtatgaatgagactaaaaaattgttttgtttctgtctttttaagttgtattttattttcttttagattcagggggttcagatgcaggtttgctacatgagtacattgtgcaatggtgaggtttgggcttccggtgtacccatcatccaaatagtgaacattgttcccgatggttttcaaactgattatagaatgtttgaaatgcagcctaaaattttggctttatttctagaattataaattacttgcgttcatgttgtcaacacataattattgatatgataacttttctgagcacctgaaatatattcttgtacaaaactttctgtcttcataagtgactttccagttagataacagtcagtaaatataataaatagtaaacaaaatgttacaaagggaaaggtggcagaaaaaaaataaaattggagtctttagaatagatattctattctatgtattgcttataaaatatattagtttttaaagtacatttcaatgagaaggtctagaacaatgatatgaggagtttgccatgtggttaacatgagagagcatccaggcctgaaaaagtaggtcctaagttggattcatgctgtgtatatttgaccagcagcaaaaagctagccttgctgaaacagtgggagagatgaagagagaatgaggtcagagaagtgatgggatcagacgttggagggctttgtaggccattttaaggactgtacaagggccataacaattaataaattcaatcttctataatcagcccattaataaactcagatccagaaagaataaatgaactggtgtcctcccaaaagagcccagaacaatgcaattcatctactaattcaacaaatatctatggagtatctacattgcatcagtaggtatagtaacaacttggggacgaaggccataaaagtaggcagctatgattcagctctgtacattttataataatggtgttcataccatggaggacacattatagaagcaggaaaggggaattggttgccaagagaggagtctcttaatgagcaggaatgcttgaaaaatccttaagtacgaggagagaagtgtaaacaaaatgaagtcataaaagtgggaattctaatggtaatggagcacagaggaacgaagaagattacagttgtcaaactaaagtatatggacatagctgggaagaaaattcaagaagaatgtaggaaatctggaaaagtgagaaaggatgagattgtgagtgatgttatgtgctggttaaaaggtatgagatttatttaagcgttaatccagagccatgtaaaacaaagaaataggaataacattaaatttagctcaaacttatattttatgaatttacgatggccaaggagataattctatggaagaaagaaaatctgaaacaatacaaattagacacggttttttaaatagagcaaaggaaactaacctaatatatgatgaggaggaagtagaatctgaagtatttgacgagtattagaaatacagtccggtggatgattattaaatggtgttgatgaaaaagatgatgggatgctatttctggacagcctacaaaagtagtgcctttactaaaagaaacaatgcaataatagaaattttacactacttcctttagattgcacaaccctgtcatccttcatttgttatgtatagtactctcaggaaccatgagggtttcaccttcagctcttccatctgaatttaagtttattatgtcttctgtcccagttattcattttctgttttggtttcaagcttagcgaaataaatatctaagatagttttctcacatttaatctagcatttgtatatgtgtgtgtgtgtgtgtgtgtgtgtgtgtgtgtgygtgcgcacgcgcacttggaaggtagatgggggaactcggttcaacctggtaaccagtaatgtcatccaaaaaaaaatgcaaactgtctttattaaattttactaaacagatttcttacaaaggacattgtcattatctcaaactggaataggaacagtgtggggaggggggcaatggaaggaaaaaaagagattagtgacagtgaatagactcaccaatatgtctagtttatttctgatctgatattttaatagc

SEQ ID NO: 53593 - DNA, 2540 bp, Homo sapiens
taaagtaatacatgtacatatgcatgttacatatcaaaaaagttgtaatgtaggtaataagataacccataatcactcaaataataacttgattttagctttagttattaaaaatcaaatatagtatatgatgctagtaactttgcataaggataaataacttacaactaaggagataaggaagatttttctcattctaatttggattagacactagatagacattaaagacataattaattctatgtttagaaggtagggaaaacagagttctaggtagacaaattgagcaaagccatatacaacagtgaaaatataaaaaagttttttggaacacagtgagtatactttcttcattgccggctcttctaacatcagcagaggatggggtgtgatgtttttaaataaaaatagtatgaatgagactaaaaaattgttttgtttctgtctttttaagttgtattttattttcttttagattcagggggttcagatgcaggtttgctacatgagtacattgtgcaatggtgaggtttgggcttccggtgtacccatcatccaaatagtgaacattgttcccgatggttttcaaactgattatagaatgtttgaaatgcagcctaaaattttggctttatttctagaattataaattacttgcgttcatgttgtcaacacataattattgatatgataacttttctgagcacctgaaatatattcttgtacaaaactttctgtcttcataagtgactttccagttagataacagtcagtaaatataataaatagtaaacaaaatgttacaaagggaaaggtggcagaaaaaaaataaaattggagtctttagaatagatattctattctatgtattgcttataaaatatattagtttttaaagtacatttcaatgagaaggtctagaacaatgatatgaggagtttgccatgtggttaacatgagagagcatccaggcctgaaaaagtaggtcctaagttggattcatgctgtgtatatttgaccagcagcaaaaagctagccttgctgaaacagtgggagagatgaagagagaatgaggtcagagaagtgatgggatcagacgttggagggctttgtaggccattttaaggactgtacaagggccataacaattaataaattcaatcttctataatcagcccattaataaactcagatccagaaagaataaatgaactggtgtcctcccaaaagagcccagaacaatgcaattcatctactaattcaacaaatatctatggagtatctacattgcatcagtaggtatagtaacaacttggggacgaaggccataaaagtaggcagctatgattcagctctgtacattttataataatggtgttcataccatggaggacacattatagaagcaggaaaggggaattggttgccaagagaggagtctcttaatgagcaggaatgcttgaaaaatccttaagtacgaggagagaagtgtaaacaaaatgaagtcataaaagtgggaattctaatggtaatggagcacagaggaacgaagaagattacagttgtcaaactaaagtatatggacatagctgggaagaaaattcaagaagaatgtaggaaatctggaaaagtgagaaaggatgagattgtgagtgatgttatgtgctggttaaaaggtatgagatttatttaagcgttaatccagagccatgtaaaacaaagaaataggaataacattaaatttagctcaaacttatattttatgaatttacgatggccaaggagataattctatggaagaaagaaaatctgaaacaatacaaattagacacggttttttaaatagagcaaaggaaactaacctaatatatgatgaggaggaagtagaatctgaagtatttgacgagtattagaaatacagtccggtggatgattattaaatggtgttgatgaaaaagatgatgggatgctatttctggacagcctacaaaagtagtgcctttactaaaagaaacaatgcaataatagaaattttacactacttcctttagattgcacaaccctgtcatccttcatttgttatgtatagtactctcaggaaccatgagggtttcaccttcagctcttccatctgaatttaagtttattatgtcttctgtcccagttattcattttctgttttggtttcaagcttagcgaaataaatatctaagatagttttctcacatttaatctagcatttgtatatgtgtgtgtgtgtgtgtgtgtgtgtgtgtgtgtgcgtgcgcacgcgcrcttggaaggtagatgggggaactcggttcaacctggtaaccagtaatgtcatccaaaaaaaaatgcaaactgtctttattaaattttactaaacagatttcttacaaaggacattgtcattatctcaaactggaataggaacagtgtggggaggggggcaatggaaggaaaaaaagagattagtgacagtgaatagactcaccaatatgtctagtttatttctgatctgatattttaatagc

SEQ ID NO: 53594 - DNA, 2540 bp, Homo sapiens
taaagtaatacatgtacatatgcatgttacatatcaaaaaagttgtaatgtaggtaataagataacccataatcactcaaataataacttgattttagctttagttattaaaaatcaaatatagtatatgatgctagtaactttgcataaggataaataacttacaactaaggagataaggaagatttttctcattctaatttggattagacactagatagacattaaagacataattaattctatgtttagaaggtagggaaaacagagttctaggtagacaaattgagcaaagccatatacaacagtgaaaatataaaaaagttttttggaacacagtgagtatactttcttcattgccggctcttctaacatcagcagaggatggggtgtgatgtttttaaataaaaatagtatgaatgagactaaaaaattgttttgtttctgtctttttaagttgtattttattttcttttagattcagggggttcagatgcaggtttgctacatgagtacattgtgcaatggtgaggtttgggcttccggtgtacccatcatccaaatagtgaacattgttcccgatggttttcaaactgattatagaatgtttgaaatgcagcctaaaattttggctttatttctagaattataaattacttgcgttcatgttgtcaacacataattattgatatgataacttttctgagcacctgaaatatattcttgtacaaaactttctgtcttcataagtgactttccagttagataacagtcagtaaatataataaatagtaaacaaaatgttacaaagggaaaggtggcagaaaaaaaataaaattggagtctttagaatagatattctattctatgtattgcttataaaatatattagtttttaaagtacatttcaatgagaaggtctagaacaatgatatgaggagtttgccatgtggttaacatgagagagcatccaggcctgaaaaagtaggtcctaagttggattcatgctgtgtatatttgaccagcagcaaaaagctagccttgctgaaacagtgggagagatgaagagagaatgaggtcagagaagtgatgggatcagacgttggagggctttgtaggccattttaaggactgtacaagggccataacaattaataaattcaatcttctataatcagcccattaataaactcagatccagaaagaataaatgaactggtgtcctcccaaaagagcccagaacaatgcaattcatctactaattcaacaaatatctatggagtatctacattgcatcagtaggtatagtaacaacttggggacgaaggccataaaagtaggcagctatgattcagctctgtacattttataataatggtgttcataccatggaggacacattatagaagcaggaaaggggaattggttgccaagagaggagtctcttaatgagcaggaatgcttgaaaaatccttaagtacgaggagagaagtgtaaacaaaatgaagtcataaaagtgggaattctaatggtaatggagcacagaggaacgaagaagattacagttgtcaaactaaagtatatggacatagctgggaagaaaattcaagaagaatgtaggaaatctggaaaagtgagaaaggatgagattgtgagtgatgttatgtgctggttaaaaggtatgagatttatttaagcgttaatccagagccatgtaaaacaaagaaataggaataacattaaatttagctcaaacttatattttatgaatttacgatggccaaggagataattctatggaagaaagaaaatctgaaacaatacaaattagacacggttttttaaatagagcaaaggaaactaacctaatatatgatgaggaggaagtagaatctgaagtatttgacgagtattagaaatacagtccggtggatgattattaaatggtgttgatgaaaaagatgatgggatgctatttctggacagcctacaaaagtagtgcctttactaaaagaaacaatgcaataatagaaattttacactacttcctttagattgcacaaccctgtcatccttcatttgttatgtatagtactctcaggaaccatgagggtttcaccttcagctcttccatctgaatttaagtttattatgtcttctgtcccagttattcattttctgttttggtttcaagcttagcgaaataaatatctaagatagttttctcacatttaatctagcatttgtatatgtgtgtgtgtgtgtgtgtgtgtgtgtgtgtgtgcgtgcgcacgcgcacttggaaggtagatgggggaactcggttcaacctggtaaccagtaatgtcatccaaaaaaaaatgcaaactgtctttattaaattttactaaacagatttcttacaaaggacattgtcattatctcaaactggaataggaacagtgtggggaggggggcaatggaaggaaaaaaagagattagtgacagtgaatagaytcaccaatatgtctagtttatttctgatctgatattttaatagc

SEQ ID NO: 53595 - DNA, 627 bp, Homo sapiens
ctgttttatggaaccatagggaaaagcttctcaatttttcaagaagctgcccaacaggttgcatggggaattgaatgaacattttccatcttaactgaatcaaaatacacataacaaaacagacagtagtcacctcgctcagcacccaacattaacctggcaaggctcaaactttctcctgttggtctctgtcatctgtgatccatgcaacatggggagcagtgacctctgaccagaattcaatggacggtctctgggcgagagacaaagagcagaaggtcaccttgagtcaggactgttgagctgtcttcagcgctctccaaaagtgaccagataaataagagagattctctgagttgggcctgctagactttcatcagcagsgatcagagatcccatccacatatacaaatacacacacaacaaagacaagagagacagaagaccttccaaaccaagacccctgaccaagaattccataaactattttttccaaactaaccttctactctccgtctgaggaatctgcccgaaatattccagattggggagatctcctgaaccaagacacttatcactaattagggagagccaactgagacccccaacagagccaaaccaagaccc

SEQ ID NO: 53596 - DNA, 627 bp, Homo sapiens
ctgttttatggaaccatagggaaaagcttctcaatttttcaagaagctgcccaacaggttgcatggggaattgaatgaacattttccatcttaactgaatcaaaatacacataacaaaacagacagtagtcacctcgctcagcacccaacattaacctggcaaggctcaaactttctcctgttggtctctgtcatctgtgatccatgcaacatggggagcagtgacctctgaccagaattcaatggacggtctctgggcgagagacaaagagcagaaggtcaccttgagtcaggactgttgagctgtcttcagcgctctccaaaagtgaccagataaataagagagattctctgagttgggcctgctagactttcatcagcaggsatcagagatcccatccacatatacaaatacacacacaacaaagacaagagagacagaagaccttccaaaccaagacccctgaccaagaattccataaactattttttccaaactaaccttctactctccgtctgaggaatctgcccgaaatattccagattggggagatctcctgaaccaagacacttatcactaattagggagagccaactgagacccccaacagagccaaaccaagaccc

SEQ ID NO: 53597 - DNA, 627 bp, Homo sapiens
ctgttttatggaaccatagggaaaagcttctcaatttttcaagaagctgcccaacaggttgcatggggaattgaatgaacattttccatcttaactgaatcaaaatacacataacaaaacagacagtagtcacctcgctcagcacccaacattaacctggcaaggctcaaactttctcctgttggtctctgtcatctgtgatccatgcaacatggggagcagtgacctctgaccagaattcaatggacggtctctgggcgagagacaaagagcagaaggtcaccttgagtcaggactgttgagctgtcttcagcgctctccaaaagtgaccagataaataagagagattctctgagttgggcctgctagactttcatcagcagggwtcagagatcccatccacatatacaaatacacacacaacaaagacaagagagacagaagaccttccaaaccaagacccctgaccaagaattccataaactattttttccaaactaaccttctactctccgtctgaggaatctgcccgaaatattccagattggggagatctcctgaaccaagacacttatcactaattagggagagccaactgagacccccaacagagccaaaccaagaccc

SEQ ID NO: 53598 - DNA, 2439 bp, Homo sapiens
  misc_feature (1)...(2439): n = A,T,C or G
tttyttttttttttttttccagagggagtctcgctctgtcgcctaggctggagtacagtggcacgatctcagctcactgcaacctctgcctcctgagttcaagcaattcttctgcctcagcctcccaagtagctgggactataggcgtgtgccaccacacccggctaatttttgtatttttagaagagacggggtttcaccatattggtcaggctggtcttgaactcctgacctcaggtaattcaccagcctcggcctcctaaagtgctgggattacaggtatgagccactgtgtccagactgtatagcacttttcaaagccctttcatatatctctgctactcacagtgaacccgagtgtggagattgcatgtaaactatacagtatacatggcttcatatgtgggtgtctcttagaagacacacaatagtgtgaactctcctaataactgtatataaatgtgtaagttgaacctgtattctttccttttttcactcctttcttttttttaaagtgccttgggatttttagaaggggatatacctttccaataacccatatactattgtctgccaaattgaccatattttcaaaacagatttattatctatctacctacctacctacctatcaatcatctgtctctctattgagagacactagtattagcatctgatccaaaacaatgaatgagattaaacctcatgtaataagattttgagttagaataataaatagccttatatgtgtttgggttttgcatactgtagctgtcatatcatgtttcagttattcattgcttcagatgattaagggttttttttttgtgctcagccttaatatagctcatttatcatgaacatgatataataatttttcatgactattatctatttctagtgatttcttcatcaatatagatttataatgactttttttagaatgaaagaagaaacagaaaaatgacataaagatcaattatttttagcaagcaataatataaagatatattatttttagcaatattttatatatatatatatatatagagagagagagagagagagagagagagagagtattatagataagccattaaaatctttggaaacctatgctaatttttctgtgtcatactttcatctttttcccccaacatcatatagtagaatgagacacttctactcaaaggacaagacatagattgcaagtttgacttttttggttttttttgaaatggagttttgctctgtcacccacactggagtgcaatggtgtgatcttggctcactgcagcctccgcctctggggttcaagcgattctcctgcctcagcctcccaagtagctgagatgacaggcacacgccaccacgctcgggtaattcttgtagtttttagtagagatggggtttctccattttggccaagctggtcttgaactcctgacttcaggtgatctgcccactttggcgtcccaaagtgctgggattacaggtgtgagccaccatgcccagactttacttgtttttcaagtaaatgattggacaccttcagtttaaatgatatggtaacacatggacaattctgtatagtgatactttttgtttaaagcatttatttgccatatatataatatttaaaaaatttttgagccaggtactgtggctcactcctgcaatcccagcacttccggagccaaggcaggaggatcacttgagtccaggagtttgtgaccagcctgggcaacatagcaagaccttgtctctgcaaaaaaaaaaaaaaaaaaaaaaaaacgcacacaaaaattagccgggcttggtggcatgtgcttgtggtcccagctactcaggagacttaggtgggaggatcccttgagcctgaaagccggaggttgcagtgagccaaggtgtgccactgcactcaagctgggcaatattactgagacnnnnnnnnnnnnnnnnnnnnnnnnnnnnnnnnnnnnnnnnnnnnnnnnnnnnnnnnnnnnnnnnnnnnnnnnnnnnnnnnnnnnnnnnnnnnnnnnnnnntattatatagtgaaaacttcatcataccttgttcccatttgtctattccgatgttgccctccttccacccaggaaaccactgttcttggttactcaggcatcctttcaaactttaccattatatattttctaaatacataatatttacatatttataaatgaagagattgggttaagtaaagacaatgcataaaaatagaacctcttaaaggagttttgaacataaaactggtaatacaactgaaaaatccaatgttggccaggcacagtggctcacacctgtaatcccaggcactttgggaggccaaggcaggcagatcaactgatgtcagcattcgagaccagcctggctaacatggtgaaaccctgtttctactaaaaatacaaaaaatt

SEQ ID NO: 53599 - DNA, 2439 bp, Homo sapiens
  misc_feature (1)...(2439): n = A,T,C or G
tttcttttttttttttttccagagggagtctcgctctgtcgcctaggctggagtacagtggcacgatctcagctcactgcaacctctgcctcctgagttcaagcaattcttctgcctcagcctcccaagtagctgggactataggcgtgtgccaccacacccggctaatttttgtatttttagaagagacggggtttcaccatattggtcaggctggtcttgaactcctgacctcaggtaattcaccagcctcggcctcctaaagtgctgggattacaggtatgagccactgtgtccagactgtatagcacttttcaaagccctttcatatatctctgctactcacagtgaacccgagtgtggagattgcatgtaaactatacagtatacatggcttcatatgtgggtgtctcttagaagacacacaatagtgtgaactctcctaataactgtatataaatgtgtaagttgaacctgtattctttccttttttcactcctttcttttttttaaagtgccttgggatttttagaaggggatatacctttccaataacccatatactattgtctgccaaattgaccatattttcaaaacagatttattatctatctacctacctacctacctatcaatcatctgtctctctattgagagacactagtattagcatctgatccaaaacaatgaatgagattaaacctcatgtaataagattttgagttagaataataaatagccttatatgtgtttgggttttgcatactgtagctgtcatatcatgtttcagttattcattgcttcagatgattaagggttttttttttgtgctcagccttaatatagctcatttatcatgaacatgatataataatttttcatgactattatctatttctagtgatttcttcatcaatatagatttataatgactttttttagaatgaaagaagaaacagaaaaatgacataaagatcaattatttttagcaagcaataatataaagatatattatttttagcaatattttatatatatatatatatatakagagagagagagagagagagagagagagagtattatagataagccattaaaatctttggaaacctatgctaatttttctgtgtcatactttcatctttttcccccaacatcatatagtagaatgagacacttctactcaaaggacaagacatagattgcaagtttgacttttttggttttttttgaaatggagttttgctctgtcacccacactggagtgcaatggtgtgatcttggctcactgcagcctccgcctctggggttcaagcgattctcctgcctcagcctcccaagtagctgagatgacaggcacacgccaccacgctcgggtaattcttgtagtttttagtagagatggggtttctccattttggccaagctggtcttgaactcctgacttcaggtgatctgcccactttggcgtcccaaagtgctgggattacaggtgtgagccaccatgcccagactttacttgtttttcaagtaaatgattggacaccttcagtttaaatgatatggtaacacatggacaattctgtatagtgatactttttgtttaaagcatttatttgccatatatataatatttaaaaaatttttgagccaggtactgtggctcactcctgcaatcccagcacttccggagccaaggcaggaggatcacttgagtccaggagtttgtgaccagcctgggcaacatagcaagaccttgtctctgcaaaaaaaaaaaaaaaaaaaaaaaaacgcacacaaaaattagccgggcttggtggcatgtgcttgtggtcccagctactcaggagacttaggtgggaggatcccttgagcctgaaagccggaggttgcagtgagccaaggtgtgccactgcactcaagctgggcaatattactgagacnnnnnnnnnnnnnnnnnnnnnnnnnnnnnnnnnnnnnnnnnnnnnnnnnnnnnnnnnnnnnnnnnnnnnnnnnnnnnnnnnnnnnnnnnnnnnnnnnnnntattatatagtgaaaacttcatcataccttgttcccatttgtctattccgatgttgccctccttccacccaggaaaccactgttcttggttactcaggcatcctttcaaactttaccattatatattttctaaatacataatatttacatatttataaatgaagagattgggttaagtaaagacaatgcataaaaatagaacctcttaaaggagttttgaacataaaactggtaatacaactgaaaaatccaatgttggccaggcacagtggctcacacctgtaatcccaggcactttgggaggccaaggcaggcagatcaactgatgtcagcattcgagaccagcctggctaacatggtgaaaccctgtttctactaaaaatacaaaaaatt

SEQ ID NO: 53600 - DNA, 2439 bp, Homo sapiens
  misc_feature (1)...(2439): n = A,T,C or G
tttcttttttttttttttccagagggagtctcgctctgtcgcctaggctggagtacagtggcacgatctcagctcactgcaacctctgcctcctgagttcaagcaattcttctgcctcagcctcccaagtagctgggactataggcgtgtgccaccacacccggctaatttttgtatttttagaagagacggggtttcaccatattggtcaggctggtcttgaactcctgacctcaggtaattcaccagcctcggcctcctaaagtgctgggattacaggtatgagccactgtgtccagactgtatagcacttttcaaagccctttcatatatctctgctactcacagtgaacccgagtgtggagattgcatgtaaactatacagtatacatggcttcatatgtgggtgtctcttagaagacacacaatagtgtgaactctcctaataactgtatataaatgtgtaagttgaacctgtattctttccttttttcactcctttcttttttttaaagtgccttgggatttttagaaggggatatacctttccaataacccatatactattgtctgccaaattgaccatattttcaaaacagatttattatctatctacctacctacctacctatcaatcatctgtctctctattgagagacactagtattagcatctgatccaaaacaatgaatgagattaaacctcatgtaataagattttgagttagaataataaatagccttatatgtgtttgggttttgcatactgtagctgtcatatcatgtttcagttattcattgcttcagatgattaagggttttttttttgtgctcagccttaatatagctcatttatcatgaacatgatataataatttttcatgactattatctatttctagtgatttcttcatcaatatagatttataatgactttttttagaatgaaagaagaaacagaaaaatgacataaagatcaattatttttagcaagcaataatataaagatatattatttttagcaatattttatatatatatatatatatagakagagagagagagagagagagagagagagtattatagataagccattaaaatctttggaaacctatgctaatttttctgtgtcatactttcatctttttcccccaacatcatatagtagaatgagacacttctactcaaaggacaagacatagattgcaagtttgacttttttggttttttttgaaatggagttttgctctgtcacccacactggagtgcaatggtgtgatcttggctcactgcagcctccgcctctggggttcaagcgattctcctgcctcagcctcccaagtagctgagatgacaggcacacgccaccacgctcgggtaattcttgtagtttttagtagagatggggtttctccattttggccaagctggtcttgaactcctgacttcaggtgatctgcccactttggcgtcccaaagtgctgggattacaggtgtgagccaccatgcccagactttacttgtttttcaagtaaatgattggacaccttcagtttaaatgatatggtaacacatggacaattctgtatagtgatactttttgtttaaagcatttatttgccatatatataatatttaaaaaatttttgagccaggtactgtggctcactcctgcaatcccagcacttccggagccaaggcaggaggatcacttgagtccaggagtttgtgaccagcctgggcaacatagcaagaccttgtctctgcaaaaaaaaaaaaaaaaaaaaaaaaacgcacacaaaaattagccgggcttggtggcatgtgcttgtggtcccagctactcaggagacttaggtgggaggatcccttgagcctgaaagccggaggttgcagtgagccaaggtgtgccactgcactcaagctgggcaatattactgagacnnnnnnnnnnnnnnnnnnnnnnnnnnnnnnnnnnnnnnnnnnnnnnnnnnnnnnnnnnnnnnnnnnnnnnnnnnnnnnnnnnnnnnnnnnnnnnnnnnnntattatatagtgaaaacttcatcataccttgttcccatttgtctattccgatgttgccctccttccacccaggaaaccactgttcttggttactcaggcatcctttcaaactttaccattatatattttctaaatacataatatttacatatttataaatgaagagattgggttaagtaaagacaatgcataaaaatagaacctcttaaaggagttttgaacataaaactggtaatacaactgaaaaatccaatgttggccaggcacagtggctcacacctgtaatcccaggcactttgggaggccaaggcaggcagatcaactgatgtcagcattcgagaccagcctggctaacatggtgaaaccctgtttctactaaaaatacaaaaaatt

SEQ ID NO: 53601 - DNA, 429 bp, Homo sapiens
tgtaaactctgcagcatactaataatgctctggctttctgattaaagataaatggcttactatcatcacccctggtttgagggccagctcacatgtaatcccttataggattccaaagttgttaaataaatgcagttctttttgtcattttgaagcattcaaaaatttttcaagaaaagctatgatcatataaatagaaattttatccagaatgttacaatgtaacatttgtraataaatgtgtaggtgctgtatttgctcagactctagtttgggttgtgttttcttttccctttttttttttgagacagggtctctctctgtcatctgggctgcagtgcagtggcgtaatcacagctcactgcaacctctactcccaggctcaagcaatcctcctgagtagctgggactagagacatgcgccacaac

SEQ ID NO: 53602 - DNA, 1182 bp, Homo sapiens
tgtcgcccaggctggagtgcaatggcatgatctcagctccctgcaacctctgccccctgggttctagtgactctcctgcctcagtcacccgagcagctgggactacaggcgcccgtgaccaaggctggctaatttttgtatttttagtagagacggggtttcaccatgttgaccaggctggtctcaaactcctgacctcaggtgatccgcctgcctcggcctcccaaagtgctgggattacaggtgtgagccaccgcacccagccccagtccttcctttttgtcttctcttccgacatctcaggctctgctcacctcgtttcctgctgaaaagccgcatccctggctgtctgtgtgaagcagaatctaggggcctccttcatgctccagcttccatccttgaggctcgcctgcccccgggcagctctggcagaggaagcctggccctggcgcgtctcctcaggagcgctcatgacgggcacgggcgtcacaaacacaccaacagaaacaacctgtttccatcgcaagagaacagctccttaacacgtagcatttcattctaaagagtgctaaacagctatgaaaagcggccagtttgtctgcacgttgggcctttcaatgattttacatcatccttgcgagagccctgcggtggtgtcacgccctcgcaccgcgggtggagaagcgtgtctttcagacagaccaagcgatttgctcaaggtcacagggctcagaggacacaatattaagcccaagargctcacagcgtgaggggaattaggggagacagacacagacagagattcttggaaaacagcagccgagtggtcagtaccgggacataggttcgctcaggtgctgggggagccttaaggaggagtctccagtatagagcgagagcctgatcttccaaacgccagcctactttccaccacggccacaccaaactgtagtattttgttaaaggttctcagaactattaagcatttcttgttttctgattctggcactcagcactgtgccttatgcataggagacacgcaataaatatttgttgggctggcgcagtggctcattcctggaatcccagcactttgggagcctgagccaggaggatcacttgagcccaggaattcaagaccagcctgggcaacatagtgagaccccacctttataaaaaata

SEQ ID NO: 53603 - DNA, 648 bp, Homo sapiens
cacgcctgcagtgctgatagctgcaacgggagagtggggagaaaggaggccgataccagggtgaccctgggaacagacagcggatctgccccagcccttcacactcactgaccaatggcagcagtgaagtacatggcgatctcatccggagtcagagcccgctcccagatgatgaactcatcgaaagcaccgttctcataacacttggcctggtcctgctcagaccctatcacgaggttgacgttggactctccatagtcacgagacacttttccactcggatcagaggtgctcagggtcccgttgacgtagactttcaggccctccttggatttccatgtaaataggacatgagtccaataggggcctggaaaagagtgaagatcgccattctgagtrctgtgggaatgagctccccatgcacaggtttttcctgtttgtaggcacatccttctttcttaaggtgatcaatcactgttaactgtggtgcgtcctaatacaaggtataacacagacctgactttccccagtcctttggagcacaggaaggatgttatctttttgtccttatgccctaaattccagaagcagttcaaggagactccttgttattttaacatagtagttacaaattcaaatgcccacaag

SEQ ID NO: 53604 - DNA, 440 bp, Homo sapiens
aggttgggacgcctgtgggtctttttcaccagaacatttttcagccttctcgttctctctcagagaatggcacctcttgttcatgacgcattgcgctggaatgtcaaataatatcgtaggttattcagcaaacaatgagtccagacttttctgttgactgagcttctttaatcaaggtagcctagaccacagctagggatttgcatttttcccagtctcgttcctatttctgtgagggctgaaaacttctggcccatgagaagatactctgaattcagattgatagcagaattacacagaaggagtggtgataactttcacttaataaccctgcatttttctgcctattttcaaagaaggaattgctctggggggaacatcgtaaaaaaacaaaacaaaaagattatctgtagaaaattaaataccaagagtgkggaccc

SEQ ID NO: 53605 - DNA, 440 bp, Homo sapiens
aggttgggacgcctgtgggtctttttcaccagaacatttttcagccttctcgttctctctcagagaatggcacctcttgttcatgacgcattgcgctggaatgtcaaataatatcgtaggttattcagcaaacaatgagtccagacttttctgttgactgagcttctttaatcaaggtagcctagaccacagctagggatttgcatttttcccagtctcgttcctatttctgtgagggctgaaaacttctggcccatgagaagatactctgaattcagattgatagcagaattacacagaaggagtggtgataactttcacttaataaccctgcatttttctgcctattttcaaagaaggaattgctctggggggaacatcgtaaaaaaacaaaacaaaaagattatctgtagaaaattaaataccaagagtgtkgaccc

SEQ ID NO: 53606 - DNA, 2010 bp, Homo sapiens
tgtctggattagcaggcatgcccttgcggtggctaatgagagctagmctgatcccattagtaaaaatcgcgaaggaccaggagtctttggcaagaagtgactgcaccccatccccgccccccaccccacccccactacaccccagctaccttcatctctcagcagcagctatctggctataaagccacccaaatagtaatgtagtatgtcagatagccatttaattattatgatcttttgatctttgttgtagcaattatgatttgctttagggcagataaaagcccctcaatggccaatggtttgggcttttaggatgatgagcacatgatgagcacaaactaccctcatggtgtttgtgtgtgggcatgaattaacatcgacaaatgagttgtaagctctgctttaaaaatgtaattgaaatgcaattgcagagaaatatatttttgagagaataataaaaatattttatgatatctagtattcacacccaaaactaggcatattttactgagcttattccattcgtgtgtcactgattacctagtgtatttggtgttagtatacaccagctgtcttcctttcttcagctggtaggtgtgtaccaagggcagccacgtgagcctcgccctgagtgttcctggagctcctatgcactcctgtgtttctgtgtatgattaatagagacttagaggttaaagtaaaaggattattattgaatgatcaccatttatttttcaatctttattcaaaaaacacaagaaggggagctttagcaaggttgagaaataaactcagtagcatggatcctccccaggttggtgcaatgcacatttgttgttttctcacttcccagcattcatttctttttctcaatagcacttccaagtggagggtattaccactggatacagtctgtgtacattaataactgtggacagatgcccaggcaaagactcctcatgatctgctttaggctgttggagactccttgaacagagaggcaaagagactgaaatgtaacagagtccagactgaaatgtcacagagtccagttcatcccatttgtcagcctctgacaacctttcctgcaacaagacctggtggttggtggttcctggttcctatctccattgcccagatttgccttgctgcccacctgtgtctgagtctagctctgcattctcttgccaagtctataagggccagtatccttccaatatattcctttgttagaatgtcagttactattgcttacaccaaagaatcctaattgatatacccaggtaacagtctggctctgccacttactacctttgtgatgaaggataaatttacctctttgaggttctatgtccttctctgtaaaatgggactaatcttacaacctatttcatagtggccatatagattaaatatgatgtttcaagtagaacatttagcagtttggaaaatagtaatgctcactagatagtggctgctactgttactgttataatcaaatgaaggtcttcttattattcctaagaatgcatggcacatagtagatattcaaaaaaatactaatttcatttctctgtcccctcttctgaaaacaaactgaaaccttcctgagctgggaaggagagagaatgtcagcagtccctactctacacatgaacttgaccagcagaattttgtcttgactgaagagcaaaagtggaggcattaggaggataaagtgtttgtctcttggcccctcctagtgaccagaaagtgggatatttccctgtttttccttgctcaacttggccctttggagtgtgtttgggcagccatgtgacccactcgcccactgatgtgattccggcaccagccgtcacggcggaggctgaaaccacgcatgagtctggttgcctgggtagcaccctgtctaacaatactgcattagacaccgtgatcacagactgcgttaagaaacagcaaagccagtgtgttctctgtaggcctgacagctcagatcaaactgca

SEQ ID NO: 53607 - DNA, 2010 bp, Homo sapiens
tgtctggattagcaggcatgcccttgcggtggctaatgagagctagactgatcccattagtaaaaatcgcgaaggaccaggagtctttggcaagaagtgactgcaccccatccccgccccccaccccacccccactacaccccagctaccttcatctctcagcagcagctatctggctataaagccacccaaatagtaatgtagtatgtcagatagccatttaattattatgatcttttgatctttgttgtagcaattatgatttgctttagggcagataaaagcccctcaatggccaatggtttgggcttttaggatgatgagcacatgatgagcacaaactaccctcatggtgtttgtgtgtgggcatgaattaacatcgacaaatgagttgtaagctctgctttaaaaatgtaattgaaatgcaattgcagagaaatatatttttgagagaataataaaaatattttatgatatctagtattcacacccaaaactaggcatattttactgagcttattccattcgtgtgtcactgattacctagtgtatttggtgttagtatacaccagctgtcttcctttcttcagctggtaggtgtgtaccaagggcagccacgtgagcctcgccctgagtgttcctggagctcctatgcactcctgtgtttctgtgtatgattaatagagacttagaggttaaagtaaaaggattattattgaatgatcaccatttatttttcaatctttattcaaaaaacacaagaaggggagctttagcaaggttgagaaataaactcagtagcatggatcctccccaggttggtgcaatgcacatttgttgttttstcacttcccagcattcatttctttttctcaatagcacttccaagtggagggtattaccactggatacagtctgtgtacattaataactgtggacagatgcccaggcaaagactcctcatgatctgctttaggctgttggagactccttgaacagagaggcaaagagactgaaatgtaacagagtccagactgaaatgtcacagagtccagttcatcccatttgtcagcctctgacaacctttcctgcaacaagacctggtggttggtggttcctggttcctatctccattgcccagatttgccttgctgcccacctgtgtctgagtctagctctgcattctcttgccaagtctataagggccagtatccttccaatatattcctttgttagaatgtcagttactattgcttacaccaaagaatcctaattgatatacccaggtaacagtctggctctgccacttactacctttgtgatgaaggataaatttacctctttgaggttctatgtccttctctgtaaaatgggactaatcttacaacctatttcatagtggccatatagattaaatatgatgtttcaagtagaacatttagcagtttggaaaatagtaatgctcactagatagtggctgctactgttactgttataatcaaatgaaggtcttcttattattcctaagaatgcatggcacatagtagatattcaaaaaaatactaatttcatttctctgtcccctcttctgaaaacaaactgaaaccttcctgagctgggaaggagagagaatgtcagcagtccctactctacacatgaacttgaccagcagaattttgtcttgactgaagagcaaaagtggaggcattaggaggataaagtgtttgtctcttggcccctcctagtgaccagaaagtgggatatttccctgtttttccttgctcaacttggccctttggagtgtgtttgggcagccatgtgacccactcgcccactgatgtgattccggcaccagccgtcacggcggaggctgaaaccacgcatgagtctggttgcctgggtagcaccctgtctaacaatactgcattagacaccgtgatcacagactgcgttaagaaacagcaaagccagtgtgttctctgtaggcctgacagctcagatcaaactgca

SEQ ID NO: 53608 - DNA, 1158 bp, Homo sapiens
cggttgcaactggagtggattgatagcatctgcatgcctttgtatcaggtactttgatttgggagggcctacatgttctgactgaatcagaaaaggaaaagtgtgtatttctcaaaagcactcatttgaggagacatttccagggtatgcacattgcggagagctctggctgcagtttgtctttcttggatttctgactgtgccctggctgggaagagttggttctaggaggctgcagacctgcgttctccactttctaggatataatctccatgggcctctactccctcatctgtaaaccagggatactaatattttatttactatctctcaaactgtgtcccatagaacatgaacatccagccatcatctaatagctatctgttcaaaaaaagctcacaggcccaagaaacgtttaaacttgatcagctcaatttctcaaacatatttgaccatggaaattttttttttttacaaattttctttattaatataatgtgggaatgaggattccatgaaacatggtgttcggctctgaccccatggtctgakacagggggttttgtgacgcaccttccagcttcaaaatctgcctgtctctgagatgcatgagacaaatcccaaccagtgaattctgagcgagatgtgctaatgtttccagctctgctacttggtgtgtaggcctctccttctgaaaggagaaaagtgtcgctttgaatggttcacactgcactttttgagtgcggatcagggctggcatcagttaacactaacagtttattgtacattggcttttaattctacttctaagcatttgctttcatttgtaaaaacctggcaagttctttacccacaacctagctcagtcagactgagctgctttcctaacttcaaagtgagaaacatgcagggaaagcaaaagctctttagttcctcaccctatgtaaccccattaaaaacgcagtattgttttttaaggacctcacaaccatcaagttcaagatcatctaccactttgttttcagcacttttaggaactgctgagccctgtcacagaactctgaaaacaaacaaacttagaatactgtcttgaagatggatatgtaatttttgataactataacaaaaataaattcatttttgttttatattagccat

SEQ ID NO: 53609 - DNA, 1158 bp, Homo sapiens
cggttgcaactggagtggattgatagcatctgcatgcctttgtatcaggtactttgatttgggagggcctacatgttctgactgaatcagaaaaggaaaagtgtgtatttctcaaaagcactcatttgaggagacatttccagggtatgcacattgcggagagctctggctgcagtttgtctttcttggatttctgactgtgccctggctgggaagagttggttctaggaggctgcagacctgcgttctccactttctaggatataatctccatgggcctctactccctcatctgtaaaccagggatactaatattttatttactatctctcaaactgtgtcccatagaacatgaacatccagccatcatctaatagctatctgttcaaaaaaagctcacaggcccaagaaacgtttaaacttgatcagctcaatttctcaaacatatttgaccatggaaattttttttttttacaaattttctttattaatataatgtgggaatgaggattccatgaaacatggtgttcggctctgaccccatggtctgatacagggggttttgtgacgcaccttccagcttcaaaatctgcctgtctctgagatgcatgagacaaatcccaaccagtgaattctgagcgagatgtgctaatgtttccagctctgctacttggtgtgtaggcctctccttctgaaaggagaaaagtgtcgctttgaatggttcacactgcactttttgagtgcggatcagggctggcatcagttaacactaacagtttattgtacattggcttttaattctacttctaagcatttgctttcatttgtaaaaacctggcaagttctttacccmcaacctagctcagtcagactgagctgctttcctaacttcaaagtgagaaacatgcagggaaagcaaaagctctttagttcctcaccctatgtaaccccattaaaaacgcagtattgttttttaaggacctcacaaccatcaagttcaagatcatctaccactttgttttcagcacttttaggaactgctgagccctgtcacagaactctgaaaacaaacaaacttagaatactgtcttgaagatggatatgtaatttttgataactataacaaaaataaattcatttttgttttatattagccat

SEQ ID NO: 53610 - DNA, 1158 bp, Homo sapiens
cggttgcaactggagtggattgatagcatctgcatgcctttgtatcaggtactttgatttgggagggcctacatgttctgactgaatcagaaaaggaaaagtgtgtatttctcaaaagcactcatttgaggagacatttccagggtatgcacattgcggagagctctggctgcagtttgtctttcttggatttctgactgtgccctggctgggaagagttggttctaggaggctgcagacctgcgttctccactttctaggatataatctccatgggcctctactccctcatctgtaaaccagggatactaatattttatttactatctctcaaactgtgtcccatagaacatgaacatccagccatcatctaatagctatctgttcaaaaaaagctcacaggcccaagaaacgtttaaacttgatcagctcaatttctcaaacatatttgaccatggaaattttttttttttacaaattttctttattaatataatgtgggaatgaggattccatgaaacatggtgttcggctctgaccccatggtctgatacagggggttttgtgacgcaccttccagcttcaaaatctgcctgtctctgagatgcatgagacaaatcccaaccagtgaattctgagcgagatgtgctaatgtttccagctctgctacttggtgtgtaggcctctccttctgaaaggagaaaagtgtcgctttgaatggttcacactgcactttttgagtgcggatcagggctggcatcagttaacactaacagtttattgtacattggcttttaattctacttctaagcatttgctttcatttgtaaaaacctggcaagttctttacccacaacctagctcartcagactgagctgctttcctaacttcaaagtgagaaacatgcagggaaagcaaaagctctttagttcctcaccctatgtaaccccattaaaaacgcagtattgttttttaaggacctcacaaccatcaagttcaagatcatctaccactttgttttcagcacttttaggaactgctgagccctgtcacagaactctgaaaacaaacaaacttagaatactgtcttgaagatggatatgtaatttttgataactataacaaaaataaattcatttttgttttatattagccat

SEQ ID NO: 53611 - DNA, 597 bp, Homo sapiens
tttttttttaatttgagacagtgtcttgctctgttgcccaggctggagtgcagtggtgccatcatggctcactgcagcctcaactgcctggttcaagtgatcttcccacctcagcctactgagtagctgggagtgcaggtgcacaccaccacactcagctaatttttgtacttttttatgcagacggggtttcacccttttgcccaggctgttctcaaactcctgagctcaagcgatctacccacctcagcctcccaaactgctgggattacaggcatgtgccaccatgcctggcccccatcactgttttaactagtgttaccataggtttattttaactcttcttgaatttcwgagaaatagaatcatatactcttctgcatctggtttcctttgagcatgcctgagaaatgtatccatattgtgcgtagcagtaattcattatcttttattgctatacagttttccattatatgaatatgtttatccatacttgatggatatttgggttgtttccagtttttggatattaagaacaaaaatacctgaatattcttatttctgttggttatttatctaaaagtgtaattgttggac

SEQ ID NO: 53612 - DNA, 519 bp, Homo sapiens
catttaacctctgatggtaaacccccaaatttgaagagcaaatacaaccctaactctctgcttagttattggaagtccctattcaaaaaaaacaaaaaaaaaacaaaaaaccctctaccaaaaggagaagaaactcagcacccaatcttaaatttctatactggctctttcgcatttctctgacacatgccagcttaaacccaaactgaatgcaaaactcacattttgcaaactaaaactactgaaaagataacctgcccacctcctcctcagacaggccgcctcctttcccttgggtctctagcccatttctcctcctttaggattcctttrggctttgcattctcttcccaggaccaaaagagtcccctgtaaacctactatcctttcttttctgtttttttttataactagtgagggcacaaatggttaaagcaacgtgctgacaggaagccagcacccaattcaaggacagcctcttgcaagggcctggcccacccatcatccctgactctgaac

SEQ ID NO: 53613 - DNA, 521 bp, Homo sapiens
cctgaatgcaayggcgtgatctcagctcactgcaacctccacctcctgggttcaaccaattctcctgcctcagcctcccaagtagctgggattacaggagcctaccaccacgcctggctaatttttgtatttttagtagagatggggtttcaccatgttggccaggctggtgttgaattcctgacctcaggtgatccgcctgtctcagcctcccaaagtgctgggattacaggcatgagccaccgtgcctggtctgggctcagaatccgttattaaggatgttacagggaaatgaccttggcctagaaatagggtgagaagaaactaagacaggagtgccatggtcattcaacaagaaagagtatttcactctccagtcagattgccccctactgtggaagagtgttcaagaacataagacgagagaaagaatcaaggtttaaggtagtctcacatttcaattttttgctcattgacaagatatatagagatatataattttttatatgtgtataaaaaat

SEQ ID NO: 53614 - DNA, 522 bp, Homo sapiens
tttccttccttttttaatcctgaagactatatatattctgcattttctttattgatatatatgttgaataaatattgaggtgaatttaatgtcttggctgtggtaaataatgtttcaatgaaatgaagacgctgttatctttctaagattctaatttcaattacgttggatatatactcagaagtgggattgctgaatcatatagtagtcatatttttaacttttaaagtaactttcatactggctacaccaacttacattcccaccaagagtgttcaaattttccactttcctttactccacatccttgccaacaaatctatctatctacctattatatatctatttatstctctctctctctctacttatctaatagccaacctaacaggtgtgaggtgatatgttattgtgttacagtaaggactttttgcttgaaaattttggtgaaaactgttagtgtatgataaacttctaacttaatatttttagtagaattcataattatgaaatagctactag

SEQ ID NO: 53615 - DNA, 586 bp, Homo sapiens
tgaaaattttaaaatcccaatgaattttgctgtgacagattttttatctgaagtagccaagaccttccttagaaagtattattatcttaatagtagaaaatgaagaaagcaatggattaaagacttaaatgttagacctaaaaccataaaaacactagaagaaaacctaggcaatacattcaggacataggtatgggcaaagacttcatgactaaaacaccaaaagcaatggcaacaaaagccaaaaytgacaaatgggatctaattaaactaaagagcttctgcacagcaaaagaagctaacatcagagtgaacaggcaacctacagaatgggagaaaatttttacaatctacccatctgacaaagggctaatatccagaatctacaaggaacttaaacaaatttacaagaaaaaaacaaacaaccccatcaaaagtgggcaaagaatatgaacagacagttctcaaaagaagacatttatgcagccaacagacacatgaaaaaacgctcatcatcactggtcatcagagaaatgcaaatcaaaaccacaatgagataccatctcacaccagttagaatggtgat

SEQ ID NO: 53616 - DNA, 459 bp, Homo sapiens
ctctctctctctctctctcttccccttcctccctctcattctcccccttattttctcctctaatgaggctgccattatcatatgtgggctaatgtctgtaatatatgagggtacggggaattgakgtatcctttcagtaaatagtgatgtttggatcacctccagttaagcattcaggcatgaggatagaccctaggacctgaattggctaactgaagagcacttcatatttgccccctaacattagaataatgaccatgtggcattagagcctgccttgccttctctccatccctcctttttcctttcctcctccatacaatgtacaccaggcattgtgctagggactggggcacaacacaccaaatgagctactagggatgccgagaaggaaagagcctcccaccggaactccagatggcttctacatatgcctgagaggagctaggggagtgcatg

SEQ ID NO: 53617 - DNA, 459 bp, Homo sapiens
ctctctctctctctctctcttccccttcctccctctcattctcccccttattttctcctctaatgaggctgccattatcatatgtgggctaatgtctgtaatatatgagggtacggggaattgaggtatcctttcagtaaatagtgatgtttggatcacctccagttaagcattcaggcatgaggatagaccctaggacctgaattggctaactgaagagcacttcatatttgccccctaacattagaataatgaccatgtggcattagagcctgccttgccttctctccatccctcctttttcctttcctcctccatacaaygtacaccaggcattgtgctagggactggggcacaacacaccaaatgagctactagggatgccgagaaggaaagagcctcccaccggaactccagatggcttctacatatgcctgagaggagctaggggagtgcatg

SEQ ID NO: 53618 - DNA, 521 bp, Homo sapiens
ctttcaggagcgttggtttgtagactccttcaatcagccacatgggctttcctgttattattttaaagggagaatgcagatgtttccaaaatgggatagaaggtaaattacgcaattctaatggaagaaacctcagccagggaaggttaaaactttctataagctttgttaattgatttttcattaccccttttgtgtgttcccacagtctggaagactgagggtagtatgcgctatgggaatgcttaaaaatcagtcacatattacaaatagattgaattacatgacctggaaatgggttccttggttgctgtgcagtttaaaagaaactcctccagaaggaataggacaagacataaaatggcaatgactaaagatgcagttgacaaagaaatttgatcattttttttcttttgtagtttactcaaaaagtgaaaaaaagtctttggttatatcttattaatacttcatgaaaatcttacttcrgaaagaaaaccaagttttactcttatactagttta

SEQ ID NO: 53619 - DNA, 535 bp, Homo sapiens
tggttaaaacctggcacagtgcttttgcacagtaggcacttaattgtattgaatatgcaatttaaaaaatacaaagtcaatccttgataatacataatcgatattgctttcaaattgttttactatgatgttttctgatatagtttkgctctgtatccccacccaaatctcatcttgaattgtactcccataattcccatgtgttgtgggagagatctggtgggagacaatttaaagcatgggggtggtttcccctatactgttctcatggtagtaaataagtctcatgagatctgatgggtttatcaggggtttcctcttctgcatcttccttgttttctcttgcttccaccgtgtgagaagtgcctttcacttcctaccatgattctgaggcctccccagccatatagaactgtaaatccaattaaacctctttttcttcacagtctcaggtatgtctttatcagcagcctgaaaatggactaatacagtaaattgctaccaatagagtggggtgcttctgaaaagataccca

SEQ ID NO: 53620 - DNA, 448 bp, Homo sapiens
ctcggcctcccaaagttctggggattacaggcgtgagccaccgtgcccggccccctatttaatgatgttatttgaagttatgtatagaataaataaatgaatccttgacaattgttcttcaataatataattttaaaaactcatgaaaacaatttgacaaatataaaaaatagtgtcatgcatggtatttttctctgataacagagataaaaatgcttcaatcttttatattacatttaaatcaggactatccaatttgctacgaattttaaatgttgaattctcatgtaaaatttgtataactacaaagttgtgcatttaaaaacatttcttgccctgcagattcagtgtgagtaaaagaactcatattcaaaagactcatgaaaagataaaaaaactgcaraaacgaataagattggtggcttatggaggaggccgatctcgcaaa

SEQ ID NO: 53621 - DNA, 1930 bp, Homo sapiens
ccagtccttatccattcccaattctaccctgtgtatgtgtgtttttaatcatcactcacttatttaacaaatatttattgagtgccttctctgtcaggtacttttctatgtagtgggaatacactattgaatgaggcaggaatagtcactgtgcacgcgggagttacatactctatattgtatataataatacagacaaataggctagggagagagggagctagataattatatatacagaaacctaatgatggctatcatttaccaagaccaaaagcaggcattatgccagaggtttttaattcaatcttcaaaataatgttacaagataagacttattgttcacatttttatcattaacaaaatggtacacagcaaaaatgagtaatttactaggctcaaacaacaaggctaaatttataattttttgttactcatctgccatgcacattgcctgtcatacatgaaaaatcctgttcctctttggattaactataattcccataccaaatgatgttagaataaactatcctttattaattttattaatttagctaaatcccttagaatgctttggctaaatacaaagtgcttagaacctcatttattaatcaatttttcaaaaataaaacattttctgtatctgtagatactacatgtatatcattggtgttactattacccagacaattttaacttttcccatatattattgtagttatccttaccttctttaatttatttttaaaaattaatgcattgttattatagaaattttgaaaagaatccaaaattagtaaagtgtagaaaaaaattatccacagtctaacaacttgtaagcaacaactagaggcttagttttccttgttttttcctccatactgtattttcacaaaaataagattatatgctacataccatcttgtattgtactctttaagattattattataccacccaattttatatgttattataactttgctaaccttattttctatgtcataattctagtgtataaaatatgccataattttattagtcatcctttccctgttggacacttagattggatgactaatagatctattttaacttcttcctatgaggacacaaagtatttttatttatttattcaatcttaatttatttttgcaatggcaaattaaagaagaaaagacaaattgtgttgagacatgcctaggtttttcactgtccacatgtctaaatctaaactcatcagcttattccagaaaaaaaaaaaaaaaaaaaaaaaaaaaaaccacattgtttctcttacacctcctcccttggttaaggttccctatttttcagactgccctggctcagaaaagcccagtcagcctgactttttgccccttgaacattaaaatctaatcagtctccaaggccattcagcccttctttcagagtacagtaacgttacatcccctgctcctccgattttccgagtgagtatctaaagtcgggctcctttatctcatgttttctttacttatgagccagggtcaygactgaaataactctatttgcatgtggtcaatgctggatgagtactggacacatgcttgctgaataagcatcacctttaccttttattgattttaaacatgaatactaccccatgcctcctctaaaggcttgttgagcacaaaaatcatgaactaataaaaaaaaacagctaataatttttaaaagcctactatgtaccaggaactattctgagtgttgcacatagtttttctttagtgctttaactgccctacctataaagatcaccatttgtttcataagtgaggatacagaaaaacagtatgatttacacaaagttccataataactgtgggagctggacttttaactgcaggttatctggctaagcatagctctgtcaccatgcctggcccca

SEQ ID NO: 53622 - DNA, 848 bp, Homo sapiens
ttaaacagccaccaaaacagtgtaattttagaagactgacaatgccaagcgttggcaagattgtagaaccagtgaaaactcaaaatattgccagtggaaaattattttggaaaagtgtttggcaacacctgctaaggttaattacatgcatagtctatgcccacaacctttactctaagatgtacatgcctcagatatgtgtgcaaatgtatgctgaaaatgcgtaacaatggttctatccagttcattaataacaaccagaacaaaaaacagggctgggcatggtatctcatgcctataatcccagtgctttgagaggccaacatgggaggatcactggaggccaggagttcaagaccagcctgggcaacaaagtgaaactctatctctacaaagaggtaaatcatttaaaaaattgttaaaaaaaaatgtccatcaatgggaaaatgaataaataaattgtggtacagtcattacaatgaactacatagcaatcaaaaagaaaaagactacttctatccacagtgaaataacattgagagaaagaagctagacacaaaagaatataaacaatatgattccatttatataaaataatagagcagccaaarctagatcatagtgtttagggaagtgtacttgggtcataaaattatcacaaaatgcaaccacaatgaccacaaatggcaggagagtggaaacctttgaggaggaatcaggaattatttattggaatgggtacaagaggggattcgggatcccgatggtattctatttcttgactgaagtggcagttgcaagaatttacactttatgataaatcatctagctattccatttttttcatg

SEQ ID NO: 53623 - DNA, 629 bp, Homo sapiens
tgtaaatttgtttgagttcattgtagattctggatattagccctttgtcagatcagtaggttgcaaaaattttctcccattctgtaggttgcctgttcactctgatggtagtttcttttgctgtgcagaagctctttagtttaattagattccatttgtcaactttggcttttgttgccattgcttttggtgttttagacatgaagtccttgcccatgcctatgtcctgaatggtattgcctaggttttcttctagggtttttatggttttaggtctaacatttaagtctttaatccatcttgaattaatttttgtataaggtgtaaggaagggatccagtttcagctttctacatatggctagccagttttcccagcaccatttattaaacagggaatcctttccccattgcttgtttttgtcaggtttgtcaaagaccagatagttgtagatatgtggmattatttctgagggctctgttctgttccattggtctatatatctgttttggtaccagtaccatgctgtaaccaaacaatttttaaagggaagttcatcaaatgcttttttgccaaccaaaaaaaaaaaaagaagtaaaaaagatagacaatcttttcttaaaaaaaaa

SEQ ID NO: 53624 - DNA, 680 bp, Homo sapiens
cctgagggtttaaaaaaatgcatttggccatgattcctcttaggagcagctaagacaaaatgagtagtgttgcagaaagaaatgaaaatccccaaggcaacccagcaaaggaagaagaggttctcttaaagtataaatgggtctttgttgaattttaacaagccatcaatgcacagattcctggagatgtctgaagttcttcatttaatgtgaaaatactttacacttttccttaaacaacaacaaaaaaaattcaccccactggcaaggagccaaagcttgcacattttttgagtcaccacaggaaaagagaaagatgagagaggccaagcacttccacattcacactggaggaagaatgtgccccacttccccgagttctaatcagtggcagttctggatcctgattaatgagcccttccgcgctcttggcctttctacccccaactactgctctataktttcaattttcactccaaatctggaaatgcctcctcagcgaagaaagcgctgagatgatgtggagggaataaatgggaaacgcagatattagtgctacctggccagcaggaaatttgaactgtatcaactgagatggcccaaagagctgttgaaatgtaagatgaagttcagaatgggactactatgtcaagaatatgaatttgaatttctttttggag

SEQ ID NO: 53625 - DNA, 389 bp, Homo sapiens
ctgtcagcttctttccccatcttccctsttaacttctgtctcccacccagagttcaacatccccccataagcaggttacagtttcaaagaagagaacacaggctgaacctctcccgtttctgctccccatctccaaatttatctacagtgcacaatttatttttttaacctattcatatacgttttattctttttttttttttttttgagacggagtctcgctctgtcacccaggctggagtgcagtggcgcaatctcggctcactgcaaactcagcctcccgaagttcatgccattctcctgcctcaacctcacgcgtagctgcagactcaggcagccgcaaaaacagacgagctattattttgctacttttaatagagacggagttt

SEQ ID NO: 53626 - DNA, 894 bp, Homo sapiens
cctcccacctcagcctcctgagtaggtgggaccacgagcacaagccactgtgcctagctaattttttagttttttgtagaggcagggtcccactatgttgcccaggctggtcttgaactcctggcctcaagcaatcctcctcctcggcctcccaaagtgctgtgattacaagcatgagccactgcacccggccccatatatttttaatatgttacataagacttttaaaagaaaatttctacttcttgccaacatcagaagatttcaagtttaaattttgcaaaatgcataaaagtaaataactcaactgtcttaaattatattaaaaattatttacatgacatgcacttgaattcagactaatgagggcatgatacctctttacaatactttctcctggcatcctagggtgcaaataattctgcttgtagttatttattgaacatctgtagtcgctattcactccatgatgactaagagatgcatccctggtatctagcattgtacttagtgagkttttagttaatatcaatatatgaatgaaaacacggaaaagggagaggaggtgtggtgaagggggtaagtgaatcactcgccgagagcgcgctctgtgacatacactaacacaccgagagcactgcacagcttttaaactaaataaaaatgggcaaaaaagtagcaattgaatatatttgctattaaaataggaaagaactacgataaagctaataaggaaataatttctttgattggtttaaatttgtatgactttgtgcatttgtagatggtaataaccactgtttccagtttctgtatttgatactttgacatctcactgacactggagagactgcccttcccagggctaggtaattcctagagacagcaaatgac

SEQ ID NO: 53627 - DNA, 894 bp, Homo sapiens
cctcccacctcagcctcctgagtaggtgggaccacgagcacaagccactgtgcctagctaattttttagttttttgtagaggcagggtcccactatgttgcccaggctggtcttgaactcctggcctcaagcaatcctcctcctcggcctcccaaagtgctgtgattacaagcatgagccactgcacccggccccatatatttttaatatgttacataagacttttaaaagaaaatttctacttcttgccaacatcagaagatttcaagtttaaattttgcaaaatgcataaaagtaaataactcaactgtcttaaattatattaaaaattatttacatgacatgcacttgaattcagactaatgagggcatgatacctctttacaatactttctcctggcatcctagggtgcaaataattctgcttgtagttatttattgaacatctgtagtcgctattcactccatgatgactaagagatgcatccctggtatctagcattgtacttagtgaggtyttagttaatatcaatatatgaatgaaaacacggaaaagggagaggaggtgtggtgaagggggtaagtgaatcactcgccgagagcgcgctctgtgacatacactaacacaccgagagcactgcacagcttttaaactaaataaaaatgggcaaaaaagtagcaattgaatatatttgctattaaaataggaaagaactacgataaagctaataaggaaataatttctttgattggtttaaatttgtatgactttgtgcatttgtagatggtaataaccactgtttccagtttctgtatttgatactttgacatctcactgacactggagagactgcccttcccagggctaggtaattcctagagacagcaaatgac

SEQ ID NO: 53628 - DNA, 677 bp, Homo sapiens
gatcactctaccaacctgtctgtacaaaagaaagtatgatactggtgagaatggagacaaatacactctattggttttttacagtggtacaaaagcaattcagtgggaaaagggtagacttttcaacaaatggccttggagcaattagacattcataagcaaaaaaattgaaccccaacytaaaccaacgtaatggagaaaatcatctgaatctagagctaggcaaagagttctcagacttgataccaaaagcacaacccataagaggaaaaactgataaattggaccgattcaaaatttaacattcttgctctttgaaagaccattttaagagaataaaaagacaagctagagactgggagaaaattttccaaaacacacatccaacaaaggactggtattcagaatatatgaagaactctcaaaacaaaacaacaaacaatccaattagaaatggaaaaaagacacacgtgcagacatttcactgaaaaggatatacagatgacaacacaagaaaaaaaatgttcaaatcattagccattaaagaaatacaaatcaaaaactacagtgtgatatcattacatacctatcaaaatggataatttttttaaaaaagtcataacatcaaatgctggcaaggatatagagaaactagatcacttataattgctggtgca

SEQ ID NO: 53629 - DNA, 676 bp, Homo sapiens
agttttgttcaaaacgatttccttccaccctgtgtcttagataaatatatctcagcccctgatggaggctagctggttctattccccctaagaacaacaaccacaaaaacctgtaaaacaattacactaatgcaacagttgaagacttgataacagatagttttgtcaaaagaaaattttaaaagatggaaaacaaccttgggtaatatccatatttaggcatttacagaagccaattactggcaaataagacatagagaaaagcaaagccacagaagttggaaagacagcaataaaaatttaccatcacaaacccagaaatgaaggtgctgaattcaaaagttatcataattgttgaaaataagccataaaaaaaagaagtacaaagaaggtcagtgagagaccatagatatgtttcaataaatttcagaagagtggtgtgatgaaatcaggtgtgtaaggctaaaaaacttcttgrtgctgagtaaatgaaaacaaattttgtagacacaaatgttactaagaaattgagaggcaatagcaaggtaagatacaggacagtagttgaacagagataagtttcttttgttttcctgtactgtagttgtttatttagatgcagaggaaaatgagtccatggaaagtgtaagcctaatgctacaagtgtgatcgaata

SEQ ID NO: 53630 - DNA, 676 bp, Homo sapiens
agttttgttcaaaacgatttccttccaccctgtgtcttagataaatatatctcagcccctgatggaggctagctggttctattccccctaagaacaacaaccacaaaaacctgtaaaacaattacactaatgcaacagttgaagacttgataacagatagttttgtcaaaagaaaattttaaaagatggaaaacaaccttgggtaatatccatatttaggcatttacagaagccaattactggcaaataagacatagagaaaagcaaagccacagaagttggaaagacagcaataaaaatttaccatcacaaacccagaaatgaaggtgctgaattcaaaagttatcataattgttgaaaataagccataaaaaaaagaagtacaaagaaggtcagtgagagaccatagatatgtttcaataaatttcagaagagtggtgtgatgaaatcaggtgtgtaaggctaaaaaacttcttgatgctgagtaaatgaaaacaaattttgtagrcacaaatgttactaagaaattgagaggcaatagcaaggtaagatacaggacagtagttgaacagagataagtttcttttgttttcctgtactgtagttgtttatttagatgcagaggaaaatgagtccatggaaagtgtaagcctaatgctacaagtgtgatcgaata

SEQ ID NO: 53631 - DNA, 638 bp, Homo sapiens
cgagttaatgggtgcagcacaccaacatggcacacgtatacatatgtaacaaacctgcacgttgtgcacatgtaccctaaaacttaaagtataataataataaaattttaaaaatattgtttggtttaggtctctgtttctaggaaaagtagtcttaccgtttttcaggcaaggccactgatgagtgattttgctcaaggtcatataagatagtatagcctgtgttctttattggaccacattcttttctttctttctttttttttcccccctcaaattaacagtcacactcatgggaatcccacacaaatgtgaaactcctcaaccatattcttttcaatgagttatagcaagtgactctatagatgaccaaaaggtggttatatgccccaggagatacattagcattttagataaagtaagaacctagagaaggcaggctccctctacagcaagtccttcctsctggggcctggtcttattcatcatggtgtctctagtgccaagctcagcacctggcacgttggagtctgcggcatatgcttgttggctgttgaattaatgactatgagttggaggacgacagtttaacaaaaaggagaaaagatttgaaagtgaagttttctcaggcagcctaa

SEQ ID NO: 53632 - DNA, 575 bp, Homo sapiens
agctagaaaggcccgccatccattcttcttggagggacagggatgtctgctccccgtttcttggaacacacaaacatttcctctgtcctctgttgctgtgttggcttgcggcttggggagctgacatggtaccgagatggcagcactgacaatggcgagaagacccagaaaaagggtggtttctacctctcttctcgcctgaccaaaagcatctttatgagagtaaattagaagtcttttctgcttggtgaggactagtttcaaaaagtagagtggagtgaagactgggtctatatagttggtggggccctggcaagttgcaaaacttttaaggtgccatcttggtttttaaaagaatctatgtaagatgtgtttttttcccccaacaatggaaccctttgtttagcatgagatgctaatttattgctcctgttttatattatatgtttactagtaacatgtgcttcctcargcagtgccacaaatgacatctctccccctctttctttgagcagagattatctgcgcaggtactgtaaatcacatacttgtgcctatagctaggagtgtagaga

SEQ ID NO: 53633 - DNA, 575 bp, Homo sapiens
agctagaaaggcccgccatccattcttcttggagggacagggatgtctgctccccgtttcttggaacacacaaacatttcctctgtcctctgttgctgtgttggcttgcggcttggggagctgacatggtaccgagatggcagcactgacaatggcgagaagacccagaaaaagggtggtttctacctctcttctcgcctgaccaaaagcatctttatgagagtaaattagaagtcttttctgcttggtgaggactagtttcaaaaagtagagtggagtgaagactgggtctatatagttggtggggccctggcaagttgcaaaacttttaaggtgccatcttggtttttaaaagaatctatgtaagatgtgtttttttcccccaacaatggaaccctttgtttagcatgagatgctaatttattgctcctgttttatattatatgtttactagtaacatgtgcttcctcaagcagtgccacaaatgacatctctccccctctttctttgagcagagattatctgmgcaggtactgtaaatcacatacttgtgcctatagctaggagtgtagaga

SEQ ID NO: 53634 - DNA, 575 bp, Homo sapiens
agctagaaaggcccgccatccattcttcttggagggacagggatgtctgctccccgtttcttggaacacacaaacatttcctctgtcctctgttgctgtgttggcttgcggcttggggagctgacatggtaccgagatggcagcactgacaatggcgagaagacccagaaaaagggtggtttctacctctcttctcgcctgaccaaaagcatctttatgagagtaaattagaagtcttttctgcttggtgaggactagtttcaaaaagtagagtggagtgaagactgggtctatatagttggtggggccctggcaagttgcaaaacttttaaggtgccatcttggtttttaaaagaatctatgtaagatgtgtttttttcccccaacaatggaaccctttgtttagcatgagatgctaatttattgctcctgttttatattatatgtttactagtaacatgtgcttcctcaagcagtgccacaaatgacatctctccccctctttctttgagcagagattatctgcgcaggtactgtaaatcacayacttgtgcctatagctaggagtgtagaga

SEQ ID NO: 53635 - DNA, 458 bp, Homo sapiens
aacttttcagaacaaaatacataaagggctcaatgcctaaaatgattgaaattgtcatatatacaaaaataaaacagtstttcagtagtaattggataataaatatgtattgatatttattctaattagagtttattctaatagacttaagaactctctttaattatattttaacaaaaacattacttttatctgattaaaattatctgcctataaaattatagaaacataatgttaaactttactgacctccacatttatgccctcaggggaaataactgttaatttgttaatggttaggtaatatggtactttgtgttgatttgattatgaagtgatatgtataaatacatccccctataatatgtgaatgcatctttttgttaaagatgtaaataaatacaaatgcatatagaataaactaaaatggagtcagtattagacctttttcatataaa

SEQ ID NO: 53636 - DNA, 541 bp, Homo sapiens
actgaccactattcaagtattcatgatgtattaatttacgatggratttatgcttggctgaagaaatggattagttgtctacagaaaagtaaaattcaaaggttgaagcttctttgtgatatactccaagaggagacagaatataagttctgcaactatgtgttcttttcaactattaaaaaaaatcaaattttaatgctagaaatactttatttgacatgatccagtctacggcacacctgattctgcagaagaggaaatgggaaccctgagtttttaacactatttagtgtcagagctgagactggagttcaactgagactagagtctgagagaacacagatctccattcaagaaatacccttcttatgtagtcataatgtaataagaaaagaaaaaaatttttaagaaatactcttcttagacatggcctgttgagagatctgtgtacttctcataacccttgctgcctccctgatttggagtgggatggtggtcagaagtggaactacagataatccaaattttttagtgactgtaa

SEQ ID NO: 53637 - DNA, 541 bp, Homo sapiens
actgaccactattcaagtattcatgatgtattaatttacgatggaatttatgcttggctgaagaaatggattagttgtctacagaaaagtaaaattcaaaggttgaagcttctttgtgatatactccaagaggagacagaatataagttctgcaactatgtgttcttttcaactattaaaaaaaatcaaattttaatgctagaaatactttmtttgacatgatccagtctacggcacacctgattctgcagaagaggaaatgggaaccctgagtttttaacactatttagtgtcagagctgagactggagttcaactgagactagagtctgagagaacacagatctccattcaagaaatacccttcttatgtagtcataatgtaataagaaaagaaaaaaatttttaagaaatactcttcttagacatggcctgttgagagatctgtgtacttctcataacccttgctgcctccctgatttggagtgggatggtggtcagaagtggaactacagataatccaaattttttagtgactgtaa

SEQ ID NO: 53638 - DNA, 541 bp, Homo sapiens
actgaccactattcaagtattcatgatgtattaatttacgatggaatttatgcttggctgaagaaatggattagttgtctacagaaaagtaaaattcaaaggttgaagcttctttgtgatatactccaagaggagacagaatataagttctgcaactatgtgttcttttcaactattaaaaaaaatcaaattttaatgctagaaatactttatttgacatgatccagtctacggcacacctgattctgcagaagaggaaatkggaaccctgagtttttaacactatttagtgtcagagctgagactggagttcaactgagactagagtctgagagaacacagatctccattcaagaaatacccttcttatgtagtcataatgtaataagaaaagaaaaaaatttttaagaaatactcttcttagacatggcctgttgagagatctgtgtacttctcataacccttgctgcctccctgatttggagtgggatggtggtcagaagtggaactacagataatccaaattttttagtgactgtaa

SEQ ID NO: 53639 - DNA, 565 bp, Homo sapiens
cctaggcagggtctccttctcagcrtgtccccttctcctccctaggcagggtctccttctcagcatgcccccttctcctccctaggcagggtctccttctcagcgtgtccccttctcctccctaggcagggtctccttctcagcgtgcccccttctcctccctaggcagggtctccttctcagcatatccccttctcctccctaggcagggtctcctcagcttgctcccttctcctccctaggcagggtctccttctcagcgtgtccccttctcctccctaggcagggtctccttctcagcgtgtcccttctccttcctaggcagggtctttgagccgccccaaggtataatgtgttcttggatgtgaataaagcatttattggggtttaagactttactaaagctcaggaaaccactgggacacaagtgtctgactttgagcgaatgataccagaattcttggcccagcaaagtggttccctacctgcactgtgttcttagagtctctcagttcccttccccctgggctcccaggccttccctgctaacttctccttggctttc

SEQ ID NO: 53640 - DNA, 565 bp, Homo sapiens
cctaggcagggtctccttctcagcgtgyccccttctcctccctaggcagggtctccttctcagcatgcccccttctcctccctaggcagggtctccttctcagcgtgtccccttctcctccctaggcagggtctccttctcagcgtgcccccttctcctccctaggcagggtctccttctcagcatatccccttctcctccctaggcagggtctcctcagcttgctcccttctcctccctaggcagggtctccttctcagcgtgtccccttctcctccctaggcagggtctccttctcagcgtgtcccttctccttcctaggcagggtctttgagccgccccaaggtataatgtgttcttggatgtgaataaagcatttattggggtttaagactttactaaagctcaggaaaccactgggacacaagtgtctgactttgagcgaatgataccagaattcttggcccagcaaagtggttccctacctgcactgtgttcttagagtctctcagttcccttccccctgggctcccaggccttccctgctaacttctccttggctttc

SEQ ID NO: 53641 - DNA, 565 bp, Homo sapiens
cctaggcagggtctccttctcagcgtgtccccttctcctccctaggcagggtctccttctcagcatgcccccttctcctccctaggcagggtctccttctcagcktgtccccttctcctccctaggcagggtctccttctcagcgtgcccccttctcctccctaggcagggtctccttctcagcatatccccttctcctccctaggcagggtctcctcagcttgctcccttctcctccctaggcagggtctccttctcagcgtgtccccttctcctccctaggcagggtctccttctcagcgtgtcccttctccttcctaggcagggtctttgagccgccccaaggtataatgtgttcttggatgtgaataaagcatttattggggtttaagactttactaaagctcaggaaaccactgggacacaagtgtctgactttgagcgaatgataccagaattcttggcccagcaaagtggttccctacctgcactgtgttcttagagtctctcagttcccttccccctgggctcccaggccttccctgctaacttctccttggctttc

SEQ ID NO: 53642 - DNA, 565 bp, Homo sapiens
cctaggcagggtctccttctcagcgtgtccccttctcctccctaggcagggtctccttctcagcatgcccccttctcctccctaggcagggtctccttctcagcgtgyccccttctcctccctaggcagggtctccttctcagcgtgcccccttctcctccctaggcagggtctccttctcagcatatccccttctcctccctaggcagggtctcctcagcttgctcccttctcctccctaggcagggtctccttctcagcgtgtccccttctcctccctaggcagggtctccttctcagcgtgtcccttctccttcctaggcagggtctttgagccgccccaaggtataatgtgttcttggatgtgaataaagcatttattggggtttaagactttactaaagctcaggaaaccactgggacacaagtgtctgactttgagcgaatgataccagaattcttggcccagcaaagtggttccctacctgcactgtgttcttagagtctctcagttcccttccccctgggctcccaggccttccctgctaacttctccttggctttc

SEQ ID NO: 53643 - DNA, 565 bp, Homo sapiens
cctaggcagggtctccttctcagcgtgtccccttctcctccctaggcagggtctccttctcagcatgcccccttctcctccctaggcagggtctccttctcagcgtgtycccttctcctccctaggcagggtctccttctcagcgtgcccccttctcctccctaggcagggtctccttctcagcatatccccttctcctccctaggcagggtctcctcagcttgctcccttctcctccctaggcagggtctccttctcagcgtgtccccttctcctccctaggcagggtctccttctcagcgtgtcccttctccttcctaggcagggtctttgagccgccccaaggtataatgtgttcttggatgtgaataaagcatttattggggtttaagactttactaaagctcaggaaaccactgggacacaagtgtctgactttgagcgaatgataccagaattcttggcccagcaaagtggttccctacctgcactgtgttcttagagtctctcagttcccttccccctgggctcccaggccttccctgctaacttctccttggctttc

SEQ ID NO: 53644 - DNA, 598 bp, Homo sapiens
tgtcaaattttaggctgatataataattttgagacaaataaagaaaacctggattttttcacatttggatgaacttagcattttgaaattttctgtaactgkattacatattacggtaagtgaagtagctctgtttgcaagttagccaaaggcttttgacagatagatgttatgttcctgagtggtagtccttcatgatgaataaattggtcatactaacctcttctagggctgaaaataccattatctattcccagaaatgtgacagtttctactgactgtaattgcaatgcctgctgcatgacagacaatctttggcatacacaataactgttcatttcaatggactttttagcactgtataatctttctgaagacattttaaatgacaattggggatcaaaatttaagtcaaactttaattttatatcacgttaacaaagtaatccaaatcaggtaacagtagtatgaacataggtatgaacacagatatgagcacatgtatgtccacaggcaaagagaagttatgttgccacacattcttctgcttaatggctgcatttttcttttttacaaaaattataaaacatattccaat

SEQ ID NO: 53645 - DNA, 590 bp, Homo sapiens
taaaattaagtaatatatcattcagttctaatatgtgtataatgcattatgtaattgtaataattttgtattttagatgaaaattaacatctgcatcatacaatgaaaaatatatgcatttaaaagttatctattctaattatagataatataaattaaattttttaaaaatttatttgacattttgagtaattttctttgagtcattttctttcagcagttattaccagtgttatcagaccatctatttgttctcatatcttgttctctatgtattcacatacataatasttaacatagatggatctctattgaatatattaaaatctcttatgttcatatgattagatttttttaatctttctgtaaattactaatgtacacgcatacctcagagatattgtgagctcagtttcagaccactgcaacaaaacacatatcacaatagtgggtcacacgatttttttgatttatcagtgcctataaaattatgtttatatcttactgcagtgtatttattgtgcaataccattgtgtctaaaaatgcatgtaccttaatttaaaactactttattattaaaaagtgctaa

SEQ ID NO: 53646 - DNA, 545 bp, Homo sapiens
ccattggcctgagcctctcaatgacttcatgaaagaggccactccgctgacctgttcgcttgcccagtatcatcatgtgagctagaaataaacttctgttgtgttttagccataatatatgttggggtctcttcttatgatagttacccttccctaactaatacagacacatttttcagttaaaaatcagctccagaattatttaaatcatttcaatcttgactgatctcctaggcattactcaggggaagtactaaccatccataaataaaacctgtaattatttctctrgaagcacagccacatagagttgcccatgtgagaagcagcttgactgcaaactgacaaccttaaatcagaacatctgccctgagatttttcacttaagattcattttgaaacgatggtaggttttctctgtcaagggtgccttgacgcaggtgaagcatctttccccattcacaggccaagagttactaatgatgtcttcatttcagcctctctggaaaatgagtatctatctctttgaagtggcccacaggaac

SEQ ID NO: 53647 - DNA, 611 bp, Homo sapiens
atgtgagccactgtgcctggcccatattttcaaatgttcattggccatttttatttcttccctattgactatttatgcccattgcccattttaccactgaatggtatttttttttttttttaaacaggagtctcgctctgtcacccaggctggagtgtagtggcacgatctgggctcactgaaagctccgcctcccaggttcacgcattctcctgcctcagcctcccgagtagctgggactacaggcacctgccaccacgcctggataattttttttttttttctttgtatttttagtagagacggagtttcaccatgttagccaggatggtcttgatctcctgacctcgtgatccacctgccttggcctcccaaagtgctgggattacaggcgtgagccaccgcccccagctggtatagtttttaaattgacwtataagtacacttataatacataatacttataatgtacaatacattacttatacacttataagtaatgtattaagacttgatagtctatatatacttaatatatattttatctctgcttattttctctaacttttctcatgctttttgttgttattgttgctgagatgtaactttta

SEQ ID NO: 53648 - DNA, 1371 bp, Homo sapiens
gttgctaactgatggcatcgctcaactttcaaatacatccctcttctggagcttcaccatgaatgacaagattgtttgaccyacttaagagtctggactgtcttcagagagacctcgcttccaaactctgctttgccagtattagttgagtaacttttgtcaaattgaccttcttctgcttcagttttctcatctgcaaaatgaggttcataatcagggatctcatttcattggattgttgtgacgtttgtttcttatatttacacgtgtaacatgtgatgtcacaaagtctcttcttgttcacagaacataaaagtggtgataagatctgtaaaaatacatcaactatagaaagtgttggagaaaattcagataaggacatcagggtgaggtaatccaaagctagatttgagactgtgcctgagtgctgttttcaggatgcaaaggattaagcagaagctatttaattatctttcatatcgtacaatatctaaggctcagtgatcaatacatgttagccctcttttgttttccagttccaccctttgatttatcacttgccactccccactgtcttgttcaccaggtgtgtggtcttgggcttcatgcacacacctgctttccccctctcttctggatgcctccctctccagccggactggtgtgttcctggttctaaacccaggaatcctttttgttcttgaccacttcctggcacaagatataggctttatcccttacctggacagcctcagcatttatcacctgcccaatctttcctctctgtctttctctttgcattctagattaactgccacagggattacagcacagtaaagagctcccttggtgtctgattgcctgagttcaaattttggttctgccactgattagccaggtggcccggttatttaatctcttcatggttcagttttctcatctaaaaagtggagatcataatcttaactacctcatacaattgtgacgaagattgaatgggctaatatctgtcaagtgcttaaactggagcctggcctacagtaaatcttacataagtgcacattattattattattattattattaagacagagtctccctctgtcgcccaggctggggtgcagtggcgtgatctcggctcactgtaagctccgcctcccgggttcacgccattctcctgcctcagcctcccaagtagctgggactacagacgcccaccaccacgcccgtctaatttttttaaatttttttgtagagacggggtttcaccgtgttagccaggatggtcttgatctcctgacctcgtgatctgcctgcctcagcctcccaaagtgctgggattacagacatgagccgccacgcccagtctat

SEQ ID NO: 53649 - DNA, 1371 bp, Homo sapiens
gttgctaactgatggcatcgctcaactttcaaatacatccctcttctggagcttcaccatgaatgacaagattgtttgacccacttaagagtctggactgtcttcagagagacctcgcttccaaactctgctttgccagtattagttgagtaacttttgtcaaattgaccttcttctgcttcagttttctcatctgcaaaatgaggttcataatcagggatctcatttcattggattgttgtgacgtttgtttcttatatttacacgtgtaacatgtgatgtcacaaagtctcttcttgttcacagaacataaaagtggtgataagatctgtaaaaatacatcaactatagaaagtgttggagaaaattcagataaggacatcagggtgaggtaatccaaagctagatttgagactgtgcctgagtgctgttttcaggatgcaaaggattaagcagaagctatttaattatctttcatatcgtacaatatctaaggctcagtgatcaatacatgttagccctcttttgttttccagttccaccctttgatttatcacttgccactccccactgtcttgttcaccaggtgtgtggtcttgggcttcatgcacacacctgctttccccctctcttctggatgcctccctctccagccggactggtgtgttcctggttctaaacccaggaatcctttttgttcttgaccacttcctggcacaagatataggctttatcccttacctggacagcctcagcatttatcacctgcccaatctttcctctctgtctttctctttgcattctagattaactgccacagggattacagcacagtaaagagctcccttggtgtctgattgcctgagttcaaattttggttctgccactgattagccaggtggcccggttatttaatctcttcatggttcagttttctcatctaaaaagtggagatcataatcttaactacctcatacaattgtgacgaagattgaatgggctaatatctgtcaagtgcttaaactggagcctggcctacagtaaatcttacataagtgcacattattattattattattattattaagacagagtctccctctgtcgcccaggctggggtgcagtggcgtgatctcggctcactgtaagctccgcctcccgggttcacgccattctcytgcctcagcctcccaagtagctgggactacagacgcccaccaccacgcccgtctaatttttttaaatttttttgtagagacggggtttcaccgtgttagccaggatggtcttgatctcctgacctcgtgatctgcctgcctcagcctcccaaagtgctgggattacagacatgagccgccacgcccagtctat

SEQ ID NO: 53650 - DNA, 524 bp, Homo sapiens
gaagatggtgcaggtaaagcacaggtgaggatgaaccaggagctctgtgtggagctgcctcagccagggagcaggctccctctggaattcacacaaggacactgtgggtgccaacagaaagcctgtggttaccgaagtggaaaagagtgagggaatttagatagatttaggagacgaaaatccaatccacggtgcttagttgaaatgccaggggcaaaggagtctaggatgacattctaaggtaaaactcagaaatagtgaaggtttgttgaatttcgtttagaaaacaaawataggaaatgtaattagctcttgattattctaacaaatgttcctttgaaatccaggaacatggcaagtgtaatgttaggatgcctaaataaggaagagcacagcgtgtgtgtgtgtgtgtgtgtgtgtgtgtgtgtgtgtgtgtgtgtgtgtgtgaaagtctggaaggagctactcccaagatgtttagaaaaattatctttgggtggtgggatttcaggtgactttctttt

SEQ ID NO: 53651 - DNA, 622 bp, Homo sapiens
atgtatgcttcatggttggtgtatatcaaaggctttcctaggaatctaaaatacgacattgggatagaaggcattgtgctgagagtgttatcaatacagtaattcctgcaatagatacttgctgacaggcccatcttttaaaaccatccctttcattctattgtttctctactgaggaacatacaatggtttcctcatgggcaaccatattaaatcatacgattgcaaagtgggagcctggatgaacttcccagttgccttacttctttcttttaataaataaagggttccatacccaaagaggtccagtcattataaacttcttaaagcagagttgtggccatgtcatttccttactggaggcttcagccatgcatgctcagttttttatgatctgcctttatgrcttttctcttattttattccctttactacactctttgctctagccttgtgatatggttttgatgtttgtcccctccaagtctcatgttgcaatgtgattcccagtgttggctgtggggctggtgggaggtgtatggatcacaggggtggatccctcatgaatggcttagtgccacccccttggtgatgagtgagttcttgctctgagttcacacaa

SEQ ID NO: 53652 - DNA, 558 bp, Homo sapiens
tgagaaacaagaaagaaaaaaatgaacccaaactttctgaatactgaacagtatcattttttaatgattaagtaatcaaaataatcagttgaatctaaaaataaaataaaatttgaatcaatttaattcttaaattttttaaagtatcattgtgtttcagtataatacacagtttgtagattagaagggaaaatgattaatttatttcttcaggtaggaaggcataggagaggcaggtagggatgttccacatgtgatatgacarcaaagggctggcccaggcgtggtggctcacacctgtaatctcagcactttgggaggcccaggcaggcgaatcacctgaggtcaggagttcgagaccagcctggccaacatggtaaaacccctgtctctattaataatacaaaaattagcttggtgtggtggcatgtgcctgtaatctcagctacttaggaggctgaggcaggagaatagcctgggaggcagaggttgcagtgagcagagattgcaccattgcactccagcctgagttacagagtgagactccatctcaaaaaa

SEQ ID NO: 53653 - DNA, 558 bp, Homo sapiens
tgagaaacaagaaagaaaaaaatgaacccaaactttctgaatactgaacagtatcattttttaatgattaagtaatcaaaataatcagttgaatctaaaaataaaataaaatttgaatcaatttaattcttaaattttttaaagtatcattgtgtttcagtataatacacagtttgtagattagaagggaaaatgattaatttatttcttcaggtaggaaggcataggagaggcaggtagggatgttccacatgtgatatgacagcaaagggctggcccaggcgtggtggctcacacctgtaatctcagcactttgggaggcccaggcaggcgaatcacctgaggtcaggagttcgagaccagcctggccaacatggtaaaasccctgtctctattaataatacaaaaattagcttggtgtggtggcatgtgcctgtaatctcagctacttaggaggctgaggcaggagaatagcctgggaggcagaggttgcagtgagcagagattgcaccattgcactccagcctgagttacagagtgagactccatctcaaaaaa

SEQ ID NO: 53654 - DNA, 570 bp, Homo sapiens
agtaaactagctgtaactaactgcaaagcaagaggctatttgtcatagagattatgactccatggataagtacttgaaaggctaccacttgctctcagaccttctccataaaagattgtcttggggtctgtaatttgccaatacttctgggtcaagagaaagccatttcagatcagaaatgtaatagaaagttttaaggcctgtggtacagtgccaaagaggatggaagtattaataattttcatggttttttwaaaaaggccctatcaggtaaaaaaaaaaaaaagaaaaaaataagtcacaaaggaatccacttgaagatttgaaaagaaactacaaaggacttcattaatacaaaagggaagaatagtcagagaacaaaagaataaggaaggaggaaacgaatggaaaggcagggaaggaattataatagtgtcagacaagggaggctggtgaggaaaaactaaggaggaattaaaacaaagactcctcaactttctagatccacgagatcatcctggatatttcccctttgaggagatgaagacgaagtgtgagtgacagagaaat

SEQ ID NO: 53655 - DNA, 570 bp, Homo sapiens
ttttggttggcatcatagagttatttcccattcagtagtaatcaaggcattttatagttggtactttttattgctcaccatttgacaatracatgtatgttatgttgtttgattcctaaaacaagttgtaaagtagcttttcatatgcccactttacaaataataaaactgatgcacagagaggttaggagacttgtaggttttgggcctctgacatccagcactccttcttctttcatctgtgccctcattgagggactttccccctgaaagtccaggaacaacacactcaagcacagtagctctgggatgtagcagccacctctgccttgacaaaaattacaaggccttttgcatgtggcagtttagcccactggagaccattccagttgcaactaagccaatcttatcatctgtggtttgtctacacagtagcacaattggcagaaacacaggagtattggttactgtgcttacagtgactttgggaaccatgactgatcagtttagaccaaaattctaaccacaatcgttctggaaacttgcactgccatggcgaatgtagaaaca

SEQ ID NO: 53656 - DNA, 831 bp, Homo sapiens
taaataaatatattttcacgtatgcatatatagatagatagatgcaatcaagagtttaaagacaaggtgcgtaattacagatgcctcttctcctgtcagtttcagatttttgttttcacygtactccaaggtcatcactacaactgtcagactttctgaacctaagacattagagcagcagttgtcaaaggctcacaaactcacctgccattcagacagtcctcccagggaaaacttgactggaagaaccagggcaaacagaaaataattctaggagaagaggtaatagcaacagcaagagctaacagttacaaaagtcttcttatgcattatctccgttaatcttcatgattgcttgtaggaacaggtactctgattagtaccgctttatagatgaaaaattaagactgacaaagattaagtaccttgtcccaaatcccacagctagtaagtgacagagggcctgaaagtggttgactttcagtttgtattgaagaccaatataaacaaaaaatttgaaaggccctatagaattttccttcttcctctttagatttgaattaaggagagaaaagggtaatggtactatatttgggcaaattatctcctggttcgagtcatttctatccgtcagcatttctggaggtccaacaaagttccacctgcctgtatggtgactctggtcagctgaccacagtaccggaaggtctggctatcacatcctccatgtttccttgggacagctttggtctctacaatatagtactgtatctgtgttcacctgaaccagatgtgactaaaaatttgtcataattctaatttctttcaacc

SEQ ID NO: 53657 - DNA, 639 bp, Homo sapiens
gaaattccaaagtcttccagttaagcatttacctagttataattagttccaaaattcaaaaccaatactttgtataagggtataatttataaagtggtaggcacactgtgggcaaagacatatttcactcctaaaattttggcatgatcatcccttggatttgagaacaagcaaagataaaattatataaatattttctatagatgattttccttaatgtctgtggagccaaagaaatactccaagatgtcagagactgatatcaagagttttccaggaggaaactgaaacaggcagttgcagccactatatccatcgaagacaacagctgcacagaatccttggaatcaattgatttacatctatgtgtctaatgtgccccaagagagtcactgtgtcttcaaatcacaaattacttcagtgctgtggatatgggagaagcacaaggtaatcatcaagccttacagtgaattcagtactcctgccaaaagcaaccagaagcaytttgcccttctgactggtagaaaacttgactgctcctatgtagagctcagcatctgagacaactcctcttcaaagcattgttccatgtgctctcactataacacattagctaggcaggtaatgttttcctttcag

SEQ ID NO: 53658 - DNA, 605 bp, Homo sapiens
tcaaataacagttaccctaacaatggctgacacacactgaagcctgtcatgcgctggggtgtggcccatatcggagaggttgcaaactgactccctctgacatgttttgccctcagttttaaaaagtgagctaaatttgaaaatcacgtaaaattcctagtttcctgcttccctcaacaacacagggctctggccaccctaggcctaaacaataagtaatagctgcccccatccaatgggatatgagctccaggttcaccctggtcctctcccttccctggggtctcacactgggtggccagatttggtggcagccctggctgggcccctgcagtcatctgagtttttgagtctgaggcacagtctctcattcaagtatcagcccstcaaggaaggaactgagtgatctcatttcctagacaaggaaactgaggttcagagctgggtttggatcccagacacatcaatgagacatgttagcctggacgttcggggcagtcctgaaaccaaagatgatccagctctctccccacgccatggagaacgtcctccaaatctgaatatttttccatctaaactccatctctctttggcctctggaagct

SEQ ID NO: 53659 - DNA, 676 bp, Homo sapiens
gtggaaggcatttcagaagcatttgactagtgtactagaaatggaaggcaatctattatataatcgtcctccagatgtcacatcaatataccgcaaccacagtgtgaaagtgctccttttcctaaacttttgccaacaatagttactatctttgccaatttagtaactgaaaatggactctccttttaaaactaatatttaaaaaaatcactgggggtagataayatgtagtctttccatttccagtacacttggacccagaaacctgaattatatttatttatcctgaagaaataatcagggatatgggaaaacaatatatacagtatgttcactgcattgttgcatatattaacacaaaaattttgaaaacaacccaaaggtttactaataccaatttattaactaaattatggcataatctttataactaaaatttcttcaggcattaaaaatgatataatatattccatttaccctgatgtgattattacacattgtatgcctgcatcaaaatatcttatatacccaataaatatatatacctactaggtacccataaaagttaaaagaaacatgatgtaataacagaatgtgtagaattctatatgtgtatgatgttcatgacatattaagtaaaaggaatagattataaaacagaacatactgtatgatc

SEQ ID NO: 53660 - DNA, 558 bp, Homo sapiens
ttttaaatcttcacattacatattaaagcttctcacattgtattcctatttttgtctcatttaagttttaatctcctcataaaaggataagtgtcttttcttcagtcatcttaatgtgttaacctgcacttcatatcatcatgattttaaaacatgcattgaatgctgctacagtccaagaataacaacgcctgtggcctccaaggagtaagggacccctggaacatcagcaccagcaaaaggaagagagacactctcagttgtggggtgtctctccctgactcagcccccacctcactgagggtcttccatccccacagtttccatctcagatgcccagaagaatgggaggggccaaaggagstccactttgtatatcatcaatgaaaccccctgtacccagtcccccaacaaggaagaacaacagataactcaatttaaaaaatgttacttgtggctgggcatggtggctcactcctagaatcccagcactttgggaggccgaggcgggtgggtcatgaggtcaggagtttgagaccagcctaatcaacatggtga

SEQ ID NO: 53661 - DNA, 859 bp, Homo sapiens
ttttacatcttcatcaccaatatatgaaggtttcagtttctccacatccttgtcaatgcttgtgattgtctgtctctttgattataggataattcctgtttagatttttttttttccttagagatgggatctcactctatcacccaggctgtagtatagtggtgtgatcatagctcactgcagcactgaactcctgggcttatgtgatcctctacctcagtgtcccgagtaggtgggactacagacacataccatgatgcccagctagttgtttattcatttatttagtttttagtagagatggggtctcaccatgttgcccacgttggtctcaaattcctgggcctaagcgatcctcctgcctctgcctccctcagtgttgagattacaggcttgagtcaccatgcccagctaattcctgttttttaatagcttatacatcctcaatttgtgttttgctttggtttccttggattgccaagaaaatagtttaaataccaagtttgtaaaaatgttaaaatatctgtgtggwttacttaaattagtgattatttgatttcagttgattttcttagttcagatgttcctgaaagcaagggtaagatgacgtcttaagctacttaataatggttgtcagttttctgcctgcctcatcctgcatttcttgagcaccactgtgtgtccaggcactgagctggagaacacaagtattgtccttatggtctagtatgatattttccaacttttttgaatgaaaaaaaaaatggagcaagttaagacacacttagatgatttcaagaccaggtaatgagtcacagatactgttccagtagaggatgtagtcaagaaaactattgat

SEQ ID NO: 53662 - DNA, 511 bp, Homo sapiens
gtgattccactgagatggcaattgccataattatcattttcacatgaatttatctactgaccacctatttatatcttaggtgctccgagagacattgaatataccttagggaataaaacagttgtgaacatcctgtgcctggtgggtcttgcaatccattgtgggagacagaacaaacacataagcaaacaaatagatgtacaatattaaattatgatcaaagctaacaaaggaatctgggtagagaatcacagtgaagggggtgaggaagcctcctgcacagagttccactrggaaggcctctctgaagtgatgacatttaagcccagacctgaaagatgaaaaggagctgttcatttgaagactgaagggaagagagatgggaacagcatgtatgatggcccttaggtgggacaaagcattttatgctggaggagctgaagtacaagcttgaattcccccattatatccctatggggtctacactgtgggatcacattttcaccttttc

SEQ ID NO: 53663 - DNA, 611 bp, Homo sapiens
gtcaccttctttcttcctgtcttcctcattcgatggaccacacctagtaatgaatacatttgttccttgccattaaaaatgggtattcagcctagggcatacaaagcatatgttcggtattagttgttagagggttaaagatgctggctaatttgggtttttccaagacaaaagcctaactggcaactttgtggcctctggtttcaagtctacttcctatttatatcccatgacactcaggttcttgaaacttggcaaaaagcctccagcgttttgtgattttttttctcrttggccaatatcaatttgtaatgagccaaacctgacttgagtagcagatctacaggcccatatcttggaggtatataggtatttggctgttgagggcatagattaggaggtctcttgacattctgttgctaggttactgaaccctgaattactgaaccttgaacacagtatttgtgttctcaaattggtatttatgatcgaaagcagctgctattcatatttttttgggggggaatacagggaaatataaaataaataaaactaagtagttagatacagtgcatcaaaaagtaattgtaagaaaatgttattacaaacca

SEQ ID NO: 53664 - DNA, 611 bp, Homo sapiens
gtcaccttctttcttcctgtcttcctcattcgatggaccacacctagtaatgaatacatttgttccttgccattaaaaatgggtattcagcctagggcatacaaagcatatgttcggtattagttgttagagggttaaagatgctggctaatttgggtttttccaagacaaaagcctaactggcaactttgtggcctctggtttcaagtctacttcctatttatatcccatgacactcaggttcttgaaacttggcaaaaagcctccagcgttttgtgattttttttctcattggccaatatcaatttgtaatgagccaaacctgacttgagtagcagatctacaggcccatatcttggaggtatataggtatttggctgttgagggcatagattaggaggtctcttgacattctgttgctaggttactgaaccctgaattactgaaccttgaacacagtatttgtgttctcaaattggtatttatgrtcgaaagcagctgctattcatatttttttgggggggaatacagggaaatataaaataaataaaactaagtagttagatacagtgcatcaaaaagtaattgtaagaaaatgttattacaaacca

SEQ ID NO: 53665 - DNA, 550 bp, Homo sapiens
ggaacatctgttctaagagaggtgacagccataatgagggaaagaaatgatggcatatgatcatttcagatactgataaccaaccatatcagtaaagtcaacaaatgggcagtgagattgagcrgcgggttggggggtacttttgaaggtccctctgagaatctgacctttttgctgagctctgaagggtaggaaaaaaggaattgttgacaacccagggccttttctgtccatggtagagaaaaggagactagatgaaagagagcctgtgggatggggtgaagaaatcctcttgacactttttgttcagaagattgagatgtttgaatctcaccatggaaggattctcagttatctagctccctctctctgtctccctctcgtacccccctacatttcaacaactgttcatttctggaaacaaaatcatcctgcaagcacaaaaagaggttggcattcagatcaggcgtactccaaaatgaactgagaaaattgacctgaaacacaaaatcaagcctgttatttcagcaaaaccaacagccatcgatca

SEQ ID NO: 53666 - DNA, 540 bp, Homo sapiens
ttggtstcgcgccctcccttggttggtctcgcgccctcccttggttggtctcgcgccctcccttggttggtctcgcgccctcccttggttggtctcgcgccctcccttggttggtctcgcgccctcccttggttggtctcgcgccctcccttggttggtgtcgcgccctcccttggttggtctcgtgccctcccttggttggtgctgacacttgcgttagaatatcttgatttcttaccctcggcagcctttaaattgagcacctgagatgagcgtctctccttcaccccggtcctcttttttagctgctgaactattttgaagatagaaacatcaaacacagtccggaatttatagcaggtgtcactgggtcacacagcctgtttgggtggtgcctgtgagagccctgccctcaccctgcaaactgtcactcacctcgcctgagttctcttttgggaggcctggccctcaggtgcggatcactttataatgagctagtgtggagtgcggaggcttcagtagcaaagggaccccgggcag

SEQ ID NO: 53667 - DNA, 540 bp, Homo sapiens
ttggtctcgcgccctcccttggttggtstcgcgccctcccttggttggtctcgcgccctcccttggttggtctcgcgccctcccttggttggtctcgcgccctcccttggttggtctcgcgccctcccttggttggtctcgcgccctcccttggttggtgtcgcgccctcccttggttggtctcgtgccctcccttggttggtgctgacacttgcgttagaatatcttgatttcttaccctcggcagcctttaaattgagcacctgagatgagcgtctctccttcaccccggtcctcttttttagctgctgaactattttgaagatagaaacatcaaacacagtccggaatttatagcaggtgtcactgggtcacacagcctgtttgggtggtgcctgtgagagccctgccctcaccctgcaaactgtcactcacctcgcctgagttctcttttgggaggcctggccctcaggtgcggatcactttataatgagctagtgtggagtgcggaggcttcagtagcaaagggaccccgggcag

SEQ ID NO: 53668 - DNA, 540 bp, Homo sapiens
ttggtctcgcgccctcccttggttggtctcgcgccctcccttggttggtstcgcgccctcccttggttggtctcgcgccctcccttggttggtctcgcgccctcccttggttggtctcgcgccctcccttggttggtctcgcgccctcccttggttggtgtcgcgccctcccttggttggtctcgtgccctcccttggttggtgctgacacttgcgttagaatatcttgatttcttaccctcggcagcctttaaattgagcacctgagatgagcgtctctccttcaccccggtcctcttttttagctgctgaactattttgaagatagaaacatcaaacacagtccggaatttatagcaggtgtcactgggtcacacagcctgtttgggtggtgcctgtgagagccctgccctcaccctgcaaactgtcactcacctcgcctgagttctcttttgggaggcctggccctcaggtgcggatcactttataatgagctagtgtggagtgcggaggcttcagtagcaaagggaccccgggcag

SEQ ID NO: 53669 - DNA, 540 bp, Homo sapiens
ttggtctcgcgccctcccttggttggtctcgcgccctcccttggttggtctcgcgccctcccttggttggtstcgcgccctcccttggttggtctcgcgccctcccttggttggtctcgcgccctcccttggttggtctcgcgccctcccttggttggtgtcgcgccctcccttggttggtctcgtgccctcccttggttggtgctgacacttgcgttagaatatcttgatttcttaccctcggcagcctttaaattgagcacctgagatgagcgtctctccttcaccccggtcctcttttttagctgctgaactattttgaagatagaaacatcaaacacagtccggaatttatagcaggtgtcactgggtcacacagcctgtttgggtggtgcctgtgagagccctgccctcaccctgcaaactgtcactcacctcgcctgagttctcttttgggaggcctggccctcaggtgcggatcactttataatgagctagtgtggagtgcggaggcttcagtagcaaagggaccccgggcag

SEQ ID NO: 53670 - DNA, 540 bp, Homo sapiens
ttggtctcgcgccctcccttggttggtctcgcgccctcccttggttggtctcgcgccctcccttggttggtctcgcgccctcccttggttggtctcgcgccctcccttggttggtctcgcgccctcccttggttggtctcgcgccctcccttggttggtstcgcgccctcccttggttggtctcgtgccctcccttggttggtgctgacacttgcgttagaatatcttgatttcttaccctcggcagcctttaaattgagcacctgagatgagcgtctctccttcaccccggtcctcttttttagctgctgaactattttgaagatagaaacatcaaacacagtccggaatttatagcaggtgtcactgggtcacacagcctgtttgggtggtgcctgtgagagccctgccctcaccctgcaaactgtcactcacctcgcctgagttctcttttgggaggcctggccctcaggtgcggatcactttataatgagctagtgtggagtgcggaggcttcagtagcaaagggaccccgggcag

SEQ ID NO: 53671 - DNA, 558 bp, Homo sapiens
ctgggttgttgctgttggggtttgtaatgtagtccatgtctattagtgaagacacagagggcaaaataagcagtttctttcttctttctttctttctttctttttttttttttttgagatggagtttcactcttgttgcccacccaggctagagtgcaatggtgcaatctcggctcaccgagatctcctcagcctcccacgttcaagcgattctcctgcctcctgcctcagcctcccgagtagctggaattacaggcgcacagcaccacacccggctgatttttgtatttttagtagagacgaggtttcacyatgttggccaggctggtctcaaactcctgaccgcaggtgatccgctgcctgcctcagcttcccaaagtggtggaattacaggcgtgagccactgagcccggccaaatatatatatttattatttttattttttgagacggagtctcactctgtagcccaggctgaagtgcagtggcgcgatctcctttcactgcaacctccgcctcccaagttcaagcaattcacctgcctcagcctctggagtag

SEQ ID NO: 53672 - DNA, 551 bp, Homo sapiens
agaaatagttggactacattaatacctcaaaaatgtctggttaaaaacacaagaaccacactgggataaacttcttattgatgagatttctcagatcatggaatccccatcaaggaaagtaatgggaggtttatcactggaaactttgaagaacaaatgagacwaaacagtatacagtaaaaatagcaattatatataatatggaggcccagagaaaaactcttcatctcccaatactgagattttcagaaattcatgtaatacttatatttttgcttgctatctaaagctttcttcagttctacattacctaggcatatatggcatctgtgctttttggttcagtatttctgacccatttgatgattgataattattgaaatgaaaacaaaatgttcttttgtagaactcactgactcttaagtcctagggttccagtggtgtgcagcattagagatggaactctgcccctatttcctatctatccaatctactgtagggcaaaaggcctatacttgtgaagggctgcttgggacaaggctgctttctgt

SEQ ID NO: 53673 - DNA, 551 bp, Homo sapiens
agaaatagttggactacattaatacctcaaaaatgtctggttaaaaacacaagaaccacactgggataaacttcttattgatgagatttctcagatcatggaatccccatcaaggaaagtaatgggaggtttatcactggaaactttgaagaacaaatgagacaaaacagtatacagtaaaaatagcaattatatataatatggaggcccagagaaaaactcttcatctcccaatactgagattttcagaaattcatgtaatacttatatttttgcttgctatctaaagctttcttcagttctacattacctaggcatatatggcatctgtgctttttggttcagtatttctgacccatttgatgattgataattattgaaatgaaaacaaaatgttcttttgtagaactcactgactcttaagtcctagggttccagtggtgtgcagcattagagwtggaactctgcccctatttcctatctatccaatctactgtagggcaaaaggcctatacttgtgaagggctgcttgggacaaggctgctttctgt

SEQ ID NO: 53674 - DNA, 2221 bp, Homo sapiens
gaaaatgataaatccaaattaatatcaacttataaaaccataaaaataatatcttgtgagattccaagtatatgtcaaattaacagtgcatgatgacagaaacaaaagtcaaaatgaggggaaatggagataaagtgttctaagacayagtttccctcctgtgatctaagatggcttctccagctcttaccgtcatatccatatatctcttcctcttaaagctgcttttcagaagtttgaatacatcacctctgccttcattccagtaacatgaccttaacctaggtgcaagggaggttgggaaatgtagtcttcatctgagaagacaagtaaaacttaaggtttctatatttaaagaaagaagtgaagagtggatatattcagaaggtggggtgggagtgagggtggtaactatcagtttctgccacattgccccagttcctgtgtacaattgatttgtacaggtgtaaaaattctaggtgtgggcagactgcatgatgccgacagaccaactagtcaatggacattttagccttttgaggattcaaatatggcctttatactacacacagatactatcttgaaaggctttgctaaaagtttcagccatgaaatctttaatcctaaactgaccactatttcaccaaatgaggatagagaattagtgcaaagctcagtggataatatttgagttgtattcagtagtgggaaggaaagaagtagccttgttggtggtaaagaatatgtgaacttactctactggcataagaaagttctcatgggaatggcaaaaactatcactaatgaacagtccatttgtaggatactatggtgtcccttagatatagtatagcagcagatattatagcctaagaaataaagttccagagtgctaagggcagtgctttggggaatagagcaaatgctagaactagttaactggttgctgtttggctctaaataatcaaggatattcaagaaaaaaattttcaaatggactggatgcattcactggaaaatattttccatgaagaagactttttggaagagatcccaaggatcctatgtaatacactggtggaattctgtcacctcacactggcaagaggatgccactagctttactcattatttcttgacattcagagggaagcctaaactgccttgtgttggaagcagctcaatgtgggatgacagcctcagctgcagttggctaaattgaaaggcgaattctaagttgaagatttccctggcagcctgacataataatgggagtcaggaaaagcactctgacccattttttccctgaaacataggggcataaggttgactacttgcttaaataaacagagaagggaaataggggaaatgaggaaaaaataaaactataacttcctatctcaaaactgttatcttttcacagaagttgaagagggagtaaaaatgggactatttcaagcacaggatataattgcatgatgaaatgaggggaaaggggttaaaaaggaagacaagagggaggtaaaaagggggacttctaggagtgcatgtgctatggacatggtgctggctaaaagactccttaatggaaacagccaagcaaaatttcccatcatcctctaaatatgagagtattcaaggctctgagtaagagcaaaattttcaaagttgtgaactgagcctacataatctggaaggagtctgatgtgcatgcaactgctgggttacactaataaacaaatatgtaattatgaattgtgatacttcttctgaagaaagaaacagggtgctgtaaccatgaatacttgataggttactttagccagagtggtcagagaaggtttctctgaggacatagaaattttagctaagctctcaaagtcgagaagtcagccattcaaggagctggtcaaaacgtttaggcagaggttggagcaaatgcaaagaccctgaggagcaactgggctcagtatattaaaaaaagagcagtaagcccagtgtggctaaagcagagtaagagagaaagattatgatgcagagacaagcaggggccacattacgcagggccttgtaggccatggtaagtgtgatggttaattttatgtgtcaacttgactgggttaagaaatatccagatagctgataaaacattggttctgggagtgtctttgagggtgtttctggaagagattagcatttgaatcagtaaactgactaaagt

SEQ ID NO: 53675 - DNA, 2221 bp, Homo sapiens
gaaaatgataaatccaaattaatatcaacttataaaaccataaaaataatatcttgtgagattccaagtatatgtcaaattaacagtgcatgatgacagaaacaaaagtcaaaatgaggggaaatggagataaagtgttctaagacacagtttccctcctgtgatctaagatggcttctccagctcttaccgtcatatccatatatctcttcctcttaaagcygcttttcagaagtttgaatacatcacctctgccttcattccagtaacatgaccttaacctaggtgcaagggaggttgggaaatgtagtcttcatctgagaagacaagtaaaacttaaggtttctatatttaaagaaagaagtgaagagtggatatattcagaaggtggggtgggagtgagggtggtaactatcagtttctgccacattgccccagttcctgtgtacaattgatttgtacaggtgtaaaaattctaggtgtgggcagactgcatgatgccgacagaccaactagtcaatggacattttagccttttgaggattcaaatatggcctttatactacacacagatactatcttgaaaggctttgctaaaagtttcagccatgaaatctttaatcctaaactgaccactatttcaccaaatgaggatagagaattagtgcaaagctcagtggataatatttgagttgtattcagtagtgggaaggaaagaagtagccttgttggtggtaaagaatatgtgaacttactctactggcataagaaagttctcatgggaatggcaaaaactatcactaatgaacagtccatttgtaggatactatggtgtcccttagatatagtatagcagcagatattatagcctaagaaataaagttccagagtgctaagggcagtgctttggggaatagagcaaatgctagaactagttaactggttgctgtttggctctaaataatcaaggatattcaagaaaaaaattttcaaatggactggatgcattcactggaaaatattttccatgaagaagactttttggaagagatcccaaggatcctatgtaatacactggtggaattctgtcacctcacactggcaagaggatgccactagctttactcattatttcttgacattcagagggaagcctaaactgccttgtgttggaagcagctcaatgtgggatgacagcctcagctgcagttggctaaattgaaaggcgaattctaagttgaagatttccctggcagcctgacataataatgggagtcaggaaaagcactctgacccattttttccctgaaacataggggcataaggttgactacttgcttaaataaacagagaagggaaataggggaaatgaggaaaaaataaaactataacttcctatctcaaaactgttatcttttcacagaagttgaagagggagtaaaaatgggactatttcaagcacaggatataattgcatgatgaaatgaggggaaaggggttaaaaaggaagacaagagggaggtaaaaagggggacttctaggagtgcatgtgctatggacatggtgctggctaaaagactccttaatggaaacagccaagcaaaatttcccatcatcctctaaatatgagagtattcaaggctctgagtaagagcaaaattttcaaagttgtgaactgagcctacataatctggaaggagtctgatgtgcatgcaactgctgggttacactaataaacaaatatgtaattatgaattgtgatacttcttctgaagaaagaaacagggtgctgtaaccatgaatacttgataggttactttagccagagtggtcagagaaggtttctctgaggacatagaaattttagctaagctctcaaagtcgagaagtcagccattcaaggagctggtcaaaacgtttaggcagaggttggagcaaatgcaaagaccctgaggagcaactgggctcagtatattaaaaaaagagcagtaagcccagtgtggctaaagcagagtaagagagaaagattatgatgcagagacaagcaggggccacattacgcagggccttgtaggccatggtaagtgtgatggttaattttatgtgtcaacttgactgggttaagaaatatccagatagctgataaaacattggttctgggagtgtctttgagggtgtttctggaagagattagcatttgaatcagtaaactgactaaagt

SEQ ID NO: 53676 - DNA, 2221 bp, Homo sapiens
gaaaatgataaatccaaattaatatcaacttataaaaccataaaaataatatcttgtgagattccaagtatatgtcaaattaacagtgcatgatgacagaaacaaaagtcaaaatgaggggaaatggagataaagtgttctaagacacagtttccctcctgtgatctaagatggcttctccagctcttaccgtcatatccatatatctcttcctcttaaagctgcttttcagaagtttgaatacatcacctctgccttcattccagtaacatgaccttaacctaggtgcaagggaggttgggaaatgtagtcttcatctgagaagacaagtaaaacttaaggtttctatatttaaagaaagaagtgaagagtggatatattcagaaggtggggtgggagtgagggtggtaactatcagtttctgccacattgccccagttcctgtgtacaattgatttgtacaggtgtaaaaattctaggtgtgggcagactgcatgatgccgacagaccaactagtcaatggacattttagccttttgaggattcaaatatggcctttatactacacacagatactatcttgaaaggctttgctaaaagtttcagccatgaaatctttaatcctaaactgaccactatttcaccaaatgaggatagagaattagtgcaaagctcagtggataatatttgagttgtattcagtagtgggaaggaaagaagtagccttgttggtggtaaagaatatgtgaacttactctactggcataagaaagttctcatgggaatggcaaaaactatcactaatgaacagtccatttgtaggatactatggtgtcccttagatatagtatagcagcagatattatagcctaagaaataaagttccagagtgctaagggcagtgctttggggaatrgagcaaatgctagaactagttaactggttgctgtttggctctaaataatcaaggatattcaagaaaaaaattttcaaatggactggatgcattcactggaaaatattttccatgaagaagactttttggaagagatcccaaggatcctatgtaatacactggtggaattctgtcacctcacactggcaagaggatgccactagctttactcattatttcttgacattcagagggaagcctaaactgccttgtgttggaagcagctcaatgtgggatgacagcctcagctgcagttggctaaattgaaaggcgaattctaagttgaagatttccctggcagcctgacataataatgggagtcaggaaaagcactctgacccattttttccctgaaacataggggcataaggttgactacttgcttaaataaacagagaagggaaataggggaaatgaggaaaaaataaaactataacttcctatctcaaaactgttatcttttcacagaagttgaagagggagtaaaaatgggactatttcaagcacaggatataattgcatgatgaaatgaggggaaaggggttaaaaaggaagacaagagggaggtaaaaagggggacttctaggagtgcatgtgctatggacatggtgctggctaaaagactccttaatggaaacagccaagcaaaatttcccatcatcctctaaatatgagagtattcaaggctctgagtaagagcaaaattttcaaagttgtgaactgagcctacataatctggaaggagtctgatgtgcatgcaactgctgggttacactaataaacaaatatgtaattatgaattgtgatacttcttctgaagaaagaaacagggtgctgtaaccatgaatacttgataggttactttagccagagtggtcagagaaggtttctctgaggacatagaaattttagctaagctctcaaagtcgagaagtcagccattcaaggagctggtcaaaacgtttaggcagaggttggagcaaatgcaaagaccctgaggagcaactgggctcagtatattaaaaaaagagcagtaagcccagtgtggctaaagcagagtaagagagaaagattatgatgcagagacaagcaggggccacattacgcagggccttgtaggccatggtaagtgtgatggttaattttatgtgtcaacttgactgggttaagaaatatccagatagctgataaaacattggttctgggagtgtctttgagggtgtttctggaagagattagcatttgaatcagtaaactgactaaagt

SEQ ID NO: 53677 - DNA, 511 bp, Homo sapiens
gtgttatggcytatggtagggaaaaaaaccaacaaaaagacatactctctactctcaagaagctccacgtctactgggaaacacagatgccatcagttcaaatggctgtaatacaaaacatgatgatagcgatgactaaaataaatatcattggttgaacacttactatgacatagatacattttaaagaattttgcaggtatttcctactcaatgaagtattaggttggagcaaaagtaatccagtttttgccattattttcaatggcaagacctgcaattacttttgcaccaacctaatagatgttaataatcttattttacatgtaaagaaactaagagagagagtaaatgattttccagagaccacacagcagagaaaaacaacagatctaaactatcttcagtcaaaggtaaaaatccttgggattgtacataggctaacatctaaatgggtcaatcttttcattcacaagtaggtacacaacggccagcctcatgccatgtctca

SEQ ID NO: 53678 - DNA, 425 bp, Homo sapiens
cctaattttaatcctgaagggtaattgtagttcttccattatcaattccattctagatcctgatctcttatgcttactctcacttgaaacccttaggaatatcagtttgaccatcttccttgaggatgtaaataatacaggaggaaatgaaaagctcrtgtcagagaaattttaatattagagttattggggagaagcagggatgaataaaggataacagtgggatggtgaggcaaaagctaggtcaccccaaatagtcctgagctgaagagcttgcttataccttaggatcagggttaattttaaggcagaatcagatagataaagaggtaacaccaaagatagtcattaagtctctctcctccctctgttctctctctaatctttagtgtttgccaaactttctctctgcacatattaaacat

SEQ ID NO: 53679 - DNA, 562 bp, Homo sapiens
ttttttttttttttttttttttttgataaagagtttcactcttgtcacccaggctggagtgcagtggtgcaatctcggctcactgcaacctccacctcccgggttcaagtgattctcctgcctcagcctcctgaatagctgggatattacaagtgcgtgacaccamgcccggctaatttttgtatttttagtatagacggggtttcgccattttggccaagctggtctcgaactcccaacctcaggtgatccgcccgcctcggcctcccgaagtgctgggattacaggtgtgagccactgtgcctggcctctagcatcttaaaatagtgaaaacaaaagagtacactattggctggagaagctcacttctaccctatccacgctcttcttttccagcctcctgccaaggagctggtaatgtatattcaggaccaaggacagtaattgggccccatttcttcatctgaagccttagcaggggaggggttgacgtgagctgtctagaccagaactgccctggtcagcgggtaagtgttctcttgctgttgcttcttctcactgg

SEQ ID NO: 53680 - DNA, 562 bp, Homo sapiens
ttttttttttttttttttttttttgataaagagtttcactcttgtcacccaggctggagtgcagtggtgcaatctcggctcactgcaacctccacctcccgggttcaagtgattctcctgcctcagcctcctgaatagctgggatattacaagtgcgtgacaccacgcccggctaatttttgtwtttttagtatagacggggtttcgccattttggccaagctggtctcgaactcccaacctcaggtgatccgcccgcctcggcctcccgaagtgctgggattacaggtgtgagccactgtgcctggcctctagcatcttaaaatagtgaaaacaaaagagtacactattggctggagaagctcacttctaccctatccacgctcttcttttccagcctcctgccaaggagctggtaatgtatattcaggaccaaggacagtaattgggccccatttcttcatctgaagccttagcaggggaggggttgacgtgagctgtctagaccagaactgccctggtcagcgggtaagtgttctcttgctgttgcttcttctcactgg

SEQ ID NO: 53681 - DNA, 562 bp, Homo sapiens
ttttttttttttttttttttttttgataaagagtttcactcttgtcacccaggctggagtgcagtggtgcaatctcggctcactgcaacctccacctcccgggttcaagtgattctcctgcctcagcctcctgaatagctgggatattacaagtgcgtgacaccacgcccggctaatttttgtatttttagtatagacggggtttcgccattttggccaagctggtctcgaactcccaacctcaggtgatccgcccgcctcggcctcccgaagtgctgggattacaggtgtgagccactgtrcctggcctctagcatcttaaaatagtgaaaacaaaagagtacactattggctggagaagctcacttctaccctatccacgctcttcttttccagcctcctgccaaggagctggtaatgtatattcaggaccaaggacagtaattgggccccatttcttcatctgaagccttagcaggggaggggttgacgtgagctgtctagaccagaactgccctggtcagcgggtaagtgttctcttgctgttgcttcttctcactgg

SEQ ID NO: 53682 - DNA, 530 bp, Homo sapiens
tctaaatgtgtttgatgacaagcattaacactatggaaaaaaatataccctctttgacattataaaagcatcagaactactgtatgatttatttgcttatatgctaagttaccataatgtttttggtgaataaatagcatatcaacatatggcctatggcctggtttatgaattttttttttttgagacagagtctcactctgtcccccaggctggagtgcagtggcacaatcttggctcactgcaacctccacctcctgggttcaagggattctcctccctcagcctcctgagtatctgggactacatgcacatgccatcacacctgrctaatttttttagtttagtagagacagggtttcactatgttggccaggctagtcttgaactcctgacctcaggtgatccgcccacctcggcctcccaaaatgagggttttattagtatcagtgctggacatattgattactcgtttgtcactaagtcatacttaatatctctgagcctcaatttcctatatatgatgtgag

SEQ ID NO: 53683 - DNA, 636 bp, Homo sapiens
atggggagatgtactttgatctaatttaaaacaaaatgacaacagagtttttatgaaacttgataatatggctttaaaactcaaagaaaagaaagaatgagaaggtctaagttgatgatgaaaatgaagaacgagggaaaaactgtcctatctgatgttgatgacattttacaaaatagctattaaagtggtggtgtaataagggaacaaaagtcacatagataaatacagcagaagtaagagaccagaaactggcccacacagatatgaaaatgtaataaaaaacagaaaccatattataaatcagagatatatctggttkctgtacagggaaaaactaaaaattagatcccaagttcacaaaatatacacatgtacacaagtacagacacacacacacacacacacacacacaatccagaaaaaattttaaaaagtgaaaatataaaacattaaagtttttagaatatatgagaatagctttttgaattcagagtaaagaatacttttttagacaatacatagaaaacaaaaataaaattcaaatactgcacaaaattcaaggataagcaacatcttatggaatacagctgaaggattagtattgaaaatatattttaaaagcaactgaaaaaa

SEQ ID NO: 53684 - DNA, 594 bp, Homo sapiens
cccaaataagacccctgcatatcctggtggcagtgggcatggggaccagttaccccactggacaagttgggaagtcttactgcctcttttgtgacatctaatcaatcttcctgattgattcaatgccctgtctcccaccttcaatgacactctagcggggcctgtaattcgtgaatctgtctggggttctagagarcagatgagcttatttagcatcggtaacccctttgctgcaagcactcacaactctctcagttttgctaacatccttgttctgacttcatttttctcttctgtaaaatgataaaaaattttacattattttcagttctgttaaaggagtggaatgagctaatctctcaggtgacttttaagcccaggattattttatgattagtcaaggaacttaggtttggggaagtgttgcgttaagtttctctttcttttttagttgactttggtcagagagggatcggggattgttggcacaaggaaaaactggcaaattaaggtacatttatttttaggttaaagtcaaatgttggttgtacgtattaatcttttttatgattctccatgttaataggcatttta

SEQ ID NO: 53685 - DNA, 594 bp, Homo sapiens
cccaaataagacccctgcatatcctggtggcagtgggcatggggaccagttaccccactggacaagttgggaagtcttactgcctcttttgtgacatctaatcaatcttcctgattgattcaatgccctgtctcccaccttcaatgacactctagcggggcctgtaattcgtgaatctgtctggggttctagagagcagatgagcttatttagcatcggtaacccctttgctgcaagcactcacaactctctcagttttgctaacatccttgttytgacttcatttttctcttctgtaaaatgataaaaaattttacattattttcagttctgttaaaggagtggaatgagctaatctctcaggtgacttttaagcccaggattattttatgattagtcaaggaacttaggtttggggaagtgttgcgttaagtttctctttcttttttagttgactttggtcagagagggatcggggattgttggcacaaggaaaaactggcaaattaaggtacatttatttttaggttaaagtcaaatgttggttgtacgtattaatcttttttatgattctccatgttaataggcatttta

SEQ ID NO: 53686 - DNA, 699 bp, Homo sapiens
aaaaaaaaaaaacttgcaaactcccatcagcatcagaatgggtgcataaaggaagcaatagccacacaacggaaaattatcagcgaagagaatgtgaatgaactacacaactacacgcatgtgtgtgactcatgggaattataggatatgtgcttttcttgtgtctagcttctttcacaaaaaagcacagatcatattccattgacagaaagttcaaaatggagtgttagaattcaggatagtggttcaccttggggagtagtgacaagaagtgggcatgargtggcttctgggccctggcaatactttttcagttctaaaaattaaaaaataaaaacccttagaaactccccctctgaagcccagcactggacctccttagccaccaagttttccaagtggctgcactgggagtacagctctactgcacgtggccagagaggagatttcaccccctttgtgatcagggaaatccctcatcaaccctgagaatgcacaagtcaagtttcatctgaaagtgcatgttttgcactccaggtgggatgagaggggcgagaggtggagggggccactgtgcgcttttgtctagtctcaagtaagaggtggcagagttcagcctctctgaacccagccattcagtggagagattttggaccacgccaggagtcaagacccactggaaatgccaagaaaatcctg

SEQ ID NO: 53687 - DNA, 555 bp, Homo sapiens
ccactcaggactcatattttatgactgtgtcacttgaaatattatggctagagtctgatttatcaacaatctgctagagggatgatagtcttcttctgtatttttaagagtgcaaaaggaagacttgagtagttattatgtggccagcaactgatttatattgcttcccattgcagtcaaataatcttgagcaaaaaggggggaaagggtaattgtaacagtacaacctcgctgtaaaacatagagtgttctctttatacggagtttctcaatgtgaagttttgtgtgacatttaatattgtggctggactttcatgtcagctgaaatcaaaattctcacgtaattacaaaaggtacatcctgtggttctcaagccacaaaatgatggcctagaacagaagggaaaawatacctgggggatgggaacgtgtgaaatccttgcttttttttttttttttttttatcatagctaacaagcaaaagaaacaccaccccggcacccatggttttgactcaaacatgtaatgtgtgggttcagaggatgctaccgaaatc

SEQ ID NO: 53688 - DNA, 555 bp, Homo sapiens
ccactcaggactcatattttatgactgtgtcacttgaaatattatggctagagtctgatttatcaacaatctgctagagggatgatagtcttcttctgtatttttaagagtgcaaaaggaagacttgagtagttattatgtggccagcaactgatttatattgcttcccattgcagtcaaataatcttgagcaaaaaggggggaaagggtaattgtaacagtacaacctcgctgtaaaacatagagtgttctctttatacggagtttctcaatgtgaagttttgtgtgacatttaatattgtggctggactttcatgtcagctgaaatcaaaattctcacgtaattacaaaaggtacatcctgtggttctcaagccacaaaatgatggcctagaacagaagggaaaatawacctgggggatgggaacgtgtgaaatccttgcttttttttttttttttttttatcatagctaacaagcaaaagaaacaccaccccggcacccatggttttgactcaaacatgtaatgtgtgggttcagaggatgctaccgaaatc

SEQ ID NO: 53689 - DNA, 1423 bp, Homo sapiens
tcagtccccaacacactaggtttcaagttttatatcatgcttctccttttgaacaagatgaacttttctattaccacagtcaggacataggtcaaattttatctccttttttactctctttctcatctcactgagcaagaaaatgttcgtttccctgggtttcctcaacatcatgttcatgcttccattgaaaaatgtgctatggtctgaatattcctccccccatttcatatgttgaaacataatacccagtgcaacattactaaaatgctgagttcttgtaggcacttaataagacaggagggctctgtcctttctaaaataataacaccaagagatgcaagggagccatttctccccttttgctttttttgtgcttctaccgtttcaggatacagagggggtattgtcaataaggaacaggccctcaccagacagtgaacttgctgatacctcaatcttggaattcacagccttcagaactgtgagaaataaatttctgttatttatcagttgcctagtcttgggtattttgatttggcagaagaaacagacagcatgtgtcacctagaatcataatttcttatttcttatttatttatttatttatttatttatttatttatttatttatttatttgtgtgctggtatgctttgtctctgtgtccttacccaaatctcatgtcaaattctaattcccagtgttgggggagatacctggtagaaggtgattgcatcataggggatgatttctcacttgctgttctcatgatagtgagtgagttctcatgagatctggttgtttaaaagtgtgtagcctttcctctttgctctctctctcctgctcttccatgaaaatatatgcttgcttcctctttgccttctaccatgactgcaagtttcctgagtcctcccagccattcttcctgtacagcctgtggaactgtgagtcaaataacctcttttcttcataaattacccagtctcaggtggttctttatagcaatgaaagaatggactgatacatgtgctaaatgtgaatgcttgaaggaaggtttctttccttgttatcttggtatctacagtgccacatataaagcagacatcaaaggtcacagaaaaaggaaggagattctatcaccagatgctcagcacacacatttcacgtgtggagatcaaacatccaaaaaacattgccatgactagggaaagagcatggtgctctgcatcactgcagagtatcctgctacattcttaatgtccccctgatcccatccatggttatttggcaaaggttttaatatcctttatttagagccaatrtcctgctcctgtggctcattatctcctttaatagccctgccttctcttcttttcatcctctctgactcctttgatgtagcttaaatgtctttactgcta

SEQ ID NO: 53690 - DNA, 537 bp, Homo sapiens
caaaaggcaaaacaagttagttccaagtgacctcatttcaaaacttgaacaaatgagcagcacattgagtttccaggcagactacatgttaagaaattgtattgcatggctgggtgcggtggctcacrcctgtaatctcagcactttgggaggctaaggcgggcagatcacgaggtcaagagattgagaccatcctggctaacacggtcaaaccccgtctctactaaaaatacaaaaattaactgggcatggtggtgtgtgcctgtagtcccagctactagggaggctgagggaggataatcacttgaacccagaaagcggaggttgcagtgagctgagatcgcaccactgtactccagcctggcaacagagcaatactccatctcaaaaaaaaaaaaaaaaaaaaagaaaagaaagaaattatattgcttatcatttatatgaaatattaccttctttactcctattcttaatcatttgctttttctcctgctttagagacacatggtttgagctttcaaaaaaattaatgatttt

SEQ ID NO: 53691 - DNA, 524 bp, Homo sapiens
tcaagcgattctcctgcctcagtctcccaagtagctggaattacaggtgtgtaccagaatacccagctaatttttgcatttttagtagagacagggtttcgctatgttggccaggctggcgaactcctggcctcaagtgatctgcctgcctcagcctcccaaagtcctgggattataggagtgagccaccgtacctggcctcaattaaactttaatattattcagcctttctttggtataacacaataaagacaatagaaatattttccctaaatttccaaaaaaattactccagttttcaagttcacattttgcaaatctaagaatctaatcaccctaatacaagaaaacagtttattttcttaattttaaaaaattttttactgtgatttatttattttgagacaggctcttgctttgttgcagtgccacaatcacagctcactgcagctcttcctccgaggctccagggtgcctcctgcctcagcctccagagtagctaggaayacaggtgtataacatca

SEQ ID NO: 53692 - DNA, 535 bp, Homo sapiens
tcatgagtatgtgccaatccacattcagaaggagatgtaatttatctgcagacctctggagctctctctctctttcctgtctaaaattctgttttgtgaattctagccaagttggccttcccgaactctatactctgtctcctcatcttatgaagattagcatgctccagtttgggcaacctgtcttgcactacagcctaaaaattttatacaagaattgggccagaacaatcttaggtatcgtgttatttattttctttatttcrctggcctaagagtcacgttgactaatgaaaggaaaataaaaggggcttcttaaacttggtagttttttagttgttaaagatgggaggtaagtctagttccagttataatatcatggctaaaaccatgttaatataatgatttcttaaaaacactttattttctttgagatatatattggctttacttcctattctttcaatctcattacccacaaatctctatttctattgttaaaggttttgcacatccttctgaaacaattctgtat

SEQ ID NO: 53693 - DNA, 535 bp, Homo sapiens
tcatgagtatgtgccaatccacattcagaaggagatgtaatttatctgcagacctctggagctctctctctctttcctgtctaaaattctgttttgtgaattctagccaagttggccttcccgaactctatactctgtctcctcatcttatgaagattagcatgctccagtttgggcaacctgtcttgcactacagcctaaaaattttatacaagaattgggccagaacaatcttaggtatcgtgttatttattttctttatttcactggcctaagagtcacgttgactaatgaaaggaaaataaaaggggcttcttaaacttggtagttttttagttgttaaagatgggaggtaagtctagttccagttataatatcatggctaaaaccatgttaatataatgatwtcttaaaaacactttattttctttgagatatatattggctttacttcctattctttcaatctcattacccacaaatctctatttctattgttaaaggttttgcacatccttctgaaacaattctgtat

SEQ ID NO: 53694 - DNA, 1380 bp, Homo sapiens
cacatcggtagcatcctgtgcaccatgaggacttagggacccacgggccattttcctgagagacagcagccagccagccctgaccgcaggagctcagacagccagatagccctaagcagctgagtctggtgggcgaacttttctgagtggctgccagtttgtgatggtccccacagaagcgcctctgttattttgtgcagtgtgtctctaagtattccagtgaggacacccaccacttctcttgaatgtacagactcctctgtgggggtttttctccctgcttgtcagcttcagtcttctttgttcagaatcttccctcttcctctggacttaccccttcaacacgaccacaacctcaagaatgtgatgtttgcacttacaacgttctatgaaatccagcaaaacagcctcagtggacaactcttctacttaaggagatttttgtttttctcttctcttgtttaaatctagcayagacacctttatcaagtacacgggtatgtcttaagtgacttttgtggcatttctaagctttaatgtgacttagattaaaggtgtttaaaaaggagaaaacaaagacaaattttgaactctccttcgaactaaaaaattgtgctgaactccttaatatttgaaatattgatattctgagaggtaaaagaatgttaagtaaatatttcacatggacaaataatttactgtcataatcgtcttttagaaatgctttgctcgtaaagagactcacagctgcctttctagtttaggtttcaatctgtacatcaaatgagcaattcagcaggacatcttggtacagggttcaagaagctgttaagaatggttgcttggggagggtcatttgagcccaggagttccaggttacaatgagccatgatcgcaccattgcactccagcctgggcgacaaagcaagacactgtctcattaaattaaaaaaaaaaaatagaaaaagaaagaaaagaaaaagaatggctgcctgtatacccccagggaactgaagcagtgcccttgagcatgcctacaggccaagacctgcactctgacaatatctcattaaattggcatgaaataaaaacagaaaaaggaggacctttttccatcccaatgaaaacagatggaaggactgtggaaagggcaaggttttagcgatatatcagcctgggttcaaatttcagaccttcacttactaactacactgtgagcaagttacttaacccctctcataagaaagcaatgagtagtagaagccagcatagattcattaataacatcttaggtcaaaccgacataatattttttataaggttactatgcatagacagaatgtaacttaattttggcacagtattagaaagcacatctcc

SEQ ID NO: 53695 - DNA, 534 bp, Homo sapiens
cacagtagcaaagacatggaataaagctacatgtccatcaatgatagattggataaagaaaatgtacttatgcaccatggaatactatgcagccattaaaaattagatcatatattttgcaggaacgtggatggggctggaggtcattatccttaacaaactaacacagtaacagaaaaccaaatactgcatgttctcacttataggtgagagctaaatgatgagaakacatggacacatagaggggaacaacacacactggtttattggaagatggaggataggaggagagagaggaacaggaaaaataactaatcgttattaggcttaatacctgggtgctgaaaaagtctgaacaagaaacccccatttgttacatttttctgtgtaacaaacttgcacatgtacccctgaatttaaaataaaagttaaaaaaaaaatctggcatcctattagcctcactttttccctcagtacaaattccttcaatataagaactgtttgagttttagcttctcaatattgtatcataat

SEQ ID NO: 53696 - DNA, 647 bp, Homo sapiens
tattttaatgttttgtccattttatgttccaatgataattaggactaagtggtgagcagttcatgtaaaaatgactttacagtagttataaaaccaaactcacactgctgaagtctactaggcagaagaactgaacaagagcaggaaggtgttatatattttctgaaggtccctaaaacaactctaggcaccagataactcctacctcaccaaaagaaaaaagaaaggaagaagtaaccatattctgaaagtctatagcaccaatactatcccattcatagtcatctttttgagacagctcttgctctgtcacccagtctggaatgcagtagtgtgatcatggctcgctgcagcctcaacctcccaggctcaggtgatcctcccacctcaacctcccaagtagctgggaccacaggtrtgtgccactaaacccaggctaatttttttttttttaagggatggggttctgccatattgcccaggctagtctcaaactcctgcgctcaagtgatccccctgcctcagcctcccaaagtgctaggattacaggtgtgacccaccacaccaggtcttagttctttttcttgatacaagtcagcagagactccaatttctccacttcaataaattaatggattctttaaaaa

SEQ ID NO: 53697 - DNA, 626 bp, Homo sapiens
cttgttagttaaatgtatgaacctgaggctatagtatgaaagatattgagtgccaggctagtaagtttggaattcacttagtagacactaggcaaccagtagaggtttctgagcaagtaaatgtaacagtctgattaatctgaccacaccaaggaggacgagctggagagaagaacaacttggatcagaggtgccaattaggatgcttttgatgtagtccaagtgagtaacagcaaggttctgaagtgggatgaagactgtgcaaactgaaagaggaggatagaagtgagaaattactggatacactgtattagccctcaactagaaatccattaatctacctaggcttgcctttaactgtgtgatcttgagcaagtcaatcaactccttgttcaatacactttcttcattagtaaaataaaatattatattaaacatggattgtcactttctctgcaactactcaaagtaatttgcagataatagttatatcactaaaatattaattttaaatgtcacaaaatcttaatttcttattgctaacttttcctgcatttacttatgctaatattggttattaaccatgctttttaaaagtaagattagagaatcagtatwaaacttca

SEQ ID NO: 53698 - DNA, 539 bp, Homo sapiens
gcatattttgcatattaggaaaaaataaagtttaattaaaaccaatcataaataaataaatgtttaattgtatacaaatatgacataatttgtaaacatactgataccaaggtcacagtatcagaggaaaaactgctcaaggtaaaataaaagtctatttggatagaccaataatgtgtacttcttaggtaatgatctttcacattttggcagtatctctggagagataacagttttagctttaattgagattaaagtttaaaacacaaacaaaactcaaggaactagatgactaatcatttataaggatagagaagwtagtaaaatataagctttcaaaagtttatataacaagtgtggcttatttatagagtacccagtttaacttaagcctccttggattttacccctggaaggacaatactttcctttaaaaggacaaaaaagcatttacttagtgaagcttctgatggtattaggtaaagctgataaaagggaggggagtattaatttttctgttctggttctatcgtcaggat

SEQ ID NO: 53699 - DNA, 1222 bp, Homo sapiens
aggttagatacgctcaacagcctacctgtgtggccccagacatcgagttcctgcctccaactgggcttcttgccaggacatatcactgtgtgttgttcctcagtacctacctcattttaatgagtcagcctggtctcaggccccagccttgcctggcctcatcctaccataggtctgcaagctcatgcctgacttcagtggtggtaaagatcatcaatgtggagcaagactttagagttcaggttcaaattaygctctgctacctgctaacagtgaggcttttccaagcctcatttttctcaggcacaaaaattgagaatgaacagaaattacctcatggaattgctatgaggtttaaacaaaacagtccatggaaagcacttaccacaatgcctaacatattttaagtgctcaataaatacaatacatgttatctgcattatttcagttgcaaaaaagataaacatactcagtttagttcaagaaacagtggggcttgttgaaaggctacagatgataaatttcacagaagccagtttctatgtagtaaggacagatggatgtccaggaaatgggaagtcacagacaaccactccctgactctctgattctgactctgtctctctgtcatttctgcttcttgctgcctgttgacttctctctactgattctctgagtaccttttttctcagcttattcacatcctgtggtagactgctagttgttcttcaatatccattctttttttcttcctttaacaatagagcccttttgtttagttggacacatggcctccttggtaaacgttatattttctggactcccttgcagctaggtgtggccactcaatcaagttctggattcatgtacacgtggcatatgtaactttgtcgtcataggagaggacagcctcctttctgcatccttttgactgcgacataagtatagtagtaagctattttggactgagccaccctaacaatgagtaggccagaagtctaggtccccagcaatgggaaattgctatctcaagtctgggttcgagaaaaacaatatctcctaccttttttgaggcattttattttgtctttaatacagtggttgaatctgtgtgctaacagatgaatcatttactctcaggggcttgggtagctttgccctctcttgtccccaaatcaatatcacaaacactcatcattgtccaactgacccaaacatttag

SEQ ID NO: 53700 - DNA, 631 bp, Homo sapiens
cttcttcctcctcttactagccaagtatattcttagcatagatcagtcatactgtcctatgtgagaatttcaatgaaccgacataccaccctagcataaatttccattttacttaaagccaatatcctacagctgaccattgattattctccagtagtttcgcatttattaactggtctaccttaaatctagtcactgtgaatccctccagggtagggaccatgtcttatacaggcagttcccaactttaaaatgagcgtgtcccaagatgtaatggtaaactcgttgactgcacgcaagaactcctgcagaagcaatgttataatatgagtctcactgtcaggcatgtagcacataatctagcactggcttgaattctgcgtactgggccgtataaggcagtggagggtgaggaggaacagcaggtgacagagaaagaacgttcctttcatttcccaagatatgacttgtgcacaaatcaacattttcccccaaataactattgcaygtctctgacatccaccttctcttctgcctcccaccttcacggccccctggctcctgggtccctagtttgccctaagggagagtctcattccccagaatatctcatgctccaaaattacttttt

SEQ ID NO: 53701 - DNA, 541 bp, Homo sapiens
gatgkggtttcgccgtgttagtcaggatggtctcgatctcctgaccttgtgatccacccgcctcagcctcccagagtgctgggattacaggcgtgagccaccatgcctggccgatgaaaggtagtattttaagtgagtttaaagtgttttgtcttttggctgaaaaaacaaaaacaaactattttgcacgtgtttttctgctggacaaatggatactagagatgtccacacaaagaagacaccctcatagaggtttaaagattcttatcattgaacatgaggcttgctgaccaacataaagtgattttagtgtaaataatgcagcaatagttctcaaactttagtatgcatcagcatcacctgggaaggcttgttaaaatacagcctggtgggccaatgcctagactttctgatttagtaggtctgaggcggggtccaagggtgtgtatttccgtcaagttccctggtggtgctgacgctatggctgctggtccagaggccactcaatggaaaccactggaatatggcattgggagaaagg

SEQ ID NO: 53702 - DNA, 541 bp, Homo sapiens
gatgtggtttcgccgtgttagtcaggatggtctcgatctcctgaccttgtgatccrcccgcctcagcctcccagagtgctgggattacaggcgtgagccaccatgcctggccgatgaaaggtagtattttaagtgagtttaaagtgttttgtcttttggctgaaaaaacaaaaacaaactattttgcacgtgtttttctgctggacaaatggatactagagatgtccacacaaagaagacaccctcatagaggtttaaagattcttatcattgaacatgaggcttgctgaccaacataaagtgattttagtgtaaataatgcagcaatagttctcaaactttagtatgcatcagcatcacctgggaaggcttgttaaaatacagcctggtgggccaatgcctagactttctgatttagtaggtctgaggcggggtccaagggtgtgtatttccgtcaagttccctggtggtgctgacgctatggctgctggtccagaggccactcaatggaaaccactggaatatggcattgggagaaagg

SEQ ID NO: 53703 - DNA, 1995 bp, Homo sapiens
atgcaattacctaaaccagtcatgtagtattaatgtaatctgcccatttctacagctgaaaagaagtttaatatttaaagagtgagtaaaaagagacaacttggtgccccacaattcccctagcttggaaccaaataataattagcttgccagtttactctcaaaatcgactaacttccagttaaccattatgccttagaaatctttacttagtcatatgataaattgatattaacataataaatgggcagttatacatatataggcattcctatctgtctccatacaagtcaaactgagatctacaaaatcactgatcagccacttctctgcttaaaacttaacagtggttcctcactgccctcagaacaaattctatctgtacaaggcccttaaatatctgttcttacttacctcaagtctcacctctcaccatcttctacaccacaaaactcaacttttcagctgtctagacttgcctgaacctatcgagctctcgtcaatgagctattttctttgcctggaacacacaatctgttccctttttgmccagataatttctagatattcttctgcttccaactaagtcggattattcttctaaatagaattggcctgactcctccagtcgaatgttaggtactattccaaattgttctcacggtccctcgtacttgctccatcacagcactatttaaacaggcaagtataactaagtgcaatttgtctatatccctcaatagaccaaaagatcagtaatgacaggaactagaagtagatctgtctcattcactactgcatctccaacatctaatgcagcatctggtacaaagcagaaactcagagatattaaaagactgaataaataattttgatattaatatttaggattttggagggtgaaagtgcaaagcttatctatctacttcctcaacaaaaactggtcacattctatttggtttattcagcaagtatttactgtctacccacataaaaatcaaaaagaatataatccagagtccagtcttaaggaacctacagtcttgagagaaaataagacatgtacaaacataaatatgaaacatcaaaaaagtgtgttattagattctaaagtgtgctgcacagacactgagtgccaaaaaagagataaggattgggaaagcatcctagaagtaggatttgagctgagccttaatggataagtaaggctgaagacagaaaatataaagacaaatgtgctacagttcagcacttctcaaagtgggtcagaagacaacttccttctttcaagggtacttaaggtcaaaagtattttcataataagcctaagattttatttgctttttttactttcattcactctcaattatacaatgccgttctccagaggccatatggcatgtgatatcacaaaggattaaatgcagaagcagatatgagaatccagctgttttctactaagccagacacttaagagtcttataaaaatgcaagacagtgccactcattatatttttgttttgaaagttatcttttctacaaatgttatttgtgttaacatggcatagtatttatttcatttttatttttagagccaagtctcgttgtgttgcccaggatggtctcaaactcctggactcaagtgatctgcctgcctcagcctcccaaagtgctctgattacaggagtgagccacccatatactatatgattttaggatagtgatgcctaaaagtaaaggaataaagaaacaaaagaattaatgacatgctttaaagagaaagaaaatttctggtcatgcataacttcaaaatgtgtttaacatacaggcacaggctttcttctcaataactatttttacttagtacaaaaatataaaaataaccttttaaaatcatacttatcctctcacccaaacacaataatacagtttcatattccttttatcataaataggtgttttcacaatgtttcacgattaccatttagtgcaaaa

SEQ ID NO: 53704 - DNA, 1610 bp, Homo sapiens
ctttttcccttctgggatttactgtctggtcttacatttatcctgtgtgcagttttacatagtcgatgccacaccatttatataaaaatgctttttcagttagtagtatattgcaagcattttctcacatcattaaattcttctaaacatgaattttaatgtctgtgcaatatttcatcacatgtatttaaccattttcccactggaaatataggttgacttaaaaaacatttttggctataataaatgatactctgatgaacatctttgtcttaagatttttgtcagcatttctgattattttctcagggttaattcttaaaagtggaatttctggttcaaagaataccacagctataaaaatccatgtattttgctaattttctttccagaaatgctaaatcaattttatattgatgcataacaacatggaatttcaattcctgctctgaataaacctttgtttcatagaggattattagaaaatcatcttttggtgacagatatttaaagtagaagaatgtatgcaggcgtgttgaaattgtgtgaggaaaattttttcttctcatccttttcatgaaaagtcagaatgtagtggttgcatggcacctgcatttagaacactaactttagtcagccgatattaattggaagcctaggttcaaatcatggctttgccacttactaacttcgtgattgtggtcaggtcagttactctctctaagttgtcgtttccttatctgtaaagtgaagaaaagattagcattgttatgagatggagataaggcatgtgaggaatccagcactttgaaaagagctgagmttaccatgacagcaaccatatatagctactgaacacttgaaatggagctggttcgaattgagatgtgctatacatgtgcagtgtgcaacacacactaattccaaaggcttcgtcccaaaaaagaatgcaaactctttattaataaaagagttgattaattattaataaattttgatatcattacctgttgagatactatttgaatatctcgatttcaaataaaacacattattaaaattaattgtaatacatttattttgctttttaaatgctttttttccctctttgaagtggcttgtgttataatcttactggacagtactgctgtagaatataataaaggctggaggagcaatttttagaagaaaaagtgggttatttctccattatggaattatccagttgtcatcttatcttttggggacatttgattcttaggaaatgatgaggcatttggacagggtcctctgttttggtccggaaggtttagaaaggctagagtagggatgatgcataatctttcattgtttgttagaggggtgagtggagagtttaaaaatagcgtcccctccctcctcccctcccaatgctgatccctcatgagttatttctgttggccgcattaggaacctgacatttgattcattcagtgggtcctgcctaggtcctttaaaacagaatggactgttagggaaaggctgccctgggccatgcaggccgaggagaccaaggggattggaataaccagtatggcaaaatgcttggtcaagatccagactcgacgaag

SEQ ID NO: 53705 - DNA, 601 bp, Homo sapiens
cataataagctcatctggccaggtcttatattttgctcaggggacttggggaaggagaactttgatttaatctaacacgtttttcagatgttcattgtggcacttcttacycactttcacttatcagctgcctctgtaagatcatcacacctgcagctttgcttgacgcagtgagtcctggttgtgattctacagcattctggaatcatgagcacaatgtgcattcacagatgattctgatgcgtgaaatatccactactgtcttctcacttcttactttcactcttcagctgcttatgtaagatcatcatacctgcagatttgcttgactcagtgagtcctggttgccatcctacatcattctggaatcgtgagcactatgtgcgttcacagatgattctgatgtgtggaatatccactactgtctccatcattattttaggtttcaatgaataccttcgagccactgattcaatctaatataacccaatagcaatgataaagattgcagacttactaaacagaaataagcaaatgttgtgaaaaatatattaaccagaatgaactgtatcctgctaattgaatgttatttaagaacatt

SEQ ID NO: 53706 - DNA, 550 bp, Homo sapiens
ggataactaatacaagagtgaaataaggacaaaagaaaccttaattaactggttatcttctcactttgatcaatgtgtaccacagtcttaaagacacattttggagtgtttttaacgtttctttagcactgttaacaataagcttccaaatcacaaaattcaaaaattatctattttccccattaaacatgttgcttgctccaattatggttaaaaatacatcttggggccaggtgtagtgactcacacctgtaattctaccactttgggaggctgaggtgggaggattgcttraggccagcaatttgagaccaacctgggcaacatagctaaacctcatctcaaaaaaaaaaaaaaaaaaaaaaaaatcttggtaatgaaaataatactggggaccaagttaggtataaaatatatttcacacttaccatatttagatgcaaggtctagaagaattgttctgaagatatgatggagttggtattttaggtgtaaatcactgcctgaatcagagtgcttctctctttcctggaggccactcctcagcagc

SEQ ID NO: 53707 - DNA, 574 bp, Homo sapiens
tacaaatggatgagccaagcagcaaggattgatagagcacctttgacttggagagatcaagaaaatgaaaaagcatgagaacagtgctgccctaaagacaataagaaagtggggagtttgggcttacacatattaagcataacacagacattcagttgcaggggcctgtgtctgtagtcccagctacttgagaggctgaggcaggaggatcgcttgattgcaggagttacaggccaactggacaatatagcaagacctccatctcaaaaaaaattttttaagtatgacacaaaggcacatgaggacctgatggctataaaccaaagccccaaaggatgtcacagacagcctggtcactcaggtrgagactcatggcaggggaatagtcaccgcagagttcccactaggacaatgcctcatggaactgttggagtagagcagcccccaaaaccctataactgtagagctaccagtatgcaactccagcctgggagagctgcaggcacaagactctagctcatgaaagcttctggaggccttgggaacccaatccctgccccagtgtgcttaggat

SEQ ID NO: 53708 - DNA, 563 bp, Homo sapiens
tagtttgaatgtgtctcccaaaaagcatgtgtcagaaacttcatccccaatgcaacagtgttgagaggtggagcctgataagtcattaggtcataaagcctctgccctcatgagtgggttaatgctgttttctcaggagtgggtgacttatcatgagtgggtttgtcataaagtaggttcagccacctcttgttctcctgctgttgtgcactcttgcccttctgccttctgcctgagatcatgcaggaagaagttcctcaccagattccagcaccatgttcctggacttcccagcctccagaactgtaagaaataacttmcttttttatataaattactcaatctcaggtattctattatagtaaaccaaaatggagagactttgggtttgaaacatggacaaacttctgaaagtgcggcaaaaactctttaagatcctatagactttcattattagaaattcagaatttggtggtggtatggtttggctctgtgtccccacccaaatctcatcttgaattgtaatccccacgtgggaaggaggtgattggatcatgggggaa

SEQ ID NO: 53709 - DNA, 597 bp, Homo sapiens
agttattttcaacttggagcaaattaaaatcttatcagcaatttaaaaagtctagagtagtcttcttctggttaattattttaacttgtgtttttctctttatgtttttagtgagttgtcttatcaaggagaagaactcaagctgattattctttttttttctcttccatccacctcgctggtgtgtgaataatttcatttctcagaaaatgttctttcatatccatcttacaagatgagagaccttttaacatcttccattcggatgtgataccagtaatggaaaatattccagcttcatgaatatggtgatacaaatagttatccgtctaacctctgtcagtgccaaatgtttactttactcagtgaattactcagctgactgttaatttcttctgaaatcactaatgagaggatcagaggtctggctgttgtctgtacctcgtatgactcccagtgcagacagttgtttctrtggagcacagacagttgaatggattgacttcctgcctagaatagtttctgctgtgcttcttatccttcttgtggagatttcagattatctgaattgcttttctatcttaagaaaaaactcaa

SEQ ID NO: 53710 - DNA, 578 bp, Homo sapiens
aagcaaagagggcccccatgcacccagatcactgcacaagaagggtagggtaacagaagctgccaatctgggcaactcggtgctctgaatgcctgggcatagagtggagagggccccactgcaccacagtctctgcacaggaagggtggggtggttcaggttgctgatccaggtgagtgtgtgctccaaatgcctggagatctgcctttatcaagcagatgtattcrcaggggctgtttccccacattcttctccctttaatctggaatgtagttcatggttccagtggattctgttttctttgttgaactaaagctcacagagttgatcttcatgcactatcttgctatttccaaatggctaaggcacactaaaagcctcttatacaccatcttagggggaaaaaaacctaatgctcaaaaatacctactttttataaagtttggcccttacatactattcagctacttcttttagtgctcagataataaatcagtgatgaattttccagcaggattttcagaagaattgtcaggcaaggtggtgcctagcatagctcaggttcccctaacatttag

SEQ ID NO: 53711 - DNA, 578 bp, Homo sapiens
aagcaaagagggcccccatgcacccagatcactgcacaagaagggtagggtaacagaagctgccaatctgggcaactcggtgctctgaatgcctgggcatagagtggagagggccccactgcaccacagtctctgcacaggaagggtggggtggttcaggttgctgatccaggtgagtgtgtgctccaaatgcctggagatctgcctttatcaagcagatgtattcgcaggggctgtttccccacattcttctccctttaatctggaatgtagttcatggttccagtggattctgttttctttgttgaactaaagctcacagagttgatcttcatgcactatcttgctatttccaaatggctaaggcacactaaaagcctcttatacaccatcttagggkgaaaaaaacctaatgctcaaaaatacctactttttataaagtttggcccttacatactattcagctacttcttttagtgctcagataataaatcagtgatgaattttccagcaggattttcagaagaattgtcaggcaaggtggtgcctagcatagctcaggttcccctaacatttag

SEQ ID NO: 53712 - DNA, 578 bp, Homo sapiens
aagcaaagagggcccccatgcacccagatcactgcacaagaagggtagggtaacagaagctgccaatctgggcaactcggtgctctgaatgcctgggcatagagtggagagggccccactgcaccacagtctctgcacaggaagggtggggtggttcaggttgctgatccaggtgagtgtgtgctccaaatgcctggagatctgcctttatcaagcagatgtattcgcaggggctgtttccccacattcttctccctttaatctggaatgtagttcatggttccagtggattctgttttctttgttgaactaaagctcacagagttgatcttcatgcactatcttgctatttccaaatggctaaggcacactaaaagcctcttatacaccatcttagggggaaaaaawcctaatgctcaaaaatacctactttttataaagtttggcccttacatactattcagctacttcttttagtgctcagataataaatcagtgatgaattttccagcaggattttcagaagaattgtcaggcaaggtggtgcctagcatagctcaggttcccctaacatttag

SEQ ID NO: 53713 - DNA, 638 bp, Homo sapiens
atcataaaaaaggcatgcgcagtaactcaaacagttgcttagcaaccagtggaaaaaatgctgaagtgcaaagaggcctgcataaattaaccgaaaatcctctgtcaaagagatgggctagtttttctgctacactgggtcatcgtttttgttttatttttttaatgcacatatgggcctcatgagtacgaaaatcaggggtgaacgcaagaggtttaagaagactgcattttactcaggaattggatttytggatcactgcagcaagaaccaaggtgttctctcaccctctcaaccacccctacccctcacatctcttcgagaaatgcgttcgtccttccctaacttatgccacatagtatatgacaagaactattttatttaccatcaccttcaacacagggccacaatttctggtctgttcttttcctaccattctgagatttatacacccaaacattttatctgtttgaaaaggtgcctatgaaatgcagtgagagtaatttgtagagagcaacttgcttaatgagcattctttatcagctagcagcaccccaaaagtcagacctctttgtaatcgcggatttaacacctgactctccctcaatgacacatcttcatggtgtcatcttctacat

SEQ ID NO: 53714 - DNA, 544 bp, Homo sapiens
aggtgccttgtagctgcctgtgtgcctggtgttaatgaaggctgtcttctgtgacaggatgtctatacggtcagggtgccaaacaggcagaatcctgggaagagtgggcaaaacatccctttcctcagctctgcattatacttgacttcaggcatggatgtgccagtgctgtgcctagagcctcctagtgtctttctaagtcttctcaattccttactctgtcccacagaagtgaagacargtgtgggcaggctcagaaaggcctgtcccatgtcatcttctttgtggccttcatcctatctctctttcttccccaggcacctctacctcaaaatgtctccttcctccttatccaaagaccagaagtctccatggctagggagtagatacaaatagttatcgggtgggcggtggggaggaagatacctagttctactcgccagaagagactgaggcctgccaagatagcagatatggaaacgtaggtattccacagaaaaggccaactgatttcaattgctaaaaactgcatggtgagcaagat

SEQ ID NO: 53715 - DNA, 444 bp, Homo sapiens
gcgcatgcctgtaatcccagctactcaggaggctgaggcgggagaattgcttgaacccrggaggtggaggttgcagtgagccaagatcatgccactgcactgcactccagcctgggcaacagagtgagactccatctcaaaaaaaaccaaccaaccaaacaaacaaacaaacaaaaaacaaaagaaagcacaggtgtaaaaaaacaaaataattcaaagtcagcttggtttctgaggcttctcttgcttttgtcttatcttctggtgtgtccccctgctttagcccaaggccaagtgtgctgataaagggaagcaggtttattgccccaaattcagagatggggccataaaggaaaaacatccagtgtagagaaattttaattatatttcaagtgcatgagtgttttagtatgtcatgcaacataattcttggatttaaaaaaa

SEQ ID NO: 53716 - DNA, 633 bp, Homo sapiens
atcttagtttgggctgctataacaaaataccatagactgggtggcttaaacaatagaagttatttctcatagttctggaggctgggaagtgcaagaatccaggcaccagcagatccagtgtctgatgacggcctgcttccagtgtggagatggcagtttgcttgctgcatcctcacatggtagggtggggggagagagagcaagagcaagagacggggagagggagagagagagagagagagagaagacagagagagagagagcacagcaggagtgcacatgcttctcctgtctcttcttctaaggcactaatcccttcatgagggctctatcttcatatcctaaagatctcccaaaggtcccacctcctcacaccatcctattcattttcatttattgatttatgtgtgttttatccaggcaaataacacactttctctttctctcgtgtcccctaccacggcacttccagggagtgctctgcagtgaatgattgctcagcattgcgaaaagtctagttaccacctccaagaatatctcttttaggatgcagcttttccgasgcaagtgagtttgcattctctatctccaagatcatttaaaggagagggaaagaatttaggctctagggaa

SEQ ID NO: 53717 - DNA, 542 bp, Homo sapiens
attgtataatgccagggagaaacgtgactgtgttttgaaattaagtgaagtttagaggtatgtgtgtgggttctaagctgacaagaagtcacctgtggtggctattggaatgtctcaacttcagctagtctgagctacatttctcagacttctcttaccgctatgtttccagttaatagtggttagcaagacatttttgtgcaaaatctggagaacagcagttaatcagcggtcatatattgctaactctaggaatgttgaggtagtgtcactgtgwacttttgtagttcatacatctataatctgctgttaagctcattcagagattattttacttcagattttcttagctctaaaattttcatagcttctgtttctctgctgaggttttgtatttgtgtactttttataaacattttcatttacatttttggatatagctgaaatagcttcttaaaaacctcttttaaaaattattttatctgtgtcatctttggatcagttcctactgattgccatatcttgactaggggtcacatttt

SEQ ID NO: 53718 - DNA, 542 bp, Homo sapiens
attgtataatgccagggagaaacgtgactgtgttttgaaattaagtgaagtttagaggtatgtgtgtgggttctaagctgacaagaagtcacctgtggtggctattggaatgtctcaacttcagctagtctgagctacatttctcagacttctcttaccgctatgtttccagttaatagtggttagcaagacatttttgtgcaaaatctggagaacagcagttaatcagcggtcatatattgctaactctaggaatgttgaggtagtgtcactgtgaacttttgtagttcatrcatctataatctgctgttaagctcattcagagattattttacttcagattttcttagctctaaaattttcatagcttctgtttctctgctgaggttttgtatttgtgtactttttataaacattttcatttacatttttggatatagctgaaatagcttcttaaaaacctcttttaaaaattattttatctgtgtcatctttggatcagttcctactgattgccatatcttgactaggggtcacatttt

SEQ ID NO: 53719 - DNA, 596 bp, Homo sapiens
tttttatacccattgtttatttcatgtcattctctgaaatctaacactcaggatatttttttccctgctttttaagtcctatggttgcctagcaattaagatcttcccctatatggctttgctggttctgttaaatcttattctttatttcatctcaactttcactatcagatttagttaaatgtccttttctgwccgagcactcctgctattttacttacatggaagcttctcacatctctgtccccaaagttgtccctctgaaagtctggtctgttttgtaaggttcggtttaagatcaatctcttttatggggcctttatttactattccaggtgttggaaagtaaaataatgagcagtaacattgttgacaaaatatgtgattgcattcatgcccaaattgtattttagaaataggtagacttatttttaaaaatctgaagaggaaatgtgcagacacacaccctcccacaccccataaaagtgaaggaatattagaaatgcaaatttacaccaaccaataaatggaaagtaaatgtcagatgttttacaggtctgactgtattatagtttacctgcacttggaaggaaatc

SEQ ID NO: 53720 - DNA, 657 bp, Homo sapiens
gagacctcttctgccttttcattgtcatgtcctcagcaactaaagcagggctgacacatatatatgcatttaatgaaggcacgaacacacttgaattaatctatttgtgtcacaaaggcaaaatattaattttcttttacaaaacttatttatctacacatgcaaatatatttagctacacaattctactctaagtagaatrtaattctgaatattctttttagagcgcccaaacgtaaacacatccctttctgtcatgtatccccagcgctcaagctaaatctactactactacctctatggattgttcttcataaaatgttcacaaaagagacaggatctcagatgaacagacatctcccatccccactcatgcccctgctggcctccccacctggtcctgattgaagcactcctttctaatgtctgaggcaagtgggacttgaactggataaatctgcctgcctgctactcagagggggctgaggtatcagttccaaatccactgataaggaaattctctgatgataacagcaggcttgacattgatgaagcctccccatctggtatgtttaggggagcaatcatgaacaaggggtggcaaaatgtgttttcttggctcctggccaccaccatattgtgttaagattcctctct

SEQ ID NO: 53721 - DNA, 1957 bp, Homo sapiens
gaccacagttgtaacctgggactctcctggggaattgatgttacttaagatggtggtttgcaaactttaccacgcataaggattgctgaaggcaggggagttttctaggcagtatcctcagtagggttagggcctgaggattggcattctaacaagttcycaggtgctgttgcttcaggtccacagaccacactttgaggagcctaggttcacagaactcattcacagcatgttcttattgaaccttacagagagcccaaaagccatgaaaagttatcaatactgtcatgctaagctggagaaccgagactcagagaagttaagtgactagctcaaggacacccagctacaaggggagaagcccttgtttaaatccagagttgccaacttgcagcctctgcttggctcaccaggcccagcagcctctcagcttaggagcattttaagagctgagctgatccccctggctctgcagcaatgcctcgttctctgcaaatgtttctggcctggattaaacccagctctttttgcttcataaaaactacttcaagtcagccaagaggactgtaatttggtataagaaattactttggcaatgctttagtctatatttatacttaattaatattttaatgttttaatattttgatgtatgcataattttaatgttaaaataatcagatgtatatcatagaacactggtgctaggtattttctgttttacatcattgaaatggagctccattggcctggtgctcaacttccatacactaaatcctcaagtgtattttttcaggaatgcagtaggaggctgcctgtatcatttaacctctctatgcctcatctataaaatggggcagggaatagtgcttccataataggagaggtgtggagattaaatgaattaattcacattagcttaattagaggagagcctggaaaatattgagtgcccacaaagaaagctcttcctttttaaattctctgctggactcccttttattcttttgtcacttttataacttcccacccgtgaactctttccacacataggctgaattttcttccccactatattccttcaaatcttgcacacagtaggtgactaagacttacttatggaacgaacacaaaatttaaaatatttaggaatcccagaaactcatctttatactgcgaaaccataaaatccaaagcctgagtgatgggctatttcattgaggtcccacggaggttgttggaacagcccagattggccgtgacccagcctcagcatctctcttccagctgcatggaatgaagtctgggctccacagcactcactgttccagacatgagacctttccactgtgagttccactctgggcttggaaagcctggaatcaacagatccaatggggaatgaaagtgaatttggtgggtctcattcagccttgctggctgctgatggatttgggagggatgaacagtttcctctggatgcctggctatgaaaggaaaaagaaaagcaagaatctcattaggtgtgggaggttttgtggtttggtccaaaaccagaatcaaaagtgagaaccaatctcacacccaatggccaaagatttaggctttttaaaatgaaaattctcatttgtcagttgcttaataagcagagaaatttcatggtgctcagaggcggtgacaggaagagctttattgaatctcaccaggtctatgggttttggggtctctagcagaagtttgaacatatccctaaagaaagagccaattaaagaaggagaaggcataagctgagtacctctcagataatgagaaaaagcacctggctcaggagagtgttttagttagtgcttgctatgaaacaaaccacctgcaaacaaaggggcttcagcaactaccatttgtttatgattcaaggggtcagcaaattaggctgggctcagcaggtcagttcttcttt

SEQ ID NO: 53722 - DNA, 597 bp, Homo sapiens
tcccatcctactctggcctcgtgtgaacagaggtcctgcccgtggccttgttgtcccctggcagccgccctccacccaccccctgacttgctgtcacagctgccctggcatccatcctggccttcagccccacctccctggctccagagtcatccctggccacaggacggtctctgctctccagcccaacccgcctcctgctgggattacctggaggagctcaccccgtgcagaactgtttctccctggcaaattaatttgtcagcaccacaggtactaaaacagattagctaataggcaaaacctgcatagatttcactaaactgggtcttgatgcacccatgaygagcgtgaaatgggattatccctttaaagtgcttcatctttgtattcttgtcaaaagaggaggaaaaagacattttcttacaccctgaggaaacagactgggcattgatgtgtctgtatgtccattagataaattttcaatttgttctttaattataatctgttattgcttttggggggatataggggctaaaaatgtcaaaacgtacctttaataatttcacaaagtaagtttgtaatggtttctaaacc

SEQ ID NO: 53723 - DNA, 572 bp, Homo sapiens
cttccaggatgtccaaggccctaatttgcaaagtaagtctaaatgaattttcctacagtggtagttctgcaatttaacctctgtaaatgggatgggaagtttttgttccccagttgatgtattaaagcatgtcactggaactcagcagkgatgtgaccaggacaacgggggacatgatgaaattcctgacagagaatcttgtgagttagaaaacagtcacttgggtggccagatcattattcttctgtggccgtctgtgctcttccacctcttggaattttctgggagacattaatatatttacttccccattgcttgatgcttcctattgtgttcaccatgtggctctttcacaggaggatggacggtatgaaggcccaactttggctcacgctgtggagttgtttggtggcagacggtggagtgctcgaaaccccagccccggaacatcagcaaagaatgctgagaagcccaatatgcagagaaacaataccctgggcataagcactaccaagaaaaagaagaaaatcctcatgagggtagagtgttatttgtttattaagcattaaacc

SEQ ID NO: 53724 - DNA, 516 bp, Homo sapiens
tgcattccgaagtgcccctctgccctcacctctgaggatctgttcctgagttagcttcgctcagttctcttctgtgaggaggacgtctcactcgtgagggcttctcagttgtttatataaatagactttgcccaccccagattacsaggcacacctgcacatgttcaaatctgacgccactgagccctcccttctgaactctgaccgagtgctcatgtatattgtatccctgcatgcctttgaactataataataattaaatagcacttggactatcacatgaggtaaatgacaacagacagaatgaggcaaggaggggaactgaaaggtgagatgttttctgaggtcaacttgcctttcgagttcaaatgaataaaccagaatgcccatttctcttgctgtaggaaagctagcggccctgcagtctccccagggaaacacatacttttctcctcgggatatctggctccaaatttctgcactccctcagttcattccagttttggaacatcttgc

SEQ ID NO: 53725 - DNA, 516 bp, Homo sapiens
tgcattccgaagtgcccctctgccctcacctctgaggatctgttcctgagttagcttcgctcagttctcttctgtgaggaggacgtctcactcgtgagggcttctcagttgtttatataaatagactttgcccaccccagattaccaggcacacctgcacwtgttcaaatctgacgccactgagccctcccttctgaactctgaccgagtgctcatgtatattgtatccctgcatgcctttgaactataataataattaaatagcacttggactatcacatgaggtaaatgacaacagacagaatgaggcaaggaggggaactgaaaggtgagatgttttctgaggtcaacttgcctttcgagttcaaatgaataaaccagaatgcccatttctcttgctgtaggaaagctagcggccctgcagtctccccagggaaacacatacttttctcctcgggatatctggctccaaatttctgcactccctcagttcattccagttttggaacatcttgc

SEQ ID NO: 53726 - DNA, 605 bp, Homo sapiens
ggataactcacccagtgctaccatgggtaaggacgaggcctatggggctcttatatggaaaagtgtggagtcaagtgaatctagatttgaattctgactccaccatttactggctgcaaaaacatgggtaaacggttctctcctctcagactcagtttcttgatctataatatgtagtaatgcctatctggacacatggttgtagtcataattaaatgatgcattatgtgtaaagcataaaagacagtacctagctcatagcaagtactcaataatattgttcctccccttttgaggtttgccctttttcctctgtattctcactcagcaggtcaattggtgctacttacctcaggacaggagaagccaaggcagcacttaacagaagcttcttgacttttttaagcttcagtttgtcagctgtaaaatggggataacaatacatctttcttaaaagtgtgaggatttaataagggaatgcrtgtggaacacttagcacagtccccagaattcagaaagtatatgttcttttagttctcatcgtagcattattattaattagattaggtgatagtataagactatcaaaacactcaagaaaacat

SEQ ID NO: 53727 - DNA, 605 bp, Homo sapiens
ggataactcacccagtgctaccatgggtaaggacgaggcctatggggctcttatatggaaaagtgtggagtcaagtgaatctagatttgaattctgactccaccatttactggctgcaaaaacatgggtaaacggttctctcctctcagactcagtttcttgatctataatatgtagtaatgcctatctggacacatggttgtagtcataattaaatgatgcattatgtgtaaagcataaaagacagtacctagctcatagcaagtactcaataatattgttcctccccttttgaggtttgccctttttcctctgtattctcactcagcaggtcaattggtgctacttacctcaggacaggagaagccaaggcagcacttaacagaagcttcttgacttttttaagcttcagtttgtcagctgtaaaatggggataacaatacatctttcttaaaagtgtgaggatttaataagggaatgcatgtggaacacttagcacagtccccagaattcagaaagtatatgttcttttagttctcatcgtagcattrttattaattagattaggtgatagtataagactatcaaaacactcaagaaaacat

SEQ ID NO: 53728 - DNA, 322 bp, Homo sapiens
tgaggactttcttggccgggcagcggtccccacmttttttatgagtaatgattgttacaggatctcctgggggtggagctgggtgaggaatttagtccttcccagttccctgaatataaccaggcatttgcaatgctgtggagttatgggaagatgttcccagaggcaaccaccccactgctaaaccctgagcacgggctttagattaaactggccgggatgaatcctggcgctgctcttactggctaagtagctttaggccagttactgacttctataagcctgttgcctcatctgaaaagtgaaggtaataatacctacc

SEQ ID NO: 53729 - DNA, 517 bp, Homo sapiens
caccttcctggaagaagagtggagtgcagtttcctagtgggaaggcaaacggcttcctgacatttgtgctcttccctgggcttcgtcattgtgtgacctgcataatgtccttaaacatgcccttctgacttccacctgcactacacgacgtcccagcgtggactgtgccggctcattcatcaggaatggtatttaatcagggctgcaagtcaaccagaggagactcattaaagtcaccgcaggacggaaactcaggctcccagccgtggccttaccctgaggttgcttttcctttcacctgccaattactttcatccacctcccaccttccggttcccatgctaagcccagattaagctggttcactsgtaggagggaagaccttgaaggaagctccactggcatggctgggaatcagggcaggtgcccgtgctcagggtcactgctgaatggccatcagcgaggcagctggcaatggctactggaggaaagtctctcccactggagacacagtcac

SEQ ID NO: 53730 - DNA, 593 bp, Homo sapiens
ggacaaaagttgaggtggctggaaccgtgttaggtgagtgtaagattgtgcaagtgggagagggagagggctgatggcgtgtgctgggtagtggcgagtgcatgcacgtgtgtgtgtatgcatggggtggtgagggtttggggaagagcctgaagcttcccccatctccagagaatccgaaatcctaggtaaaacagccaagtctaaggacactgacagggcacgacstagcctcagttagacccctcctattccattctgagcccacacacccaattcttcatcctctgccttgcctgggagggaacagggtatccagatcccaaggcatcaaccccaaaggctggggaatggaatggggtgaggaggaggtactcacagtttcctgcatggggtggctgaggggtttctcgagggcggccatgttgttgggcatgtccggggggtgggagagctgggggggcccgtgcatgaagtcattcatggatgtccctccagggttcccgtgggggaagtcaaagttgccatggccttggtagttgttgcctaggaagggatgagatggggaggggagggggtcacccagagggata

SEQ ID NO: 53731 - DNA, 555 bp, Homo sapiens
cttgaaccgcttggaggggatgccatcagggtcgtccttgatgtgtaagtccgacttgatgggcaccggccgccagctgcacgtgggatcgatggtgacctcttcaactcggagctgggggaggaagggtggcagagctgaggctccggggtgcctggctttgggcataaaagcacctccagctccgacagacaccmaggtgaccttgttgaggcccctgctcccactctcaccacactgtggacgaggcggaagcctggcagggatttctctatatatctttgacatatggggagactgaggctagaaaagcaagtggctgggcacagggcagctggcctcaagggctccctcgtggggagcagcaggtggagggtcggggcggggcactgtcagcctcctgctgtggctggctttcatgctttctgggaagttcatttgtccccagatccagaggcccccaagggtaagggacagagaggtgggggatgtgggtcacggtctgctggctgggaggggagggctgtgtcagggctatccacctgctcaccttgc

SEQ ID NO: 53732 - DNA, 555 bp, Homo sapiens
cttgaaccgcttggaggggatgccatcagggtcgtccttgatgtgtaagtccgacttgatgggcaccggccgccagctgcacgtgggatcgatggtgacctcttcaactcggagctgggggaggaagggtggcagagctgaggctccggggtgcctggctttgggcataaaagcacctccagctccgacagacaccaaggtgaccttgttgaggcccctgctcccactctcaccacactgtggacgaggcggaagcctggcagggatttctctatatatctttgacatatggggagactgaggctagaaaagcaagtggctgggcacagggcagctggcctcaagggctccctcgtggggagcagcaggtggagggtcggggcggggcactgtcagcctcctgctgtggctggctttcatgctttctgggaagttcatttgtccccagatccagaggcccccragggtaagggacagagaggtgggggatgtgggtcacggtctgctggctgggaggggagggctgtgtcagggctatccacctgctcaccttgc

SEQ ID NO: 53733 - DNA, 607 bp, Homo sapiens
atccattataattagttctgaaggaagctaattatatccagcataattagttctgaaagaaatcactgaagactaaactgtagacatgatgtcctgttgggtacttcttcaaaaatacataaccatcatacagccctccaaatcagtaagtcaacattgatatattaagttctttatatcattatggatttytgatttttgcagtaggttatatttttaaagtatttttataattttgataatcagattatcctggatttggccagtcagggagtatattcagggtggtgcctatatccttttgaaatacctgtcattcttttaagcacttccatactgtctggcacagtaagattgttattttgtgctttctgggctccagccctcgagtcagctatttcttcaaggagctcttattccttttagtagagtatggtagttagaaacgagacttgagtatgcttgttgctactgaggtgtaattgcttctagcttctttcaacaggcagaactaggaaatatatttacatacatgcatacctacatacacacaccaaaaaacacataaacatcgatatatgtatatatttttaaaaactatgttcat

SEQ ID NO: 53734 - DNA, 651 bp, Homo sapiens
ttggtctaagtaggtgagttgaagtcatttgaaagctgtgtttgcgtgcagttacatagcagagtctctcctgcgtaagtacggttcccctgcagttttatgtgggagtatggctacatttagtacataaaattcacaaagttatccrgttcagttcataaatgaccaggagaagctattctaaatccctgtgggattgatttttcacatccaaagatttgatcttttaaaattcagctgaatctaactcctagagttgtgtagagaggtttttaggaaacctacagaaccctgcatgaacaaaagcttttaacttctagtttccaacattgatcacacttagacaccaagccatttcactagcatatcagaagttgctgttattagatgttcattcccaactgttaatgcatatctaaaagtcttcctgaaaaacaaataatgtagagatgagagcatgtcctctaacatttccaaagcattgcttctagcaaacaacgctttttcacctcacagtttaagccaaaatttcttagcttcagcacaactgatattttagactgtgtaattatttgttccaggggagtagaggctgtcctgtgcatggtaagatatttagcagcacccctgacctctactcaccagacgcca

SEQ ID NO: 53735 - DNA, 651 bp, Homo sapiens
ttggtctaagtaggtgagttgaagtcatttgaaagctgtgtttgcgtgcagttacatagcagagtctctcctgcgtaagtacggttcccctgcagttttatgtgggagtatggctacatttagtacataaaattcacaaagttatccggttcagttcataaatgaccaggagaagctattctaaatccctgtgggattgatttttcacatccaaagatttgatcttttaaaattcagctgaatctaactcctagagttgtgtagagaggtttttaggaaacctacagaaccctgcatgaacaaaagcttttaacttctartttccaacattgatcacacttagacaccaagccatttcactagcatatcagaagttgctgttattagatgttcattcccaactgttaatgcatatctaaaagtcttcctgaaaaacaaataatgtagagatgagagcatgtcctctaacatttccaaagcattgcttctagcaaacaacgctttttcacctcacagtttaagccaaaatttcttagcttcagcacaactgatattttagactgtgtaattatttgttccaggggagtagaggctgtcctgtgcatggtaagatatttagcagcacccctgacctctactcaccagacgcca

SEQ ID NO: 53736 - DNA, 651 bp, Homo sapiens
ttggtctaagtaggtgagttgaagtcatttgaaagctgtgtttgcgtgcagttacatagcagagtctctcctgcgtaagtacggttcccctgcagttttatgtgggagtatggctacatttagtacataaaattcacaaagttatccggttcagttcataaatgaccaggagaagctattctaaatccctgtgggattgatttttcacatccaaagatttgatcttttaaaattcagctgaatctaactcctagagttgtgtagagaggtttttaggaaacctacagaaccctgcatgaacaaaagcttttaacttctagtttccaacaytgatcacacttagacaccaagccatttcactagcatatcagaagttgctgttattagatgttcattcccaactgttaatgcatatctaaaagtcttcctgaaaaacaaataatgtagagatgagagcatgtcctctaacatttccaaagcattgcttctagcaaacaacgctttttcacctcacagtttaagccaaaatttcttagcttcagcacaactgatattttagactgtgtaattatttgttccaggggagtagaggctgtcctgtgcatggtaagatatttagcagcacccctgacctctactcaccagacgcca

SEQ ID NO: 53737 - DNA, 589 bp, Homo sapiens
cctcctttgtagtctttataatagctaccatttctttccttcagttataaaaggatcagttctcaaaatatgttcatgcaaaataaaagggaagtggggaactgaaccttctttttctggtgataaaatatttctggatactaagttataaagtagcttgataattgttgtgaaatcaggaatacattcattgatctttgtctctgtttctggcaccaggttcctaaaactcatggaatttcctaagtggtaagagagtcttttgttattcataaggagtctctttcaatcacacctaagtttatgctaatgaggtgacttagggcgggaatcctaggtagcatcaaggtggtgctagycactagaaagaccaaaccattagagagaagtgaaactgctcctataaactttacagaattaatcagggaagaagggagggagagaaagaaaacaaaccaagcttgcagcacactaagcattaatcactaggccagctggctcactgacctgcttcctcatggttgtttggtgactgtttcatcagaatcatgtagaccctgtcacaggatcatagttccccttgactgct

SEQ ID NO: 53738 - DNA, 554 bp, Homo sapiens
ttatgacctaggaagctatcctaaagaaacaatccaaaatagtgaaaaattcacaaaaatatttgtatcaagtcactaattgtaagtggaatcatatgtcacaaaccatatgttatatyatgttatcaaattcaaactattaaattatgggatatacatctagaggaatacagtttgccattgtctgtcataggaaaatgctcatgatatggcagcttgtaaaaataaactgtataaaaaaaatacacagaaaagaaatatgccggccgggtgcgggagctcacgcctgtaatcccagcactttgggaggctgaggcgggtggatcacaaggtcagaagatcgagaccatcatggctaacatggtgaaactccatctccactaaaaatacaaaaaattagccgggcatggtggcaggcgcctgtagtcccagctactcaggaggctgaggcaggagaatggcatgaacccaggaggcggagcttgcagtgacccaagactgcaccactgcactccagcctgggtgacagagcgagactccatctcaaaaaaaaa

SEQ ID NO: 53739 - DNA, 560 bp, Homo sapiens
caacccacccgtcaagttcccacattccctgccatccgtttttattcctgtgttctccttcatcagtgaacatcatcaccttttacacaaatcagaaacctgggttctgtactccacctctccctattccttgcctaccactccatccccacttcccaatccaatccatccaagtccatccttggccacctgcttccctagacactcatcaccattatcctggttcaggccactgtcaccttgcacctgcattatttcawcattctcctaactgaactcctacccacagcattaccctactgatatgtcaacccaatatgtcactctctggtatgttgtaaagactttcatggtctgatcttggtttacttctccagcttcacattttggcaatacccatctcacaggcactatcagttatgcttatatcctccaatatgggtgcctttcaattagctctagatcttacaaatattcttccctctgcctgaaagattattccatccccacgccctcagccaacttttctcactcattcttccttcagatatcagcacaga

SEQ ID NO: 53740 - DNA, 554 bp, Homo sapiens
acatgtgccatggtggtttgctgcacccatcaacctgtcatctacattaagtatttctcctaatgctatccctccccttgccccagccccctgacaggccctggtatgtgatgttcccctccctgtgtccatgtgttctcattgttcagttcccacttaygagtgagaacatgtgatgtttggttttctgttcctgtgttagtttgttgagaatgatagtttccagcttcatccatgtccctgcaaaggacatgaacacattctttttttatggctgcatagtattccatggtatatgtgccgcattttctttatccagtgtatcattgatgggcatttgggttggttccaagttgttgctattgtggtataagtttttgtgtatattttaaatctattttccttgcaggcaagccattattttcttctttttttacttttttatccattgctttaattgaatatttataagagggcactgtgctggagatgtgaggataaattctcaagaaaatttaaaatgtgggtagagagtaatagatgcttacatctga

SEQ ID NO: 53741 - DNA, 637 bp, Homo sapiens
gagatgtaggcgggaccatctctccaggagaccccagtagggaatggtttagctgtggcctctgcagggcactgcctggagtaagggagtgctgagcccctctagggaaggaggagcaaacaacagatccctgggtcagctgctgacacactcctatgcacgcggcatctagttctagcacctcctctctggcactgcctggctccccacccagccagtcagctcttagaggcagaagcccagtgtatcccaaaggtgcctggctcagtgctgggccccgattaaatgatgaagtggcctggggaggtagaaagagccccaggctgtgagttgagtgatctgggttgaggtcttgactctatgcagcgctccggctttggacaactctgggcttccttctgctcctctggccagtaagcttctttagcagtggaaacttttcctcaaatgaaattccaagtgaggggccaataaatgaagcagataaaactgcatgtactgtgtttgcccactcccacaccttcctgctacctgtcccwtctctgaggaccctcaagactcctaggagcacagtctgatgttctcctgacatggatatcctctgactaattgcctgcttccctgaatatctcgaggc

SEQ ID NO: 53742 - DNA, 605 bp, Homo sapiens
tgtcatacattactgcaagttccctgaggaagtttactgatctgtagttttacgagaaatgcacgtcatggaggtggcgtgggggagcgggtgaacaaggaaactttagttgctataaaacaggagctgagagctcaagcaggttggttatgttctgccagatggagataaaactgtggcagccacatcctgtgactagaaattgtttaagtaggcagacctgttggaggactaaagaacattaggcaaggagattaaattagtgtaggaaaaaaaatcagttttgtttaaaacgaaatatctacttgtgttaatagaacattctaactccaccataggatggaatcaagaggttttttttttaatacatatagtgtatatatataaatatatatatacacacacacacactgtatgtattcctatgtagattaaatattttgatttacctctttctagtaaagcaaagttcattctgaaatccaaaatattcacttactagagcagaaaaaaattagctgtgcatttatgctgatcacagtgtagataattaatctttaagaaagtaggtttttmtgtttatagttgataaagtgttagtggca

SEQ ID NO: 53743 - DNA, 552 bp, Homo sapiens
aagagaagtcagaaaattattgagaacattcttagcgtcaatactcttggtaatgtcaggccttaaaaatgtagaaatatggaaacattttggctgaaggtatggctcagtgcttttaaatattcagtttgtataaaccgaagtcaattactgactaatactttatgtgtctcttatgtgctcctaccatcattcccacagactgcttctgaaagcaggagtgctatttttttaatgaaatttggaccgttaatcaatcaaatgtgaaataaaatactgattctacagatcctagacttgcatttcatttttggtttgtagacttttccataataaaattttacacattaaataaataacaaggctgccagtattgcatataactacactatggtctttttgagaatttataatagagctacatcacatgtgcttcattttattttttgagacaaggtctcactctgtccccaggctggaatgcagtgctatgatcatagctcactgcaacccaaaagtcctggactcaagcartcctcctgcctcagcctc

SEQ ID NO: 53744 - DNA, 562 bp, Homo sapiens
tgcccatttcctgaggcactactctgggcatcttcctgtggttttaatacattaatgaccatctttattcttttttttatgagaatttgaccaaaattgagcccttgtgacaatattcacatctgagctaatttgacttaattttccaagttggcttcatgaagcacagtagcaaagtgctttattaaaatctggataatcaaattagcctattcatctactaaccgtgtgcttgtatcacatgattaaattcattttttatagtaaactcctatcaattataccagagtagatgaagtcaatgatcataaacattttgcttccctrtgttttccatgctaggtagaattttaaggttagctttgggcatgtagcctaaaatacaaactgcaaatttaacctctgttgaggtgatatttatattgaagggctcacagtagaaatctagaatattagaaacattattttaaaaggtacctctctgctttaaaagaaaaggtctttcaaactcactgggctacataagataccctccaaagttataacatgcgttaattttact

SEQ ID NO: 53745 - DNA, 904 bp, Homo sapiens
gtcttgtcaaaagaaatgtagtggagacagtactttcaccattgtccagaggtaatgaggccactgtactccctataatatcagtagaggccattgggaaatagtaacaaagcattcctactcttcccaggcaggatgatattagtggagactcggctgaagaggagaactgagtgaacccagaaggcggaggttgcagtgagccaagatcgcaccactgcactccagccttggtgacagagcaaaactctgkctcaaaagaaaaaaaaaaaaagaagaaaagaaaataagagaaaacatttttattttacaggattttagttaaaatggctgtcaaaataacactcaaatatgaaaccacattcaaagagcctatattgattcacaccatttaaaagcttaggcgtgtattggcagtaatacattaagcacagaaaggtgcataaatatgtgtagaatcaagcatatgaaatcaaaaacaagaaagaaaataaaatttagaatcagaagttgaattataggtcatccaccctaaattcttgcttataacaattacagggtcactagaacatggcaaatctcaacattactgtcacgtagctgtgagcctttagataagatgattcattccgaaaagcttccaatttgtttcctgcagaataaagacaacgattcccatttcataaaacaatgtataaataatatatgaaaaacatgtataacattatgtctgacatattggaaatactgaagaaatggtagacatttcattataaattctttttctttttcctctgctaccctttccaccaaaagtctgtacttcaagttccatagcgtgcatttgacattgaaaagtgcaagctgctctcccagtaaccactttcttgacccgattcttatc

SEQ ID NO: 53746 - DNA, 904 bp, Homo sapiens
gtcttgtcaaaagaaatgtagtggagacagtactttcaccattgtccagaggtaatgaggccactgtactccctataatatcagtagaggccattgggaaatagtaacaaagcattcctactcttcccaggcaggatgatattagtggagactcggctgaagaggagaactgagtgaacccagaaggcggaggttgcagtgagccaagatcgcaccactgcactccagccttggtgacagagcaaaactctggctcaaaagaaaaaaaaaaaaagaagaaaagaaaataagagaaaacatttttattttacaggattttagttaaaatggctgtcaaaataacactcaaatatgaaaccrcattcaaagagcctatattgattcacaccatttaaaagcttaggcgtgtattggcagtaatacattaagcacagaaaggtgcataaatatgtgtagaatcaagcatatgaaatcaaaaacaagaaagaaaataaaatttagaatcagaagttgaattataggtcatccaccctaaattcttgcttataacaattacagggtcactagaacatggcaaatctcaacattactgtcacgtagctgtgagcctttagataagatgattcattccgaaaagcttccaatttgtttcctgcagaataaagacaacgattcccatttcataaaacaatgtataaataatatatgaaaaacatgtataacattatgtctgacatattggaaatactgaagaaatggtagacatttcattataaattctttttctttttcctctgctaccctttccaccaaaagtctgtacttcaagttccatagcgtgcatttgacattgaaaagtgcaagctgctctcccagtaaccactttcttgacccgattcttatc

SEQ ID NO: 53747 - DNA, 698 bp, Homo sapiens
  misc_feature (1)...(698): n = A,T,C or G
tttgcaaataaagctgtctaaaacaaattctataactcaatttctagttttgttgtaaaccacatattagttaatagcatagcacacctgatttgacttggcattttcaaaaytgatttattgcactctgcaaaaccaattagctctaatcttgcaaatgcaataggtttctcttgccatgattattattatgcaacctatagatacgttatatcatctcttggtttatgtaattgtgatttgccactcatttccaagagaaaacctatccctaaagcaataggttctgccattttctattaacaataaagtgctatgtattatctaacagcacccaggttacaaagaggggtctatacaaaccaccatactccaaatccaaaagtaattcctggggaggaactgatgtgtctttaatgttttgcagtcattgtcttagaatttaaacacaagtagcctcaagtttgtggtttgcttctattgcctacggatagctgcaaagaacaggctaaacataaggnnnnnnnnnnnnnnnnnnnnnnnnnnnnnnnnnnnnnnnnnnnnnnnnnnnnnnnnnnnnnnnnnnnnnnnnnnnnnnnnnnnnnnnnnnnnnnnnnnnnaatatgctgaataattaagtagggttggtgacaacttaggctgtattaaggtaatgatatctctttctgttttcttta

SEQ ID NO: 53748 - DNA, 1176 bp, Homo sapiens
tactttgcaaatcatgagtgggaagcctgacactacccctgcaaggaggcgagggacctggcccagcacctcacctggaggctggagtttctctctcagccagtaaaaatgtgtgacacttggaaaagacaaagcaggcattgaccacccctcgcccccgtttataagcctctcctccgtttataagcactccctttatggggccacttggagaagagcccacagagactgagctttcagtccccctttcctccatattcaaatatctatcatccagtgggatttacgagatgtgcacatgggggaggctgggcatttgtgacgatcagaggagtggcgatcagagaagggcatcgccatattaaagtcaattctgcatatcctcagatgccaaccattcctagctccctgtcacagtttaagatacgaattgactgactggatttctccatttctcacaaaccccttaatcctacacctctcttggccattgcgacagtaaagccaagccactcagcaaagtcttctcttgtctgttagactgagaccaatagaactgtctaaaagcatcaacaaaggcttaactttggatactcttctattttccagcacttgtcagtagagaagactttttagtttagggataaatatatatttttttcagtgctcggaactatccatgtataagcactgcaatcaatacctcacaaagcgactcgagtactaaaaggtgtctttacagcaggaggaaaataagcatagtgaactgatgctttcctgttgacatagttcagaagtattgtaaatacagaactcactccttcagtctgatgttcatctttgtcccatttaactcccaaattaaactcaactatagttacaaattaaacactaaaaatcagttaattgtgttctttaaaatgcatacacacataatggaataataaagwatatttttcatgaaatactacacaaattttcagatcttgctcattagttatgtttgactttgtactactaccatgatataagcatgattttctgaacatttcatatgaatggaagtttaatttttaatcataaatatataaaataatatggcatttgaattccatttttctgaaggatgtgttttactcttttactcttttctgtatgtatcaaaaatactgacac

SEQ ID NO: 53749 - DNA, 1176 bp, Homo sapiens
tactttgcaaatcatgagtgggaagcctgacactacccctgcaaggaggcgagggacctggcccagcacctcacctggaggctggagtttctctctcagccagtaaaaatgtgtgacacttggaaaagacaaagcaggcattgaccacccctcgcccccgtttataagcctctcctccgtttataagcactccctttatggggccacttggagaagagcccacagagactgagctttcagtccccctttcctccatattcaaatatctatcatccagtgggatttacgagatgtgcacatgggggaggctgggcatttgtgacgatcagaggagtggcgatcagagaagggcatcgccatattaaagtcaattctgcatatcctcagatgccaaccattcctagctccctgtcacagtttaagatacgaattgactgactggatttctccatttctcacaaaccccttaatcctacacctctcttggccattgcgacagtaaagccaagccactcagcaaagtcttctcttgtctgttagactgagaccaatagaactgtctaaaagcatcaacaaaggcttaactttggatactcttctattttccagcacttgtcagtagagaagactttttagtttagggataaatatatatttttttcagtgctcggaactatccatgtataagcactgcaatcaatacctcacaaagcgactcgagtactaaaaggtgtctttacagcaggaggaaaataagcatagtgaactgatgctttcctgttgacatagttcagaagtattgtaaatacagaactcactccttcagtctgatgttcatctttgtcccatttaactcccaaattaaactcaactatagttacaaattaaacactaaaaatcagttaattgtgttctttaaaatgcatacacacataatggaataataaagtatatttttcatgaaatactacacaaattttcagatcttgctcattagttatgtttgactttrtactactaccatgatataagcatgattttctgaacatttcatatgaatggaagtttaatttttaatcataaatatataaaataatatggcatttgaattccatttttctgaaggatgtgttttactcttttactcttttctgtatgtatcaaaaatactgacac

SEQ ID NO: 53750 - DNA, 1176 bp, Homo sapiens
tactttgcaaatcatgagtgggaagcctgacactacccctgcaaggaggcgagggacctggcccagcacctcacctggaggctggagtttctctctcagccagtaaaaatgtgtgacacttggaaaagacaaagcaggcattgaccacccctcgcccccgtttataagcctctcctccgtttataagcactccctttatggggccacttggagaagagcccacagagactgagctttcagtccccctttcctccatattcaaatatctatcatccagtgggatttacgagatgtgcacatgggggaggctgggcatttgtgacgatcagaggagtggcgatcagagaagggcatcgccatattaaagtcaattctgcatatcctcagatgccaaccattcctagctccctgtcacagtttaagatacgaattgactgactggatttctccatttctcacaaaccccttaatcctacacctctcttggccattgcgacagtaaagccaagccactcagcaaagtcttctcttgtctgttagactgagaccaatagaactgtctaaaagcatcaacaaaggcttaactttggatactcttctattttccagcacttgtcagtagagaagactttttagtttagggataaatatatatttttttcagtgctcggaactatccatgtataagcactgcaatcaatacctcacaaagcgactcgagtactaaaaggtgtctttacagcaggaggaaaataagcatagtgaactgatgctttcctgttgacatagttcagaagtattgtaaatacagaactcactccttcagtctgatgttcatctttgtcccatttaactcccaaattaaactcaactatagttacaaattaaacactaaaaatcagttaattgtgttctttaaaatgcatacacacataatggaataataaagtatatttttcatgaaatactacacaaattttcagatcttgctcattagttatgtttgactttgtactactaccatgatataagcatgattttctgaacatttcatatgaatggaagtttaatttttaatcataaatatataaaataatatggcatttgaattccatttttctgaaggrtgtgttttactcttttactcttttctgtatgtatcaaaaatactgacac

SEQ ID NO: 53751 - DNA, 536 bp, Homo sapiens
tttaattttggaaaccctgaagctgagtttacctcaaacccatcacaagggtaattatctcaaagtacagaaaaaattaaaatgttcatgttgtttcttattccactgtcatgtatatgagaccatcagtttagactatactattgagctttagaaacattataccaggtcttgcaaaatgagacgatatattggtttccaaggtttctctagcgacttgtgtctcaggccccagactctagctaggaactagcacaccagataggaatctcaggagagaggattaaacggacactggttctaaataatacagactcaataccgtttcttctaggtgaggctcttaaactttctcactgacccatgcattgtgatttcacagctgggatggcattcttgagccgaagctgatgtgagattccggattttgaacatcttggtggggagacagccccawccttccttccaggttgcagatttgctacagtatctccagacccaagttggctcagactggaatggcaggatcaggtttg

SEQ ID NO: 53752 - DNA, 602 bp, Homo sapiens
tgttgagccgaatcaacagattccctgggttctccctcagttttttaagaaacataaactgaaaaaccagtctgtgctataacgtgtcacaggtgacttaataaagctaagtacagcatacagtaaagatactgtatggaaaagagggtcacctgcggggagggaaaaggcttcataaaggagatgtctctggaaagatgttcacttgtttgcttcatagacttcgaaagcaattctttctaggcagagagaaggtacaagaaaaggttctgaggcatgaaacatgcaggcaagttcatagaactccatctaatcagctccattaggctgtagtgtagattgaaatgaagcgataagagatgtggctggagaaactgaaaagggaccacagaaagaagagcattgaatgccaggctgagtttagcctatgtggcaatgtttcccaagtgtattttcaagataccccaacacacacaaatacacacacacacacacacacacacacacacacacayacacgttaaaaagtcaggctcccgggacctaatctcctctctagaataaaagcttctagaggtagaaccctgtatcttaggtcattc

SEQ ID NO: 53753 - DNA, 1240 bp, Homo sapiens
tgccctgcagtcacttaagctgaggagagatcgctataaattcaggtctgcataccctaatttatttcttatttattttgctgatacatatctagggcctccagtgagctgcttctacacctgcacaaaggcacctgcagccctaagtgcaactagggcaggaaaggagaccttgaaataagccctggaagaaaaactggactctacacactagaatcatacaagtttaattcatttttctggtaaactggaattaaacccatgcccacactcaccccctatttgtgaaacacaggactgaaaatgttgttacatgtcctgttctgcttttctatcttagtaaagacagcattaaatgtacttcttccatgagtacaagattatttttctgagtcacagaatgtcaaaagataagcaaatattctaatactaagacataatcagaaagggaatgaagagaagaaaaaagtctgttcttgtaagtgattactaaggaccaaatgctatatgcaaggtgctgtcaaaggcagaagtaatggccattgcagtctttaaatggaaagcaatgtaagttggaagaaatgtcagccatccttccccaaagatctcttttcacagatggtcaaactgtggcccagggagagaacatgacttgtcagaagtcactcagcaagttggtcccaacgtgttccccttttagcctcatacttatttcmaaagtcagtttgagtccttcaagagccagagctgtcctacaagcttcacctgtgttgtttcctttagccctcccctcctccagttaattgtccttacagatacggacattaggacacagaaaggctgaacagtgccctcacattgctacattcctgctgaaaccaagcttgaaggctggacttagcctgtgcttttatgcaccatacctgaagcctttgtgaaccttcaagacgtctgcttttgtctccaaactgcactgactaggcccatacaggtagattcagaagggcaggaggcttcagcaggaaaaagctcctggctctaggatgaggcctgggcatgggttatatttattacatttattaacccaatctttatttttctcatttttttcttttttaacccacccaacagaaggttatacttttggcttttggctcttggactaaaacaggaaaggcagaaaggccattttattgaaggtcaaggttcagccttgctgagctgtagtgtctgatcattt

SEQ ID NO: 53754 - DNA, 1240 bp, Homo sapiens
tgccctgcagtcacttaagctgaggagagatcgctataaattcaggtctgcataccctaatttatttcttatttattttgctgatacatatctagggcctccagtgagctgcttctacacctgcacaaaggcacctgcagccctaagtgcaactagggcaggaaaggagaccttgaaataagccctggaagaaaaactggactctacacactagaatcatacaagtttaattcatttttctggtaaactggaattaaacccatgcccacactcaccccctatttgtgaaacacaggactgaaaatgttgttacatgtcctgttctgcttttctatcttagtaaagacagcattaaatgtacttcttccatgagtacaagattatttttctgagtcacagaatgtcaaaagataagcaaatattctaatactaagacataatcagaaagggaatgaagagaagaaaaaagtctgttcttgtaagtgattactaaggaccaaatgctatatgcaaggtgctgtcaaaggcagaagtaatggccattgcagtctttaaatggaaagcaatgtaagttggaagaaatgtcagccatccttccccaaagatctcttttcacagatggtcaaactgtggcccagggagagaacatgacttgtcagaagtcactcagcaagttggtcccaacgtgttccccttttagcctcatacttatttcaaaagtcagtttgagtccttcaagagccagagctgtcctacaagcttcacctgtgttgtttcctttagccctcccctcctccagttaattgtccttacagatayggacattaggacacagaaaggctgaacagtgccctcacattgctacattcctgctgaaaccaagcttgaaggctggacttagcctgtgcttttatgcaccatacctgaagcctttgtgaaccttcaagacgtctgcttttgtctccaaactgcactgactaggcccatacaggtagattcagaagggcaggaggcttcagcaggaaaaagctcctggctctaggatgaggcctgggcatgggttatatttattacatttattaacccaatctttatttttctcatttttttcttttttaacccacccaacagaaggttatacttttggcttttggctcttggactaaaacaggaaaggcagaaaggccattttattgaaggtcaaggttcagccttgctgagctgtagtgtctgatcattt

SEQ ID NO: 53755 - DNA, 542 bp, Homo sapiens
ttatagacaacctagtcctctgcttggccatatgcacagccctccccatagccctctggtccctaagtaaactccaaggagttcaaccttcaatggcctcagctagaacgctcttgtcagtgggtctggcacctgctatgtgctccttcagtggaaaatcatatactgtggagacagatggctattgattaaatttagttttccatcatttgatgaggctgagctcatcttctccatcccagctgatggagaagtagttccaatactcctgctttcagaagagaaaatgaggtactgggtttttatttcagtcctcccgctggcatttcttgtccacaaagattaacacccagagcccagccttcctcatccatcaccggacatcactgattaaaatgccttcccaccatgagaccccaccggccaactccccgctccccttcccatgccatcgtcctaaacaacatcaataataaaacatactcacaaaaattaatttacaaaaaccacaataacaaaaaaaaaaaggycagccctcttgg

SEQ ID NO: 53756 - DNA, 533 bp, Homo sapiens
cagcatacaggtggtcttgttgttataaagcagagtgttcctagtgagctaggagacctgatgtggaggacaagcccacccacattgcagggagaccgccacagacagaagctaatggccagccacatgaaaggcatgccattagggcaggttatgatggacrtaatgctccctggagttgtgaactgaagaagtcctgtagaatttagaacacatcaattgacctacagccagctaccaaaccacatcagagcctacggggctgcatctaggtctgcaaaggtccagaagttacagagactgctgctgcttgatggtgagtatgcagagagcggacctgagcagcggagaaagtaaccagagagctggaaccaagaaataaaagtaggaactggggaagaagagtcaatgagatgaaagaaaacaaaactgaagtaaagccagaaaccagaaatactgtaagactctggttcccaaactgtgcccccaggaaccttggggtgccacagtgaattcagaggaatgctactaga

SEQ ID NO: 53757 - DNA, 533 bp, Homo sapiens
cagcatacaggtggtcttgttgttataaagcagagtgttcctagtgagctaggagacctgatgtggaggacaagcccacccacattgcagggagaccgccacagacagaagctaatggccagccacatgaaaggcatgccattagggcaggttatgatggacgtaatgctccctggagttgtgaactgaagaagtcctgtagaatttagaacacatcaattgacctacagccagctaccaaaccacatcagagcctacggggctgcatctaggtctgcaaaggtccagaagttacagagactgctgctgcttgatggtgagtatgcagagagcggacctgagcagcggagaaagtaaccagagagctggaaccaagaaataaaagtaggaactggggaagaagagtcaatgagatgaaagaaaacaaaactgaagtaaagccagaaaccagaaatactgtaagrctctggttcccaaactgtgcccccaggaaccttggggtgccacagtgaattcagaggaatgctactaga

SEQ ID NO: 53758 - DNA, 541 bp, Homo sapiens
tggactagagatgccaaaacagtaaatgtaatattacaaaatctgaataaattttgaaatctgaaacacttctggttccaagtattttggataagggatactgaaatctgaagtactataatttggttggttagttwttttaaaagcaaaagtgggcttaatgttttggtgtgctttagcatttacataggtcaatttttttgtaagaacacatgaatgagttgtgtagaccaaatggttattttttgttttgaatattttttggtatggtatttaaacaaagcagtcaatatttcattaagtttaaaatccaaaacttttaaggatgttttagattataaatatcttatatattcttctttatacaaattttgattttatatttcttgttcagaatgcatttacagattattaaatttgtaatatttcttccaaaaatcaattataaataaggttgctgagagacatacagattttttagcatgaactgatagttttatttctttatttttgacctatatggcctttatattattttctt

SEQ ID NO: 53759 - DNA, 1716 bp, Homo sapiens
tgaaatttttagtttagaagaactaggttcctatccccccatctcacttccctggtataacagtactagtcaaataaattaatgtataatgtttgagaatataaacaacattattagctaatttttttgagagcttacactgtattagctctattctaagcatgtcaatcacttaatcctctcaaaaaccctatgtggcaggtactgtcataatccccaatgaacaggtaggagaaaaccaaagcttggaaaagtgaggctgcttgctcagtgttcctgattcagtgagaggcagatctgggtttgagtcacktgggtctggtttgagggcctaagctttgaattactgtgttccaaaatagctccttaaggcacgcatcactattgcatggaccagaagacagaggttcaggtatttctacagaactgctataggaatcaaaccgtatcatgcgtgctatctgtcaagagccagttcctatttctcttaaatcccatcctcctttctcctgccatgataagatctttagggtcaaagattgtattctacttatcttgggtcctcctccagcttagcctgctatccccatcagagcaaatgataattgtgtgtctaccacaggccaggctggatcgtgatgtatttcaacgttccaaagtcctcgaagcgtttgaggctggcaactaacagttaagtaagaatcacaagaatgattcaaattagtgtgaaaactgtcatgcattatagcacattataaacccatttcctaatggaagttgcagaggggctgccatgagagagatttaagtttgaagggcttaaaagcctgattatctctcagtgatgcctcagcactggggaagtggctgcctggtgtttctctctgtgatggagacctgtgtggtgtaatgaagcagcacagagctctgagatgatgcctggggtacagacagacatcccctgtgatccttccaacagtaagtctttgttggggctgcagaaaaagtgtcccagggtagctccaaattgcatctcttctcccagggagaggaggtgagctgtgcccttctacccagcaccacacccctcaccttccctatgggatccccactaacaaggggccaccaccgatatccagtggcactgaggactgcaggagcagcatgggaggagatgctttgggagaatatgaaggacaagaggttgcacatcactagcctttgcctgcttagaccttttgtttctagggaaaggtggaacagctcccattatcctttcagcttcatctaaatgacctccaccccacccccaccttgtcagaggacaaaggcgtggatcagatgtttgctgtgagctcctagcatccagggatctcatttcccccttaatggaaaagcagatctactcccccgataccgaataaaactccttagtctctgtgatgtccgctgccagctcagctctcccactctagatgctggataccatgaaaaaaacgatatacacacagtagatccttaatgtgcatgaagatgtcttgaaaccagagtaggagaccaggaggatgactgatacttgttgtgggcaataagtgagttgtttttagggaagggatttcaaaatttggaaactgtaagtaccttaatgcctttggaatgaactgcttagcacctatggtggctgagcaggagatgctgggatggtttacttatgaa

SEQ ID NO: 53760 - DNA, 581 bp, Homo sapiens
tttaccatgtaccttggctctccctacaaatgctcaattagtggctgtttctctcctgctagaaaccrgacaaaaataaaaggaaggcataatctgatgttcttcattttccaagtgggaattgccacggatatgcagcagccgaggcagaggggaggcgtagaaacctaaccccaatctgggaaaggaagttgacaaaactcagaggaaatggctcaaaccacatgtgagcacttgattgcttctttctcccacagcaggcagaggtattagcagtttagctctcctctcctcatgaccttgaaaatattgtttgccaggtaccgccataacatcttcattaacggtctggaacagggaggcaacgacatgttaattaaatttgcagatgatactaaattgggagatatagcaaacatcagggaggacagagatctaatacaagaagatgtcgggagttagaactgcgtgctggaaatggccaggtgggctgctggacatatgacaccaaggccccgaggacacaggatggaggatatgggtgacagggagggaccagccaagaagaaaaggtgcaactg

SEQ ID NO: 53761 - DNA, 581 bp, Homo sapiens
tttaccatgtaccttggctctccctacaaatgctcaattagtggctgtttctctcctgctagaaaccagacaaaaataaaaggaaggcataatctgatgttcttcattttccaagtgggaattgccacggatatgcagcagccgaggcagaggggaggcgtagaaacctaaccccaatctgggaaaggaagttgacaaaactcagaggaaatggctcaaaccacatgtgagcacttgattgcttctttctcccacagcaggcrgaggtattagcagtttagctctcctctcctcatgaccttgaaaatattgtttgccaggtaccgccataacatcttcattaacggtctggaacagggaggcaacgacatgttaattaaatttgcagatgatactaaattgggagatatagcaaacatcagggaggacagagatctaatacaagaagatgtcgggagttagaactgcgtgctggaaatggccaggtgggctgctggacatatgacaccaaggccccgaggacacaggatggaggatatgggtgacagggagggaccagccaagaagaaaaggtgcaactg

SEQ ID NO: 53762 - DNA, 581 bp, Homo sapiens
tttaccatgtaccttggctctccctacaaatgctcaattagtggctgtttctctcctgctagaaaccagacaaaaataaaaggaaggcataatctgatgttcttcattttccaagtgggaattgccacggatatgcagcagccgaggcagaggggaggcgtagaaacctaaccccaatctgggaaaggaagttgacaaaactcagaggaaatggctcaaaccacatgtgagcacttgattgcttctttctcccacagcaggcagaggtattagcagtttagctctcctctcctcatgaccttgaaaatattgtttgccaggtaccgccataacatcttcattaacggtctggaacagggaggcaacgacatgttaattaaatttgcagatgatactaaattgggagatatagcaaacatcagggaggacagagatctaatacaagaagatgtcgggagttagaactgcgtgctggaaatggccaggtggrctgctggacatatgacaccaaggccccgaggacacaggatggaggatatgggtgacagggagggaccagccaagaagaaaaggtgcaactg

SEQ ID NO: 53763 - DNA, 537 bp, Homo sapiens
cctggggactcggctgagttttacaatagcatccctgcggatttcccagtcaatatttccctgggggtttaaaatactcctagaaatgtcccgtcaccaacttgcttctgggtttcctttctatttatgggggcttatcgccaaagctgctgctataaaacttcaagaagagatcacataactttttttccaaggacggggtgtgggtgctaagagcagggtctatgcactggacttctatgggattttttttttttctgtttcttctgggaattgagcttgtggtaccagatctccttttaatcgagttttaatatttttatggcaatgatggatgcgtgtgaagagaaagcagattgctttggaagtgatgaattaattctaaggaaaggttggcctcttgtaagccaaagcctcttctttctcttcaaccccttcagggcaggcagcgctcctggctccctgacctgagggyaccaggcgctagaacaggaggcagggacagctgacacattttcataaatgattaaggaagtc

SEQ ID NO: 53764 - DNA, 550 bp, Homo sapiens
ttatggctagaattacattaaggttccattctaagtcctttcttattaaaattgtgagctgtcatcctgggattttacgcaacaaactatgaaaactaagcttatataaggataattaagttaaagtacacacttttaggtgtgactttcttaagactgagcyagagacaaagacaaatagccagattttggacctcctgctaattagaatggtagttctcaaactattttaaccaatatccatttaaacatggcaaataaccctaaaaatcacctggactattctcaatttccattggaaacattatttcataatagcaatgaaacattacctattgtacaaataaatttgggggaggaggttagagataaatgatatagatgatgctcatatgattcacaatacacatctgagatacactaattataagattagagggtggaccaggcacggtggtatacgcctgtaatcccaacactagtgaggctgaagcagagggtcgcttgagcccaactgtttgagaccagcctaggcaacatagtgagacct

SEQ ID NO: 53765 - DNA, 550 bp, Homo sapiens
ttatggctagaattacattaaggttccattctaagtcctttcttattaaaattgtgagctgtcatcctgggattttacgcaacaaactatgaaaactaagcttatataaggataattaagttaaagtacacacttttaggtgtgactttcttaagactgagccagagacaaagacaaatagccagattttggacctcctgctaattagaatggtagttctcaaactattttaaccaatatccatttaaacatggcaaataaccctaaaaatcacctggactattctcaatttccattggaaacattatttcataatagcaatgaaacattacytattgtacaaataaatttgggggaggaggttagagataaatgatatagatgatgctcatatgattcacaatacacatctgagatacactaattataagattagagggtggaccaggcacggtggtatacgcctgtaatcccaacactagtgaggctgaagcagagggtcgcttgagcccaactgtttgagaccagcctaggcaacatagtgagacct

SEQ ID NO: 53766 - DNA, 499 bp, Homo sapiens
ctcgccttcatcacatcttaccttgcttccaaagtgcctattatcttgggatcctcctattccaactgttggtagggcacagttatttccccctcttagtaggtttggcacttatctgcctgatttcttgttgtgatttaacctattttgtcatctggttatgaggagggaaggtaggattaaatacagatgttctgtatttaatagtaaatacagatgttctgtatgttctctggcaaaacagagacctctgcatcatytttaagcagtagcctttaaccaggaagggtaggccacttctgcaatcgcagcaaattcagagtatctaaagatttgagaattttaacacataaacttagatgtgcttaacccatttctcacctggacgtggcaggcttgctaagatggaaaatgcaacttcctctggagatttgttatgcagatgattaagcactgggttgacatctgctttccaaccatagaagacaaaaatcctttc

SEQ ID NO: 53767 - DNA, 579 bp, Homo sapiens
ttctactaattcaccagtaagctgataggcaacaacaaataatcagtatattgacataagactgttcccactcacctttatctatccctggcccctctatgtgcagagacagtcactgaaaccataaagccacatctgttggctgagtgatgtccctcaccatatgggtgttggaaagtatactgtaagtgaacttaacaggttcctggtagaggcggctgcgaagtattcaaaataatagttgctctggccatttccccaaaacactcacttgtcattctaagaacagatgctccactcaggtaaccagttcaatgatcagttagacaatcacgagtccggtggatcaatagatacatgtttagagctatgttgattccctctggaccccttattgaatatttatttcatattcagccctcatctcrtgcaaatcacagccaaacagtctttcatggtctggcatttcacaggaaagagagtatctttggaaacctaaagaataagactcagtggggaattttagcctctggctggtttataaaataaacacttcaacaaaactatttgcataataaa

SEQ ID NO: 53768 - DNA, 544 bp, Homo sapiens
ggcaaaaaagcaagaccctgtctcaaaaaaaacaaaaacaaaaaacagaagatgataaaaaaaaaaaaaagaaaccctcccgaaaacggcagaaagacagtcataaagggatgcaaagaaatttatacatatgggccaggcacagtggctcacgcctgtaatcccagcactttaggaggccgaggcgggcggatcacragttcaagagatcaagaccatcctggccaacatggtgaaaccccgtctctactaaaaatacaaaaattagctgggcatggtgacgcatgcctgtaatcccagctactcgggaggctgaggcagaagaatcgcttgaatccaggaggtggaggagggtcccttgagccaagattgcaccattgcactccagcctgggcgacagagggagactctgtctcaaaaagaaaaaaaaaagaaagaaagaaatttatacatatgaacccttagagctataaataggaaacttaaaatcttctacttatgtttgtgtgtgtgtgtatttttagtagggtggtctataactgac

SEQ ID NO: 53769 - DNA, 490 bp, Homo sapiens
tccgaatatttttcaccacatactaaacatttcattcattcgaccaatatttattgagcacctactatgtgccaggcattgttccaggctgtggggatacaagtagtgagcaagaccagccttctaacagaggagccagtcaaaacaaacatatacatagtttatataatttcatgtagtgatgctgctctgaggtggaaaaaggtaaatacattttaggaacaattgtgggaagaggagggtgattttcttttatcttttttccccaaagcatagtttcctgcttcatagtacttattaaccwatttcttctaaaggtagcatttcctcccgtcttcggtccttgattcctccagttttttttttttgccaaagtttattgattatctcttcaaagtgtccataaatacatctcctcctcacttttctagaatcccacagacgcccatcacctcatgcctagaatgttgcaatggcttcctaattggtc

SEQ ID NO: 53770 - DNA, 617 bp, Homo sapiens
attcttactacagttacttgagtaagagaagaaatttttaatgtaactatatcttttctcagcataagaatctctactatcttacgcctgtaatcccagcacattgggaggccaaggtgggcggatcatgaggtcaggagatcgagaccatcctggccaacatggtgaaaccccgtctctactataaatacaaaaattagctgggcgtggtggtgcccgcctgtagtcccagtgactcaggaggctgaggcaggagaaccgcttgaacctgggaggcagaggttgcagtgagccgagattgcaccactgcactccagcctggtgacagagcaagactgtctcagaaaaaaaaaaaaaaagactatctactatcccctgtctcttgccctytttagttttcccttctggcactggcattgaaacaaattcatgcagatctgtatgccttaagcagtgaaagtaatttgttcttttgccctgaacacgtcatgctaatcagaacttagtttcctcaataagtatggactaattataccagtgtgcactagagaaaatgcagaatacagcaagcggagccaacatttactctgattaaccaacactccttttgctctgtg

SEQ ID NO: 53771 - DNA, 1485 bp, Homo sapiens
ttttttttttgagacaaagtctggctctactacccaagctggagtgtagtggtgcgatcttgactcactgcaacctctgcctcctgggctcaagccatcctcccacctcagcctccagagtagctgggactrtaggcacgccctactgtgcttggcaaatttttgtattttttgtagagatggggttttgccaccttgcccaggctggtctcaagcttgtgagctcaagtgatctgcctgccttggcctcccaaagtgctgggattacaggtgtgagccaccttgcctggcctgattctccttttttgatagaggaaaacattggccctcagagaggttaagtgatttacctgaagtcactcagatggtgagcagcagagtcagatctggagcccaggcctgagaactcaggccagcatcaccctccacacccacatacggtgtccctggatcagtggtactgactcttgattcagagtccgaggggcctgtgcgagcatggcagagcctacgcacactcctcatcccccaccccaggaaatgtgctagttcatgacccttggggaaagaagggcttgccgatggcccctgatcagttcacccgggtctgcatcagcttaaggtcagcagggaggtgaggcaggataaagagctaggcagagattttgatccctttttcagatatctattgtcactgtctcccatcacagtgggttatggagaggtgtctgatcggatgttattttggatttgtggctgagtgtatgtaaacacttgtaagtatttttaacccattattataaaacatttcacaaaagtagagcaaacgatacaacaacccccccatgtactatcatccagctatgacaggtgtcagctgatgggcagtttccacattctggattctgctgattgcagccctgggtgtcctttaacattttgtccctagtcttatatttcctgtaaactagtagttagatctagaagctggattgggtttgattttttttttcttgtcaagaatacttactttacaggtggtggtgttatttccatcaggagcacacaatgttatggacactttaatgtttaacatagttaaaagtagatcagtgttgtcacacacgtctgaacaatgtgaaagccgactcacccaatagacactggaaatgaaaatggcttagtccggggtggggtcttaatggaagttagttgatgaattagataacacaggaatcacactgctcaggattggcctcctggagtaggaagactccagaactgggaacttgtcttaccttagcactgctacctgctcacccaggacaggatgtcaatatttggtaatatcctgggatagctttgagcaacatgtgatgggtgtgtcacaggaatcggggcctgttttcaaggaaacatccatagctccttttctacaagaagactctggaaagtgttgcaaggcctctggcttcaatattagat

SEQ ID NO: 53772 - DNA, 1485 bp, Homo sapiens
ttttttttttgagacaaagtctggctctactacccaagctggagtgtagtggtgcgatcttgactcactgcaacctctgcctcctgggctcaagccatcctcccacctcagcctccagagtagctgggactgtaggcacgcmctactgtgcttggcaaatttttgtattttttgtagagatggggttttgccaccttgcccaggctggtctcaagcttgtgagctcaagtgatctgcctgccttggcctcccaaagtgctgggattacaggtgtgagccaccttgcctggcctgattctccttttttgatagaggaaaacattggccctcagagaggttaagtgatttacctgaagtcactcagatggtgagcagcagagtcagatctggagcccaggcctgagaactcaggccagcatcaccctccacacccacatacggtgtccctggatcagtggtactgactcttgattcagagtccgaggggcctgtgcgagcatggcagagcctacgcacactcctcatcccccaccccaggaaatgtgctagttcatgacccttggggaaagaagggcttgccgatggcccctgatcagttcacccgggtctgcatcagcttaaggtcagcagggaggtgaggcaggataaagagctaggcagagattttgatccctttttcagatatctattgtcactgtctcccatcacagtgggttatggagaggtgtctgatcggatgttattttggatttgtggctgagtgtatgtaaacacttgtaagtatttttaacccattattataaaacatttcacaaaagtagagcaaacgatacaacaacccccccatgtactatcatccagctatgacaggtgtcagctgatgggcagtttccacattctggattctgctgattgcagccctgggtgtcctttaacattttgtccctagtcttatatttcctgtaaactagtagttagatctagaagctggattgggtttgattttttttttcttgtcaagaatacttactttacaggtggtggtgttatttccatcaggagcacacaatgttatggacactttaatgtttaacatagttaaaagtagatcagtgttgtcacacacgtctgaacaatgtgaaagccgactcacccaatagacactggaaatgaaaatggcttagtccggggtggggtcttaatggaagttagttgatgaattagataacacaggaatcacactgctcaggattggcctcctggagtaggaagactccagaactgggaacttgtcttaccttagcactgctacctgctcacccaggacaggatgtcaatatttggtaatatcctgggatagctttgagcaacatgtgatgggtgtgtcacaggaatcggggcctgttttcaaggaaacatccatagctccttttctacaagaagactctggaaagtgttgcaaggcctctggcttcaatattagat

SEQ ID NO: 53773 - DNA, 1485 bp, Homo sapiens
ttttttttttgagacaaagtctggctctactacccaagctggagtgtagtggtgcgatcttgactcactgcaacctctgcctcctgggctcaagccatcctcccacctcagcctccagagtagctgggactgtaggcacgccctacygtgcttggcaaatttttgtattttttgtagagatggggttttgccaccttgcccaggctggtctcaagcttgtgagctcaagtgatctgcctgccttggcctcccaaagtgctgggattacaggtgtgagccaccttgcctggcctgattctccttttttgatagaggaaaacattggccctcagagaggttaagtgatttacctgaagtcactcagatggtgagcagcagagtcagatctggagcccaggcctgagaactcaggccagcatcaccctccacacccacatacggtgtccctggatcagtggtactgactcttgattcagagtccgaggggcctgtgcgagcatggcagagcctacgcacactcctcatcccccaccccaggaaatgtgctagttcatgacccttggggaaagaagggcttgccgatggcccctgatcagttcacccgggtctgcatcagcttaaggtcagcagggaggtgaggcaggataaagagctaggcagagattttgatccctttttcagatatctattgtcactgtctcccatcacagtgggttatggagaggtgtctgatcggatgttattttggatttgtggctgagtgtatgtaaacacttgtaagtatttttaacccattattataaaacatttcacaaaagtagagcaaacgatacaacaacccccccatgtactatcatccagctatgacaggtgtcagctgatgggcagtttccacattctggattctgctgattgcagccctgggtgtcctttaacattttgtccctagtcttatatttcctgtaaactagtagttagatctagaagctggattgggtttgattttttttttcttgtcaagaatacttactttacaggtggtggtgttatttccatcaggagcacacaatgttatggacactttaatgtttaacatagttaaaagtagatcagtgttgtcacacacgtctgaacaatgtgaaagccgactcacccaatagacactggaaatgaaaatggcttagtccggggtggggtcttaatggaagttagttgatgaattagataacacaggaatcacactgctcaggattggcctcctggagtaggaagactccagaactgggaacttgtcttaccttagcactgctacctgctcacccaggacaggatgtcaatatttggtaatatcctgggatagctttgagcaacatgtgatgggtgtgtcacaggaatcggggcctgttttcaaggaaacatccatagctccttttctacaagaagactctggaaagtgttgcaaggcctctggcttcaatattagat

SEQ ID NO: 53774 - DNA, 1485 bp, Homo sapiens
ttttttttttgagacaaagtctggctctactacccaagctggagtgtagtggtgcgatcttgactcactgcaacctctgcctcctgggctcaagccatcctcccacctcagcctccagagtagctgggactgtaggcacgccctactgtgcttggcaaatttttgtattttttgtagagatggggttttgccaccttgcccaggctggtctcaagctygtgagctcaagtgatctgcctgccttggcctcccaaagtgctgggattacaggtgtgagccaccttgcctggcctgattctccttttttgatagaggaaaacattggccctcagagaggttaagtgatttacctgaagtcactcagatggtgagcagcagagtcagatctggagcccaggcctgagaactcaggccagcatcaccctccacacccacatacggtgtccctggatcagtggtactgactcttgattcagagtccgaggggcctgtgcgagcatggcagagcctacgcacactcctcatcccccaccccaggaaatgtgctagttcatgacccttggggaaagaagggcttgccgatggcccctgatcagttcacccgggtctgcatcagcttaaggtcagcagggaggtgaggcaggataaagagctaggcagagattttgatccctttttcagatatctattgtcactgtctcccatcacagtgggttatggagaggtgtctgatcggatgttattttggatttgtggctgagtgtatgtaaacacttgtaagtatttttaacccattattataaaacatttcacaaaagtagagcaaacgatacaacaacccccccatgtactatcatccagctatgacaggtgtcagctgatgggcagtttccacattctggattctgctgattgcagccctgggtgtcctttaacattttgtccctagtcttatatttcctgtaaactagtagttagatctagaagctggattgggtttgattttttttttcttgtcaagaatacttactttacaggtggtggtgttatttccatcaggagcacacaatgttatggacactttaatgtttaacatagttaaaagtagatcagtgttgtcacacacgtctgaacaatgtgaaagccgactcacccaatagacactggaaatgaaaatggcttagtccggggtggggtcttaatggaagttagttgatgaattagataacacaggaatcacactgctcaggattggcctcctggagtaggaagactccagaactgggaacttgtcttaccttagcactgctacctgctcacccaggacaggatgtcaatatttggtaatatcctgggatagctttgagcaacatgtgatgggtgtgtcacaggaatcggggcctgttttcaaggaaacatccatagctccttttctacaagaagactctggaaagtgttgcaaggcctctggcttcaatattagat

SEQ ID NO: 53775 - DNA, 1485 bp, Homo sapiens
ttttttttttgagacaaagtctggctctactacccaagctggagtgtagtggtgcgatcttgactcactgcaacctctgcctcctgggctcaagccatcctcccacctcagcctccagagtagctgggactgtaggcacgccctactgtgcttggcaaatttttgtattttttgtagagatggggttttgccaccttgcccaggctggtctcaagcttgtgagctcaagtgatctgcctgccttggcctcccaaagtgctgggattacaggtgtgagccaccttgcctggcctgattctccttttttgatagaggaaaacattggccctcagagaggttaagtgatttacctgaagtcactcagatggtgagcagcagagtcagatctggagcccaggcctgagaactcaggccagcatcaccctccacacccacatacggtgtccctggatcagtggtactgactcttgattcagagtccgaggggcctgtgcgagcatggcagagcctacgcacactcctcatcccccaccccaggaaatgtgctagttcatgacccttggggaaagaagggcttgccgatggcccctgatcagttcacccgggtctgcatcagcttaaggtcagcagggaggtgaggcaggataaagagctaggcagagattttgatccctttttcagatatctattgtcactgtctcccatcacagtgggttatggagaggtgtctgatcggatgttattttggatttgtggctgagtgtatgtaaacacttgtaagtatttttaacccattattataaaacatttcacaaaagtagagcaaacgatacaacaacccccccatgtactatcatccagctatgacaggtgtcagctgatgggcagtttccacattctggattctgctgattgcagccctgggtgtcctttaacattttgtccctagtcttatatttcctgtaaactagtagttagatctagaagctggattgggtttgattttttttttcttgtcaagaatacttactttacaggtggtggtgttatttccatcaggagcacacaatgttatggacactttaatgtttaacatagttaaaagtagatcagtgttgtcacacacgtctgaacaatgtgaaagccgactcacccaatagacactggaaatgaaaatggcttagtccggggtggggtcttaatggaagttagttgatgaattagataacacaggaatcacactgctcaggattggcctcctggagtaggaagactccagaactgggaacttgtcttaccttagcactgctacctgctcacccaggacaggatgtcaatatttggtaatatcctgggatagctttgagcaacatgtgatgggtgtgtcacaggaatcggggcctgttttcaaggaaacatccatagctccttttctacaagaagactctggaaartgttgcaaggcctctggcttcaatattagat

SEQ ID NO: 53776 - DNA, 1485 bp, Homo sapiens
ttttttttttgagacaaagtctggctctactacccaagctggagtgtagtggtgcgatcttgactcactgcaacctctgcctcctgggctcaagccatcctcccacctcagcctccagagtagctgggactgtaggcacgccctactgtgcttggcaaatttttgtattttttgtagagatggggttttgccaccttgcccaggctggtctcaagcttgtgagctcaagtgatctgcctgccttggcctcccaaagtgctgggattacaggtgtgagccaccttgcctggcctgattctccttttttgatagaggaaaacattggccctcagagaggttaagtgatttacctgaagtcactcagatggtgagcagcagagtcagatctggagcccaggcctgagaactcaggccagcatcaccctccacacccacatacggtgtccctggatcagtggtactgactcttgattcagagtccgaggggcctgtgcgagcatggcagagcctacgcacactcctcatcccccaccccaggaaatgtgctagttcatgacccttggggaaagaagggcttgccgatggcccctgatcagttcacccgggtctgcatcagcttaaggtcagcagggaggtgaggcaggataaagagctaggcagagattttgatccctttttcagatatctattgtcactgtctcccatcacagtgggttatggagaggtgtctgatcggatgttattttggatttgtggctgagtgtatgtaaacacttgtaagtatttttaacccattattataaaacatttcacaaaagtagagcaaacgatacaacaacccccccatgtactatcatccagctatgacaggtgtcagctgatgggcagtttccacattctggattctgctgattgcagccctgggtgtcctttaacattttgtccctagtcttatatttcctgtaaactagtagttagatctagaagctggattgggtttgattttttttttcttgtcaagaatacttactttacaggtggtggtgttatttccatcaggagcacacaatgttatggacactttaatgtttaacatagttaaaagtagatcagtgttgtcacacacgtctgaacaatgtgaaagccgactcacccaatagacactggaaatgaaaatggcttagtccggggtggggtcttaatggaagttagttgatgaattagataacacaggaatcacactgctcaggattggcctcctggagtaggaagactccagaactgggaacttgtcttaccttagcactgctacctgctcacccaggacaggatgtcaatatttggtaatatcctgggatagctttgagcaacatgtgatgggtgtgtcacaggaatcggggcctgttttcaaggaaacatccatagctccttttctacaagaagactctggaaagtgttgsaaggcctctggcttcaatattagat

SEQ ID NO: 53777 - DNA, 608 bp, Homo sapiens
ctatagcagaagcagatattttataatttttaagcccgcttaggtacagaggcctgcgtggtctcacgccaatactgactacccggagctcgttcctccacattgaacatggactctggctggaggcctggcttggagcgtggcgtgtgccaccactaccacatcttcagagaacgtaattccattagaaccccctgtaaggtcctcaaatgcccactgccccctcagccatgctgtggcctttccctgcaaggtggtgctgctctgaactgttttactagatggtgatgggcacaaggctggcacctacctgcaggacaatggctgttgtgtgctatgtgttcaccaggttttagacatttatctccaatctctaaaactcccccttaaagtgaatatcacccttcttttcatttatggaagaggaatctgaggctggaatgtagggcctgcaggatagtgcggtcttaagccccaggctgagtggccccctcaagaccacatggccctgctttcctccactggtgactgagtgaggcctgctgtcacctgccagggctgaggcctcctcttccaccagcamccctaggtctggggtcatgttagcc

SEQ ID NO: 53778 - DNA, 547 bp, Homo sapiens
gccatcctctgacctggcactgggaagactgtgccagtctctgagctacactagcactaagtctccctttcaggatcccataattgtgatcgaatccctatgacatgggagtggcagaggctgaagaaacagagctctctccaagacttggggctgaactcctgccgaccagaagcagtggatgttcgcttactgtgggatgagcagagccagcccaacatccaggaaggccctgtccccagccaggcgacasccagcagtccctgcagggctctgtcacagttgggagcagctttctgagtgtgctctgcagaggacaccacgacccattcacccatctcccagactgcctggcttgctgatttttctaccggcagccacgttcccgttaggaagacagtcttctagaactttctccttctcttccatgtctagtccctcccccatgcctcaccccaggcacttgggaaaggggagaaaacaaagacagaggcaggcgattccggtcccctcatcagccttcttattttctctctagaagtcatca

SEQ ID NO: 53779 - DNA, 629 bp, Homo sapiens
ggaggcagaggcaagaggatcacttgggtccaggaggtcgaggctgcagtgagctgtgactgcaccactgcactccagactgggtggcagagtgagaagtgagaccctgtctcaaaacaaacaaacaaacmaaagtaacagaaacccatttgaactggcttaagcaaaaaaaaaaaaaaagtgatttatcaaggggaatctgtggtatgtcatgaaatccaaggaggagctcagctgaagaaggctcagcaatccacaacactacctcctgagaatgagggaaggtaggggtgctacacagaacaggcttatatcagggcctggcacacagtcggtccttacatgttggctggtatgatttctaagtgactggcaccctaccccagtgtctctatctgaaaagcaaggtttcagatctagatacaaagagatttcaccacatttgtgaactttatgtctgctctgttagcatccttagcatttctaattagccagcggaattttccaggcatacttagggatttgttctatctcatttgtttaatttttccagccagagcctaacttctttctgccttgctctgcggcagaagcagaggcactggggctgggctgcagacaggagccta

SEQ ID NO: 53780 - DNA, 1449 bp, Homo sapiens
tcaggccagttggtcatctaattggaggttatcaaaggaggtgggttttagcatcctctttcctttcctgttacattgagaccatggggtgctattgaataaacttgattcggtttcttcaaaaaaagccagaaattgatctaataggttttgctcatatttggtaattgaattggactgtatacagtctgcacgtttaccttattttccattatataatggtaccaaatatcacaatgattttcaaaaattaatgcttttagtgatggattactaggtgttgaaatgctttataatatacttatgaaaacatttatacaaataatttcatcctccacatgacatttagaaaagtttagtctggctgggtacagtggctcactcctgtaatcccagcactttgggaggccaaggcaggtggatcaccttaggttaggagttcgagaccagcctggccaacatggtgaaaccccgtctctactaaaaatacaaaaaatagcccagtgtggtggcgcacacatgtagtcctagctacttggtaggctgaggcagcagaatcacttgaatctgggaggcagaggttgcagtgacccaagatcacgccactgcattccagcccaggagacagggtgagactctgtttcaaaaagaaagaaaagagaagagaaaagatgaaaaggaaatgtttagtttgaaattccgttaccgaaagttctcgggggttgggggaggtgggaggcaatatctttttgctattatatttcttatagtgcagtgtcagtgaaactatgtcatcctttgtaaaatcaataaaatccctgtcaatttatctggccattcgatactttatcatctataatttttcaagacatctatttggttgaagtgtcttcatcaattgatggactgtacatcagtctggtttggcagtttacattgtattttcctctgagtttatcttctctgtttcatggacttcactagggtcagtggttcttaagttggatgataagaaaccccaatcttccatacagggtacagtttggccattggttttaactcaggtcatggcatagcagttgcatttctatggaagcaaagctaaccttggaaatggactctaatcaaagactcactaacatcaaacaagtcataaccacattaagtaatgtcttaaaggcaaaaatcaatagtaattcactttgagcatttaaagagtcaggctctcagtcactgtctttgagattatgagagcatagtagaaaacagcttgtccaactgccttatttaatagatgagctcatagaaatgaagtaactcagtcgaagtgacattggttttcatggctaaacacaggaactggaaaataatgggagtattgttagarattacaataatattgaaatttgacttcaagctaatgagtcaagtatgaagatattaacttca

SEQ ID NO: 53781 - DNA, 571 bp, Homo sapiens
aattaagtacatttttctaaggtacagttgttcacatcaaatgatctaattgtcaagtctaaataaaataaatctacctatgtttaaatgcacaatgaaaaaaccactgaaatttaaatttaagtggaagactgttaagaaaaaaaaaactgaatataaaaatttgactcaactcaaaggaaaaaaaataactatacaccaaaagaaacaccatggattcaagggtcatgagaacaaacaaaaaaaaaaacaggttttactctttggggatttttactascttgtcttgttttttaatcaagacaagtatagatgactctctatttacgaacttttatctcttgaagttctttacttagttgtccttttcaaattgttacacattcaaaaattaaaacaatataaaatatatatattgagaagtctcattctcaccagatttctccccaagaaaacacacaagtatgttttcctgtgtgtcttaccagtatttcttcgtgcggcaaataactcaaaacctttataaatacaaacaaaacacatccatatgtgtcaaccaccaagtaccggc

SEQ ID NO: 53782 - DNA, 571 bp, Homo sapiens
aattaagtacatttttctaaggtacagttgttcacatcaaatgatctaattgtcaagtctaaataaaataaatctacctatgtttaaatgcacaatgaaaaaaccactgaaatttaaatttaagtggaagactgttaagaaaaaaaaaactgaatataaaaatttgactcaactcaaaggaaaaaaaataactatacaccaaaagaaacaccatggattcaagggtcatgagaacaaacaaaaaaaaaaacaggttttactctttggggatttttactaccttgtcttgttttttaatcaagacragtatagatgactctctatttacgaacttttatctcttgaagttctttacttagttgtccttttcaaattgttacacattcaaaaattaaaacaatataaaatatatatattgagaagtctcattctcaccagatttctccccaagaaaacacacaagtatgttttcctgtgtgtcttaccagtatttcttcgtgcggcaaataactcaaaacctttataaatacaaacaaaacacatccatatgtgtcaaccaccaagtaccggc

SEQ ID NO: 53783 - DNA, 556 bp, Homo sapiens
ggcctcccaaagtgctgggattataggcatgagccactgtgcccaactctccttctctctctctttttttttttttgagatggagtctcactttgttgcccaggctagagtgcagtggtaccaatctcggctcattgcaacctctgtctcctaggttcaagcaattctcctgcctcagcctcctgagtagctgggactacaggtgtgcgccaccatgcctgcctaattcttttgtatttttaataaagacagcgtttcaccatgttagccaggctggtctygaactcctgacctcaggttatctaccagcctcagcctccctaagtgctgggattacaggcgtgagccaccgcacccagctctccttgtctcttaatgcttgactcttctctactgtgaccctgcagtgcatctgcctgtttatattccctggatatcgggctgtctgtctgtcttccagctgccttcaccccatccttggtttcctgggctgtccagtaacgagcctgggacctctttcccatcagagtgagaggacccctttgtagcagggcag

SEQ ID NO: 53784 - DNA, 555 bp, Homo sapiens
atctcagaattagccaacagggttaggcaatgaccattgctgatattctcatgcctgaacataaattctttgtttcagtagatcaatgtacatgtgttcaaatgatcaagagaaaaagcaacatgtctacggtaaatcaaaaagatcaaacaaaaacaatctctgaagaaaatgttctctataaaatgtcagagcttgacagggcaagggtgctaagaattgaatacactatcctagaaaagtatttcttattatttagcaatttctgagtttcattgaatctaagatgccatttrttgaaaggaacactattattttagatgtgactaaggaacaaaaatgtcaccaccaattgtaattatcagatgttattaattatataaatttcagacataaaaattgtgtatcatagaatgaacaaaatacagtatgcaaagcactaattggagataaagaaatactgatcaggaaaaaaagaaataacaacaatggtcaaagccagaacaattcgagcaacaaaataatgtattatgttggtgcaaaagctattgcggt

SEQ ID NO: 53785 - DNA, 555 bp, Homo sapiens
atctcagaattagccaacagggttaggcaatgaccattgctgatattctcatgcctgaacataaattctttgtttcagtagatcaatgtacatgtgttcaaatgatcaagagaaaaagcaacatgtctacggtaaatcaaaaagatcaaacaaaaacaatctctgaagaaaatgttctctataaaatgtcagagcttgacagggcaagggtgctaagaattgaatacactatcctagaaaagtatttcttattatttagcaatttctgagtttcattgaatctaagatgccatttattgaaaggaacactattattttagatgtgactaaggaacaaaaawgtcaccaccaattgtaattatcagatgttattaattatataaatttcagacataaaaattgtgtatcatagaatgaacaaaatacagtatgcaaagcactaattggagataaagaaatactgatcaggaaaaaaagaaataacaacaatggtcaaagccagaacaattcgagcaacaaaataatgtattatgttggtgcaaaagctattgcggt

SEQ ID NO: 53786 - DNA, 620 bp, Homo sapiens
cacgatctcggctcaccacaacctccacctcccaggttcaagtgattctcctatctcarcctcccaagtagctgggattacaggcacctgccacaacgcctggctaattttttgtatttttagtagagagggggtttcaatgtgttgaccaggtgggtctcgaactcctgacctcaggtgatccacctgccttggccttccaaagtgctgggattacaggcgtgagccaccatgcccagcccaacattttgatgatactctctagagacttggttttattatctccctgaagagtaataacaatttttttggccagtggttaaattattattagataacctttaacttttggattcctgactttatgctttgtttggtggaaagctctatttcaggtttattcctgatctaaaaatgaataattctattataagatgtagtctttacttctaatgtgttgccattctggggatttattgccatgccctcacactttgtagaattctgaatccacattctgtctccctggattgggtggattctgaaatctttgctcagcaattccatctttccagctgttgctctccctttgggttctttaaagtcttgcctgcacatgt

SEQ ID NO: 53787 - DNA, 620 bp, Homo sapiens
cacgatctcggctcaccacaacctccacctcccaggttcaagtgattctcctatctcaacctcccaagtagctgggattacaggcacctgccacaacgcctggctaattttttgtatttttagtagagagggggtttcaatgtgttgaccaggtgggtctcgaactcctgacctcaggtgatccacctgccttggccttccaaagtgctgggattacaggcgtgagccaccrtgcccagcccaacattttgatgatactctctagagacttggttttattatctccctgaagagtaataacaatttttttggccagtggttaaattattattagataacctttaacttttggattcctgactttatgctttgtttggtggaaagctctatttcaggtttattcctgatctaaaaatgaataattctattataagatgtagtctttacttctaatgtgttgccattctggggatttattgccatgccctcacactttgtagaattctgaatccacattctgtctccctggattgggtggattctgaaatctttgctcagcaattccatctttccagctgttgctctccctttgggttctttaaagtcttgcctgcacatgt

SEQ ID NO: 53788 - DNA, 2370 bp, Homo sapiens
ttttctaacagttcaactttttaattttcacatttatatttctaatttgtatgacttctctgtgtgtatggtatgaggtaagaatctgattttagtttttccatagagaagtccttgtctcagtagcactcattcccccactgtatttatatcactttgtgcatatatcaatatcccatacagatttgcagtgggaacacatgaaggaggcgactgaagggaaggcagcagtctaaggaaatctcctctggtagacctggaggacattgagaagctaaatacctgaagaagggagagtacagctaggggtagagagttgaggagaccaaaaatgaataattatttgaagaggcattctagtgtgaaacctttgtattctttgaaaacttagtgcctcattcactgttctacagtatctattaacatgatttacaaatggtttctcagaatacatgttttcttaacacttttcaaattcacatcagccattcatacaatatgaaacctcatcactgcttcgtggattgaagaaaacttagaagtatgggatggaaataaaaatagaggtaaaaactgaatatatataagaaataccacttgccaagagtcctagcccagtcccaataaaatttatacagttttaaatgtgaagtttccttaaacttctttagcaactcttgctgtttgagatgtctctaatttatagataggcagaaatttcagtaggtgtttatcttgttccactttggaaaaatcatttggaggaaaatgttttatttcattattttcccttttaactaggatttcaggccaacaagtttttgtctacttttctcccctgacttcaaagaaattctaggcattttgttatacattaaaatcacgcaatttgtataaatattatcttccttttacaaaaagcccatggcaagggtaatgcatcctagagtaaaatcatagtttttttccccttttttttcatgaactttagcacactatacttagtgtgcctacactatagcttaaaataacttcaaaggtttttgagccactgaaattagtgcaccctaaaaaagatagagctgttatcagaaaaaaacaatatatgaaaatctatcttaggtgaatccctctttagtagtcatctaatagcctcatagattaaataagcactttctttcatgtctgaatcacatctattacatataattactttccttccaagcaagtgaaagaaagaacaagaaggaagagctatataaagattataattaataaytgataggcagttttccacaaaacgaagcctgtattgtgagttacataatcagtacctcagcaacctcagttttcttctcaaaagtaagggctaggaagaatcagagatgagacttctttatcttttttttgtttcacaaagataacatatatgcattgtgaaaatgtagaaatacaaataagcaacttgaagaaaacaaaagccacatgtatagcagagatagagttttcacaatacacgtaattctcttctcccttatgaaaagaatcccagtttttcagttgggcacagggctcccctatgtaaatgactatttcctggcctcccttgaagctaagcatgaccttgtgattaaattctgacaaatgaggttaaatggcagagaagtgtaatattccttccccatgtcccctttcctgctgcctcttcaatggataaagatgcaatggttggacacggtagagggaatggtagtcacccaggatccctagcactttgaaataccattagctttggactatccacttccatacttctcttatgggagaaagaaagaaaaaaatttagccttttaaagcttctcttcctatgttccttggtactcgcagccaatcctaatgctaaggtattctaatacttccatttaataattatttttattacctagcttttgagcttttaaatgctcacaattatgtgctatctctttaatttttatttttaggttaattggttagtttatttaattaacactgaaaactcatggagtatacagcttccttaatctaaacgcaattttattcatctgaactgcagtacataggtgtcagaagaaaaatgcttttcctttttcttgtcaaaactttcaatttctggggaagcaaaatcaaacaatatactgaaagcccaggccttaacttttttatatgaataaaatgggtctgcatgcataaagtcatttactctcccaggatactttcattattttcaacttacagataaggaagtggaggtccaaagaggtgaaatgagtaacccaaggtcacaaagctcgtaagaggcagttacagtctggctccactatccacatc

SEQ ID NO: 53789 - DNA, 562 bp, Homo sapiens
atgtatgcttcactgaggcaggagaatggcgtgaacccaggaggtggagcttgcagtgagctgagatggtgccactgcactccagyctgggcaactgagcgagactctgtctcaaataaataaataaataaataaataaatgtatgcttcaatattagagtccattcaatggtagtctttttcctccttcctagattgtaaactcctgagggcaggaacaatgtgctccttgttttcttagactctgcagcatgtagcaagtgtgtaagatacaatcctcaggttaagagaggtaaagagagataatcagagaagttttgagaggagttatcttttgagtttaacctggtaagtctaaagtatttgcaagattctctttttcttttttttcctttgtttttatctcttttggcttgaacatggcttagaggcaaagtaacatgacgtaggagaagaattctgaagacaaatgaagatttacatcctgacaatatcaatcacttatgtcgctctaagtctgtattcctcatctataaaatagatatgagtacttacgaggttg

SEQ ID NO: 53790 - DNA, 605 bp, Homo sapiens
agagtgagactccatctcaaaaaaaaagaaaaaaaaattcagtgctattaaacaacaacaacaacaacaaaaaatcgaaatagaatacttaaattccaaaccagtagagaggaaaaaaggagatcagagaaaatttagaaaatgaaaagtctagaaaggaagcaattaaaacaaaaaaaaaaaggcagcaaaggaaaattctgttaaatataaagtccaggccgaacatggtggctcaggcctgtaatcccagcactttggaaggcaaaggcaggcagaacacttgaggtcaggacttcgaaaccagcctgggcaacatggtgagacattgtctctacagaaaatgcaaaaattagccaggcatggtggtatgtgcctgtagtttccgctactcaggaggcagaggtggaagaattgcttgaaccgaggaggtaagggctgcagcagtgagctgtgatygtgccattgcactccagcctggaagacagagtgagaccctgtctcaaaaaataaaacaaaacaaaaaaattaagtataaatagatataaataaatcattaataagaagtataaaagactaaatttacttatgaaatagaaaaaaaa

SEQ ID NO: 53791 - DNA, 621 bp, Homo sapiens
ttggagccccgtaggagcaggaaatccacgtaagtacagcaaatggtttaaaacttgcgctaggctgtctggaaaactttgtatttttttattatcggtaatatttggaagtggaattgcagaacatgctcctgaacatgaagaaccttaaaaaaatatttggaattgcaacccgaaaaagacgattttgtttacaatagactttcctcttgtgggggagtctaagatataccatgcatgttttgactttttaatcgatgttcttgaatattcattgagaaagtggmcgtttctgtaaaacctgaaaagagcatcttaataagagattagcctgcaaatgctgtcatttattcctttttaggattgtaatattttgtaggaattaagtctaacagggaaaaaactggcagacattacatcatactgcatcaacttagatgttagcagcttacagttttgccgaccttggcagcttcagagttaaaatgctaattaacttccacgcagtatagggacagagcgcctgtaggcgaaactaaattaataacctgccctaactactaagggaataacacttgaacacccctgtcaggggcttcgtttctcagtagaaagttcttg

SEQ ID NO: 53792 - DNA, 2161 bp, Homo sapiens
ctctcgtgtttccttgcatgacatcaattgtcatttaataagaaagacaaatacacgtgtttaatcactccctgaagaaagtaaacacactatctgtgggaaatggaacacaatgagaggcgtgccgtcagcctcagggtgccctgactccattccagccctctcctcatatgccccatttgcacatcacccatcacttttgcctaattgtttctactcaccaagtgaagataatggcttctttgcctgctcaagtgataatttgagattatatgtctcatcagatactttattggatgaatgaaaaaatgcacaatgatggttttattaaattatgcagttagttaccaagatgaatggaactacacctatgcaaaaatcaagatgtggagataagggaggttataggctgagtyatttaacctttagggctctttctgatattttctgtgagggccaaatagagttctcagtggactgcatgtgagtttctgccaatggcctgtggagcaagtgcctgcaagagggaacactcccccaacttctggggtgataaaggatttctcactgtcccaccagcctgcacagtaggtttcaccattttgttaactattccagctgaacttttcttactgacctctggtttcatctatctaaggtgagctcctgctcacatctctccctgcgaggttcatatctctttagattttaggccaggtggtggttctgcaagctcaactctccaatgcatttgtaaaagatcatgaacttgaagtttgttgtaagggtggaaatgaggctccttatagctttctacttcctggggcagaagccagaagttccagcccatagattttgataagttgtattttcattttcattcagcttgaaatacttgctaatttcccttttagtttcttctttgattcattgagtatgaagtatgtgttattagtttcctaatattcctggatttttcagagaagttgctattgctgatttcttattttaatctattgtatatcacaaagatatactttacatgacttaaatgattttaactttgttgaaacttgtttaatgactcgtttaatggtctattttggtaaaagttccaaatgaactcgaaaaagaatacatgttcttctgttaggtgaaacattccataaatatcaatgaatcatataggttgatagtgataattaatacttctgaatccctattttctgtcttcttgtgcaatcagttactgagacggggtgctagaatctcctactgtcattgtggatttatctatttcattcagttttactagatttcatttcgtgtattttgaagctctgttattaagtgtttgcatgtttaggattatgttctctgatgaaagaacatcttaatcattacaaaataattttctttaccttttataataatttttgcactgaaatatactttgtttaatatagccaatccagcttttttaaaaactattattagcataatatatatttttccatgtgtttacacttaggctatttgagccttttttatttaaagtgtgtttcttgtaggcaacatatagttggatcttactttctcatctaatctgaccatcattgccatttaataagagtgtttgcactacttacctttaatatggttgtttatatgattaattttaagtctaacatctactatttgttttttgtttattctttgtccattttcaaagctgctagggagtgtagatgcattttgtaagagaatacattttataaattgttatatacactctgagattttaaccataattgcagttctttttttatgaacacatttttagtaggctgaatattctttctgcttcaacctgctaagattgaaggaaatactgctgaaatagaacatgtacacaaagacagattctgagggagggtttctgtatttttttactttaaagcagcctagttgaaaaagactgtggtacctgattctatatctgtgtagttagcccttttttttctaaatgaaattagatctcaggtaaatgtttaaattcccctcagcaaaaaggcagatctactgacaaaaagcatggctgtttaaagcctataaatctcagaagtggaatgagggagtttatttaaagccagcttcactc

SEQ ID NO: 53793 - DNA, 1143 bp, Homo sapiens
cattgaattcagtcctcaccatgagtgctggctggttgagcattgaacccaggcaggtaatgggctttattgtgggaatttggcaggtaatgtaaccactccatgtgtttgtctccttatttgtaaaatgaggataattctggcatctacctcattgggttattgtgaggatttaatacaggcatgtattaacagtttctagcccatagggtgtgttcggtagatgttggctgttggtatcaaatcatatagaaggagacccaagcacagacagattaggcaattgccaagatgctgtaaagttagtgaagttgcagtttgaatcatgtctgacttcagtatccacttaaatataatgctatgtggcttctcttcacagcatttatacctgcagtctcttctcaatttctttacttcaagtaacagcttagatctctgaactattagtactgcactctccacctcctacctctgagatgccatgcaaaccatagagaggtagcaggtggccccagtttgtgcctctagccacaagccaggaggctgtgatagcctgctgctgactcctcctgggctctgaacaccttgagtgaaacacctgatttaggcaggagcaggatacctggattgaggacctcaatgaggtgagctgatcaatgcattctttttacgtcacaaaagayttctaaagaggcacaacatgtatattaggatgccagagctgacagagagacccagggtctacttagggatcacactctggtgaaagtcaattttcagtgcagggatcatgttcatggcttgaagattcctgttatactcctgacaacttccaaacaagtcaacttccaaacaagaaaaaaactgttgagattcatgattactagcacaggactaggttaaatagtttaggaagagaaaaatgtctagaatgctagaagaaagaaaagaaaggataaaactaatgtttattatgtgaagatcttttctgtgccaggcactatttcagatattatcatatattcattaatttggtccataaaaatttaatgagcattttttatgttccaggatagcctctgataggtcctaaggcactgggactaatacagcaggcatgctctttccatttatagagcttag

SEQ ID NO: 53794 - DNA, 458 bp, Homo sapiens
gagggattcaactttgtgtgcaggaattagccggaagtaccctagatatcttgctagacacatgcatgacagaggatggaagataaacccttaaaacattcaagggcctgccaccttagtgaagtttctaggagtccattagttgrggcatggcacatttctaccaaggtgaagggcaagttgcttcatcttgcacactctaccactgagaaggagacacaagggccactttggattcaaattgtgacatataccctagttgaatgttctactttgagtcacttactgagtaacccatagatttgaatggattccagagcaacagaagcttctgtggcagctctaagcttctacgcaagctgatcttgggccacatgactcagcagattgaatggtgctgaaagagcacattgaaatgttctaacagtagcaaataaaaaatgccatggcaatacccc

SEQ ID NO: 53795 - DNA, 207 bp, Homo sapiens
gttagggaatactaatcacccccacccccatcctcccgccccagccccccgccccgctcccttgccaagtataagaagctgtggagaacacaaaagttaagrcatactccttgctcacaagtttacaatctagtacaggagataagctatgaacaaaacaaccttaacaaaaacagaataggaaaagaaacaagagcagaattccat

SEQ ID NO: 53796 - DNA, 541 bp, Homo sapiens
atggccacagatcccatcaggccattgcttgtagcggcttgcaggacctcccacataacagaagaaaaggaagctgagagacccagtcttgggaatcctagatccagttacagcattgtctcagctaatccatgatgtgaaaagattgcgttttaaaagaagcatattaaaaaagaaaaaaacaaaacaggagggactcttaaataacaagcccttgattgcctaattagcctgaatgccctcactttcattggaattcactgctttgatggtgtggaggtgcaaagaggccagctatcaaagagagaygccacttatctaaacaaaatccaggaacagaattcgagacccttgtctctcagatgaagattgtttgcccagtataagagatttcatcctcgcttttgatagaattatgattcttgggaaatctttacgtggaaaaaactgcctcagaataaacaccaagtgtttcaaaataactacaggaagtccaagccacagcaaaatttaaatctctatttacaaaatgaaggtattc

SEQ ID NO: 53797 - DNA, 541 bp, Homo sapiens
atggccacagatcccatcaggccattgcttgtagcggcttgcaggacctcccacataacagaagaaaaggaagctgagagacccagtcttgggaatcctagatccagttacagcattgtctcagctaatccatgatgtgaaaagattgcgttttaaaagaagcatattaaaaaagaaaaaaacaaaacaggagggactcttaaataacaagcccttgattgcctaattagcctgaatgccctcactttcattggaattcactgctttgatggtgtggaggtgcaaagaggccagctatcaaagagagatgccacttatctaaacaaaatccaggaacagaattcgagacccttgtctctcagaygaagattgtttgcccagtataagagatttcatcctcgcttttgatagaattatgattcttgggaaatctttacgtggaaaaaactgcctcagaataaacaccaagtgtttcaaaataactacaggaagtccaagccacagcaaaatttaaatctctatttacaaaatgaaggtattc

SEQ ID NO: 53798 - DNA, 580 bp, Homo sapiens
cagaacacatatagtttaaggcacattgggaaacttaaaatttattaataaagaaatgattaaaataataggctaaaagaactagaaaataatcaaaatagaaaatgacaatgaaatgccaatagacacaacattttgcccctagagaggaatacaaaaacaataagcagaacaaaaattaaaaaaaaaaagaaaaaaaattgactaaaaatattgagrcttcaacctacatattgttcaacatgaactcagagaaatttgatagtcaacacatatcacagttattgaaatacacaggagaaaaaagaatcccagaggagccagacaaaaagaagaagtaaagaaaatattttgggagtcaaatgtctccacagaaacatttatttccaaaataaagtgaacaaaacctattaaacataaagttttcagacatagatttaaacatgaaagaactcagactactgtttatatgagaagatagatgagtagaagatgaactgtagccaatcaaaaaacaaatagaaaattggcaatgttgaatatgtttaactatagatttaaaatgaaaagaaaggtaaca

SEQ ID NO: 53799 - DNA, 601 bp, Homo sapiens
ttgcctgcctgtctgacctcatcttgtcctgcctcttccccctttctcatcacctacacccaagcctcatggcctggcccctttctgttcttaaacacccagagcctcttcctgccccaaggctgyggcaccagctgttccccacacctggactactcaactccaggcgtggcagccctggctccttcttcaactctcagtttaaagctcctcttctcagagagaccttccccaccactccatttcaaagaagtgcctggtcacagtctgcttcacccacatgggatgggtctccttggttttcatggtctgttgttcataagctcctgagagtaggcaccttgtttgtcttgcatacacacaccccaggacctagaagaggctgacacatagtaggtcgttaagaagtattgaatgaatgggccaggcagtggctcatgcctataatcccagcacattgggaggatgaggcaggtggatcacttgaggtcaggagttcgagaccagcctggccaacatggtgaagccctgtctgtactaaaaatacaaaaagtagccgggcgtggtggtgtgtgcctgcaatcccagctagtcgggaggc

SEQ ID NO: 53800 - DNA, 534 bp, Homo sapiens
actcaaaggagagtcttaaaccttcagggtagaatctcgggggtgtgacctcctatccatggctttccaccatttgtactctctgctttgtgaatggaggcccgttctccctgtctgctttgttcacatacctttgccattttccttgctgggatgacatcctttgccctgaagttctcgttaaccataccacagctgtcctcttcttacctcaatacatcaaaggctacytcaagttacaatttctccctcagtttttccctagtctaagtccacgtggatttctccatatccagaatgtctactacttgtcttatctttcctcacacttggcatgtgcatttccttccagctactttcataatgttgtattttaactgttcagttgtgtttatattacactattctgccaggcaaataagagtatttatattgctgaaatctatggttttttaaaaatgtaataaaatgtaatgaataaacatacaaatgaatgagttaattactatattcctggttaagtaatgagcatta

SEQ ID NO: 53801 - DNA, 587 bp, Homo sapiens
ttgggcctgataaaaagaaaacaggtttcacttgtaactggcatctcagggaatcctgaatgctccaattgttggtctgcactgctttgcagtttactgagatgttaagatattttgtgctccataaaatactacttaccaaaattattttagacacataattcctctgttttgcttacaggatacatacagactcaaaacttatcagtacacttacttcctctttaaaacagtatcatgaagacaatacaagtaaatggaaagataycctgtgttcataggttggaagaattaatattgttaaaatgtccatactactcaaaatgatatacagattcaatgtactctctatcaaaattccagtttaatttccacagaaatagaaaaaataattctaaactttgtgtggaaccacagaagaccctgaatatccaaagcaaacctcgagcaaacatgacgctgaaggcatcacactacctgacttccaaacctattacaaagttatagtaatcaaaacagcatggtactggcataaaaacagacacattgatcaatggaacagaatagagaacctgcaaataaaccca

SEQ ID NO: 53802 - DNA, 544 bp, Homo sapiens
ttctctagtcatctrctgatgggcacttaggtcgattccacgtcttggttacaggtagcgtgccgacaaccaacgcagcaggacacatatttgcaccacatcccgatttcgtgtccttaggcgatacgtccagaagtgggatgactggacgtatcccactggactggaatcccagttccagcggtgatttcttgagcaacccccccgtatcgctcccggccaccccttgaccagcccttactgtgttggcacctcccacacccagctggccacgcagccctgtcctcaggcctcactcctctctgcgccaggtccaaggcggagacagcgagcctgagatgtccccgaaagccgtcagggcgtgaccggatcccacggcaccggccctgcggacgttccatttcctttcgcctgcttgctttctggcggacgtctccgcgcacgccgtttctcagactcgcctgggacagcctgcgcctcgcacgtctccctctccctctcttctcttaccgagtttctcctccccacaccccgccgggtcctg

SEQ ID NO: 53803 - DNA, 544 bp, Homo sapiens
ttctctagtcatctactgatgggcacttaggtcgattccacgtcttggttacaggyagcgtgccgacaaccaacgcagcaggacacatatttgcaccacatcccgatttcgtgtccttaggcgatacgtccagaagtgggatgactggacgtatcccactggactggaatcccagttccagcggtgatttcttgagcaacccccccgtatcgctcccggccaccccttgaccagcccttactgtgttggcacctcccacacccagctggccacgcagccctgtcctcaggcctcactcctctctgcgccaggtccaaggcggagacagcgagcctgagatgtccccgaaagccgtcagggcgtgaccggatcccacggcaccggccctgcggacgttccatttcctttcgcctgcttgctttctggcggacgtctccgcgcacgccgtttctcagactcgcctgggacagcctgcgcctcgcacgtctccctctccctctcttctcttaccgagtttctcctccccacaccccgccgggtcctg

SEQ ID NO: 53804 - DNA, 544 bp, Homo sapiens
ttctctagtcatctactgatgggcacttaggtcgattccacgtcttggttacaggtagcgtgccgacaaccaacgcagcaggacacatatttgcaccacatcccgatttcgtgtccttaggcgatacgtccagaagtgggatgactggacgtatcccactggactggaatcccagttccagcggtgatttcttgagcaacccccccgtatcgctcccggccaccccttgascagcccttactgtgttggcacctcccacacccagctggccacgcagccctgtcctcaggcctcactcctctctgcgccaggtccaaggcggagacagcgagcctgagatgtccccgaaagccgtcagggcgtgaccggatcccacggcaccggccctgcggacgttccatttcctttcgcctgcttgctttctggcggacgtctccgcgcacgccgtttctcagactcgcctgggacagcctgcgcctcgcacgtctccctctccctctcttctcttaccgagtttctcctccccacaccccgccgggtcctg

SEQ ID NO: 53805 - DNA, 570 bp, Homo sapiens
ggcttgcgctgctcaggctgccagaggttagagcctcctcgccgggaacacagagctctttcctggatggggaagctgtcctttgaggagacgggagaagacagacctccctgtggaaagcaggggaagatggagacmcgcaagacccgggagggctctgagagaggacgaggtgagtgagggtcgagtgtctcgtctgtgcggattggtgtgtggagggggtggcaggggccagggaggcaggagagttagagctggggtgacaaaggcagcggcccccgccccacgggccctgatccggcaggtggtggggaaacctaaggtcaaagaaaggcagactttttgtgtgctgggtggctccgccagctgggccatcctctgggtgcgcccgcggaggagggtttgctggagggtgccaggcagctggggaacagccagagtcaggagacaggaagggacccggggagtggggcctggaggtcttgggcagctggagaaagaggagggggtgggggacacctgggagcagagccattcctgccttgaagtcactctgggagcttggccctt

SEQ ID NO: 53806 - DNA, 612 bp, Homo sapiens
aaaaatcaaaaaaatttttttaaattgactgaagttgtattccaaaacatgcaaaatttagtttaaaatagattggatacacttttaaattttaaacaaggtagagggtttagtgctttgcttttttaaaaagtaaatgaaggctgcagctttctgcagtagttgtcttgggaagtagtgtggacatcactcctaagagacgttaaggaagtttagctaacaggctttaaccctttctctccataccagcttttactcttttttttttttttttgagatggagtttagctcttgtcacscaggctggagtgcaatggcaccatctcggctcatcgcaacctctgcctcctagttcaagcaattctcctgtagttcaagcaattctcctgcctcagcctcccgagtagctgggattacaggcatgcaccatcacatctggctaattttgtattttgagtagagacggggtttctccatgttggtagggctggtctctaactcctgacctcaggtgatccgcccgcctaggcctcccaaagtgctgggattacgagcatgagccaccatgcccggccaccagcttttactttaatgccacagccttaaattttc

SEQ ID NO: 53807 - DNA, 612 bp, Homo sapiens
aaaaatcaaaaaaatttttttaaattgactgaagttgtattccaaaacatgcaaaatttagtttaaaatagattggatacacttttaaattttaaacaaggtagagggtttagtgctttgcttttttaaaaagtaaatgaaggctgcagctttctgcagtagttgtcttgggaagtagtgtggacatcactcctaagagacgttaaggaagtttagctaacaggctttaaccctttctctccataccagcttttactcttttttttttttttttgagatggagtttagctcttgtcacgcaggctggagtgcaatggcaccatctcggctcaycgcaacctctgcctcctagttcaagcaattctcctgtagttcaagcaattctcctgcctcagcctcccgagtagctgggattacaggcatgcaccatcacatctggctaattttgtattttgagtagagacggggtttctccatgttggtagggctggtctctaactcctgacctcaggtgatccgcccgcctaggcctcccaaagtgctgggattacgagcatgagccaccatgcccggccaccagcttttactttaatgccacagccttaaattttc

SEQ ID NO: 53808 - DNA, 680 bp, Homo sapiens
ctttcagacccgtgctttctaaatggaagaggaaggaaggagaaggcagatcaccctcgaccaagctcaagggaggggtggcatctggcgggaagggcactgcccccgcaccctcccccattgggcactgcccactgccagraggtggtgtagcttacaggttagaataatcaggctggcatcacctagagcaaagtccaaatcttggtccaagtccctctaaactgtgccaaacatgactctcagtttccccgactgtaaaatggagtcagcaacatatacctcttttttgggtgattctatttgccccttgcccctcaccaccagtggattcattctcacccctccctgccctgctctgatccccaggaggctgacctcacccaggtaggatattggaagacagcaggaagacagagaggtcgaggacttttcccactccctcttctgggccacagtttggatgtggctgcatccctctcccagggtcccccatcctgtcgggcagcgccttccacagctcctgatctgtgattctggtacccagtgctctcctctggcccacagagctagaggtggttacaacgtgctgctttcactagtctctggtgcatcatcatcccctaccaggtcctttcattatttctccaaagatgatttacaaacagccgacaagcaca

SEQ ID NO: 53809 - DNA, 680 bp, Homo sapiens
ctttcagacccgtgctttctaaatggaagaggaaggaaggagaaggcagatcaccctcgaccaagctcaagggaggggtggcatctggcgggaagggcactgcccccgcaccctcccccattgggcactgcccactgccagaaggtggtgtagcttacaggttagaataatcaggctggcatcacctagagcaaagtccaaatcttggtccaagtccctctaaactgtgccaaacatgactctcagtttccccgactgtaaaatggagtcagcaacatatacctcttttttgggtgattctatttgccccttgcccctcaccaccagtggattcattctcacccctccctgccctgctctgatccccaggaggctgacctcacccaggtaggatattggaagacagcaggaagacagagaggtcgaggacttttcccactccctcttctgggccacagtttggatgtggctgcatccctctcccagggtcccccatcctgtcgggcagcgccttccacagctcctgatctgtgattctggtacccagtgctctcctctggcccacagagctagaggtggttacaacgtgctgctttcactagtctctggtgcatcatcawcccctaccaggtcctttcattatttctccaaagatgatttacaaacagccgacaagcaca

SEQ ID NO: 53810 - DNA, 745 bp, Homo sapiens
cctccacaatgctgcagtccagctaaatcatgcaaatattcatccaccatttactatggataaaacaataatgtgctgtggggaatccaattacacacacacacacaaaagtgcacacacacatgcatgcacacacactgctcctgctgtctcagaggttccaggctggcaaggaagaagtgcaaacattagtaggtaagtccactagcaggaggaatgtgataagtagatccaacagggtacaacacagtatgatagaagcaaacaaggtagaaatgagttctgactccctttcacttatgaaactgattatggaatagtgtatgaaaggcttgcctgaatgaatctcatattttccaagtgttttctatcccagcgattggaactttyattcatttataccattgtccaaaaggaaaatacaggagattttcctaagaccatcctctgtcttatcgctcatatcatatccccaaacatcaccaagccctgcccacttttacctactcagtttctctccagttgttctgttttctccatatgcactagtggtaccttggctacatgaagaccaccagcagcagctgggacaaccagcaccctgtggaactgcacagcatgcatagaatacgtcctcccttcagttggcttgggtcagcttaggtcatgggccacttggactgatagcagtttccacagaaatgcctcaagatggtagaataatccagatctctttgcatggggc

SEQ ID NO: 53811 - DNA, 745 bp, Homo sapiens
cctccacaatgctgcagtccagctaaatcatgcaaatattcatccaccatttactatggataaaacaataatgtgctgtggggaatccaattacacacacacacacaaaagtgcacacacacatgcatgcacacacactgctcctgctgtctcagaggttccaggctggcaaggaagaagtgcaaacattagtaggtaagtccactagcaggaggaatgtgataagtagatccaacagggtacaacacagtatgatagaagcaaacaaggtagaaatgagttctgactccctttcacttatgaaactgattatggaatagtgtatgaaaggcttgcctgaatgaatctcatattttccaagtgttttctatcccagcgattggaactttcattcatttataccattgtccaaaaggaaaatacaggagattttcctaagaccatcctctgtcttatcgctcatatcatatccccaaacatcaccaagccctgcccacttttacctactcagtttctctccagttgytctgttttctccatatgcactagtggtaccttggctacatgaagaccaccagcagcagctgggacaaccagcaccctgtggaactgcacagcatgcatagaatacgtcctcccttcagttggcttgggtcagcttaggtcatgggccacttggactgatagcagtttccacagaaatgcctcaagatggtagaataatccagatctctttgcatggggc

SEQ ID NO: 53812 - DNA, 770 bp, Homo sapiens
atattttatgccactattttggacctcaacgtggccttcctttcttccaactcatgcaatattagttgggaaattgtaatttttagctccagactgacttcagacttgaatttggacttccttcactgttctcccagaggccttcccccatctctctttctcttggcatgtgtaaatctgaacaatccacctggttgctcgctctgtgctcactgcggctggagtgcagtggcatgatctcarctcattgcaacctctgcctcctgggctcaagcaattcttgtgccaggctggagtgcagtggcacaatctcagctcactgcaacctctgcctcccaggttcaagcaattctcctgcctcagcctcccctgtagctgagattacaggtgtgccaccatgcccagctaatttttgtatttttagtagagatggggtttcaccatgttggtcagagtggtctcaatctcctgacctcaggtgatgatctgcctgcctcggcctcctgaagtgctgggattacttgtaggcatgagccaccacgcccggccatataatgcctacttaagcatcaattgctggcctgttcagtgttgctcatatggttctggtctgcactgggcgagggcatttggcaatgaggaaggagtgtgcttggtttagaatagcagcttctgtggttctttttagaggtatcatttctgcccaaatctggggtgccttttcattgatctatatttgggagttaaataaaaggagagttttattctaa

SEQ ID NO: 53813 - DNA, 576 bp, Homo sapiens
tgatcatcagtgatttaaagaaggtacagcagagcgagactccgtctcaaaaaaaaaagaaaaagaacgtacaggagatcatggaataagaacaagaagagattactttccagggctctcagaaagtttctaaaaagaggtgccattgaccctgaccttagcattgtgatggagacattacagagctggtaggaaggagaagaagaaggaacggctggaacacacttggggtgaaatgagcagcatttcagtgtgggagctgcagactcagttttggtggaagagttaagagccaggatcttgtcaggaataattctgtgtccaagtgcagaatcgtggtttgctccactactgccagtaactccatttctcaatcatgatggtgatgctttttttttttttggctcccaatcccrgagagtggccatactgaagtcacattacaacaattaacttttcaactattagatgattaatttttaccaagtagcaagaacagctgtttggcacgtagcagtgtggcatgagtatcttgtaaatgaattaaacaaaatatctgtccaacacacacacagt

SEQ ID NO: 53814 - DNA, 568 bp, Homo sapiens
gcaggaagggaatgctggagaggaaacacagctcaacctcatgatccagcctaagtgagaaatgcctgggaggtgggcaaaggtggttccaagtcaggggtccagaaaggagctggtgacccttcccactcacacatggaggagaaaatactactgcatagaaaaaaatcaacagggacttggagacacggtgaacaagagaagataataggtcctcagaaacattctataaactttccgagctcaatacttcttcagattaatttctaccatgtggacgaaaaataatcaccataacaacacagtgctttgaagagaaatatgtccatatcagttacgcaacagactatcaggacaagcttcccatttgccactcaatttattgtagagagcagggaaggaaacattttcctaaaagctcagatgccaggaaaaccgtaggcaatgaatcatcatgacatggaaaaagtgaagcaagaaacaaatgtttttgatgtttatgcttactcttattcattttataataatattcyaactgtgtttctatcaaagtgaccaatcacgtatc

SEQ ID NO: 53815 - DNA, 572 bp, Homo sapiens
gttccaggcttaagctttaagaaagcctggaagtttccacatttacacttttggtaaccctaaastaccacgtaaaaagtccagctaagatgttagattaactgtgtggagaaaccttgtggagagagagaggctccatcccccagagtcccacctgaacccaaccttcccgctattcccctcaatgcactagcataagagcaaagctaccttgaacattcaagcctcagtcatcaatcacctacaacttcatgaaagaccctacgtaagaccagcatgagaatcttccacgtaaacccaggcaacccatagaattatgataaattcactaactttctattattacattaatagaaacccaaagaggggattaaaaaaatcttgcccaccacagaaattgttcccaaaagcgtatcaaagagtgcatattactgaaagaaaatgacacagcaagactctgaagaatacaagtgggctctgtggttctgcctcagaactccattccaggttcatttcttatgattgtccaggttactttttgcatgactccagaatacacattcattttttaa

SEQ ID NO: 53816 - DNA, 572 bp, Homo sapiens
gttccaggcttaagctttaagaaagcctggaagtttccacatttacacttttggtaaccctaaagtaccacgtaaaaagtccagctaagatgttagattaactgtgtggagaaaccttgtggagagagagaggctccrtcccccagagtcccacctgaacccaaccttcccgctattcccctcaatgcactagcataagagcaaagctaccttgaacattcaagcctcagtcatcaatcacctacaacttcatgaaagaccctacgtaagaccagcatgagaatcttccacgtaaacccaggcaacccatagaattatgataaattcactaactttctattattacattaatagaaacccaaagaggggattaaaaaaatcttgcccaccacagaaattgttcccaaaagcgtatcaaagagtgcatattactgaaagaaaatgacacagcaagactctgaagaatacaagtgggctctgtggttctgcctcagaactccattccaggttcatttcttatgattgtccaggttactttttgcatgactccagaatacacattcattttttaa

SEQ ID NO: 53817 - DNA, 557 bp, Homo sapiens
caatgagagcatgagattggatgaaattggattcaccagcttctctcactacctcaacaccctagggattcttcttataattgggatacatatgtagccaccgctttatgatatgcaaggcccattcctttatacattcattcaagaaagttacattcacatctggtgtacaatatctaagtaaaaatgggtgctaagaacagagatgataatcactattttatagatgagaacagaggaaacrattatgaacttgatcagacatagctaagtggagtaggcaaatgcagaacccagggcttctggttcctagctcacttctctttctacctcatccaaaatattccaaatatcagtagccaaaaatatcatacaaggctatttttgtttgtagcacttcagcaagatgtccccaaggtacagtatagaacagagcaataaagtggccagacaagagggtggtagaatggcagcaaaaggagtgggtgtaggtcaatctgaaagtttttaccatactattttcctttatgtggatctactagttatttacttttttc

SEQ ID NO: 53818 - DNA, 636 bp, Homo sapiens
ataggcagaggaacagagttcagatttgagtaccaaggaccccccaggagcagaacattgccaaggaaagccctaagtccctcttcctgaactggggtagatcagccttctcctcagcatcgctgatctcgggaagcacatggctctgccatttggtaagcttcgtgtcttagtccgtttgggctgccataaccaaagactatagattgggtggcttcaacaacagacatttattcctcacagttctggaggctagacaactccaagaccatggcgctggcagatgtggtgtctggtgagggctggctttttggtttacgtctgtcttctgtttcctcatatggcagaagggctgaggtgcctctccagggccccytttgatttatttattttttaatttttattttaagtgactgggtcttgctctgtcacccaggctggagtgcagtggcatgatcatagctaactgcagcctccaaatcctgggctcaagcaatcctcccacctcagcctctcaagtagctgggactacaggcgtgcactaccatgcccagataattttaaaaaatattttgtggctgggcgtggtggctcacgcctgtaatcccagcactttgggaggccgaggtgggcgga

SEQ ID NO: 53819 - DNA, 650 bp, Homo sapiens
atatgtgatataatagccctgttacataatttaagaggtattgcggagactttaaaaagataataatcaatgactcattttcttaaaaataaatgtcatgaaaatggaggaactgttatgatcattagaagacacttagacatcaacaatatgtgtggaatttgtttatatcctaatctgaacaaaccaactataagaagataactttaaaacaattcagaaaaagtgagcacagatgaggtattagatgatattgcagggaaaaattatgtggtctaattttgtttttaaatgaaaataattaacttgaactggcaagcctggtttggattctccattaaaatcaccagtaacctgagtaaaattattaggtgatacttttgcattttgatgttgattaaaatagattactcctgcacccctacgcgggcacgctcacgtgcacgcatgcacacacacatacacacacacacaygagcactctaatttccttaaccttagagtatttggccttttctgtttcattttatatgccagaaaactgacataacattactgagttgaagtcagaggtaaatagcaaccagtgctagcttcctcacttggtagttaggtaacttggccaggttacttaaaaaaccccagatgct

SEQ ID NO: 53820 - DNA, 1833 bp, Homo sapiens
tttataggaaatgtatttattttagtgaaactgcaacacatatggattatgtacttccctttaccaaactgaagacaaaagataaacacctggaaaaaactgcatgcaacctaaatatcacagaaatcagttttcaaaaattctcttttatgattaacacttctaaaacggatgctatgtgggtttatacattagtgttaatgcaaatttttgtcttaaaaatgaccccacacatacattaaacaatacagagcaccaaagatttaccacttaacaacagtcttatgcctttacctaatcttagcttttttttttttgagaccgagtctcgctctgtcaaccaggctggagtgcaatggggtgatctcggctcactgcaacctctgcctcccgagttgaagcaattctcctgcctctgccttcaaaatagctgggactacaggtgcgcaccaccatgcctggctaatttttgtgttttttaagtaaagagggggttttgccatgttggccaggttggtctcgaactcctgacctcaggtgatccacccgccttagcctcccaaagtgctgggattacaggcctgagccaccgcgcccggccatcttagctttaaatatacaaaaattacttcttccttcctgacactcagaaatctccaatcccgctctctttccccaaagaaaaactaaacccttactctgattccacagccatcccatcaagttttctttctaaagtcagatatctccccagaccagttccatagaatggttcaccgttgtgtaggaaaagaggaaggagagaacagaaggcacgccattacagtgaaaggaaaggagaaaagatggagggagttagagggaagaaatcagggagtacaaataaggaagggaaataaacctatttccagtagctctttccctaccccactttaaaccttagtatctatccgaatctcctcctctgtcctccatttcctcaacattcttttctctttcaaaccattcccatttctccatgcaaactcccagactcatattcctaaaactttcttagagtccctactcctaatacgtggtactggaagagtgaaaacaatgaagagtaattgtacctgccctgttagcagtaaagggagatctatttctaatattcaaagctggaactcagtgtattttcccatagaaacattgtcataaatggtgcttaacaatttttaaaattatttaagagtgggaaagaattttcatcctctctattccctcagtttctgaataagaaaacctgagaaattaggtgccttttctaagattacacagctagtgaacggtagtgacaagacacctaaaccactgatccttttcattaaactacactgcctctttaatgatcaaattcaattcatccctggaatgcaagaatgataataacaagtggataaattatcatactaataggaaaaatactgatgatatataaaatcttctcattagaatataataaaattttatatttatttctggttccatctcaaaatatgactcagtatctttattcatataaatcataggtacctaaaaccaagtactataattagacttaacaaggaacctttttttcttattattataagaagaggactaaagcattatctaccatcatgcctatttaacatactattgcaatactcataataacttttaaagaataaaagaaagggwaaaatacagaaaataataacaatatcaatcccctataaatgacatatttttaaaagttatagaaaacaaacttaaaatatcatagaaaataatctgctgattcaagtttgt

SEQ ID NO: 53821 - DNA, 566 bp, Homo sapiens
tcatgtaaacttgttgtttttttactgcatcagaattatacacctagcatatctctttctgactcaatacagttctgactgaacacacagaaaacactcaaacatatctgttcattagcagtatatttatttgatcaaggaacaagtgtgcctgaaacccattaacaaatatgaatcaacctatycaatatgttccctaaaaggatttaaattttaagagaatattttgttattttttagggattttggctaaattcattgaccactttatttagtgctgtgtagacaggacctttagctcttggggtaatagatcttatgggaccaatttagtttcatccaggaaagcaaatttccctgctctgaatgagatctgattttcattagatgggtttactacaaggttattcagtgaaagtaatgtccagaagtttctaactcaatttaaattgagctttttctcatccacctgcatccctgtggtgcctgagtctgaaagcatgctggaatttcatttgggaagctaccattgacacaatttgggctgaaagcttagctcttcatgg

SEQ ID NO: 53822 - DNA, 659 bp, Homo sapiens
gctcctacatccctcactgattactgactctatcatggtacttatcacactgcactgtaattgcttgtcctggtagactatgaacatcttgaaagcgtctgtctcttatttttgcaaccctagtgattaaaatagtacctggtacytagtaggcattcatgaaatggtttttttaacatacagggttatatatttcatctacagtattaaatggaaaaaatccagaaggatacaccctatattatggttacctctgaagaaagaaataggaataggacaacaataagacgggaaaaagaaaacttaagactttttacctctataaatctctgtgttgatattgtttattttataatgtacatcatttatgtattactggcataaaatatttctgtattaccagcataaagtcaagccacaggtaaagaaccagccctgaagaagaatgtgtggggctgtcagaagcatttagttccacatgcccaagagcaaagccaaaaaaagcctgacttgaaagaaacagggcccttaaaacggactgagaagagaagttgagagattcggccgggagcggtggctcacgcctgtaatcccagcattttgggaggccgaggtgggcggatcaacctgaggtcaggagttcgagaccaatctgtcca

SEQ ID NO: 53823 - DNA, 660 bp, Homo sapiens
ttcccaccatcttggctgagcgtttgaccacatcggtggatgccccactgggttgcattctagtccgtgccgatggcctctgcgggggctccttccaatcccttgagacgtgggccatgttgtaggggatgctggcagttagtgggaagtgtgagcactgaggggcccccagtcctggagaggaagccttctgggctgcgggtctctctcctgccaggcatcccgggcaccatgcagcccctgccaccctgggctcagcctgccccgtgccctctgcagtccttcctcagccaagggcagctcctggagtttaggggatgggagtggactccttctggggtgggtggaacctctcctccacccagctcagcagaccggytgtgaggttgccgcgtaggcaccatgggcagtcgggggtaaggatggatacctctcggtagctgatgcggggctcacgctgggctggcactttaagacagatgccggaggagcagccaggggtgtttgtggggcacatgggccgggccaggccagcgcctctctgggacctcaagcaggagagtggtcggtccagcccgggagggagcctgtggctaggcctgtgcaggagtcgggggggactctcggtggggaccctcccggcagccgaaatgggggagg

SEQ ID NO: 53824 - DNA, 588 bp, Homo sapiens
tggctatcatcatcatttttggggttgttgtgttctacaaatgtattttcccaggagttttttttactctgtctcctctttccttcatatacccccagcctgtggctggggtcttgcttcaaccaccatgcacctttctgaaacccaagttttactccctgataaaggtattgacctcttgttggtctcatcctccagacctacctatacttaagaaaatgacatctctttaaactggtccccagttcacttgttttccctaacattttaattcacaagattaatcacttcccttacaggccagtcttactgcagagttgatttttataattttgggcctgttggtctggttgtacttttctctttctgctggtctgctagttatagcgggtcttgaaagcagtgatatgttatgacattgtcatcaccctcattattgctctttatataacagtagcagcataactgtgttttgatttcttgtacaagrcataaagtgtgctagtggctcactattcacatcaatctcatcagaaaatgttatttcctccttttgttgatcatgatatagaggcccagtgacattag

SEQ ID NO: 53825 - DNA, 588 bp, Homo sapiens
tggctatcatcatcatttttggggttgttgtgttctacaaatgtattttcccaggagttttttttactctgtctcctctttccttcatatacccccagcctgtggctggggtcttgcttcaaccaccatgcacctttctgaaacccaagttttactccctgataaaggtattgacctcttgttggtctcatcctccagacctacctatacttaagaaaatgacatctctttaaactggtccccagttcacttgttttccctaacattttaattcacaagattaatcacttcccttacaggccagtcttactgcagagttgatttttataattttgggcctgttggtctggttgtacttttctctttctgctggtctgctagttatagcgggtcttgaaagcagtgatatgttatgacattgtcatcaccctcattattgctctttatataacagtagcagcataactgtgttttgatttcttgtacaaggcataaagtgtgctagtggctcactattcacatcamtctcatcagaaaatgttatttcctccttttgttgatcatgatatagaggcccagtgacattag

SEQ ID NO: 53826 - DNA, 576 bp, Homo sapiens
tgtaatatttttgctaggttatttaggtgtttgatatacggttaaaagcaaagatatttttttcttcctttccaacatgtatcatgttagtattcaatcaatattttattgcattgacctaaacttaaattttttttttttttgagacagagtcttgctctgtcgcccaggctgkagtgcagtggcatgatctcggctcactgcaagctccgcctcccgggttcacgccattctcctgcctcagcctcccgagtagctgggactacaggcgcatgccgccatgcccagctaattttttatatttttagtagagatggggtttcaccgtgttagacaggatggtctcgatctcctgaccttatgatccgcccgccttggcctcccaaagtgctgggattacaggcgtgagccaccgcgcccagccaaattttttaattattattatattttaagttctgggatacatgtgcagaacgtgcaggtttgttacataggtatacatgtgccatggtggtttgctgcacccatcaacccgtcatctacattaggtatttctcctaatgttatccctctcct

SEQ ID NO: 53827 - DNA, 538 bp, Homo sapiens
cagatggttgtagatgtgtagttttatttctgaggcctctgttctgttccattggtctatgtatctgttttggtaccagtaccaagctgttttggctactgtagccttgtagtatagtttgragtcaggtagtgtgatgcctccagctttgttgtttttgcttaggattggcattgacctaaacttttaagacaaaattaaatggctgtggtggaggatacaggagcaacactcttctattttgttttgaagtgggaatgcctctgtttgacctgtgatgatccattgtctgagctaaatattcattattatctaaagacgttttcttttatcccagcagtcaagttgaactgaattaatctagttaaaattttcaaaatatgaagtatacctaacataaaatatatcattttaaccatctttaagtatacaattcagtggcgttaattacattcacagtgttgtgcaaccatcactaacatctatttccacaacttttcatcactcccaaaggaaactcattaagcaataactctca

SEQ ID NO: 53828 - DNA, 521 bp, Homo sapiens
attttccattgtcattaaaaaaaacctcttaggcctgtggtgccttgggtttttctgggaaaaactgggattatagaaaattctctaggccttggagccagatggatttggttttgaaatgaagctctgctgctgagtagtttgtggtcttgggcaactcatttgacctctctgaacctcaatctgttatctgaacatggcaggaaaatctgtaaatataccgaactcttattccttcttgctgttttctatcccaacaaggtaggtggatggtcatgcctcaggacgttaatggcataccacagaggtggcgaggtcccagtatgacaaccyccctccaagacttctggaaatggatgggagctgttattggagttgctgaggcagaaggtgccttcctgtgggaaagagaagagagattcatttatggggatagggaagatggtgatgttcttggtgagaagtgtaggctagttcatagatatcaggaggactgactatagctatagcctaagaagtca

SEQ ID NO: 53829 - DNA, 445 bp, Homo sapiens
tgatatatatacgtatatacatatatcatatatrtgatatatatacgtatatacatatatcatatatgtgatatatatacgtatatacatatatcatatatgtgatatatatacgtatatacatatatcatatatgtgatatatatacgtatatacatatatcatatatgtgatatatatacatatatgtacatatattgtgtgcgtgtgtgtgtgtatgtgtaactattccttggattgagaaaagtagagtcttaacaaactagattttccattttaaaagttatattattgccggggacagtgactcgcgcctataatcccagcactttgggaggcccaggtgagcagatggcttgagtccaggagtctgataccagcctgagcaacatggcaaaacttgtctctacaaaaaatactaaaattagttgggcatggtggtggg

SEQ ID NO: 53830 - DNA, 445 bp, Homo sapiens
tgatatatatacgtatatacatatatcatatatgtgatatatatacgtatatacatatatcatatatgtgatatatatacgtatatacatatatcatatatrtgatatatatacgtatatacatatatcatatatgtgatatatatacgtatatacatatatcatatatgtgatatatatacatatatgtacatatattgtgtgcgtgtgtgtgtgtatgtgtaactattccttggattgagaaaagtagagtcttaacaaactagattttccattttaaaagttatattattgccggggacagtgactcgcgcctataatcccagcactttgggaggcccaggtgagcagatggcttgagtccaggagtctgataccagcctgagcaacatggcaaaacttgtctctacaaaaaatactaaaattagttgggcatggtggtggg

SEQ ID NO: 53831 - DNA, 445 bp, Homo sapiens
tgatatatatacgtatatacatatatcatatatgtgatatatatacgtatatacatatatcatatatgtgatatatatacgtatatacatatatcatatatgtgatatatatacgtatatacatatatcatatatgtgatatatatacrtatatacatatatcatatatgtgatatatatacatatatgtacatatattgtgtgcgtgtgtgtgtgtatgtgtaactattccttggattgagaaaagtagagtcttaacaaactagattttccattttaaaagttatattattgccggggacagtgactcgcgcctataatcccagcactttgggaggcccaggtgagcagatggcttgagtccaggagtctgataccagcctgagcaacatggcaaaacttgtctctacaaaaaatactaaaattagttgggcatggtggtggg

SEQ ID NO: 53832 - DNA, 445 bp, Homo sapiens
tgatatatatacgtatatacatatatcatatatgtgatatatatacgtatatacatatatcatatatgtgatatatatacgtatatacatatatcatatatgtgatatatatacgtatatacatatatcatatatgtgatatatatacgtatatacatatatcatatatrtgatatatatacatatatgtacatatattgtgtgcgtgtgtgtgtgtatgtgtaactattccttggattgagaaaagtagagtcttaacaaactagattttccattttaaaagttatattattgccggggacagtgactcgcgcctataatcccagcactttgggaggcccaggtgagcagatggcttgagtccaggagtctgataccagcctgagcaacatggcaaaacttgtctctacaaaaaatactaaaattagttgggcatggtggtggg

SEQ ID NO: 53833 - DNA, 532 bp, Homo sapiens
gtgatctcaggattcacatgtttgaagtgaatttaatatgcgatgcaagtggacctggggaggggtggactgtgagggtgctgttttgataccccaccracatctccttaacccttcttaaccagatcagaggatccatctctcagctgctgtgagttttggctgccaaggacacacggttgcccacccgcttctctgaagatcaccctctatgaataggaactgcctcaccaggtgtatgacagacacacctgacagcgataacttaagcataacctgagaatgacccaatggcctaagaagactgtgtgtttggagttctgagctatgaaatcaggaatggccaacctggaggttcattccttatctatgaggaatatctgaacccccggcccatgctgtggaatgcagactgcacagggattgaggccctttgttctaggttaaaggaaggttgccaggtggaggttgctaggaggagggtgctatgtgaaaatgctctataaaccgcatgtttttacaagtggtagtg

SEQ ID NO: 53834 - DNA, 532 bp, Homo sapiens
gtgatctcaggattcacatgtttgaagtgaatttaatatgcgatgcaagtggacctggggaggggtggactgtgagggtgctgttttgataccccaccaacatctccttaacccttcttaaccagatcagaggatccatctctcagctgctgtgagttttggctgccaaggacacacggttgcccacccgcttctctgaagatcaccctctatgaataggaactgcctcaccaggtgtatgacagacacacctgacagcgataacttaagcataacctgagaatgacccaatggcctaagaagactgtgtgtttggagttctgagctatgaaatcaggaatggccaacctggaggttcattccttatctatgaggaatatctgaacccccggcccatgctgtggaatgcagactgcacagggattgaggccctttgttctaggttaaaggaaggttgccaggtggaggttgctaggaggagggtgytatgtgaaaatgctctataaaccgcatgtttttacaagtggtagtg

SEQ ID NO: 53835 - DNA, 1264 bp, Homo sapiens
gccaaatttggaagaggagaaactttgacattaaattttgaaattyggggaaattaagtaggcacatgatgagctagctgaggggatagaaatggtcatagttaagcttctacacaaactgaaagaaactacaaaataaagtatttgttctccgccttaacctaagctgaaggtttcagcccaaaaccatcagctgagttcaaagaggcaaaaaggaatgtcaagcccagggaatgacctccacctcacccttttctaccctcaagacataactatagggaaagactgaggtatgaaaatggggacattccacagcaaatgtgtatgattggaggagcaggctcctgagatagaaagctttgggaaaataataaagcaggaagaaccaggggcaccaggtttgttccatcgcaatgaaagggtgatgggaacagtgggctaggatcaaacacgaagaaagattactagagctctggaaagttcgtcactgcatcttatttttattaatctttgccatttttttattagtggctagcagtaaagtaaagcccttaagtttctgcttttttgtttttttgttttgtttttaaatcgtgggcctgttttaagagaaagcaaggaaacagaaaacaccaagcatgggtcctatttcacgtctgtgagaggaactctacaaagaacgaacaacgtggtggaagaaggagggaagcaggtgacctctgagccctgagaagggatggaaggagaagcagagtcagcctgggacagagaacaggcgggacaaggggatgcaaatcaggcgacaagaaacctgtgcaggatccagcagtgttaacagcacccgtgctgctcataggtagaaaagaggaaacaggcagcagggggaaaaaggcggtaaaagcactctggcaaggatcttcgaggccaagctctactaagaattcaaaacaggatagtcctgtgagcatatcctaccagacgctgagaaaaagtatctaaaaacagagtatgagtgagtgtttaacaaacttggagggaaaatggcatttcatttaaagttggaaaacagtcaaagttaatgagcaagatacttaaacttatttttatcatataattgcattctaaattgtatacattcaaaataattttaatatctattttgtaaaatgttaatatctatttcataaaatattcataaaatgcaattaattcctcatgaaatgcgtatttttcctcacatgtaataatgaaaagatgaagaaca

SEQ ID NO: 53836 - DNA, 1264 bp, Homo sapiens
gccaaatttggaagaggagaaactttgacattaaattttgaaatttggggaaattaagtaggcacatgatgagctagctgaggggatagaaatggtcatagttaagcttctacacaaactgaaagaaactacaaaataaagtatttgttctccgccttaacctaagctgaaggtttcagcccaaaaccatcagctgagttcaaagaggcaaaaaggaatgtcaagcccagggaatgacctccacctcacccttttctaccctcaagacataactatagggaaagactgaggtatgaaaatggggacattccacagcaaatgtgtatgattggaggagcaggctcctgagatagaaagctttgggaaaataataaagcaggaagaaccaggggcaccaggtttgttccatcgcaatgaaagggtgatgggaacagtgggctaggatcaaacacgaagaaagattactagagctctggaaagttcgtcactgcatcttatttttattaatctttgccatttttttattagtggctagcagtaaagtaaagcccttaagtttctgcttttttgtttttttgttttgtttttaaatcgtgggcctgttttaagagaaagcaaggaaacagaaaacaccaagcatgggtcctatttcacgtctgtgagaggaactctacaaagaacgaacaacgtggtggaagaaggagggaagcaggtgacctctgagccctgagaagggatggaaggagaagcagagtcagcctgggacagagaacaggcgggacaaggggatgcaaatcaggcgacaagaaacctgtgcaggatccagcagtgttaacagcacccgtgctgctcataggtagaaaagaggaaacaggcagcagggggaaaaaggcggtaaaagcactctggcaaggatcttcgaggccaagctctactaagaattcaaaacaggatagtcctgtgagcatatcctaccagacgctgagaaaaagtatctaaaaacagagtatgagtgagtgtttaacaaactyggagggaaaatggcatttcatttaaagttggaaaacagtcaaagttaatgagcaagatacttaaacttatttttatcatataattgcattctaaattgtatacattcaaaataattttaatatctattttgtaaaatgttaatatctatttcataaaatattcataaaatgcaattaattcctcatgaaatgcgtatttttcctcacatgtaataatgaaaagatgaagaaca

SEQ ID NO: 53837 - DNA, 1682 bp, Homo sapiens
tgctcttatttgggggaaaagagctaaaattgttttatttgaacagttgataataaagggaatttaggatataattcatggagatagagctgaaaaatttaggtagattataatccatgattaaataatttatagtctatatataatcagtagccttggaatgctctgtagctgaacttgatgggcttttgggctttgttagattagttgacatgtacagccaattgtggtcctgctactttcagaaacaggtagacgtggattatataaaaagcaagcaataaaaattcattttagccgggcgtggtggttcacacctgtaatctcagcactttgggaggctgaggcgggcagacatgagatcaggagttcaagaccagcctgaccaacatggtgaaaccctgtctctaccaaaaatacaaaaaaattagctgggcgtggtggcgcacacctgtaatcccagctactcaggaggctaaggcaggagaatcacttgaacccaggaggtggaggttgcagtgagctgagaccgtgccactgcactccagcctgggcaacagagcaagactccgtctcaaaaaaaaaaaaaaaagaaaaaaaaagtcattttaaatttgaagctctcaaattaatttttcttcttaataggacacataatagttaacagcttcattcaactttatatattaataaattaaaagtcttttgaatgtttgttttgtttttatccataatgattttgcttgagaagttatttctgttttctgttgtaaagtattcttatgtgcgaggtgatgcatttgaggtgctgtctactgcctttgtagaaatgccctttggggtacaatgtattttgtttccatatgtctggatctgttttgtttgtaaaatttgttttgtggagacctcttctagcttaaaaatatcttgaaatatacatgtgtattggaattgctcacctttcttcctatgtctttccttgggaaggattttggaaaaatagggcaatgtgtttataacctgaaactaccttgctagtaaggttaggaagattttcctgtgggcagagwttttaccttttagttctatcttttacaatactagcatagtattgacaacagagcctatatttttaaaaagtattgattataaacattggtgtattgaatctggtagtcattgagttcaaaattgattaccgttgcaccttattatctgaggtggaaggttcatttgttttaaagcaaaagtaaattattttgaagttggaacataggccggtgagttgtttcaaggttaggaatgtctttgattccctgcgtgttttcttcttaatgtaccaacgagactctcgttggagcaatgagaaagttatcctagattaatttttgctaaatgttgtgagatattgtgaaatattctagcctaaataattatgggatttgttttaaggagcttttcaattcatagaaaagcataaagatgctttttgtattgttcttctgtgtttgtattgtgcacgtgcatgaatgctagatatgatctgtattctggttcctactagggaataacaattttgcctttatatcactgtcttttcacatctctcaacctttgcctctggcagaacttgattcttttttagatttattcagtgtatgaatgtgtcattaatttccaca

SEQ ID NO: 53838 - DNA, 558 bp, Homo sapiens
tgagcactatttatatatgccagctattgaataaaaaccaacgtgtgtaatcccactgagtcttcaggggtgtgtttgggagagggcactgggtctttgagtcttgcttctcttggatgcattctgctcacccttcctgtaagcttacaggagcctgttctacctgaggaagaaatttctatggttgtgcagtgctgtatatagctggaaaaaaaaaaactggattaggagacacatccatgctgtgtgtccatgttacattctcaaaatggttttaaaggaataaaggtaattttctgatctccatatctgtgactcagatgtctctttctcagctgrttctgaattcaagcaacaaagaggactgttgcctgctacccaggtcaaacctcaacagatgaggaaattgaagctcagaagggtcccttgccaaggccatgcacgcagttaggacacaggcattctggagctcaaatggagaaccctgatgctatagtgtctcctactaattctagaacgagacagccttaaaatagggatcatcatgaatcagcaaag

SEQ ID NO: 53839 - DNA, 557 bp, Homo sapiens
tattaaaagtcataaattattgaatgattttgttataattttwggtgaacaagagtttaagacttaaaaatttttttttttgagacggagtcttgctctgtcacccaggctgtggtgcaatagcatgatcttggctcactgcaacctccgcctcctggttcaagcgattctcctgctcagcctcccaagtagctgggattaccggcacgccccaccacacccagctaatttttgtatttttagtagagatggggttttaccatattggccaggctgatctcaaactcctgacctcaggtgatccccctgcctcggcctcccaaagtgctgggattacaggcatgagcccctgcacccggtcaaaattttttttcttaaaaaaaagttttaaacaaggacctttttctctagcaaggtacagctgtttggggaggtggagttagtgatgatgtggtattgggagaggcatctgcagcttagatgtgttgatttttgaaatgcctgcatgaatatccagataaaaatggcttataagtagttagaaatatgaatctggg

SEQ ID NO: 53840 - DNA, 1675 bp, Homo sapiens
ttatgtccccagtaccacactcaggccacaccaaatataaagggttacaaatattcagattttattataaataaaatactgtttttcttaaaacataaaaatgccaagtgttgcattttattaaccaccccggagagcaaggctgtagagattaaggcaaacagctaaagtgaaggcacatataaaaggtccacagttggaattcaaaggaaaaaaattcagggaaaaatagcagtataataatccctgtgtcaaccagcattctgcagcagccatcctgtcaattacattacataaaatacagataactggagctagacaataaaataatggctgtgttgcgggagtgtaattaaggtatcatcttgtaaagaaccttttattttaaaaaataaaattctgcttaaaaaatataccacacaggtggaggagaaaagcaaataacaaaaagaaagttaaaaggaaaccaaaccaaaccaccccattgtggcctgagacttgctggagtgaacttcacccaaactagcttggcagtcaatcttcagtcctcttctgcaaccttgaccaaatgcatatgttaggatgtagccacttaatgaaatgaactagccaggaaacratgacgtgaaaactttgcaacagcacgccacatctcctgccatagtagaagaggcctgggagaagcagcagagtgaaagctcaggagtatatcgtcaaaacacttgtggtaaactctggtatatcccaagcagatggaaacaggaagtgggatcatcaagaactaagttacaccacctctcccagtctacccatcagtaagtagcactgttcctgatgccctaagtgctcagtcaaaatgtactcccttataaaacttacctatccagctccaacaattgccagaaagggcatttctccctcattcctggctagtcccactgtggcgtcaaagatcctcttcagcaaactttcctaatcctaccatagcttgtcaacctggcgttcctgctctggaacattgtaaaaccaccgtgctgcaggttaggatcatcaggactgcaatggaagaggacccaagttacctctttacagtggctgggtgtggaggaaagcaattatattaattttagagaatggagatgctgcaaacacaaggcacaattctttggagtacaatccaaagaattctagaagggagggaaggaggtattcagatacattgtgccagtgaagaggaaaaattgagcaaagtgaacagagtgtcattctagaaataggactaagtatatttacataaattccttattctataatcatgataaacaaaacacaaaacattcacacaaaaatataaatttgaaataattaatagcaccagtgtgtcagataatagtttctttccccccaccccgcccctgctacgcaaagtacaaagttgcatagtgttaaaggccatatatgaattctcaaaggtgggttggtaggaggaagggggtgtgtggcagggaactgtcacactgtggtcttaaaaccacagaggtgaggatcaaaagttgagaagcccactaggaaactccacgtaagggtcttccctctacacttagagggaaggtttagagtggatttaaatcacaaagtgcaggaactcgatagcgttggcagctgtgtgaaatac

SEQ ID NO: 53841 - DNA, 1675 bp, Homo sapiens
ttatgtccccagtaccacactcaggccacaccaaatataaagggttacaaatattcagattttattataaataaaatactgtttttcttaaaacataaaaatgccaagtgttgcattttattaaccaccccggagagcaaggctgtagagattaaggcaaacagctaaagtgaaggcacatataaaaggtccacagttggaattcaaaggaaaaaaattcagggaaaaatagcagtataataatccctgtgtcaaccagcattctgcagcagccatcctgtcaattacattacataaaatacagataactggagctagacaataaaataatggctgtgttgcgggagtgtaattaaggtatcatcttgtaaagaaccttttattttaaaaaataaaattctgcttaaaaaatataccacacaggtggaggagaaaagcaaataacaaaaagaaagttaaaaggaaaccaaaccaaaccaccccattgtggcctgagacttgctggagtgaacttcacccaaactagcttggcagtcaatcttcagtcctcttctgcaaccttgaccaaatgcatatgttaggatgtagccacttaatgaaatgaactagccaggaaacaatgacgtgaaaactttgcaacagcacrccacatctcctgccatagtagaagaggcctgggagaagcagcagagtgaaagctcaggagtatatcgtcaaaacacttgtggtaaactctggtatatcccaagcagatggaaacaggaagtgggatcatcaagaactaagttacaccacctctcccagtctacccatcagtaagtagcactgttcctgatgccctaagtgctcagtcaaaatgtactcccttataaaacttacctatccagctccaacaattgccagaaagggcatttctccctcattcctggctagtcccactgtggcgtcaaagatcctcttcagcaaactttcctaatcctaccatagcttgtcaacctggcgttcctgctctggaacattgtaaaaccaccgtgctgcaggttaggatcatcaggactgcaatggaagaggacccaagttacctctttacagtggctgggtgtggaggaaagcaattatattaattttagagaatggagatgctgcaaacacaaggcacaattctttggagtacaatccaaagaattctagaagggagggaaggaggtattcagatacattgtgccagtgaagaggaaaaattgagcaaagtgaacagagtgtcattctagaaataggactaagtatatttacataaattccttattctataatcatgataaacaaaacacaaaacattcacacaaaaatataaatttgaaataattaatagcaccagtgtgtcagataatagtttctttccccccaccccgcccctgctacgcaaagtacaaagttgcatagtgttaaaggccatatatgaattctcaaaggtgggttggtaggaggaagggggtgtgtggcagggaactgtcacactgtggtcttaaaaccacagaggtgaggatcaaaagttgagaagcccactaggaaactccacgtaagggtcttccctctacacttagagggaaggtttagagtggatttaaatcacaaagtgcaggaactcgatagcgttggcagctgtgtgaaatac

SEQ ID NO: 53842 - DNA, 1675 bp, Homo sapiens
ttatgtccccagtaccacactcaggccacaccaaatataaagggttacaaatattcagattttattataaataaaatactgtttttcttaaaacataaaaatgccaagtgttgcattttattaaccaccccggagagcaaggctgtagagattaaggcaaacagctaaagtgaaggcacatataaaaggtccacagttggaattcaaaggaaaaaaattcagggaaaaatagcagtataataatccctgtgtcaaccagcattctgcagcagccatcctgtcaattacattacataaaatacagataactggagctagacaataaaataatggctgtgttgcgggagtgtaattaaggtatcatcttgtaaagaaccttttattttaaaaaataaaattctgcttaaaaaatataccacacaggtggaggagaaaagcaaataacaaaaagaaagttaaaaggaaaccaaaccaaaccaccccattgtggcctgagacttgctggagtgaacttcacccaaactagcttggcagtcaatcttcagtcctcttctgcaaccttgaccaaatgcatatgttaggatgtagccacttaatgaaatgaactagccaggaaacaatgacgtgaaaactttgcaacagcacgccacatctcctgccatagtagaagaggcctgggagaagcagcagagtgaaagctcaggagtatatcgtcaaaacacttgtggtaaactctggtatatcccaagcagatggaaacaggaagtgggatcatcaagaactaagttacaccacctctcccagtctacccaycagtaagtagcactgttcctgatgccctaagtgctcagtcaaaatgtactcccttataaaacttacctatccagctccaacaattgccagaaagggcatttctccctcattcctggctagtcccactgtggcgtcaaagatcctcttcagcaaactttcctaatcctaccatagcttgtcaacctggcgttcctgctctggaacattgtaaaaccaccgtgctgcaggttaggatcatcaggactgcaatggaagaggacccaagttacctctttacagtggctgggtgtggaggaaagcaattatattaattttagagaatggagatgctgcaaacacaaggcacaattctttggagtacaatccaaagaattctagaagggagggaaggaggtattcagatacattgtgccagtgaagaggaaaaattgagcaaagtgaacagagtgtcattctagaaataggactaagtatatttacataaattccttattctataatcatgataaacaaaacacaaaacattcacacaaaaatataaatttgaaataattaatagcaccagtgtgtcagataatagtttctttccccccaccccgcccctgctacgcaaagtacaaagttgcatagtgttaaaggccatatatgaattctcaaaggtgggttggtaggaggaagggggtgtgtggcagggaactgtcacactgtggtcttaaaaccacagaggtgaggatcaaaagttgagaagcccactaggaaactccacgtaagggtcttccctctacacttagagggaaggtttagagtggatttaaatcacaaagtgcaggaactcgatagcgttggcagctgtgtgaaatac

SEQ ID NO: 53843 - DNA, 1158 bp, Homo sapiens
tcccaaactgctaggattacagccgtgagtcaccatgcccagccggaaggacagattttatccagcttactaataaatggtgaagcactattgaatcttgattatgattctcaagtacaatgaggtgggtttgtcaaatttacatggtcaatatgtgaagggaagttgggagcaccagaagccatcatgggttcatgaagaaaaattatgccagatgtattgcatttctatttgggttggtttgttgcatgggaagatcagggatataccacagataccagatatctgaatgcacccaagatatttgacaaagcaaggtcacacagccagtttggagatggagtttgctgggaagttaagtgtctttctattcccaggattccatgctaggttttccctagtgagaactctctggttctcacaagtatattaatttctgcatgtgtttatttgaatattcaatcttcccaattaaatgtaagctctctgatggcagaaactatttctgtttcacttcccagtgcatgtccacttctaggcacattatgggctcccaacagattgaatgaacaaaatgtgtgtgtgtgtgtgtgtgtgtgtgtgtgtgttttgttttgttttgtttttttccaaagggcacaattgtaggctgcttgatagtatagtcaagatggtttacttttattcaattacatgttctcaaagagttttcattcacagtctgatgtcaccctgaagagggttctctgcccattagctgtcaagttttattccaacatgaatgtcagtgtcttaaagaagggaatacctagcatggaatactgggaataacaagggccacagttaaacttcccaaccaaccccgtctctgtactggctgtgcaatctttctcaagacaatccctgaagatatcaatttattgatatttaacacatggatatcagcatcaacttaattgcagtcttacatgtactcaatgattgtaccatacataaatgtttagtcctgttgcttgacatgtagcaggcagtcagtcactattgttccctttcttacctcctgctccttttcaggtttattcaactcataaagggcctgtagtcagggaatastgcaactatgagatcagaagattaggaccaaaaaagtacatcttg

SEQ ID NO: 53844 - DNA, 3211 bp, Homo sapiens
gggggcgggaacgacacaccaccgttcggcctcgggcacctgagggacaacccggagcgctccaggagcaccgcaagggcccaggcggagccgacgctcgcgcaaaccccccccgagagggcagcacgacgggccggcgggacggcacccccaccgccgcggaggggggccgcccgcaagtcgacaaccactggaggcgacagcgagggctgtctgccgcgtcagaggaccccgccggcccgcacccgcgaagcagaaggcggcgggcgggacggcgaggtcgggccggggtccgcaccccacgccttcccacacgcaccgccggcgggcggggagaggagagacgaggggacccccgcggggcggagcgagaaggacggtcccgttcgccacgaacgtccgcccctcgcccgtcgcggctcggacccggcccgggagagcacgacgtcaccacatcgatcacgaagagccccccgggagcggaggccggccggccggccagcgagccgatcggctccggccaaccccccactccggggaaggggcggcggacaaccccgcggagacgagaacgcctgacacgcacggcacggagccagcggggtggggttgtcgcggccgccccgggcgcccgcagcggagagcgcacgggggcacggtggccctcgccgccttccccgccgcccccgggtgggtcagagacccggacccgggccggcaccgggagtcgggacgctcggacgcgcgagagaacagcaggcccgcgggccccggcaggcggctcaagcaggagcgcggccggctagccgggtcaccggtaggccagagccccgcgcgcatccggaggcccaacctctccagcgacaggtcgccagaggacagcgtgtcagcaataacccggcggcccaaaatgccgactcggagcgaaagatatacctcccccggggccgggaggtcgcgtcaccgaccacgccgccggcccaggcgacgcgcgacacggacacctgtccccaaaaacgccaccatcgcagccacacacggagcgcccggggccctctggtcaaccccaggacacacgcgggagcagcgccgggccggggacgccctcccggccgcccgtgccacacgcagggggccggcccgtgtctccagagcgggagccggaagcattttcggccggcccctcctacgaccgggacacacgagggaccgaaggccggccaggcgcgacctctcgggccgcacgcgcgctcagggagcgctctccgactccgcacggggactcgccagaaaggatcgcggcagagggaccgcggcccggcccggggaccgctccccggcacccgggggacgggggcgggacggtccccggctccccacggggactcggaaacgaattcggccgccgcctcagacggccaggatgagcgcggacccgcgaccgggccgggaagggcgtccccagcctcccgcgccacgcgcggcgggtccccgcgggtcgcggctcgggcctcgggagctacggcgcgctggtcgaccggcccgggcagccccacgcccgccgcgggcccagaagcgcagcgacagcctctcccccacataaacctgcacgccagagctgtgactcacaagcgacgcgccacagctctggcgccaccgggccagccgggctgacgaccgcgggctttccggagctctgcctagctcacagcggggacggtcccctccctcggcagctgccaccgcagctccggaagccgagagcacgatctcaaagcggccgccagatggagcccgacaaccgccgcggacgtcagcgagacagatccggctggcagggcggcccgtggaccgcgaaagcgaaaccgtgagtcgagaagctcttcccgaggccgaaaacgcagcccctctgccccaaccccacacaaacggtgcccaaaacgcgtctctgcctcgaccgcgacagagtcagaagacaacccacggcgcgtgggtgtttggagatgcctctcggaagcagggagggagggagggagggagggagggagggagggagaaagaacacacaaggactcggtcgcgggtcgctgcagacacacggagaggcagaatgcgtaggctcttccggaatccacgcagagacagacggggggaggggagtggggaaaagagacagatggcgaaagggaaggagggagggaagggagcagggagggagggagggagggagggaggaagaaaatggagaaaagagagacaatttagaaaacgtagatacacaaagtaaacttctgaaacactccattttttaaaagacagacggaaaggaaagaaacacgaaaaagagagaaagaatgaggaaagaaacgaaggaaagaagggaaaaagaaacagagaggaaagaaaaaagaaggaaacacagggaacgaaagagaaataaagcacgaaggaaaaaaggacagaaagagagaaagaaggaaaggaagagaggaagaaaaacctaaagaaggagagaaaggaagaaaggaaggaagaaaaacacgaaggagaggaagaaagaaaacagagataactacgtacgctcgttcatttacacacataaatacgacgcttttcatacgtaaartaaacgtctttatcgacgatcccttctttatagagcgatgtgtatttatttgtataacacagacacctacatctatcatacagaagtctatttccatacaaccgatacgtatttaccatacgcaagagtattcaacgcagagatacacgttgtcgttgtttgcatataagcgtacagaaacgtttacattaatacatataagtaaacgcgtggaaacgaaagaaataaaaaagcgaaatgagtcaacaggccgggcacggtggctcacgcccgtcatcccagcacttcgagaggccgaggtgggcgcatcacaggaggtcgggagttggagaccagcctgagcaacatggagagacacggcgtgcctactaaaaacacaaacatcagccaagccaggcgtgggggtgcctccctgtcatccccgctaatcgggaggctgaggcaggagaagcgctcgaacccgggaggcggaaggtgcggtgagccaagatcgcgccattgcactctagccgtggaaacaagagtgaaactctgtctcaaaaggacgaaacagaaagaaagaaagaaagaaagaaagaaagaaag

SEQ ID NO: 53845 - DNA, 1888 bp, Homo sapiens
ttgctacataagtgtgtttaaaattgacaacagcagttactacctattgtcaatgcatttcgtcaaaatccttttgatgtaccaaaaaagagaaaaggtggggaaagggggaagaatatgtatgctgtcagacttaaaggagagttcttcctatccagagaggagctgtgttaaaattaccccactcgtggatttatatctatccccacacagacacttttttcttttgcatgggtcaatgaaaaattcactaaggaccggggtttagaaatcactgagtagctcaactaacccttctttgatatttggatccttttatataatctctgtaagtggtcttccggtaatacctgaacattgcaagtaacgggtggtgatttccaccttttaatggttttgagtactagaaagttttttggcctatagaattgaaatctgattctgcttgtttattcaaattctactgccttggtggcctacagaacaaatccttcagtctctgtcagagttgggctcttggtgtaacgtgacccgtgaacatgacctgtgtagagtacagcaggagtgtcttgtcataggttgcatgttgcttgcactgatgtagtacaagtttgcatttacttttctggtggccagactcaacgagtttccttttcgctaaaacctgccgagccgttaatcacatgctgccattgaacctcgtctttccatcttgcgctgatgtcattgcaaaacctaacatttattgcgctgtggttttgctttattttagctgattctttccatcatgctttttagaatttgattatattatttggcacctttacctgtcctcccaaagaaatgctgtctgtacattattagatcagactcttttatatctttacttaagccggtgatgaaattgttaaactggctgaacaacacgaagtgtgtctctggaagcttccctcgaggcttacaaggagtcacactctcggttatagttaactactaatgctcttcatatcttataactagcccatatagctccacctttccacatggatatcctgaaagagtgtgtcaaacctcctttgctggttctactgaccaagttatgctgagtaataatgagttcattttcagtgtgtccctagtaacgagcactctcttctgcatatgattaagaaaatgtgttaaatgactgactggattgagacactagggtcacactgtgatctgtgacctccggaggccttaggaactgcagtgcttctaggaaaaatcagaatattgttggactttcttcagcttattttttggtttggtattctcttgtgttgaattgctttcagatagtggggaagaacaccacagtctcttccggttttgttttaattggttgatatacttctcttcctattttactaataaacatttagccaaaaggggtgtcttgaactctgcccattagattactccatatttttcacttctacatatttgcttaatcttctgagaaatatccccatttagttgagttcctcaagaaatcagaacagtccgaagtaagctatctggtagtttattcaaactcttaagtaaaaatatctaggtaaagagccagtgttaaaaattgttattgtggaaagtaagaactcctgggtgaataaaagattatgtctgctgagatgaactattgtgtggagttttaaaagaaagttctggttaatgcttaagrcatagtgtcctgtgaagtcagcataactactttcactgtcttctggaggtggttttgataacacatttggttccttgttgaacagtgggtattcacattgttcaggaatagctttgggatactgtcctctccgtattgaagtttctaataagtaattttaggaat

SEQ ID NO: 53846 - DNA, 1888 bp, Homo sapiens
ttgctacataagtgtgtttaaaattgacaacagcagttactacctattgtcaatgcatttcgtcaaaatccttttgatgtaccaaaaaagagaaaaggtggggaaagggggaagaatatgtatgctgtcagacttaaaggagagttcttcctatccagagaggagctgtgttaaaattaccccactcgtggatttatatctatccccacacagacacttttttcttttgcatgggtcaatgaaaaattcactaaggaccggggtttagaaatcactgagtagctcaactaacccttctttgatatttggatccttttatataatctctgtaagtggtcttccggtaatacctgaacattgcaagtaacgggtggtgatttccaccttttaatggttttgagtactagaaagttttttggcctatagaattgaaatctgattctgcttgtttattcaaattctactgccttggtggcctacagaacaaatccttcagtctctgtcagagttgggctcttggtgtaacgtgacccgtgaacatgacctgtgtagagtacagcaggagtgtcttgtcataggttgcatgttgcttgcactgatgtagtacaagtttgcatttacttttctggtggccagactcaacgagtttccttttcgctaaaacctgccgagccgttaatcacatgctgccattgaacctcgtctttccatcttgcgctgatgtcattgcaaaacctaacatttattgcgctgtggttttgctttattttagctgattctttccatcatgctttttagaatttgattatattatttggcacctttacctgtcctcccaaagaaatgctgtctgtacattattagatcagactcttttatatctttacttaagccggtgatgaaattgttaaactggctgaacaacacgaagtgtgtctctggaagcttccctcgaggcttacaaggagtcacactctcggttatagttaactactaatgctcttcatatcttataactagcccatatagctccacctttccacatggatatcctgaaagagtgtgtcaaacctcctttgctggttctactgaccaagttatgctgagtaataatgagttcattttcagtgtgtccctagtaacgagcactctcttctgcatatgattaagaaaatgtgttaaatgactgactggattgagacactagggtcacactgtgatctgtgacctccggaggccttaggaactgcagtgcttctaggaaaaatcagaatattgttggactttcttcagcttattttttggtttggtattctcttgtgttgaattgctttcagatagtggggaagaacaccacagtctcttccggttttgttttaattggttgatatacttctcttcctattttactaataaacatttagccaaaaggggtgtcttgaactctgcccattagattactccatatttttcacttctacatatttgcttaatcttctgagaaatatccccatttagttgagttcctcaagaaatcagaacagtccgaagtaagctatctggtagtttattcaaactcttaagtaaaaatatctaggtaaagagccagtgttaaaaattgttattgtggaaagtaagaactcctgggtgaataaaagattatgtctgctgagatgaactattgtgtggagttttaaaagaaagttctggttaatgcttaagacatagtgtcctgtgaagtcrgcataactactttcactgtcttctggaggtggttttgataacacatttggttccttgttgaacagtgggtattcacattgttcaggaatagctttgggatactgtcctctccgtattgaagtttctaataagtaattttaggaat

SEQ ID NO: 53847 - DNA, 649 bp, Homo sapiens
aacaataaggaaaacaatgaaagaaaaaaaagaagataggttccccagagcacctgagcaacagatggcaaggaagatggcctgggtccaccgaggaggttttagcactcacattgctttgcatgggtgtttgaaagtggaaatcaccacctctattccagaggcaactgaataaagatgtattcttagttcaaacactgtaaaaatggcctaaaacagtaaatgggagtaaatatatatatatatatatatatatatatatgtgtgtgtgtgtgtatatatatacatatgtatatatatgtatgtgtatatatatatacttatgtgtgtrtatatatatatgcaacagtatattgggagaagtaacaatgataaaaatttcctttagctccaaggtagtcatattgtacttaagcactttatttcattttaaccctacttgtgcccatccttgatattttcacaatttacaaattggtaataagggtaatgtggtgatgcttaaattgaaaaaaaaaaaaaagaaacaaaacaaacaaacaacaacaaaaaaacagtgcttgtaagaagagggagaccttgaaaggtctgttcctttaaactagtgccgggtaaatgcaaaccctgttgtggatctgactactagatg

SEQ ID NO: 53848 - DNA, 1271 bp, Homo sapiens
tcctgaaattcaacagcatgtgtctgcttggcttsctgcccctcactccccagagcccccaaatggtgaatttccttttcctggccccctgccggcttcagcagtcaacttatactttagtaataagcagtgaagaacacagctcctgtgatatggcatttgtgcttcttcagcaataaaactattccagggccctcagttgggaacagtggaagaatttggaggtcagtttcctgttgtggatcagagaggagggctcagaatgtacatgaatcttcatctgcaccctgaggttgcacagcaagaataaggacagtaagtaccaaaagcttaggtggctcaggttgagcaaagagtctcccagtctcccagaatcctgccaactcagcgatgattttacttttgcccgtttccttctgggcttcgtgcacttgcatgcagctctctggaagctgtgattgtggcaggcccacgggacgtctctcgccactcacctaggctgtgtttatgcatttcaacatgtgcccagccagcatgtgctgcctcagtgctgggccctgggcggacactgagtagggaccggtgatgaaaggtgcgcagagctgacgttctcgtagggcagagagaggcaaaattaagcaacagctccggcttctgggcattttgtcgtgtttgctgaggagcccttacatcatcgcattccgtgttcacattccatgcagtgagtggaagtactgtttctcatgctgttgctgtgtgtagcacgcgcggcccttcacattctttcctgtcgtcttctgggatggggggtgatgtggacctcgtagcgcatgtggcttttccgttgtgtggattatttttgtaaagctgatacttagaagtagaattactgaatgagtcaaaacttaggaacttatatttttaagtattttggaatgtttcaaacagaaaatttcaaagcagagagcataatttcctcagccctcatgtgcccacctcccagctgcagtaagtacccatctcagccagtcttattttatctcaagccctccgagctctcactgaattattttaaagcacatcgcagtcctcatgttacttcttctgtgcatatttcagtacgtacctctaaagaagggggatcttttaaagaaggcagtcacaccgccatgattgcctcttaaacaatggacagtcgctacttaccagcaaacatctggtcaatgtttagatgtttccactaatctcacaggctttttgcagctggatca

SEQ ID NO: 53849 - DNA, 557 bp, Homo sapiens
ttgttaaagtgtgaaaataacttgtagtgtttttcatcttcggtggaatgattaaactcacgtatattgacacaaaatttgtaaaaagaaatatactgtgtaaatgtgaatttttaaataataacaatacataaagaaaaaaggaccaagcatttttcattgcagaaataggatagggaaggactgaagtaatcatttgatttcagcaaatcacatctcactctgttcgtcatcttggctccatccaagaggtctgagggctgggagggactaatagtagagttcctacttatctgtataatatcaaaaattcataaattttaagtcttgtgatctttcccctatcttttttttctrgagttttcttgaggaattgtgaaacggactgagttgaaatcagaaccatggaaagttgattatttacttattaaaaaaactgaaaataagatttcttttaaaataaaatgcaggataaaatgtatctaatgaaatacatttttgtttgaatattgcaatggtgtactttatctgtacattgttggtatttccttatagca

SEQ ID NO: 53850 - DNA, 728 bp, Homo sapiens
cattgccctacagctttgctcatcagcaactgcctttatcggttatttatagcatcatggcctgtgatggaaaggccaatctaaattctgaatatataaaagatgcagataatgctggaagtatttcagaaggtaaacaaatatcaccacagtgttttgtggcctatcactgtttttataataacatgagtacaaaatgtcacaactggaatttattctaaggcaatgctagcagtgagatggaaattttacaagctttaacagtttaaatactgttgaaaggaaactttgatttgaacatgaatagtgaaagggtctaatccaaatgagtcaaattcaggataatttaagagcatattttcccacttcataaaattatatcattgcatttcatttctaccctgagctttgaaacagtgttgattatattgacagacatatagattgttcataatttacatattttagaattttattgataaaaatattaaaatcttgaacttaatgacttaattttaaaaaatatattaagtaaaaattgtttacttttaaaaatctttattttctcattaagtcactagaatactttcagttcatcacatcctagcaaatgttcagttagaaaattttgtatttaatttaaaagggaataaaaggtaaacwccagcaggaaatttagatatttactttaaagtagatatgagaaaatgtaattttaaacctaggaa

SEQ ID NO: 53851 - DNA, 632 bp, Homo sapiens
ttttcttggagaagtagagtatcttgggcaggtcaattacctttgcattaaatccacctatgtatatttccctttcattacagtcttaaaatgtttatttgctttcctctatactattccatatagtgttagaagcctgtcaggcaaagagcctgtttaactaattgtcaactgggaaacatttatctagaaacttctttgtaaccaaatgaaaatacttgctttgaaataaacggggaaggcagaagtggcaacactgcccattccacctactatgttayaagccagagcaaacaaattagtttgctcttaataaaccatttttatattcatcaattataataaatataatttaaatatcaatgaaactgcacttctgttttctacactaaactcatggtttaaaaaattaatatctgctgggcatggtggttcatgcctataatcccagtacttcgggaggccaaggcaggtggatctcttgagccccagagtctgagaccaacctaggcaatacagtgagaccccatctctgcaaaaaacacaaaaacttgccaggtgtggtggagcatgcctgtaaacccagctattcaggaggctgaggcgggaggatcaattgagcccaggaggaa

SEQ ID NO: 53852 - DNA, 623 bp, Homo sapiens
cattaataagtaagcagcagctgggcatggtgacgtgcatttataatatcagctacttgrgaggctgaggtgggaagatctcttgagcccaggagctccaggctgcagtgagctctgattgtgccactgtactcctgcctgggcaacagagtgacaccctgtctctaaaaataaataactaactaaataaaataagctagccccaaaagttccactgagttccaatttaaatagactaaagatcccctggtcaaaatgcatctctattgttcactgggttccataacagagagtgacaagaattatttgtctggcttgtttaaagttatttgtcttcaggccgggggcggtggctcacgcctgtaatcccagcactttgggaggccgaggcgggcggatcacgaggtcagaagatcgagaccatcctggcgagcactgtgaaatcccgtctctactaaaaatacaaaaaaaattagccgggagtagtggcgggcacctgtagtcccagctactcgggaggctgaggcaggagaatggtatgaacccggggggcggagcttgcagtgagcggagatggcgccactgcactccagcctgggtgacagagcgagactccatcccaa

SEQ ID NO: 53853 - DNA, 637 bp, Homo sapiens
tttcagtgcttatattggccacattttttttttgtttacaactacacctgatatccccaaggttactctgtccccagttaggtggaaaatgtgaataagtcccagaatctgtaagtttcatctacactgttttggctccctgcaggaaagaataacctaggtgttagattttgttggttttttgtctatattattccaatactatttctctggaccagattcttggaagctaaaggtatagttttcatgccccattggtaaggtctacttctatcatgcctctcaaagtgatatggtttggatttgtgtcccctttgccttccaccatgactgaaagttttctgaggctctctcagcagtgcttcctayacagactgtggactgtgagccaattaaacctcttttatttgtaaattacccagcctcaagttttttctttctttttttttttttttttttttttgtgacagagtttccctctgctgcccaggctggagtgcagtggtgcgatctcggctcacggcaagctctgccttctgggttcacaccattctcctgcctcagcctcccgagtagctgggactacaggcacctgccaccacacctggctaattttttttttttttttttttttttt

SEQ ID NO: 53854 - DNA, 603 bp, Homo sapiens
  misc_feature (1)...(603): n = A,T,C or G
cacaaccaacgagatatatatatatatacrcgcacacacacgtgggtatacatagacatatatgtattcatgtatatatttctttgaataaccctgactctaactaacatacacatgcgccacatcgncacatccaattattgaagaagtttaacatttgctcaacattttgagcacatggaaaaaatattatcagttttgaaacaaccatttacatttaaaaatgtttccattttgctttcatttctacattctcatctagttctctttcccactgacagtccactaaaaaaaggttgtggatatgtagcataattgaagaattttagattgggcatcagaatatctgtacctgaacatagaatttatctattagtataatatgtaaacttgaacaattcatttctccttccagatactacatttgtcatctttaaattaaagacaaatgtatgtttttttatggtagtattgtaagaattgagaattaaaatatagttttttagcaaattataaaatatcatctgatgtaagcttactgtgttcataatagtaacagtaatgttattattagtactttccctaaaacatgtaaaatccaaa

SEQ ID NO: 53855 - DNA, 612 bp, Homo sapiens
taacattaattaaacgaacatttgaaattgcacagaaacaaaaaaggagaaaaaatttataatcctaccaattatataaacaactcttaacactggaatgtgtcttctgtctcttaaagaacagattgttgggttttcaccaaattgtgctcattctgtatgttcaattttgtctcatgcttttttcacaatattatagcayaagcattttccatttgtaaataacattttctttcatgactacataatatgctctgaagtagtcatgccatgcagaagatttttttctaaatttgttcaccacttcaaataatactaaaatgaacatatatccgtgtatataatggttgaacaatgtgtatggtagtatactagaggtagaattgagtttaagaatttgaagatttttggctgggcgcagtggctcacgcctgtaatcccagcactttgggaggctgagatgggtggatcatgaggtcaggagattgagaccatcctggctaacactgtgaaaccccatatctactaaaataatacaaaaaattagccaggtgtggtggcgcatgcctgtaatcccagctactcgggaggctgagacagcagaatcacttg

SEQ ID NO: 53856 - DNA, 656 bp, Homo sapiens
ctattaacagaaaatattttttgactgataattcccaaagcagtcattatggcaatgaacacagcagttcaaaatgttatcatatttatcttatcacaaatgttattaatagctcaaagcagttgaaattgtcattaactatttttaataaataagtatatttcggcacttaatattcccaggagctttatataacaatattttcctcaatcttcacaaggctgtgaagtattattattaccattttgcaaatgagcaaactgacatggacactttaagaaatttgctaaaggtcacaccagtagaagttgaacagccargatttgagtccaagcctgttttaatccaagccccaagccccatccactgggccatggatcagcaaatctttttctgtaaaggaccagatagtaaatattttaggcttttcaggccttatggtctccatcataactactcgactctaccattatagcacaaaagcagctataaatgatacagaaatgaaggacatgactatgtccaataaactttattatgggcactgaaatttgaatgttatattatttatatgtgtcacaatatatgactcttcttttcattttctatccaaccatttaaaaaatgtaaaaatcattcttagttcatgagccata

SEQ ID NO: 53857 - DNA, 623 bp, Homo sapiens
aagttccattcatcagagaaagagataatatttctaaactggcacacatttaattaacactgcctgtcaacacttcactgtcttwattactgtagaattaaataagtgaacccttaacatcatccttggcacatagcaagtgcttaataaatgtcagtgatagcagcagcaggaacatactctgtgactggtgaagccatttgacttctatgagccttagttacctcttctgaaaagtggccataataataaattattttttcaagttgctttgcaaaccaaatgagaataatgtatgtgaagatgtttcatacactacagagaacaatataaacgcagaaatcgctgctcttatcagttaactggtattacaagcagcagtgtcaaggtaagcaaccatctgagcagtccccaggtgaaacagcagctctgaggatgtccaggtgtgcgcagcaagaccaggcagcggggcggccccctatgctagtgaagctcaggaagagcccgtgggcgaagtggtatcaggaaagcttcttggagggtgaagcccgccctctggtggataacccttgttcaaactcaatcagacgagctttccagaggtccttggggaaaccgttcct

SEQ ID NO: 53858 - DNA, 663 bp, Homo sapiens
ttggcacccctgtcttggcattggcacagrtgtttcaccctgattataaataggaataaggctgctcttatacagtgggggcaagaaggatccctgtggatccagggtgatctgctcaggtgcttcttggtgttcctttgttccactataactgcaaatggacaggtcatgcaactctggcctgagaaggacgtgatgaccaggggctcaggcttcttggggatgaaggtctggatcccaccaccacgtgagccactgaggccagcagaagtggcagctgagggtgaggggagtctagaaccaatggaggaggagggagatgagggccatcacctgcagccccaggacggactgccgtggtgggggctgtagttcgtcccactggcgttcctccactaagttccctcttgggaagagggccagaggaattctgaaggggctgcgccttcagtgtgtatgggcgggttcttgtagacagcagctttcaatggtgtccactgctgcccactagtaggggggtgcagttagcagatggcctgccgctgtcacctcttcagggtctgcctcagtggctgagagcccactcagccaaggtcccacccttcctagggcagcctgtatctggtgattgaaggaggtggggtgtaaaggtcaggccattcc

SEQ ID NO: 53859 - DNA, 663 bp, Homo sapiens
ttggcacccctgtcttggcattggcacagatgtttcaccctgattataaataggaataaggctgctcttatacagtgggggcaagaaggatccctgtggatccagggtgatctgctcaggtgcttcttggtgttcctttgttccactataactgcaaatggacaggtcatgcaactctggcctgagaaggrcgtgatgaccaggggctcaggcttcttggggatgaaggtctggatcccaccaccacgtgagccactgaggccagcagaagtggcagctgagggtgaggggagtctagaaccaatggaggaggagggagatgagggccatcacctgcagccccaggacggactgccgtggtgggggctgtagttcgtcccactggcgttcctccactaagttccctcttgggaagagggccagaggaattctgaaggggctgcgccttcagtgtgtatgggcgggttcttgtagacagcagctttcaatggtgtccactgctgcccactagtaggggggtgcagttagcagatggcctgccgctgtcacctcttcagggtctgcctcagtggctgagagcccactcagccaaggtcccacccttcctagggcagcctgtatctggtgattgaaggaggtggggtgtaaaggtcaggccattcc

SEQ ID NO: 53860 - DNA, 582 bp, Homo sapiens
tatgcaattgagaaactaatttgttaatttacatgttacaaactaacatatgtaaatatatgtatatataagcaattgagaaactaatttgaataaggcataatctcggcctccacaaagcatggagtctaacaggagacataataatacctggcatgtgaaaagyactagattagaagcacgtgcaggatatcatgggagcccagagaaagggcgcctgaatcaacttaccggcagagtacagaggtcccgggacaggtgacagagagatgacattcgacatgagttttgaaggataagtgggattaagctaaaaccaaatgattcactggagagatgggtgaagtccagattgtgaaaaactttgtgctttattatctcgcatgtatatgacctcctccaacagacaaaaccgcagaaatggagaacagatgagtgactgcgggttgagggcccgagggactgccgtgggctagcacaagggagcttattggggtgactgaagagctctgcatcctacctggtgttcagtggtggagacataaatctattcatgtgctaaaatccacagaactgtatgac

SEQ ID NO: 53861 - DNA, 546 bp, Homo sapiens
tttaaaatggggtggttactgggaaggcagagaaggaagaaaggaatgtacctggcacagtgccaggcatacagtgggcatttctcagggtgaggaccctcccctaatgccagactctggcagtgggtgcatggctggcaccctctttctatctaggacactcccctgtcccctgtcctgtcttctcttgtccacaccttgcccagyggcctctaacctctgccctgggctcccccttcctgcagttctggatgctgattctggccaccaccatccccatgcctgccgggtacttcatgcccatctttatccttggtgagtctggggtcctgaggttctgagagttttggggttcttggggcagggccatgcatcctggttcaccctcttcccgggtggtactaaggatggtcctcagggatggagggctgtgggggccgggtcagcctggctccccctcaccctaagtctgtggccaggagctgccatcgggcgcctcttgggagaggctcttgccgtcgccttccctgagggcattgtgactgg

SEQ ID NO: 53862 - DNA, 514 bp, Homo sapiens
tattgtaatataataaattattgtattattgtattgatttatctatgtagagtataaaaaatggagaatggggccgggcgcggtggctcacgcctgtaatctcagcactttgggaggccacggggggcggatcacctgaggtcaggagttcyagaccagcctggccaacatggcgaaaccccatctctactaaaaatacaaaaattagctgggtgtggtggctcacacctataatcccagctactccggaggctgaggcaggagaatcacttgaacccaggaggcagaggttgcagtgagccaagatgttgccactgtactccaacctgggtgacagaatgagactccgtctcaaaaaaaaaaaaaaaaaaaaagaatggagaatggaaatgtaaattttaatgtgaatgtttagctaccaaagtatttaagatatcatttagaaaggtttacagaagtggaaatattctttttaaagacctatttgtttatttctgaaaccagaatgtactca

SEQ ID NO: 53863 - DNA, 543 bp, Homo sapiens
atatgttgattgggtgattaraagagttcaccaatagtttggtgaatggtcaggaagtcttggaaaagagacatttcatattgcactaagtgtcctactctggagaaaaataaccaagcatagagttatgacagcagagctggagtcaataggacactacaaatctaagaactacaaatcaaaatggtattttggccaacagagcaggttctagacacttgccacagcaccaggtgatgtgtattccaaccagaaggttgttataaggcatctcttgaattaagtttttcttattacttggacattatgtcatattctgataaaataaagtcatgataactctgctttccaaatgtattttcttttcaccttcaaaagcacacctccatctttatacattgcctttttgatttgatccccagaaccataagaaataaaaatgtctgtgatctttaaggggtggggctggaggctcgtgcatcttccttgcacctagcaaagttactgacacataatgagtccttaataaacaacaaattatag

SEQ ID NO: 53864 - DNA, 2411 bp, Homo sapiens
  misc_feature (1)...(2411): n = A,T,C or G
aaatataattttctgcacactgtgattaacaaagccttcttcttcgcaccatgggtctatgattggccctgattactcaacaataggacgtcaggggtagggtacttggtttcctagctcatcttctcccttttctcccatcaagcaataatcatggtgattctcaaatgctaaactcactaagggctgatttgctgcgcttgccacttatccaaccaatttagcagcaaggccctcttgggaccttatctctggtttgaatcatgtcccccacacctgagagtgaatgaagacgttgtctgatctgatgagaataccgggtgatttgttgtgtggctgattgaatctcaggtgaagggcagaggtggtggtggccgatgtggtcactggaatatggtggcacccatgacctttcttcaccttcccccatctgagtgcccaccagcccttctaggtacgcactgggcagcatgtgccatggcaggggaagcgatggagagagagttgcaggacaccatggggacacacctgctttgcacatgaggaagaaagctgggacccagggggctgattgtgctgtacagactcagaggttcagggtgtcaatgtccccacccccatcnccacagagggaatgatttgatctgaactctactgggggcatgtgtgacaggcaccacggcaaggctgccctttcaaggaaccataaccaggcgtcagtgacaggacttcatgaacttgttagcagggtgagtttgtctttcagtccccttatatacctttttggacccttctctgtttccttgggttctctactttgaatatgtggcactgtgtcacccatgtactacccaaactattcctaaatatttcttgaaagtatcttagctagcaagagaatcataatttttttttaacttggcaaaaatcttttcttcctatattgactaacctcaaccccaagtgtccccttgggccttatttctatctaaaataactgttagtattgagttttcctgccctgactctttcctgaattccacttctgccaaaacttgccttcccttggtctcctcactttaacctcttcccagaaaacttgtggagtccatgcattgaagcaagaggtaaacagacaataagcaatatcacatgtctgttgtaactggtgatacaataccttcacccaaagaagtgacttcaatatcaggaatcttagaccctcagtcagggaaatggatggatggggtggaatacatcagcttttcagagcccttcaattcccattcgctgcccactcagattacacttagggtagcttaattgccacacacacccttgttccaaagctatatgtggggcatctctttagagtggccattttttcccaactgaaaattaaaaactatgatctaaaaagcagtaccttatgaaataagttgtgaatttgtggatagaacaaagagaagtctttttttacacattatttaggcatacaatataaataattcttatcaaaaagaaaacgattgtaaggaattggaagtgtctcagaannnnnnnnnnnnnnnnnnnnnnnnnnnnnnnnnnnnnnnnnnnnnnnnnnnnnnnnnnnnnnnnnnnnnnnnnnnnnnnnnnnnnnnnnnnnnnnnnnnngtcagtagagctctctttctccatcgtatgaaggtgtagttatggagggtggtgggatattagtgtggttggtaactaaagcaagtcactatgtgtagctagtgggacagggctagcaagcagagggagatatcgaaacacacagaaagaaggaaagtaagaaggtaagaagcaaagtagcaagctaagagaaatggggcgaaatgtctagagatcagagggaagaggttggagtagatgacccccagatggccagggccacctctccttgtgtggagaaacaaaggcaacccctatcctattcttatcagcagctaaagggcagaatcgatgcaagaagattccacaggaagggaagttcctgattctgatttgtgtactaggactagaggttcayatgagcagggaattgataaataaaatgatcaataatctagaagtgaacataatagatagcttcaagaggcacagatgcgcaagcctattgctgaagcggcatcaaacatttctgagattcaagaaaataaccatttgggtctcatggtgggggcctggggatgctggaatttaaataaatgtcccagatactgatccagagagaaaagcaagatttgaagatcatcaagagaaacaaatctgtttacctccattaacctccacccccttttctccgtcaccctcttctccacatatatacggggaaaaagactcaagggggtcccagcaggtggtgatttcttgaatagtgttcattt

SEQ ID NO: 53865 - DNA, 551 bp, Homo sapiens
tggtatcccccatattgttctcatccctgtagtgaataggtctcacaagatctgatggtttcataaaggggagttcccctgcacactctctttcttgcctgctgccatgtaagacgttcctttgctcttccttcatcttttgccatgattgcaaggcttcctcagccatgtggaactgtgagtccattaaacctcttacctttatcaattacccagtctcaggtatgtctttattagcagcatgagaacagactaatacattaggggccatctgattttactaactcgttaagttgtgcctccaccaaatcacaagttactataatccctggaccttctaaatggttcataaaaagactaagccataatgttcaatttccatttgcagaggatctacagtgcttgagaagttccaaggagaactgagtgagtgtgggctggagcattgagagaacaggagggagctgggctgagccttaaaygactcacaaaggcgaaaggagagtgttccagtacagggcacagcagaggcaaaggtctggcagcagatg

SEQ ID NO: 53866 - DNA, 544 bp, Homo sapiens
gaatctctttgtaatacagattttgagacagaaattttaaatttctgaatttccacattaaaagaaaaactagaggtgaggtcttcttatgttgcccaggctggtctggaactcctggactcaagtgatcctactgcctcagccttccaaggagctgggactacaggcacgtgccagcatgcccagctacatgtccacaatgttaytggagtctaattacagaaccaaggacggaaagagagaaaaagtttcctactaaaaactgtgtcatcccacaataagcatccaagaaagtaaaaggaaaccatatgatatgtgctttacagttttggaactgaaagacaccggggacattctatggttactataatgagtaattgaacccattaaaaggtattcaggcacaaggattataaagatcactatagtatgactgaaaagttccagtaagaatacttaccaaataaacccggagcaaatttcaagtttcctctactgtgggaaagcttttccatgcagttttcctatcactatgtattttcca

SEQ ID NO: 53867 - DNA, 544 bp, Homo sapiens
gaatctctttgtaatacagattttgagacagaaattttaaatttctgaatttccacattaaaagaaaaactagaggtgaggtcttcttatgttgcccaggctggtctggaactcctggactcaagtgatcctactgcctcagccttccaaggagctgggactacaggcacgtgccagcatgcccagctacatgtccacaatgttattggagtctaattacagaaccaaggacggaaagagagaaaaagtttcctactaaaaactgtgtcatcccacaataagcatccaagaaagtaaaaggaaaccatatgatatgtgctttacagttttggaactgaaagacaccggggacattctatggttactataatgagtaattgaacccattaaaaggtattcaggcacaaggattataaagatcactatagtatgactgaaaagttccagtaagaatacttaccaaataaacccggagcaaatttcaagtttcctctactgtgggaaagcttttccatgcagttttcctrtcactatgtattttcca

SEQ ID NO: 53868 - DNA, 311 bp, Homo sapiens
aaaacatttaattggctattgtgctaataagtgacattttcaagtgatgttagatagctaagtatgactattttcaatgttgttcctatgagaattgtcttcctcccaattatgctttgggtcaaaatacacagaattttaagtgtatggatatgtgtaacctttctgcacaccaaactcagtttcaacagttttactgctggrgagggaaaggctgagccaatcacaccacctggttcattatgaggctatttcagtagacgaagtattatgtaaaataaattctccatatggttcattttggcatgcta

SEQ ID NO: 53869 - DNA, 1277 bp, Homo sapiens
  misc_feature (1)...(1277): n = A,T,C or G
annnnnnnnnnnnnnnnnnnnnnnnnnnnnnnnnnnnnnnnnnnnnnnnnnnnnnnnnnnnnnnnnnnnnnnnnnnnnnnnnnnnnnnnnnnnnnnnnnnntgctgataaaggaagataaataggcttgtcttatcatcacagaatgccgcctgatagactatttattattacataaaatagatctaccatatggggaatatccatttcattatacgtatgcttcttgtccatcatgttcgaaaatataactatacgtaatctattgctcgcattatcatacatgcatattatatttcaaacaaacgagtctttaaaaaataactaagtaaagcatgctctatatttttgttatgtaaaagtgaatctttttatatacagagaaaacttcccttttcagattagaataaaaacactagcacttattgacaactaaataaattaaaacggctaacatctttaggattataaagtctcaggctctttgaccaaagaatttttatttactatttaatttgatgtattctcactctctttcagtttacaactatatattcatttcctctaccaagggcaaaacaaacattgctaatcaagttgccccactaatgttttctatatcattcaaattttatttatatggtacatttagctagttagatggcttaatagtgattttttattattattattattattattattattattattattttgagacggaatctcgctctgtcgcccaggctggagtgcagtggcgcgaacttggctcactgcaagctccgcctcccgggttcatgccattctcctgcctcggcctcccaaatagctgggactacaggccccccgccacaacgcccggctaatttttgtatttttagtagagacggggtttcaccatgttaaagaggatggtctcaatctcctgacctcgtgatcctcccgccttggcctcccaaagtgctgggattaccggcgtgagccaccccayccggctgattaatgtatttttacaagataattcagaaggatagtgaaagtagtttcttaatgtgttactactttttttcccacaaagagcaaagatgtaaagaaagatgtgcttaacgtcataagtttggtctatggttttcctattaaagtaatattacaataaagtaatattgcttttattcccatgagattaaccatctacaaattatttatccatatttttagattggatgtggatctacactatccatatgttttacagttttataaataaacaggaaa

SEQ ID NO: 53870 - DNA, 1277 bp, Homo sapiens
  misc_feature (1)...(1277): n = A,T,C or G
annnnnnnnnnnnnnnnnnnnnnnnnnnnnnnnnnnnnnnnnnnnnnnnnnnnnnnnnnnnnnnnnnnnnnnnnnnnnnnnnnnnnnnnnnnnnnnnnnnntgctgataaaggaagataaataggcttgtcttatcatcacagaatgccgcctgatagactatttattattacataaaatagatctaccatatggggaatatccatttcattatacgtatgcttcttgtccatcatgttcgaaaatataactatacgtaatctattgctcgcattatcatacatgcatattatatttcaaacaaacgagtctttaaaaaataactaagtaaagcatgctctatatttttgttatgtaaaagtgaatctttttatatacagagaaaacttcccttttcagattagaataaaaacactagcacttattgacaactaaataaattaaaacggctaacatctttaggattataaagtctcaggctctttgaccaaagaatttttatttactatttaatttgatgtattctcactctctttcagtttacaactatatattcatttcctctaccaagggcaaaacaaacattgctaatcaagttgccccactaatgttttctatatcattcaaattttatttatatggtacatttagctagttagatggcttaatagtgattttttattattattattattattattattattattattattttgagacggaatctcgctctgtcgcccaggctggagtgcagtggcgcgaacttggctcactgcaagctccgcctcccgggttcatgccattctcctgcctcggcctcccaaatagctgggactacaggccccccgccacaacgcccggctaatttttgtatttttagtagagacggggtttcaccatgttaaagaggatggtctcaatctcctgacctcgtgatcctcccgccttggcctcccaaagtgctgggattaccggcgtgagccaccccatccggctgattaatgtatttttacaarataattcagaaggatagtgaaagtagtttcttaatgtgttactactttttttcccacaaagagcaaagatgtaaagaaagatgtgcttaacgtcataagtttggtctatggttttcctattaaagtaatattacaataaagtaatattgcttttattcccatgagattaaccatctacaaattatttatccatatttttagattggatgtggatctacactatccatatgttttacagttttataaataaacaggaaa

SEQ ID NO: 53871 - DNA, 445 bp, Homo sapiens
ttttttttgtcaacagatcagccttatgaggtggatattattgccacaataattttccagatgaaaaatggaggcccagagatgttaaggaatttgcccaagatcatgaagtaagtagtggggcttgtatttgaattcagttctgtctgactctgaaggctagaacatggacacacatagcataatatatgagtcagaaagtatgagaattataaaagggcagaaaaartgttatggcagtatgtagaatgacaacgccaatttagggtgggggaaggaaattttaacagaagatgtagaagttaggtggatcttgaaggatttaaacatacggaggtcagcatttgacccagccatcccattactaggtatatacccaaaggactataaatcatgctgctataaagacacatgcacatgtatgtttatcgcggcactatcacaa

SEQ ID NO: 53872 - DNA, 566 bp, Homo sapiens
tttctaaagcaggaaggagctagaaaaatacagtaatctagctatatctagttggttctgtttacccaatagtctccgtgagtgcagggtacacattttgttgcaggccacagtttaccaaatgttttgttatagcattataaaggtcataagcattctagtatattgaggccacctactgcctcaccactatgcagatggcktatatattggcttagttaggaaaagcccctcttccagtatcaactgttaaaaagaaacactttagataaattaaatttagcagagtttatttgctgaaagaacaattcatgaatcaggctgcaccctgaaacaggaaaggttcagagatatccacccagcaatgtgggcagatagtatgtacaaacaaaaagagaaagtggcatgcagaaccagcttgattggctacagctgggcatttgcctcatacgagcatggtctgatcagctggcagtctgtgactgactgaaactcagctactgcgattggctaggattcagctatttgctacaatatactcttaggttagtttgcagcttatttat

SEQ ID NO: 53873 - DNA, 566 bp, Homo sapiens
tttctaaagcaggaaggagctagaaaaatacagtaatctagctatatctagttggttctgtttacccaatagtctccgtgagtgcagggtacacattttgttgcaggccacagtttaccaaatgttttgttatagcattataaaggtcataagcattctagtatattgaggccacctactgcctcaccactatgcagatggcttatatattggcttagttaggaaaagcccctcttccagtatcaactgttaaaaagaaacactttagataaattaaatttagcagagtttatttgctgaaagaacaattcatgaatcaggctgcaccctgaaacaggaaaggttcagagatatccacccagcaatgtgggcagatagtatgtacaaacaaaaagagaaagtggcatgcagaaccagcttgattggctacagctgggcatttgcctcatacgagcatggtctgatcagytggcagtctgtgactgactgaaactcagctactgcgattggctaggattcagctatttgctacaatatactcttaggttagtttgcagcttatttat

SEQ ID NO: 53874 - DNA, 575 bp, Homo sapiens
atcattctggactaacttcaaacaataccttttgccagtccctcagccgaatgagccatcacctctstgtattgctgacttaaagcgtttatcaaattacacagtattatgatatttgactctttcccactaaactattggagaagagttgtttgtatcacaaagtgcctaaaatatagtaagtacacaataaatgtttatgaatggaagattgcagtaattaatgaacagaaaattattttgggtagtgggaaatggttaatttctgactttcaagtacatataatcctatttcataccatggaaaaatggcctttgaacttaattgcaaattaagtttccaaacatgcagagctgatatagctacattattggcaatggaactaataaatccttaaggatgagatatatcattaaataagatggcttaatacccctcactcttgccctgatgcaatgtttataagagaagaagagatgcttgcttttctagggttgactattactcaacctgagccaagataatatgtttcagatttatcatggccaaatcattctgacctgctgcagtgtca

SEQ ID NO: 53875 - DNA, 625 bp, Homo sapiens
caaaacagcctgaagatttcaaggggcaagatcatggtccaagttggaaataagacataaaggcatgccttcagttttcagttrgtttggtttttgccaaagtattgtgagtactatatggtccagtgtttacacataagaacatgatatccaagcccgtgacaaaagaaaaaataataaccactcacctacagggagggagaaagcttgtgtgctgaagacttcattacatgcccttagaccaatagaggaaaataggccttctaacttaaggttggaggaggacacagggtcaaatcactttaaacagtggcacaaacatcctccataactaaatattatctaaaagcttcacccttctcagcaaaagggagaaactgctctagctgacacgtgtgtctgtaccaactaaaacaatcaatgtaatacagtatctgctgacagcctaatcaggggctcagtttcatagaaacacatcaaggaaatatccaaaagccataatcccttgatgcactacaaaaattttaaaataaaaggatttgagtagggtatggtagatgaggtagtttacaaaatgttagggaaatgatgaatccttagactcaagatatttgcagataataaa

SEQ ID NO: 53876 - DNA, 625 bp, Homo sapiens
caaaacagcctgaagatttcaaggggcaagatcatggtccaagttggaaataagacataaaggcatgccttcagttttcagttagtttggtttttgccaaagtattktgagtactatatggtccagtgtttacacataagaacatgatatccaagcccgtgacaaaagaaaaaataataaccactcacctacagggagggagaaagcttgtgtgctgaagacttcattacatgcccttagaccaatagaggaaaataggccttctaacttaaggttggaggaggacacagggtcaaatcactttaaacagtggcacaaacatcctccataactaaatattatctaaaagcttcacccttctcagcaaaagggagaaactgctctagctgacacgtgtgtctgtaccaactaaaacaatcaatgtaatacagtatctgctgacagcctaatcaggggctcagtttcatagaaacacatcaaggaaatatccaaaagccataatcccttgatgcactacaaaaattttaaaataaaaggatttgagtagggtatggtagatgaggtagtttacaaaatgttagggaaatgatgaatccttagactcaagatatttgcagataataaa

SEQ ID NO: 53877 - DNA, 852 bp, Homo sapiens
ggtctggaactcctgagctcaggcaatccacccacctccgcctcccaaagtgctgggattacaggtgtgagccaccgcatccggcatttgcttttactctggaggttgtgtccaagaagagtactgctaatggtgaaactaagccaaagcaacaaattgacaactggatgacctgagggagaggccagtgaaggaccctggatcacacagtatgggttcccaaggacttcttcctttaggagacctggaggtggcrgaaggggatccagttgcttttcttttcctcctctggttgtctggggaaggaaatgtggaaaaggagggggctttagtggcacccaagtttggctttaagcaagttgtgaggcaggcagtttctccttggatcttctacccctttagcaatgattccactccttttctatctctttttacccccaaatctgccctccaacacacacccatctaagaggtgtttctcttttggcattccttctgctccttgtggcatctttgtccctttgaatttcaccctgaacttgtaaactggccagcatcctctgtgacttctgggctgcttactgggtagtgctgacaaatatcctaagaagtttacatgtcctttaaatctccctagaaccagatttctgggtttctgataaatatccaccaacataagagtgaattttgatagcaaccttcatggggtcaacatctcgacctggtgtagtaagaagaaatttactttggacttgcacagagctggactccagccttagctcctttatggggaagctctacgacctttctattagtttcctcatctgtacaatggggatgataaaacctatc

SEQ ID NO: 53878 - DNA, 487 bp, Homo sapiens
  misc_feature (1)...(487): n = A,T,C or G
tannnnnnnnnnnnnnnnnnnnnnnnnnnnnnnnnnnnnnnnnnnnnnnnnnnnnnnnnnnnnnnnnnnnnnnnnnnnnnnnnnnnnnnnnnnnnnnnnnnnataatttatttacatattctcatatgtaatacatattattttactataaacactataattaaggcagaatagatagtttagatacatattcatgaagatgccacttccattcaacggacaaaaggatagtcttttcaataaaatttactaggtcagttagatatctgtagatgtggtgggtaattttgtctttaaacttggctgggccacagtgcccagatatttggtcaaayattattctgaatgtttctgtcaagattttttcatttggataagaacaatacataaatcagtggacttagggtatgcacattaccctccatagtgtggatgggccttctccaatcagttgaaagacttaatagagcaaagactggccgggcac

SEQ ID NO: 53879 - DNA, 505 bp, Homo sapiens
gactttccctcatcttcctgtcttcttccaagtcctccaaactctccaacctctggctgttagacaattctcaacctgcttctacattttcagctctctttgttgcagcctgtcagtgtggtaaaagaagaaaagtccattcacagggggaaaattcatgcaggctacagatatttgcatgaaaagaagctgagagctgattaccaagacaagaaggaaaagacctygaaggcatttcatacctccacttcagagcactaattttctgtaagatcataaagaaaagatgttgaactggctcatggctctgcaggctttaaaggaatcatagaggctcctgctcctaggaggaatcatgaagcctcccaatcataccagaagaccaagcagcaatgggctattttatatggcagaagtaggagcaagacagagaaaggagaaggttccacactgttatacaatgagatctcattggaactcagtatcacaaggtcagcatcaagaa

SEQ ID NO: 53880 - DNA, 654 bp, Homo sapiens
caacttttttcagatacataacataattgagttcatggcaaatgactgccctgaaaattgaaaagacagacaagcaggtatagagtcacaacataccagagcagaaaccttcataggaaccagtcctggagtaagaaaacttgaactctaatcagcaaaattctggaggcgaagcgtgcgtaagtttcacagttaaaaactccagggtacccagtattagaaggggctcccacacttttttgagttttacctccaggagttcttgcactaaatatcagaaaaatgccctcatgcttccagcaggggaataggaaaaagaaatcattttgaaatatgccagaacactgttcttcttaacaaaatatgtcctcaggaaaaactagttaaccaaagcttaacctgctaggactttattagagtctaactgacctcggagaagggaaattttcagctctaactcactctagcacgtaatacaagagaaaggaaatatccaactctagtctaagctagcaatcctatccatcctagggactttggggactcagggggaagggtgggaggggggtgaaggataaatttcaaaaatcaccactaaagaactttcacatmgaaccaaacacctcctgttcccccaaaactattgaaataaaa

SEQ ID NO: 53881 - DNA, 598 bp, Homo sapiens
ttgcagcctttctcttccataattgttccctggctccagtttttcctgtgaccactaacaactcaggccaaggtgttctcctggtggctggtgtgactccccaggcaacttcatatggtacaccacagtctctcccactccctccaaaaggaaaggaaaaggagacagaagtcagacagggcctagactagactgaggtaagtagagtccaggtcatagcatttaaggaagcaaccattctcaggatcatgygcatgcaggattgacacacaaaagtgagtgcctccttaaactttgtgcccgggtgcatcccttgctttgctctaggccagggcctgatcaccagtgtcacaaacatcttagaatgtttgtaaacatttactgaggatctgtttctcattatagtctctggttgtggctttaattaagtttggatatttgttccttgtcgagactgtgccagtttttcatagcgtatgccatgctagtacaggatatagactataagcaaaataaaattagttacagtgtattgattgcctactgaaaaccaggtctgtaattagcaactctgcatacatcatttctactaatcaca

SEQ ID NO: 53882 - DNA, 576 bp, Homo sapiens
tgaggagtctgagtgttttcctcagaaacaaagaaacaacttgaggcatctaatataatctaggaaacccaaatgacaaaaccaaagctacttctgagttacttttaaaagtcataaggaaccttttctcctccaagattagaggcttttagtgtgccttagccagttgaaaagagcaagataatacataaagataaactgtgaggaagataatacataaactktgagctttaattcaagatgaaaatgggaatgcactggaattgtgaaagacattccacctggaacacttactctcctggattaggagtgtaggtaacctcccatccccatgcaagaacctggggccaaggaggtttaacagattcatgcctaggcacacctctgggtgcttagcagctgctcactagattctctcctggcattggttcttgtgcctgtcgtctggggacctgtatgtggactcccccagttcagtctcacccatctttgtccccaccaccctagggctgagcagggagctcagaccactctgcactccatggatcagcccattgcctgaggtaacagaaagcc

SEQ ID NO: 53883 - DNA, 576 bp, Homo sapiens
tgaggagtctgagtgttttcctcagaaacaaagaaacaacttgaggcatctaatataatctaggaaacccaaatgacaaaaccaaagctacttctgagttacttttaaaagtcataaggaaccttttctcctccaagattagaggcttttagtgtgccttagccagttgaaaagagcaagataatacataaagataaactgtgaggaagataatacataaactttgagctttaattcaagatgaaaatgggaatgcactggaattgtgaaagacattccacctggaacacttactctcctggattaggagtgtaggtaacctcccatccccatgcaagaacctggggccaaggaggtttaacagattcatgcctaggcacacctctgggtgcttagcagctgctcactagattctctcctggcattggttcttgtgcctgtcrtctggggacctgtatgtggactcccccagttcagtctcacccatctttgtccccaccaccctagggctgagcagggagctcagaccactctgcactccatggatcagcccattgcctgaggtaacagaaagcc

SEQ ID NO: 53884 - DNA, 529 bp, Homo sapiens
agtaggggccttttggccaatgattaggtcatgagggtagcaccttcttgaataagattaatgcctttctaaaggaggctcagagggagcttgttcatcccttgtaccatgtgaggtcacagtagacggtgccatctatgatgtcatagaagccaccatctatgaaccagaaagcaagatttctccagacactgaatcttcaggyactttgtcttggacttcccagcttccacacctctgagaaatatgtttctgttgtttataggttaccacagtttaagatattttttcatagcagcttgaatagtctaagaatgtctgctgtttttgttaattattattattggaaagagcctgagggaggactgaattaagcagtggtgtctggttcagaccctatacccatttcaggtagtgattcatggagggaatcaggagacctagctctgtgattttctctgacataccatggccttggggaaatcattccatctctctgaagttagtttactgaaaaacaatatgggtg

SEQ ID NO: 53885 - DNA, 529 bp, Homo sapiens
agtaggggccttttggccaatgattaggtcatgagggtagcaccttcttgaataagattaatgcctttctaaaggaggctcagagggagcttgttcatcccttgtaccatgtgaggtcacagtagacggtgccatctatgatgtcatagaagccaccatctatgaaccagaaagcaagatttctccagacactgaatcttcaggcacyttgtcttggacttcccagcttccacacctctgagaaatatgtttctgttgtttataggttaccacagtttaagatattttttcatagcagcttgaatagtctaagaatgtctgctgtttttgttaattattattattggaaagagcctgagggaggactgaattaagcagtggtgtctggttcagaccctatacccatttcaggtagtgattcatggagggaatcaggagacctagctctgtgattttctctgacataccatggccttggggaaatcattccatctctctgaagttagtttactgaaaaacaatatgggtg

SEQ ID NO: 53886 - DNA, 529 bp, Homo sapiens
agtaggggccttttggccaatgattaggtcatgagggtagcaccttcttgaataagattaatgcctttctaaaggaggctcagagggagcttgttcatcccttgtaccatgtgaggtcacagtagacggtgccatctatgatgtcatagaagccaccatctatgaaccagaaagcaagatttctccagacactgaatcttcaggcactttgtcttggacttcccagcttccacacctctgagaaatatgtttctgttgtttataggttaccmcagtttaagatattttttcatagcagcttgaatagtctaagaatgtctgctgtttttgttaattattattattggaaagagcctgagggaggactgaattaagcagtggtgtctggttcagaccctatacccatttcaggtagtgattcatggagggaatcaggagacctagctctgtgattttctctgacataccatggccttggggaaatcattccatctctctgaagttagtttactgaaaaacaatatgggtg

SEQ ID NO: 53887 - DNA, 529 bp, Homo sapiens
agtaggggccttttggccaatgattaggtcatgagggtagcaccttcttgaataagattaatgcctttctaaaggaggctcagagggagcttgttcatcccttgtaccatgtgaggtcacagtagacggtgccatctatgatgtcatagaagccaccatctatgaaccagaaagcaagatttctccagacactgaatcttcaggcactttgtcttggacttcccagcttccacacctctgagaaatatgtttctgttgtttataggttaccacagtttaagatattttttcatagcagcttgaatagtctaagaatgtctgctgtttttgttaattattattattggaaagagcctgagggaggactgaattaagcartggtgtctggttcagaccctatacccatttcaggtagtgattcatggagggaatcaggagacctagctctgtgattttctctgacataccatggccttggggaaatcattccatctctctgaagttagtttactgaaaaacaatatgggtg

SEQ ID NO: 53888 - DNA, 1450 bp, Homo sapiens
taaagaatttcccatggtattctgcattctactcagtcttttctttaaatatcaactagagtcttctcttttaaacagattattattatccattgcctattcaatgggtttgactagttctatacttcactcactttcctacttagatgtagcacctataatttccatttctgcaggcctgttaattgaaatttttgcatttgatttggaaggtgattaactgtttcattaggtagctgttctcagagaacaagacaaaaatatttctctgcagattaggtgttactgaagaaataattaggtcagaatccatcaaagtgtggcacagccccataaactgaacatgtgcatgctgataaattcattgtgtcaagagatctgagatcgaaaacatccacactcagctcccttaggcatttagttgtgaagtacagactatgtacttctgtacaagagaagaatatttcttgagatgtttataaacaaggtagttagcaaccaaaaggcaacctgaaaaataatcctgctgaaaatagcagagtaatgtctttgacaataagactggtaaaggagagggcaaatactgataaaagtaaaaatctccaaaagtaagtgcacaaaaaaggtttcctattgactccactttaaagtgcacatagtgtaaattaaagaaataagaaagaaaattttgcacttgggtaaacaagattatgttaatgggtaaaaatagtcaatatgtattaaggtttaatcacatggtattggataaaagttaaactttgcattatccttgtttgcttaaaggttgtaatctaaataatagtgccaaaagcataaatgtaaaaaagtcagcctgatttatgcaaggagtattttatattagctttttttaccttactatttgagaatattttcaagttatacttacagtgccattgaattttctcagggagtgtatgaaggaaaatagaggacaggtaagaacaaattatgcactgataaggatgccaaaataaaaatggacagaaacttaatgcatgatatggcatctttcttgttaaggcctaacaaaataaatcaaacacatctaatggtgcaggtctcaaggccatttcaaacctctctcccwcctgaatctcaatcattaacctaaaatttagctaaatttgagcccagtatagtagagtactcataagcctctctaggcgtaaaccagaagaagcccagtttggcccatcgaccatctcagactcccagatatctttgaaacatgggttccttctggaccagatctcctcttcgtaatttaaaacagaaagagcttaattttctgaaggcagaaaggatggagcaatttttaccttacaacgaggtttctctatagaataagtttctacaaaagatctgttcatccatttattaaaatatcaagaaaaaattaatgacaatg

SEQ ID NO: 53889 - DNA, 1450 bp, Homo sapiens
taaagaatttcccatggtattctgcattctactcagtcttttctttaaatatcaactagagtcttctcttttaaacagattattattatccattgcctattcaatgggtttgactagttctatacttcactcactttcctacttagatgtagcacctataatttccatttctgcaggcctgttaattgaaatttttgcatttgatttggaaggtgattaactgtttcattaggtagctgttctcagagaacaagacaaaaatatttctctgcagattaggtgttactgaagaaataattaggtcagaatccatcaaagtgtggcacagccccataaactgaacatgtgcatgctgataaattcattgtgtcaagagatctgagatcgaaaacatccacactcagctcccttaggcatttagttgtgaagtacagactatgtacttctgtacaagagaagaatatttcttgagatgtttataaacaaggtagttagcaaccaaaaggcaacctgaaaaataatcctgctgaaaatagcagagtaatgtctttgacaataagactggtaaaggagagggcaaatactgataaaagtaaaaatctccaaaagtaagtgcacaaaaaaggtttcctattgactccactttaaagtgcacatagtgtaaattaaagaaataagaaagaaaattttgcacttgggtaaacaagattatgttaatgggtaaaaatagtcaatatgtattaaggtttaatcacatggtattggataaaagttaaactttgcattatccttgtttgcttaaaggttgtaatctaaataatagtgccaaaagcataaatgtaaaaaagtcagcctgatttatgcaaggagtattttatattagctttttttaccttactatttgagaatattttcaagttatacttacagtgccattgaattttctcagggagtgtatgaaggaaaatagaggacaggtaagaacaaattatgcactgataaggatgccaaaataaaaatggacagaaacttaatgcatgatatggcatctttcttgttaaggcctaacaaaataaatcaaacacatctaatggtgcaggtctcaaggccatttcaaacctctctcccacctgaatctcaatcattaacctaaaatttagctaaatttgagcccagtrtagtagagtactcataagcctctctaggcgtaaaccagaagaagcccagtttggcccatcgaccatctcagactcccagatatctttgaaacatgggttccttctggaccagatctcctcttcgtaatttaaaacagaaagagcttaattttctgaaggcagaaaggatggagcaatttttaccttacaacgaggtttctctatagaataagtttctacaaaagatctgttcatccatttattaaaatatcaagaaaaaattaatgacaatg

SEQ ID NO: 53890 - DNA, 1450 bp, Homo sapiens
gaaagaaacactttgatagacaawtaaaggtaaagaataggatcctgcagtctgctcaggctttaaaggatgatttctaaatattgtgcattaggcaaagagaagactttgttaccctccttgggaagaaaaaaagaggaaagggagaaaaaaagagggagagacttagccattgacatggtaaatggctgtgctttgaaaaaatgtgattatttcttacgactctccctgtttggtcactgtagccaaactcaaaatactttgtgtggatagaattttattgaaaccagggagctgtttaaatcttttgtccagacagattgatctacagtgaaggatgctgctctcattgagcacacatttaagacaggatagagataaatacattaacaaatatataaacaatacaatttaatagagcgataaaagtttcaaagaaagaaacacctggataatgaaagacagttgactagcattgggctggctagagatggtgaggaaatgagtctctaaggaggtgacatttatgcagaggcaagcagatacccctccttcttccaaattcatgcatattcaaatgttttgctagttgattgtagagaataaaagacgaaatgacagttctaatgtgcaaggagctcacaaactaagaggagaaacaaaatacaacaaaatgaaaggcatttaatacagttctataaactcattcagaaataactcttcaacattaatccagctggaattaatctctatgagaattggaagcatgactggctagctctatgttaacatctctctggacaaaggagagtgtgtcagtcaagtctcttggttgcaaacttcagagtccaactcaagcttgcttaactgaaatggggaattattgagggaacataaaggggctgtcagaagtggtggaaaaaatggatggcaagtctgggaagacagacaggaaacaagatggttcctaagaccatgcagcagcaaaaatctgaccaagaagccaccagatcatcttttctctaagccataattgcttctggggacactgcctccatgaatgaatgaacctcagcctggcagagtcactcatagactgtctcacatcaatcagaccaattctgacagtcctgtgcactttggatcactcccacaagcttcaaagtctcaggcaggtatatccgaacagccaagctaaaagacagttcattttccaggtctcaagggggagggagagggcaagcctggctggtttcgtttggtttccacagtgagaaatgaaactccctattctactaagacttgcacaagggagttcccttgaaacaagaaagaggattgaagtttgggtaggaaaaatgtcaaatattccaaaatatgttactatggttggcttcctagctgcattttcacctttatccccatactaatactttaaaataagaagctc

SEQ ID NO: 53891 - DNA, 1450 bp, Homo sapiens
gaaagaaacactttgatagacaattaaaggtaaagaataggatcctgcagtctgctcaggctttaaaggatgatttctaaatattgtgcattaggcaaagagaagactttgttaccctccttgggaagaaaaaaagaggaaagggagaaaaaaagagggagagacttagccattgacatggtaaatggctgtgctttgaaaaaatgtgattatttcttacgactctccctgtttggtcactgtagccaaactcaaaatactttgtgtggatagaattttattgaaaccagggagctgtttaaatcttttgtccagacagattgatctacagtgaaggatgctgctctcattgagcacacatttaagacaggatagagataaatacattaacaaatatataaacaatacaatttaatagagcgataaaagtttcaaagaaagaaacacctggataatgaaagacagttgactagcattgggctggctagagatggtgaggaaatgagtctctaaggaggtgacatttatgcagaggcaagcagatacccctccttcttccaaattcatgcatattcaaatgttttgctagttgattgtagagaataaaagacgaaatgacagttctaatgtgcaaggagctcacaaactaagaggagaaacaaaatacaacaaaatgaaaggcatttaatacagttctataaactcattcagaaataactcttcaacattaatccagctggaattaatctctatgagaattggaagcatgactggctagctctatgttaacatctctctggacaaaggagagtgtgtcagtcaagtctcttggttgcaaacttcagagtccaactcaagcttgcttaactgaaatggggaattattgagggaacataaaggggctgtcagaagtggtggaaaaaatggatggcaagtctgggaagacagacaggaaacaagatggttcctaagaccatgcagcagcaaaaatctgaccaagaagccaccagatcatcwtttctctaagccataattgcttctggggacactgcctccatgaatgaatgaacctcagcctggcagagtcactcatagactgtctcacatcaatcagaccaattctgacagtcctgtgcactttggatcactcccacaagcttcaaagtctcaggcaggtatatccgaacagccaagctaaaagacagttcattttccaggtctcaagggggagggagagggcaagcctggctggtttcgtttggtttccacagtgagaaatgaaactccctattctactaagacttgcacaagggagttcccttgaaacaagaaagaggattgaagtttgggtaggaaaaatgtcaaatattccaaaatatgttactatggttggcttcctagctgcattttcacctttatccccatactaatactttaaaataagaagctc

SEQ ID NO: 53892 - DNA, 1450 bp, Homo sapiens
gaaagaaacactttgatagacaattaaaggtaaagaataggatcctgcagtctgctcaggctttaaaggatgatttctaaatattgtgcattaggcaaagagaagactttgttaccctccttgggaagaaaaaaagaggaaagggagaaaaaaagagggagagacttagccattgacatggtaaatggctgtgctttgaaaaaatgtgattatttcttacgactctccctgtttggtcactgtagccaaactcaaaatactttgtgtggatagaattttattgaaaccagggagctgtttaaatcttttgtccagacagattgatctacagtgaaggatgctgctctcattgagcacacatttaagacaggatagagataaatacattaacaaatatataaacaatacaatttaatagagcgataaaagtttcaaagaaagaaacacctggataatgaaagacagttgactagcattgggctggctagagatggtgaggaaatgagtctctaaggaggtgacatttatgcagaggcaagcagatacccctccttcttccaaattcatgcatattcaaatgttttgctagttgattgtagagaataaaagacgaaatgacagttctaatgtgcaaggagctcacaaactaagaggagaaacaaaatacaacaaaatgaaaggcatttaatacagttctataaactcattcagaaataactcttcaacattaatccagctggaattaatctctatgagaattggaagcatgactggctagctctatgttaacatctctctggacaaaggagagtgtgtcagtcaagtctcttggttgcaaacttcagagtccaactcaagcttgcttaactgaaatggggaattattgagggaacataaaggggctgtcagaagtggtggaaaaaatggatggcaagtctgggaagacagacaggaaacaagatggttcctaagaccatgcagcagcaaaaatctgaccaagaagccaccagatcatcttttctctaagccataattgcttctggggacactgcctccatgaatgaatgaacctcagcctggcagagtcactcatagactgtctcacatcaatcagaccaattctgacagtcctgtgcactttggatcactcccacaagcttcaaagtctcaggcaggtatatccgaacagccaagctaaaagacagttcattttccaggtctcaagggggagggagagggcaagcctggctggtttcgttyggtttccacagtgagaaatgaaactccctattctactaagacttgcacaagggagttcccttgaaacaagaaagaggattgaagtttgggtaggaaaaatgtcaaatattccaaaatatgttactatggttggcttcctagctgcattttcacctttatccccatactaatactttaaaataagaagctc

SEQ ID NO: 53893 - DNA, 574 bp, Homo sapiens
tggctgtaaactgcagcaccagccatggtgcagggagcagaagtgctccccgccctccagctccctgcacactcttcagacccatcagggcctcatcctctccagcacccccaggtctcagtcctgaggctcggacacagacaggggcaggggtaggagggccygtgtctccctactcccaagtgctttctctgatcacagaaggaccggagagccgctgttggctcctcagaggctcttcaaacagagagatgtttatatcttttcagggcgatccaaattacaagcagggaactggagcctagggaaagtaaaccaagggataccagatagagattttttttaaaagcttggtttaaatcaacttccagaagacctcaaatgaggccagtggggcggaggaagtgccagaagaagaaggccggcaggtctggctctccagagtccagcgtgacccaatgcccagttcctttctgccccgggctcagtttccctctgtgtaccgtggcctcttctctcccagcttgttcaggaggccagttaatctaatggagaaggagccctgcagaactga

SEQ ID NO: 53894 - DNA, 574 bp, Homo sapiens
tggctgtaaactgcagcaccagccatggtgcagggagcagaagtgctccccgccctccagctccctgcacactcttcagacccatcagggcctcatcctctccagcacccccaggtctcagtcctgaggctcggacacagacaggggcaggggtaggagggcccgtgtctccctactcccaagtgctttctctgatcacagaaggaccggagagcygctgttggctcctcagaggctcttcaaacagagagatgtttatatcttttcagggcgatccaaattacaagcagggaactggagcctagggaaagtaaaccaagggataccagatagagattttttttaaaagcttggtttaaatcaacttccagaagacctcaaatgaggccagtggggcggaggaagtgccagaagaagaaggccggcaggtctggctctccagagtccagcgtgacccaatgcccagttcctttctgccccgggctcagtttccctctgtgtaccgtggcctcttctctcccagcttgttcaggaggccagttaatctaatggagaaggagccctgcagaactga

SEQ ID NO: 53895 - DNA, 623 bp, Homo sapiens
ctagtatctcgtgtgaattcggtacaccttgtggatgagtcttttggagttctaatgataacttaaaggctacttaatatatagattatttactcagtagacttcaggggcttcttcaacacatgcactaaggagcatctcctggatttagagcatggagctttaatcagagcaatcccawtaggtttaacaagatttatttaaacctgggaatcctgcggatgctggaatgaagaaaactctcagcctgattttgtacttaataataattaataatgagaatgctcttccccatggtagctaagcataggcacaaatgtctgctgcaaagtcaaattccttgccttggatctaagtcccatgccaaggacagcaccctaattcatcagtgcctgagaggctgtctagcttaagaaccacactgggtgacttataattaaaacaattgcaatgcttttttaaaatttaattccggatctaatttctcatttgcctcacgagggtacagtatgcacagcagcctatctgtggggaaattaaaagcaggaggacatgcaccacacagtgcttatattaaagtaatcattcatatttttctgacaacactctttaataagtgtcaa

SEQ ID NO: 53896 - DNA, 623 bp, Homo sapiens
ctagtatctcgtgtgaattcggtacaccttgtggatgagtcttttggagttctaatgataacttaaaggctacttaatatatagattatttactcagtagacttcaggggcttcttcaacacatgcactaaggagcatctcctggatttagagcatggagctttaatcagagcaatcccattaggtttaacaagatttatttaaacctgggaatcctgcggatgctggaatgaagaaaactctcagcctgattttgtacttaataataattaataatgagaatgctcttccccatggtagctaagcataggcacaaatgtctgctgcaaagtcaaattccttgccttggatctaagtcccatgccaaggacagcacccyaattcatcagtgcctgagaggctgtctagcttaagaaccacactgggtgacttataattaaaacaattgcaatgcttttttaaaatttaattccggatctaatttctcatttgcctcacgagggtacagtatgcacagcagcctatctgtggggaaattaaaagcaggaggacatgcaccacacagtgcttatattaaagtaatcattcatatttttctgacaacactctttaataagtgtcaa

SEQ ID NO: 53897 - DNA, 546 bp, Homo sapiens
tatactaatatagctaacacatattggctgcacactgaatgccaggccctatggtaagtgtggtaagttttacatggaactactcataactctgagaggtatatactatcattattcccattctataaaaaaattrtagaatttatttaaaaagatattgagaccttcccaagttcaaacacagcacataagagagtcaaaccatagcaatctaactctggaccctacaattcatactatcacacaaatgacctattacctcaaatatgtgtatatatcaatgtgcaagatataagcaagtcatacaacagacattttgaatagttttcaacagacattaaactgagccagaaaaagagaaacatttcacagttcacttgcactactaaggaaactagcataaaagcataaattcctataggtaaaagggaacactttaaaaaattctaagggtaaaagtagaagataaaactacaatatttataagattatactgctctaaacccttaatttaaaattagaaagtaaaaacagattaaagagtta

SEQ ID NO: 53898 - DNA, 594 bp, Homo sapiens
tgagacttcatttgacctatgagacattatcaagaatgatattaacagaggcttgatagacacttacacactggggcttgtctccttggaatgttaccttcttaaaaaccagtgtatattatgtaataaaactcagtctagaataatgagagatgagagaccatgtgaagagaggccatagaagacatgaggccattgtgtagattccagctgtagctgagctctcagctgttaaaactggataacttaacctcagttacaccatatggagcagaactgcccaactgagccctgtcaactgacagagtcatgacaaataataagttaatgtggctttaagccaccctaaacaacaagaaacactgagacagtcctccaaaatcctgcctaaggaatgcgtaatttctaatatcattttttggcttcatctttccttttaaaatttagtrgagataatacatatttctacagcttggggaaattcttatcacactgaatagaagaagcattttgaaatggctccagctatattggtccaaaaatgttctagaaaatgcctttcattttaaaggaaaacctaaaatcaaacaaata

SEQ ID NO: 53899 - DNA, 590 bp, Homo sapiens
tttgcatgtaaaaatcttgcaatgtgcaaactataaatatttgcaagttttgcatttgtttttattataaaatgtaaccaaattataaaaagcgtagaaaacaaaasaaatcacctgtaattcctgtactacaacaaaactactcatcttggcattttttcttttctttacctatgtaatttatacagttataatcatcttgtatatagtgttcatttcatcctctttttcttagtgctttaggtataatatttacccatatttaggcatttgctggatatctataaggcgcttgtcatatatcctcaatctcttgtaataatcctgtaaaagagtgaagattatcttcatcttccaagtagagacctgagattgaataaggaaaaactagatcactacctaggaagtagaactgggatttgttttgccccaaggctctttttgtttttaggccatgctatatcttcatacttatttaaaattgctaactggccgggtgtggtggtttacacctgtaaaccacctaggatcacttgaacctagaagttggagaccagcatgggcaagcaataataaaaagaaattagcca

SEQ ID NO: 53900 - DNA, 590 bp, Homo sapiens
tttgcatgtaaaaatcttgcaatgtgcaaactataaatatttgcaagttttgcatttgtttttattataaaatgtaaccaaattataaaaagcgtagaaaacaaaagaaatcacctgtaattcctgtactacaacaaaactactcatcttggyattttttcttttctttacctatgtaatttatacagttataatcatcttgtatatagtgttcatttcatcctctttttcttagtgctttaggtataatatttacccatatttaggcatttgctggatatctataaggcgcttgtcatatatcctcaatctcttgtaataatcctgtaaaagagtgaagattatcttcatcttccaagtagagacctgagattgaataaggaaaaactagatcactacctaggaagtagaactgggatttgttttgccccaaggctctttttgtttttaggccatgctatatcttcatacttatttaaaattgctaactggccgggtgtggtggtttacacctgtaaaccacctaggatcacttgaacctagaagttggagaccagcatgggcaagcaataataaaaagaaattagcca

SEQ ID NO: 53901 - DNA, 590 bp, Homo sapiens
tttgcatgtaaaaatcttgcaatgtgcaaactataaatatttgcaagttttgcatttgtttttattataaaatgtaaccaaattataaaaagcgtagaaaacaaaagaaatcacctgtaattcctgtactacaacaaaactactcatcttggcattttttcttttctttacctatgtaatttatacagttataatcatcttgtatatagtgttcatttcatcctctttttcttagtgctttaggtataatatttacccatatttaggcatttgctggatatctataaggygcttgtcatatatcctcaatctcttgtaataatcctgtaaaagagtgaagattatcttcatcttccaagtagagacctgagattgaataaggaaaaactagatcactacctaggaagtagaactgggatttgttttgccccaaggctctttttgtttttaggccatgctatatcttcatacttatttaaaattgctaactggccgggtgtggtggtttacacctgtaaaccacctaggatcacttgaacctagaagttggagaccagcatgggcaagcaataataaaaagaaattagcca

SEQ ID NO: 53902 - DNA, 590 bp, Homo sapiens
tttgcatgtaaaaatcttgcaatgtgcaaactataaatatttgcaagttttgcatttgtttttattataaaatgtaaccaaattataaaaagcgtagaaaacaaaagaaatcacctgtaattcctgtactacaacaaaactactcatcttggcattttttcttttctttacctatgtaatttatacagttataatcatcttgtatatagtgttcatttcatcctctttttcttagtgctttaggtataatatttacccatatttaggcatttgctggatatctataaggcgcttgtcatatatcctcaatctcttgtaataatcctgtaaaagagtgaagattatcttcatcttccaagtagagacctgagattgaataaggaaaaactagatcactacctaggaagtagaactgggatttgttttgccccaaggctctttttgtttttaggccatgctatatcttcatacttatttaaaattgctaactggccgggtgtggtgrtttacacctgtaaaccacctaggatcacttgaacctagaagttggagaccagcatgggcaagcaataataaaaagaaattagcca

SEQ ID NO: 53903 - DNA, 645 bp, Homo sapiens
caaatgtcagcatcaaaatttgaattgttttcctgaaccgatgttttcacttcacaaaaggcatagcaacaacttcctcaagtcactgagctggattctatgtttggtgaatataatgagcaaggctgagtactaaaggatcaacttgcagaaagaaaaggcatgggctttccttaaacatggactcagccatgtccaatgatcacaccgtaccatgagggctgagctttgacaggtccacctgaagcaaggtgaggtctccatgcactaagagacatacaaaattacactgggttaaaaaaaaaagctagcatgtccctgcctgggtgaccaccttctgagattagggggaaaacaaaacaattaaaaacactgcttgtctctgaggaggtgggctggaattacatattgtcaacatggacttgaggctaagtgaaggaccagccaagtaatggtcagttcaacctggggcacgcagaatgaagcgctgacctgggatgcatcccgtatctggcaccatcagactttcgaccatttcccctgaagccatgtctaactttgcacagggtaacaraagccctgacagcaaggactcagagggcagcccttccttccacactaaaaagatactgggttctagctctg

SEQ ID NO: 53904 - DNA, 561 bp, Homo sapiens
tcgcaaactaacacaggaatggaaaaccaaataccgcttgttctcacktataagttggagctaaataatgagatgacatggacacatagaagggaacaatacacactgaggcctagcagagggtggaggatgggaggagggagaggatgaggacgaataactaataggtactaggcttaatacctgggtgatgaaataatctgtacaacaaaccctccgacataagtttacctatatagcaaacctgcacgtgatgcctgaacttaaaataaaagttctttaaaggactggttttagctcatttttgtgggctgtgtaattagagagtaaattccatttatttgaagatgcaattcactaacaattttgatcaaatttagaatgaacgttaacagtaaattcagaattgaatatgttgatattgggttaaattaagaagctttttaatagtcaaataattataaatagcttttattgaaaggtgtgccccagtaatatctgttatttgggggtcaatacagttaaactctctcataaaaaaagaaaattgtgttgcatttt

SEQ ID NO: 53905 - DNA, 1157 bp, Homo sapiens
atgttcaaataatgccaattcctttgacctcttccttttactagacataagctactagaacagacactttcattctttagatactacaaaagtcagcatgcaagttggcccatccccttttcatagcaattaagaaagatgaatatcattaattgggtttccacttacatttttattctcaaggctaacatttgtgtttattactggatcacagataagggtacatgagggaatatgggtgagcctagctccccagtgtgaaatgcaaaacacagaaattttggagagattgtaaactctgaattgccttttatctcccaaaggcctggaacaaaggcaagctagcacaatgaatacatgtcttaattgcttttctcatactgcagacagagcctctgtcctaaatatgactccacgtgcttggggcagatgactgggtgagccaggaaccaaccaaaactttaaaactaatagtattgttttaccttctaaacaatctacataaaaggccacccattaataaatgcagcaatgagtaaagctgtcattagcttccattgagagacacagatacaacctccctccttccacctacgttctctttcttgccagagagaaaattcagaatctacctgaagcaatagcagtgctgattttaatgaaaatgactgatctctgagattgagattacttgttgccctgccctaatgaagcacctggaaccacagaaacctagaattagaagggtggtaraaagtaatagtccaacctgcccccaaagaggaatcatctctgagattccggcccaattggggatccagtttgtactagaactatctaaagggcaaggcactcactgacatgctgggtgtctggtgctgtcactgttgggccactctgcagattacgtaatccttccttactgtcagctggagtgcccgtcttcacttccctgcttggccctcatcctgtcagctggaagagcataaaatgtaatctgccttccaaagatgatcattgtactctatccaaggcttgtcttcagttctttgaatcacattttgtgacacttcatactctcaccaccctccccaggagagcctttgccacgcttaagatatggcacccagaacaggatccatcagacctctggatgc

SEQ ID NO: 53906 - DNA, 540 bp, Homo sapiens
ggcaaggtggtgcctagcatagctcaggttcccctaacatttagtggactcatgtgacaaggctcctgcacaaactctctccctagagttgcccaagtttccttcatgttcccatggagccacttaaaacaatatctgacaaggctaagaatcactggaaagaagttggtgctacaagtgtgaaaagcaaactgaactgcctggccaggytgcaacagcttcccatttcacgttgcagtttaactttgagcagttaagaaatccctctctcatgctgtaagacactagctaagggatagtttctcaaagaccaaggatggtttgatagcttttctctgtagtgcttccattttttcagtctttctactccatttatcaggaaaactattctgtggacgtgacatcatgaaatttttttccaatccttagttatttctttaaaaagcctgcataaaggccagataaaaaaagacttatggggccacctgtttattatgtggcagcacattcagatgaagaataaacatgttatctataatg

SEQ ID NO: 53907 - DNA, 565 bp, Homo sapiens
agtcctttgttcataagcccttcactggcctagccaggactgatctgtctcagcacacagtggtacagcctgattcctggggatgctcaagagcacattacctcacagggctcttagaggtgaggttaaaaaaggaaactatcttcctgatttataaaggacctcaaagaaaggttgcacagcaaattagtggcaaagccaaaattatatcctcagccttttgatcctcaatatccagtgcagtagttactaaatcatgttcccatttgtaatctgttaaccacttatccatttagtggcacaaaacagaagcagaaactgctaatcggtgtgtgtggtcagaggaactctgcccataggtagccatttactgtacagtcatcgatgatttaatcatcacggccgcagctgcccattacacatgtcagggtagagcacckcccacgtggtagttctcagtcctttgcatgtgttgccatgtgtaccccttgaagaaaccctgggaggtgagcctcgagggagactgtagcccagtgaaacaaaacttccattgaaatgcagaaac

SEQ ID NO: 53908 - DNA, 517 bp, Homo sapiens
catccttcctgccacaggcatacaacttgcacgtgagtaaccttagcctacgtaaaatgaggcttcctagcaagctccatggtagaaagaaggctccatctgcctcactgggcccgattttgctctcggagaaagacttgagtaaagccttgyggctctgaatttggccgtgtgccagcactgctgaaatcagattgtattgcagcttttgtctgtttttctcctcagtggttctcaccattcaggaagcccttcagctcactgttcaaaaagtagtgggtctctggattcatccaaagtctacatcgtgtctcacagcagcggacaacaggttcccgggtccatgtccaagccctaccacagacaaggggcagtgaacaaatatgtcatcggctggaagaaatcggagggcagcccaccgcccgaggagcctgaagtgactgaatgtcccgggtaaggtggctggctgttcttctctggtcagcatttttcactgtagggattgactaagcaaatg

SEQ ID NO: 53909 - DNA, 517 bp, Homo sapiens
catccttcctgccacaggcatacaacttgcacgtgagtaaccttagcctacgtaaaatgaggcttcctagcaagctccatggtagaaagaaggctccatctgcctcactgggcccgattttgctctcggagaaagacttgagtaaagccttgtggctctgaatttggccgtgtgccagcactgctgaaatcagattgtattgcagcttttgtctgtttttctcctcagtggttctcaccattcaggaagcccttcagctcactgttcaaaaagtagtgggtctctggattcatccaaagtctacatcgtgtctcacagcagcggacaacaggttcccgggtccatgtccaagccctaccacagacaaggggcagtgaacaaatatgtcatcggctggaagaaatyggagggcagcccaccgcccgaggagcctgaagtgactgaatgtcccgggtaaggtggctggctgttcttctctggtcagcatttttcactgtagggattgactaagcaaatg

SEQ ID NO: 53910 - DNA, 655 bp, Homo sapiens
tgctgcatctttgtaatgtgttttggaatatccccttcatttctgaaatgaaatgtattaataatataactgcctctacacataaatttaagtattaaaatagtgttacaattttaatataaagaaaagagaaagatagctttcagtgcattttattatgtaaatgcttacttgttgactattcctggagataaaatgatgtcatcagatgtttggacctacttgcaatgaatatatttggattaaagaggagtaaaacaacattcaactgagtattggcaaaagcttttctttctatttgaagctttgaaataaggagtaaataagtatacacataaacatacatagaatcctataaatgtaacatctgtgtatgtagattgatgcctggttattgtgttggtgattgaaatgccatgaattgtcgacatgatttttcacaatgatgaacaactcttggtacaattgcaaacaaaacaaagtataattcctcttcaatttacatttaaggatgttgcattccttgataattcagtgactactaaacagtgcaagaaacacttgtgtctgtaagtaaaatacagttaggctctatattcaaagaagtaacaggattttytcacctaccggcaagtctggtggaacatctgaaaga

SEQ ID NO: 53911 - DNA, 578 bp, Homo sapiens
ctttccattttccactggctggcactagaagaatccagtcagtttttctctgttctttttctccctctgtcctcttggtaccaaagcagtcaccatcacaaattccctttctttctattagtggatatggaattatctagcattattaagaataaggtgaaactgtctcagacccaggcttaaattgcaaaatgacaaaatatattaaaatactagagtacaaaagaaaagatacagaaaaattctacaaaggtatatatgaatggccaaactgtccaacatacataatccttgcataagcacccagtatgtcctaacagagaaagaaaccagttccagaaaaattaagtcaaaataatcacatataagagcttctctcttttagcccttcagtgacasctgaacgttggtcattaaatgggcatggaagaaacagagagaacaccatcttctgtttgaacaaaatcctgatctccaccaagaactgaaattgggtcttctccactttggaagactcctctctctatagagaaagaaaaagagctgtttttctttctctctctctttttttttttttt

SEQ ID NO: 53912 - DNA, 622 bp, Homo sapiens
gctcttgccagcagcttcttctgagtgtcgccggaagggctgggtggggtcaggggacagtcttagggtccctttccaactcagcatctccggcttccttcagaaaagaatctaccccaagacccttctcagtgtcctgaagcccctctgtctggagcgaggactccactgagggccggttctgggtgcaggtgacagaaactgggtgggcacctggctgggctgtccaggtgacctggtggacgtgcctctggcgtttggcagaagtggctgccgtgaaacctgcttggcctccgggtgttggcctgcccttcgcgactcagtttccttttccttccccttcctgagcaatgctggcacacacaaagaaagcccagctgtgcacacrgcgtcttccgcagacaccgtggcccagcctccggcaggcagagaaaaccacaaacggcctccactttcaccgaaatggaagcagccttgccaaggggatgttaagaaatgaacttctgccatttttagaaactgaacagtaaaaatccccgggaatgaagctggtgctggaaacggaagctccgtcccctcctgcggggacgtctgtctgttcatcaccagtagtgtctgcacc

SEQ ID NO: 53913 - DNA, 622 bp, Homo sapiens
tgctttaattgactcayagttccacatggctgagggggcctcaggaaacttacagtcatggcagaaggtggggaaaaaaggaccttcttcacattgtggcaggagagaggggagcaaggagtgaagggggaagagccctttataaaatactcactatcatggtaacaactgcctccacgatccaatcacctcccatcgggtttctccctcaacatgtggggattgtggcaatcacaattcgagatgagatttggttggagacacagagccaaaccctatcacctatgttgttaaaattggctatggaatagtccacggtgtggaggactgctttcccaaggatttctctcctacaattacatattttctctctctcctcacagcaacatttctcagagaagttgtgtataacctctgtctttacatcttcacattccattctctcctcaatatattttaattagggtctgtctccctttctttaaaatactgattggatcaattcaccaaaggtccccacgttgttaaatacagtggctgctcttctgtcctcaatttcccagcctctcagaagcatgggctccagctttcctttcttgaaacattttcttcacttctgtga

SEQ ID NO: 53914 - DNA, 1745 bp, Homo sapiens
tcccctcactgttctctctcctggggccatgagaagacgtgccttgcttcccctttgccttctgccatgattgcaagtttcctgaggcctccccagtcatgcagactatgagttaattaaacctttttcctttataaagtacccagtctcaggtattctttacagctgtgtgaaaatggactaatacagcaactcacactgccctctggctgggctgacctagatcagcagaaaataactccttccaggaaaaataacccaaacgcaccaccagctccctgttctatccctcaggaagccactgagcccagccggggcccaggccctcaacactgaaggagctgggagggcaaagaggacaaggacccctgggtgaggaccatggcctgagatggaagccccccttccctgtctctcccatggctctcaagctggcatttagtctcatttcatcttcacggtatcgggaagtggccattattggccccagttgtctgggaaggaacctgaggctccaagaggtaaagtgattcacccaagctcacacagcaaggaaacagcaaggacaatgctggttctggctccagagtaggagctggtttcatggcctgcactgtgtctctgaaggtcctggaagtcctgctcaggcccacttcttccaagagatgctgatccctggccccatggggacttggtctgctcaagcaactgcacctctgcttctttctcctgccaaccccctaaactcactctggtaggctagggtggtggctaagggttcaagctccagactctgactgcctggtgttggatcctaactctacttcttaggaactgatttgggccagtcataacctcagttacctcatctgtaaaatgggactgataataatggcgactgcttcctggggttgttttcaggagcttgtaaagttgcctgtggcatatgggaagggcacagtgggtgctggcttctgcaggtagttttcttctcatgaccgtgagctgcctttaaagcaaggtaactggtacccagggactccccagtcactttcccttttctgcccccttccagctgggttgcatcctcagtttctatcccagccaaccagagactccttttgttcaaagagaatcagcaggaacgagaaggacccgggtccacatcccacatttcctggccgaagccagagcactggactggggcagggacmcccgggtcctgctccccactttgtgatttatcagcaccctggcattcagcaggtcacttaatttctgagtttcagtttctatatcatctagctctagctagctagctgattaaaagcccttattggtctcgaggggttgttatgaccatcaaataggaaaatagacacaaattgtaaagtgatgcccctataaatggagttatcattgtgtgtttatgtatggagagaattccagatagcgaatggatgagatgtgggaccttggggaaggccctaccctctcttagcctcagtttccctgtccgtgcagctcatctagctctaaaacaccaggcagtggattcctccatgagaaaatggacaagccaacaggacttctgtgtctgcaacatgatctcccctctctcaggggacacaaactccctgccggcgtggctagtgattaataggctctgagtggggcccctgaccccttgtcagggccatcaaggtaagtgcccatccacaagctgagggctccatcgatgaata

SEQ ID NO: 53915 - DNA, 581 bp, Homo sapiens
  misc_feature (1)...(581): n = A,T,C or G
tttttccccaataaatcctttttttctcactttcaaagtgtctgcgagtctaatctctgacgaagaacctggctgtcagccgaactaaggaaaaagtcctacacctgtgatacttgcctatgcctggtgaattccatctcagcttcaaaaagttgatgatttctggctagnaagctgcccttttatcattmttctaaaagaactgacattaataatctattactttttaatgaaatgtaaacaatagaaagcctttattatcaacaaagacacactttttttttctgtagttacggaaataatttgtgaggaaaacagaagaggtatacaagtatccccacccaaattctttaccttctgcaataaagcatctaagaaaatctacttaccaagtaaaatgtataaacctgtaaaaagacaaaactcacaatacaatgtgctgatagtaaagtctatgtatatatatttcgctaggtaagtattaaaataataggacaggtcaaaaaattgaaagatataaaacttagatatttttaaaatgtacacttcaaaaagagtgaacgatattataggaaaaaaag

SEQ ID NO: 53916 - DNA, 1208 bp, Homo sapiens
aaattctcaacttttcccctgtgcagagtgaaacagttcaaagctgaggatcaggatgggactgagagggattttatttaaatacttgtgagaaaaataatgcaattattcaaaatgtttaacatgatttaatttcaggaatgagacaaatttgttataaaatgttgagaaaatacgggtaagtcaaaaggagaaaataaaccacatataatccaataatgcagagataagtgctattaaaattttggtttatattttcccaatctgatatgtcctgaaacaggtattttaaaaacaaaatagaatattttgtataattttgtgtagtaatatttttcaatacataycatattctgcacatttttcataacaatatttttctataacaccgtttaaattgctatttgatactctgttacatcaaggccctctatttatttttccagccccatagtgttgttaccaaacctttgctattattaatagttctgtgatatgtactcttacattgtacttttatatgtgaccataaatatttccttagaataacttacttgaagtgtgtcataaaatgaacaaaactccaagactttgtaacagagtgaaaatgccctttataatgtttgtaataattttcctctctgcccacaacaatgtttattgtggttttgacagagtaccttttgtgtatttgtttttgtttacttgaacctatcaatcttcttttatggttgccttcataagttaacattaagaaaattgtcactatctaagattaaataagtaatatataaataagctatataaatcaaaaaaattaaaagatgaacatttattttcttcaagtggctttatacatctttttaaaatatataatatttgcatcgttatttatttataatttatgttgataaatagtataaaacaaaataagttgttaccgaactttctcaatacatttgttaaataagccatcttgatttgctgatttgattttatagcaccgatttgatgtgctacctcatgaaattattatatgcacactattctttatttagttgaatctgtaaaattattataaccacttctttcatgtgtctctaaagaacccaggagtcgcaattattttacctgtgcaggaagcagttaaaattgatcagcttttcatcatctatgtctatgtattctcaattattaaaaaaaaactt

SEQ ID NO: 53917 - DNA, 583 bp, Homo sapiens
ctgccctctgttccctgcctgtctcttgaatagcaccccacacctcacttccacttcatttatcatgctccagccatatgcatcttttctcagttccttacacataccaagttctctttttcccttagggccttgcacatgcaggtccttccacgtgaaacactctttttttttttttttttttttttttgagacggagtctcgctctgtcgcccaggctggagtgcagtggcgtgatctygactcactgcaagttctgcctcccgggttctcaccattctcctgcctcagcctcccaagtagctgggattacaggcgtccgccaccatgcccggctaatttttttgtatttttagtagagacggggtttcactgtgttaaccaggatgatctcgatctcctgacctcgtgatccacccgtctcggcctcccaaaggaaacactctttatcctgcttgtaacatgagtaatgcctccttgtccttcaaatcttagcttaagtgtcatctccccagaggccttccttaaccagcccatcccatccttgctgccctgtctccatttattctgttgtaataattac

SEQ ID NO: 53918 - DNA, 2277 bp, Homo sapiens
aatcagagtgtcccacagtgctgaataaaagtccctttcaagttccctgacctccacaaccacagcaacttcccctctgcctgtagttccgctaggaaaaaaaggccactggacagctaccctgggggtctgggtatgagtttctcctaccactctctgagtatccttttccttaactggaaaatataaataataatctatatattctcatacaagtattgtgaggatgaaatgtgacaaggaaggcacctaaggtgctaaatgaccattaatttcatgttcaacatttctctactttcaggtcttcaaggagcctctggagtgctcctataacccttctgtcctgtccaggaccaggcaggggttgcctgtttgttgagtccatgaaaagcttctctcagcatctgggatgcttgcattagtaatgccagcccctgaacccatctgtctttttctcaagcaggaaacatttcgagcaggaaagattttcattttgtttaggtcttttcaattttttcctgtctgccaccttcatctagttagaagcatgcaggacatcatcatataaagcactcaagatataaaaatagaaaggaaaacagagctgtttggggatgtgtagagccagagatggcaagaaagggaaacagacagtcctttctctcttagcaacaggaggaaaggttttcggctgagacacgtgataatttctgatatcagtatagtgtaacagattccagaggcctccaggatcttgctccccactgctaccacagaaactcaatgagataaaacaggcatgatttgatattgcccccctttgacagatgagaaagctaaaccccagacaggtgaagtagcagagctggaacttggacccaggtgctcttgactttctccttctctaagcccaggtgcttcaaatgaccccaaccctaatggtgttgcctaattcccagggcccygaagcacttatccaattgagacccagaactgtagatcgccaagacagtcaactcattcccttgtgcccaactcaatgtattgcacttctctccatcttttccgagctagtttctccaactccaaaactagtatattgaagtccagatagggatcttaaatgttaagtggtcatagaaacttactcactactgctgggttggaaatcagggagagaacagatgctagtggatgtacctttgggttgctgcatgggaatcagagagaatgtgagatctgacttcgaacctctcctgtcatttattgtgttttctaagcaagttatgaacctctcaaagttttaattaccttatctaaaaaattgaatcactatctgccccaggagctgtgaagactaaaggaaatgctctaaggatttgctcatttatctatctatgttcttaaatattggtatcattttcttctctcctgccaaccccaccaccactggcaactggttaacaactgactctgattgttgttaacaagcctgattaacaataaagccctgagtcatggcatttgccaatttcctgagtgtaaatatcctccccttggctgatttcaagttaccaaaaaagtgtgtcactgaatgtggaattaagaagaggtgtgcacggtcagttattgtgagtctgtactaccagctggacccatcacatcaccactgataaaaatcagcctcaaatagttgggctgcccttgacagtttagagagcactttattttacgttatttcctgtgatattcacaagaatccttgaagggaaatgatcatccctatttccccaactgacagatggtaaaactgagaaccagagagattgagtgacttgctcaaagaccaacagctaactagtaagagttaagattcaatcctgagccttctggctccaaatctagggatccttctacgctctgtaccatacattacctgggtgatcactgcacaagctctgcaaatgtctttctctttcagggccatgatactaggacctgagcttctgtttttcaactggacaggcaggaatagtcatcccagcccttcgcagataccctgagaatcaaatgagataatgcagatgaaaataatttgtaaagcaccctacaaggataaaagtatgaatattatagttagtggctggagaaaaaatatggaaacaacaaatcccaagccctagagtaacttataaaccacagaggaggcaggaccaccctgcacacattcaccacattcacttcagatccacactcaaggggaaacatgcaataaga

SEQ ID NO: 53919 - DNA, 508 bp, Homo sapiens
gttaactttacaatgttaagttatcccatccgtgtctgtttgttgaagtcttccttgaagtcattaagagattacaatttttttctgcataaaggatctatgcattcttttctaaatcagcccctacatactttacattttctgttgttttcatggaagtatactttttaaaaaattaatttattattattattattattamcttttttttttttttgaggcagggtccagactggagtgcagtggcgggatcacggctcaccacaacctcctcctcccagcgcaggctcaagtgatcctcccgcctcaacctcctgagtagctaggactacaggcatgaaccaccacgcaggctaattttttgtatttttggtagaggtcgggttttgccatgttggtcaggctggtctcgaactcctgagctcaagtgaccctccttccttggcctcccaaagtgttgagattacatgtgtgagcccccaggcccgcctcatggaggtatattatt

SEQ ID NO: 53920 - DNA, 508 bp, Homo sapiens
gttaactttacaatgttaagttatcccatccgtgtctgtttgttgaagtcttccttgaagtcattaagagattacaatttttttctgcataaaggatctatgcattcttttctaaatcagcccctacatactttacattttctgttgttttcatggaagtatactttttaaaaaattaatttattattattattattattaccttttttttttttttgaggcagggtccagactggagtgcagtggcgggatcacggctcaccacaacctcctcctcccagcgcaggctcaagtgatcctcccgcctcaacctcctgagtagctaggactacaggcatgmaccaccacgcaggctaattttttgtatttttggtagaggtcgggttttgccatgttggtcaggctggtctcgaactcctgagctcaagtgaccctccttccttggcctcccaaagtgttgagattacatgtgtgagcccccaggcccgcctcatggaggtatattatt

SEQ ID NO: 53921 - DNA, 565 bp, Homo sapiens
tgcaacctgggccaggcacaggtagctcacacctgtaatcccagtactttaggaagctgaggtgggaggattgcttgaagccaggagtttgagaccagcctgggcaacaaaatgagaccctgtctctaaaaaataaaaattaaaaattaaaaaattagccaggcatagtggtatgtgactgtggtcccaagtacttcaggaggctgaggcagaaggatcccttgagcccaggagttggaggctgcaatgagctatcatggtgccactgcactccaacctgggcaagagagagagagaccttgtctctttaaaaaaaaaaaaaaaaaaaaaaaagtagaagaagaaagaagaaaaaattttaaaaagcaactcccctcacaactacccagcattcttgatgctccttactgtacttattaccttctaaayactagcaatttatatattcatcatgtttattgtttgtctccctcttccccaactgaaatgttaactcacagagatctttattgtattgactgaaataaagcatctagagtagtgtctgatacatgatcatcaaaaa

SEQ ID NO: 53922 - DNA, 649 bp, Homo sapiens
gtcttggtgacagaccctccccctctccccacaaaccccaatccaaacatcacctgaggtcaaagcaagtgagctttggctcagagggagatgagtgggaacgaaccaggggccttagttattgctgttaatgtgaacagctaaaaatcatggcagatctggaaatgtttccatgtcctgagggccttccacctggaacaggactagaactgatggagaggcaaaaaagaagcttcaaacaaatggaaagtcaagttatatggggtcttggataggaatactcaatgtaaaaaaaaaaaaagatgtcaatctttcctcaattaatgttttaatttaatgaaattccaataaaatactaatgtattttttgaactagattatctgattctaaatttcrtatggaaaataagcaaataagaatagcctagtcacctctgaaaaagcagagaaatgagggagtcctgcactactagacattaaaacatattcagtgttctgaaagaactctgacactggcatatatgcagattaacagacggcacagaatagaaataccagaaatgcacccaaataatacaagatggtgttatgataaaagtagcacttcaaatcactgttaaaaaaaaaagtcaattattcattattcaat

SEQ ID NO: 53923 - DNA, 1191 bp, Homo sapiens
cccccagaggaaacatatttcccttactcttagtaaagagaaaccacaatattttcaatttagccaaaccaataagggcttttaaaaagtaaatttatataaattattttctctgtgattatgtttgtgaataggaaagtgcatttctccttttcaatatctaccccaccttttgtgaggctatgctaatgctcaggagaaatacaagtaggaaagtattcttagcatagccgattgaaatgggaaaacctgaagcaatcggtttttgattcatgtgatgtcttaaaactactctacttkgattgttattttttttcattgaattgactgatttgattgttttagcatgctctagtcatagcttattatattggctctggggtggacaaatccatccaactatttgtggatcaaagtgaaattaattgacatcatgctttttttcccccacttacatagagaatttctagtcacactacatgctgtgtgcacaatagttaattaggcacttacaatacacctaatacagtgttgggtgttatacaaattcagaataagatagtttacagtcgtggcttattagaaaaaatacagaataatctaagtctgctattgctacatagtggtaaaaaaggacagcttttgcatcagacttgcattcgaatcagtgtttattagctaagttatctcaggcaagttagttgacctctgagtttcattttccttacttgcaaattggtttaataatatttactttgaagccagtataaaataaatagactcgtatataaaacacccagcacatagtgaacacttagtacatataacctactactataaagatctcaaaatgtatattgtagtttgtaggctctcaagattcaggaaaggttgttctcttcatgggttggaggcatttgggagtaattcttcatgataattaaatggggctcttgatggcctgtgagaaatggtgggctctacatggttaagaaatccacaaaggatgctaggacttatgaaccacaggaacatgctaaaaacaaggattggtacagacagaaagtgtacactgggaataaattgtggtattcagattttgaaacccaagctcacatttgtcacttctctacaactctttaaaacccaattgtaatcagatatcttcttgggggttggtgtggtcatgac

SEQ ID NO: 53924 - DNA, 607 bp, Homo sapiens
ggactgggacgtcaatgtgacttagcattgcaagtagcggcttttgcttcaggaattaaaagtgcatyctgcaagtgctactttagtttcacttttcatcaaaggaaaaatattttccatgtgagctattttatgtacttttcctattccttccatccaggaagaagtatccgtcagaaagaaagtggtcatgtaaatcttctccttagaacgttttttaaaaaatactatgataaaaaaaaaacctgacttgttcatatcatggtcctttctccaatgagatcaattttctccaaatactaatggaaagtttctgacccaaaacacctctgtcacgatagcttccacgtcacttctgaggacagcgctcgtctcccagagatgagccaccagggagagaggtcgcgactctgccgctcactttcctaaggggaaggctggaaccagaggtttcaaaatggcctattctggcctcaaaaatagaagcacgcatgagaacaaagttagtaaacgcagcccaggactgtgaacgtttcttggtgaatgaccagaggttgggggaagtggatgagggagagagatgggacctgtacttagccttgacgcc

SEQ ID NO: 53925 - DNA, 605 bp, Homo sapiens
aagcctttgtaatatattttctcatttattgcatccgagaacactatgacctagataaaattatcagccctattttacagttgagaaaattaaggatcataaaagttaagtaactggcctgggtttagtgctgaggcagaattggaatgtctttctgctatgtatgtctgacagcaaaaagcatggttttattatagtgacccgataacagatcctgggcccaagggtaattatttttgaacatactatacttgtcaggctctcactgtatgattgccactttgcatcaaaatttattaaaatattttttcaatctcttgctgaacmaattttgcaaaaccaaataaaaagaaagataatgaagcatgtgtgttggccaccagggggtgcaaggtccagcatcctaaatcatgtcctcaactttgcaggccttttcttgtggtatatgaaaaagggaactctcttaagaaaggcatagagtaaatctaaggggttttgtaaatcaaaggtcaacattcgtttgaactacacctggtggtaaattaatatctttgaattatgaaacttgatcgaggatgggccgactgtgataaaaagaaatcaaa

SEQ ID NO: 53926 - DNA, 601 bp, Homo sapiens
cagttttcaggctctacacacaggtctgtgttcccagtgtctgtcttaggatatgggggagactagttctggggtctaagtcttcagtctgtctgtgttcctgaagatgacttgtaaaaagcgaggtaggatagtagaatctttcatcccttgaccttcagctatcattggcttcaaaaatatctttctcacctttagcaatctcatttttaaagttctttccaaaatgaaattttactmcctccttcaataattcatttcaagtataaagtatccaagatttaggaaattctatttgtccctaaccaaagtcgatgtattgctttacattatcattattgttaagactgaaaggtggaagagaaaatctattcattctctcctcattatcttgaagatgactattaaccataaccccagaactaaacatcttaaaaatattcaactcaaggattctttaagtatgtcagtaaacattcaccaggcagtgtatatgaaggaggtgtatacagggttagatagtactactattactggctgtcagttaccttgaatacacttttgcatacgaatttatacattcttcaaaaaataattatga

SEQ ID NO: 53927 - DNA, 601 bp, Homo sapiens
cagttttcaggctctacacacaggtctgtgttcccagtgtctgtcttaggatatgggggagactagttctggggtctaagtcttcagtctgtctgtgttcctgaagatgacttgtaaaaagcgaggtaggatagtagaatctttcatcccttgaccttcagctatcattggcttcaaaaatatctttctcacctttagcaatctcatttttaaagttctttccaaaatgaaattttactccctccttcaataattcatttcaagtataaagtatccaagatttaggaaattctatttgtcyctaaccaaagtcgatgtattgctttacattatcattattgttaagactgaaaggtggaagagaaaatctattcattctctcctcattatcttgaagatgactattaaccataaccccagaactaaacatcttaaaaatattcaactcaaggattctttaagtatgtcagtaaacattcaccaggcagtgtatatgaaggaggtgtatacagggttagatagtactactattactggctgtcagttaccttgaatacacttttgcatacgaatttatacattcttcaaaaaataattatga

SEQ ID NO: 53928 - DNA, 601 bp, Homo sapiens
cagttttcaggctctacacacaggtctgtgttcccagtgtctgtcttaggatatgggggagactagttctggggtctaagtcttcagtctgtctgtgttcctgaagatgacttgtaaaaagcgaggtaggatagtagaatctttcatcccttgaccttcagctatcattggcttcaaaaatatctttctcacctttagcaatctcatttttaaagttctttccaaaatgaaattttactccctccttcaataattcatttcaagtataaagtatccaagatttaggaaattctatttgtccctaaccaaagtcgatgtattgctttacattatcattattgttaagactgaaaggtggaagagaaaatctattcattctctcctcattatcttgaagatgactattaaccataaccccagaactaaacatcttaaaaatattcaactcaaggattctttaagtatgtcagtaaacattcaccaggcagtgtatatgaaggaggtgtatacagggttagayagtactactattactggctgtcagttaccttgaatacacttttgcatacgaatttatacattcttcaaaaaataattatga

SEQ ID NO: 53929 - DNA, 600 bp, Homo sapiens
tgttagcatagatctgtaagtagartttcaaagctgtgggatttagaagaatgcacaaataaagcatttattaaaacagcattgtattctctaatgcaagcttgtctaacctgtgggccacatgctgcccaggatagctttgcatatggcccaacacaaatttgtaaactttcttcaaagattatgagattttttgcttttttttttttgtaagctcatcagctgtcgttagtgttagtgtattcttcttcttccagggtggcccacgcaagccaaaagattggatgcccctgctctaatgcgttattcagcctatcatcaggtttcccttaatttcatgcatttactgcatatgttacatatgcagtatcttcctacccctagtaagcttaccttatctttctaacctgccattgttactcactagaatttttcattgtctcttgttttccttatgatttttatgatgtggaataaataagggaacatactttatttaaaaaaacctccaaaacgaagaaagagtcaagtgttatacactgtgtatgtgagtgtatgctaaagatagattaatttattattaggggaaccagcaggata

SEQ ID NO: 53930 - DNA, 600 bp, Homo sapiens
tgttagcatagatctgtaagtagagtttcaaagctgtgggatttagaagaatgcacaaataaagcatttattaaaacagcattgtattctctaatgcaagcttgtctaacctgtgggccacatgctgcccaggatagctttgcatatggcccaacacaaatttgtaaactttcttcaaagattatgagattttttgcttttttttttttgtaagctcatcagctgtcgttagtgttagtgtattcttcttcttccagggtggcccacgcaagccaaaagattggatgcccctgctctaatgcgttattcagcctatcatcaggtttcccttaatttcatgcatttactgcatatgttacatatgcagtatcttcctacccctagtaagcttaccttatctttctaacctgccattgttactcactagaatttttcattstctcttgttttccttatgatttttatgatgtggaataaataagggaacatactttatttaaaaaaacctccaaaacgaagaaagagtcaagtgttatacactgtgtatgtgagtgtatgctaaagatagattaatttattattaggggaaccagcaggata

SEQ ID NO: 53931 - DNA, 588 bp, Homo sapiens
ttttgtgatgaaacctgtttgtggctcaggcactcccgcctcccctccaggaaatccacgtccagccaccctctctgtgctatcccctcagtcacctcgatgctggaggcggagggctcagagccactgcccagcggccgtaccacagcggactctccttagaccggtgctgagcccggcggccgggcaaggtgcagaggtggctccagacccgccggcagtccagctggcgcyatctctggggcagaacccgtggccccaggcggtgacagcctgtgtgttttcagtgttcactcctcactccagctcacctgttcctggcactctgggctgggacttgctgggaccccccacttccacccagcccttgctgctccctgagggtggagaggaaaccctgtcctcaggccctgtgagccggagagagcgcatctacgtggtgacaggtctgtggggccggggagcctgcaggagcccggctcagggtgggggcagtgcggagccctcacgggctcctgtgtggggctggtgtgtcctgccctggcttatgcaggcaacccgcttcccaggcggatgaggcggtctctc

SEQ ID NO: 53932 - DNA, 1385 bp, Homo sapiens
taacaagatgcaaacaagaaaacattgagcttcatataatagaagggttctgcctggatttgcatgtggccccatcatttgtttgctgttgggccatggtcaggttacttagctgctctctgcctccacttaggctttatgcctgtgcatccctcatctacaaaatgggaataataagaatatctaacagttagaagtggagaaaacatatataaaggcctttcaaaagatcttgtcaaagctcaataattgtcctcaataattgctctcaataattgtcagctattattcagtaataatcataatcatgaaaatatatgactcaaagaaagattcctacttcatatccagcttcccaaaagaatatcagacattggacctgtgaaaggaatgacattgagatttattttcacatcgctaagttggttttttctttgccattcaatttctgctgtccccactctaagcccatggtccaccattttatttttccttctaagatgtcttcccttcttgtaagattttctttgccttaagaagggcccttttcatccacccactcttttacccttcccagaagttggttaatgggcacaaaaatacaattagatggaaggaacagaagaagttctagtgttcaatagcacagtagggtgatggtcgttaacaataacttattatacatttcaaaatggctggaggaaagatgtggaattttcttaacacaaataaatgataaatatttgaggtgatggatatgcaaattgtcttgatttgatcagtgcacactgtatgcatgtatcaaaatatcacatgaaccctagaaataattataattgtcatgtatcaataaaaacaaaaagggcttatttctctttccttcctcccagcattccctcctatcccagatatgtgttgctcctggggctctcctgccccacattcagtcagcactgagccagcaggagggatttcacaggtcatatcctgagatcaaccctccaccccttcaggtaatgatcctcctgctcttagtcatttatatcctttggttcatagatattttgagtcaagtgccttctaaccgctgagctacataatatcccttggtttttaaagataatacaaagtggattttagcaacaatcttgagtcatcacagaagctaatgaatttggggattccatgaagccatccaagcacataaagcccrtttcctgggtccctttcccttagctcaaggccacaaaaatcagaacatgaattccagcccatatttgcattatgtctaaataattatgaattataaatgaagctaaaaatagctaaatatgttctattcttctacttcaataactataccgccataataacccacaaggtca

SEQ ID NO: 53933 - DNA, 503 bp, Homo sapiens
ccgagggcatcattcacaaacacgctgtccacatttctgtttgtgactttgtttttaccccactgcccgtcctgctttccccacttgcatctcaggtttagatcaaacttaatttcttttagtctggagccttttcaggaagctccaggtctctggctttcctcgttctctttgatccttacgttcccaaatatctacattacttcttggtacctaccttctattccctttattttgcctttttgtttaagcycacgttatattaatatcttctttactcatatgtctctgataatagttctccattgtattgttatttcaggtcaacagttctcagtttttggtccctgaggagcagcatcatcatcacctaggaacttgttagaaaggtaaatattcagaccccatcccggacttactgaatcaaaattctgggggtggggctcagctttgtgtcttcacaagccctctggggaatttcagatgctccttgaaatttgaga

SEQ ID NO: 53934 - DNA, 528 bp, Homo sapiens
tctaaaggctttttagtaaacttccactcttactctgaaacttgcctcattcactctgatttatgcccctcattccaattctttcttctgaggaggcaaggactgaagttgctatggacgcatatcagtaatggggtaactcggatctctgtcaccactgacacacccacactcactcagactgggactgttcagtctcgccagttcacttaatgtgcacatctctgggaggtgggggataccagagtgcctggagaaaacccgtggcggcgtgggagagcgttctaactccacattgtggccccagccgcatcaacattgtaacaaaacgacatggaatgaaacaacattaattcaaggacctgctgtatttgcgacacatgtaattgacagtgttcttatccagaataatcctagtatttttaaatcttatcaatctataacaaataccatttagtgcttttatttctttcaaatttttatttatgtatttatgtatttatktatttatttatttatttatttttg

SEQ ID NO: 53935 - DNA, 581 bp, Homo sapiens
tggctcctgctggcttccttctaagctcccctcactcacctccaccctgcctgttagtctccagctaagctgtcttttgaaggtaggcagggtagtctcccgctaagctatgttttgaaggtctgcttgggaagcagaggcagtagagggaaatgtgtgtctgttttttaaggaataattcatacacagtccttctctcaaatagctcgaggcacttttctgagatgcactgcgggaagagaacmgagtgaccagatcctcagagcatcaataatgcaaagcagcttcttttaactaaggggttgtcaatttgacttcccctagatcagtaagggatcaaaagtcaccagtggctaatagaccttatttgagcagaggatgcagtttcagcccaatccccgctaacggccagccacatcaaacggccaccttggtgctttggtgttctttcacttgccctttgatcagctgcagctgtaaccacacagcgtcccacaggggactcagaacctaactggatgattcttactggtgaaagctggtggagtctgagctgctacagggtgaatcactcatgctca

SEQ ID NO: 53936 - DNA, 536 bp, Homo sapiens
cttagaaacagttaggcctaacttacttggtaatatccagtgttgtagtggagcaggttcatatggattttcaagagcccattacgtacatttctctcccctttcacaatcagtgaccttacatttatagcttgacattggccrtggtgggaatatttacaccacagaaatcagcaaatgcttcaaatcagagttttaccacccctggagaactgggttgttaaatgtactattatgtccctagtaatattctaagaagtgaagattagaacatataactttgtaaattacattttgaagcaagcacattcttctaggtgtgtttccagagatcctacttctactcttttacagtattaaaaactggagctgatgatcctcctgagttctatttcgaaacttctgtcttttctaaatcaatttcaggatatactggacaacaaagaaagcccaagcaatttgtcttcattcaggcctgtaaggatcacacctctctagcagtgaaagctacctcttcctgtagtttcatcgaatcc

SEQ ID NO: 53937 - DNA, 697 bp, Homo sapiens
aaaaaaatcagagtatttcagaaaccccacatttagagaaagcttgcaatttacaaaattttttaataaactatgctacttctaaaattcataagagcttcgtaagataattttcagaagatattaagcacagaaattttatatgaccacagaaactttttactggttctatccatttaatagtactacctcattcaggtttccatctccttttcctgacatttgaggttaagacatataatcatctggctacaaccaacactttagtctcccctactctgactcatagacctagcttcctaagaaaaccaaataaaaatatctttgaataaagaagaaaggtacattaattatttttctttttttttcatttaaatgtattttattttaasttcctgtatacgtgttcaggacatgtaggtttgttacctaggtaaacgtatgccatggtggtttgctgcacctaacaacccatctaccaggtatttacctgtacatgtattattagctatttattctgatgatctccctcccctgatgcccccccaacaggccccagtgtgtgttgttcccctcgctgtgtccatgtgttctcactgtacagctcctacttataagtgagaacatgtgatgtttgtttttctgttcctgtgttagtttgctgaggataaaatggcttccagctccatctatgtcc

SEQ ID NO: 53938 - DNA, 697 bp, Homo sapiens
aaaaaaatcagagtatttcagaaaccccacatttagagaaagcttgcaatttacaaaattttttaataaactatgctacttctaaaattcataagagcttcgtaagataattttcagaagatattaagcacagaaattttatatgaccacagaaactttttactggttctatccatttaatagtactacctcattcaggtttccatctccttttcctgacatttgaggttaagacatataatcatctggctacaaccaacactttagtctcccctactctgactcatagacctagcttcctaagaaaaccaaataaaaatatctttgaataaagaagaaaggtacattaattatttttctttttttttcatttaaatgtattttattttaagttcctgtatacgtgttcaggacatgtaggtttgttacctaggtaaacgtatgccatggtggtttgctgcacctaacaacccatctaccaggtatttacctgtacatgtattattagctatttattctgatgatctccctcccctgatgcmcccccaacaggccccagtgtgtgttgttcccctcgctgtgtccatgtgttctcactgtacagctcctacttataagtgagaacatgtgatgtttgtttttctgttcctgtgttagtttgctgaggataaaatggcttccagctccatctatgtcc

SEQ ID NO: 53939 - DNA, 595 bp, Homo sapiens
tgccatatgcctgtaatcccaggtactcgtgaggctgaggcaggagaatcacttgaacccgggaggtagaggttgcggtgagccgagatcacaccattgtactccagcctgggcaacaagagcaagaattcatctcaaaagaaaaaaaaaagaacttaagcataagccacaaataaggtttatcattacctcatcaatgcttggatacttacatttatcaagttattacattttgctgtgtaaaaaatattatgtatggtgaaagggggatatatatatattatgtattaaaatatgtattatatattatatattamacataatataattatatataattatatattaaacataatatattatatattaaatatataattataatatatatttaatatatatgtataatatataattatatattatatataatatgttatatgtttataaacatatacatgttatatatattatatatttcctatatatttaatatataatatatataattatacattgtaatatataatataatataatatatatatacttaaggatgctgtgcatcaagcctgaattttttttttttttttga

SEQ ID NO: 53940 - DNA, 595 bp, Homo sapiens
tgccatatgcctgtaatcccaggtactcgtgaggctgaggcaggagaatcacttgaacccgggaggtagaggttgcggtgagccgagatcacaccattgtactccagcctgggcaacaagagcaagaattcatctcaaaagaaaaaaaaaagaacttaagcataagccacaaataaggtttatcattacctcatcaatgcttggatacttacatttatcaagttattacattttgctgtgtaaaaaatattatgtatggtgaaagggggatatatatatattatgtattaaaatatgtattatatattatatattaaacataatataattayatataattatatattaaacataatatattatatattaaatatataattataatatatatttaatatatatgtataatatataattatatattatatataatatgttatatgtttataaacatatacatgttatatatattatatatttcctatatatttaatatataatatatataattatacattgtaatatataatataatataatatatatatacttaaggatgctgtgcatcaagcctgaattttttttttttttttga

SEQ ID NO: 53941 - DNA, 706 bp, Homo sapiens
tgtgccaagcacacagcaaagcagtctcatattcagaattatctcactcaaatctatacaatacgtattttaaactctaatttacaaggcaggactctgggtcagaactcaaatccagatcaatctggcctsaaagtccatgcttttgtccgcaccccacactctcatgagctcttcaatattcctcagctcaaattccttaaacattccaaatatactcttttcttaattattaaacaactcattggagcaaatcatgtaaataagatctctgaagaagtagagcagaaagtggccagggatgatatatgcataccaatatataattacttgtaagatttgttttgtcccagcactttgggaggccaaggtgggtggatcacttgagcccaggagttcaggaacaacttgggcaacatggtgaaagaccatctttacccaaaaaatatatatatgttagtgaggagtggtggaacacacctatagtcccagttgctcaggaggctgaggtgggaggatcacttgagtacagaggtagagaaattgtggtgagctgagatcacaccagtgcactccagcctgggcaacatagcaagaccttgtttcaaaaaaaaaaaggtttgttttaatttctcaaaaattggaaatatgacttttagcagaatatttattatagtaaatatttattgtaaaaaaataatttggt

SEQ ID NO: 53942 - DNA, 513 bp, Homo sapiens
ggcggaacgcttcatttgagtcatcatggcttcctcttacactgagggagggcggcttttgtaacttctcaggatggaatcccaatgtgaatctcccacaaggggcacctgctgacagcgtgacccgggcaggggttccccttccaacccragtggacacgggagccacggccttcccatcacgccctttactctcctgcggtgtcaccagctgagcggggctcacctccctgactgggggtatcggcaactggagatcgtcggggagaagctgtcccggggctaccacgggagcacggtgtggaacgtggaggagcaccgatacggcgcgagtgagtccgcggcgtggcttccgccgctcctggaatgtactttcagctgctcaatatttgataacaccccagagttctcattttggtgggaagggaactgagcacattctccatgctcggtggcaggtcatctccctccctgcaccctgcactcagctgctgcagtaataactcaagacgc

SEQ ID NO: 53943 - DNA, 1223 bp, Homo sapiens
cctgagggaaaagggtagaatggacacacacagctctcagtgtaactacctggcacacaccacacttctctgagaaggtttgattcatacttccccataccctagtggcaacaaaaggaaaaaaaccttgctcaggtcaggcgtggtagctcacgcctgtaatcccagcactttgggaggccgaggcgagaggatcacctgaggtcaggagttcaagaccagcctggccaacatggtgaaaccccgtctatactaaaaatacaaaaaggagccaggcatggtggtgcacgcctgtaatctcagctactcgggaggctaaagcaggagaatcacttgaaggcagcagaatcacttgaacccaggaggcagaggctgcagtgagccaagattgcgccattgcactccagcctgggcagcagagtgagaatccatctcaaaaaacaaaaaacctcgcccaaacatgagacactctcctagaaatttagaattgtgtttacgagatgtcagtctgtctacaactattccttgaactatgtcctcccagtaaattcaaccacccaacaaatattaactgggcaccttctgtgttccaggtgaaatgttttccaccccttccaatcacagagccttggtgaagccagtacaagaaacacattggactaacatctgcacttaacctgcttgtacaatgttttctttaatgccctccatcttttcttttcttttctttttttgagacagaggctcacactgtcgcccgggctggagtgcagtggcacaatcttggctcactataacctctgcctcccaggttcaagtgattctccagcctcagcctcccgagtagctgggattacaggtgcgcgccaccacgcccagctaattttcgtattttagtagagacagggtttcaccatgttggccaggcttgtctcaaactcctaacctcaagttatccgcccaccttggcctcctgaagtgctgggattacaagcgtgagccaccacacccagccagtgcccccaaccttttaaccaagttttgcacttgttgggcacgctattggcctctctagacctgtttcctcatctactgaaggagtggcctagacaagcactgaccctaaaatcaagcccatcaatgttgacaactgacagccacagaaataatggtttactacccaggcgccggggctcacgyttgtaatcccagcactttgggga

SEQ ID NO: 53944 - DNA, 1544 bp, Homo sapiens
  misc_feature (1)...(1544): n = A,T,C or G
cactccagcctgggtgacagagagagactccgcattaaaaaaaaaaaggagaaaaaaataattccatttgaggctgagtcacttcaccatcatttataggaatggatcaagttcacagaatccctaaagctccctttcctcatctgtcaggcagaaaaccacatccctgggccacaggagcccagtggagattcaggcataaaggacaaacccagacaggatcctgcaacatcagctacggtgggcgggctgcaggcgtccctgacaagcctgtatcatcagcaaaccatctatcactttcaccattctttgtgcctgctccctgaccctctgtttcagaatcatgcatttcctaggtaattaatttacctggagctcaaaagaaacttttacaacacggaattagagatgggatcattcatgttcacgaaactgtggggcacaaagctgattttctgacatgtgcaggtttgctgagcattcccctcttcagtgcccacttcacttccctacttcacatcatcttcttaaaaattatcttgttggctgggcgtggtagctctcgcctataatcccagcactttgggagtccaaggtgggtggatcacctgaagtcaggagttggagaatagcctggccaacatggtgaaaccctgtctctacttaaaatataaaaattagccaggtgtggtggctcacgcctgnnnnnnnnnnnnnnnnnnnnnnnnnnnnnnnnnnnnnnnnnnnnnnnnnnnnnnnnnnnnnnnnnnnnnnnnnnnnnnnnnnnnnnnnnnnnnnnnnnnntgtttgcatcaatgaattacaccagatggtctgaccaaccagcagatggcacatgagtctcatgggttggaaatttttatctcatgatcactagagatgaactcagtcctgccccacccatcccaacctctgctggctgctgaggctctgctgtttgggggaatcacgattaagtggtggtggtggtgtgtagaagttgagtcccattgcctgccgtgggtttctgctgcctccctattatcaggaatagaaggtgagattgaagggtgaagaatgatgggacttctattaggaggggaaaaaaaaaagaacaagatgcatrtattgagctcttactgtatgccaggccccattccaagtcctgaccatacaccatctcattgggtcctacgatagtctcatagggtggtggcatcatcatcttcattttacagggaagctgagcctcttggctgtttcgtgcccaacagcaccagcccctgagtcctcggcagggttctacacttaggtgccctttgtgtagggtccttcagcacaggtgtggtcattaattacccacaggcacttgatcattatccaccctctaaggatgtgtgattcctactaccatgcactagtcttccttcacagggagaaaaaggaggagttaagaaaaggtctttcattgatgttacaggtattatatgcctacataatgtcagcattttgctaaaagggaatttggatgtctttattggcca

SEQ ID NO: 53945 - DNA, 1544 bp, Homo sapiens
  misc_feature (1)...(1544): n = A,T,C or G
cactccagcctgggtgacagagagagactccgcattaaaaaaaaaaaggagaaaaaaataattccatttgaggctgagtcacttcaccatcatttataggaatggatcaagttcacagaatccctaaagctccctttcctcatctgtcaggcagaaaaccacatccctgggccacaggagcccagtggagattcaggcataaaggacaaacccagacaggatcctgcaacatcagctacggtgggcgggctgcaggcgtccctgacaagcctgtatcatcagcaaaccatctatcactttcaccattctttgtgcctgctccctgaccctctgtttcagaatcatgcatttcctaggtaattaatttacctggagctcaaaagaaacttttacaacacggaattagagatgggatcattcatgttcacgaaactgtggggcacaaagctgattttctgacatgtgcaggtttgctgagcattcccctcttcagtgcccacttcacttccctacttcacatcatcttcttaaaaattatcttgttggctgggcgtggtagctctcgcctataatcccagcactttgggagtccaaggtgggtggatcacctgaagtcaggagttggagaatagcctggccaacatggtgaaaccctgtctctacttaaaatataaaaattagccaggtgtggtggctcacgcctgnnnnnnnnnnnnnnnnnnnnnnnnnnnnnnnnnnnnnnnnnnnnnnnnnnnnnnnnnnnnnnnnnnnnnnnnnnnnnnnnnnnnnnnnnnnnnnnnnnnntgtttgcatcaatgaattacaccagatggtctgaccaaccagcagatggcacatgagtctcatgggttggaaatttttatctcatgatcactagagatgaactcagtcctgccccacccatcccaacctctgctggctgctgaggctctgctgtttgggggaatcacgattaagtggtggtggtggtgtgtagaagttgagtcccattgcctgccgtgggtttctgctgcctccctattatcaggaatagaaggtgagattgaagggtgaagaatgatgggacttctattaggaggggaaaaaaaaaagaacaagatgcatatattgagctcttactgtatgccaggccccattccaagtcctgaccatacaccatctcattgggtcctacgatagtctcatagggtggtggcatcatcatcttcattttacagggaagctgagcctcttggctgtttcgtgcccaacagcaccagcccctgagtcctcggcagggttctacacttaggtgccctttgtgtagggtccttcagcacaggtgtggtcattaattacccacaggcacttgatcattatccaccctctaaggatgtgtgattcctactaccatgcactagtcttccttcacagggagaaaaaggaggagttaagaaaaggtctttcattgatgttacaggtattatatgcctacataatgtcagcattttgctraaagggaatttggatgtctttattggcca

SEQ ID NO: 53946 - DNA, 516 bp, Homo sapiens
  misc_feature (1)...(516): n = A,T,C or G
ttttttctgagacggagtttcactcttgtcacccaggctgggatgcaatggcacgatctcggctaactgcaacatctgcctcctgggttcgagcgactctcccrcctcagcatcccgagtagctgggactacaggcgcccgccaccacgcctagctaatttttgtatttttagtagagacagggtttcaccatgttggccaggctggtctcgaactcctgacctcaagcaatccgctcacttcggcctcccaaagtgttgggattacaggtgtgagccaccatgcctggccgaggacctggtgtttaagaggaatggcacaagtttgcaatggaggtatgtgacttctcccagtacacactggtctatctctctactctctgcaggacagcctgtcacactgatgcctcctgaagaaggcagcccaaagtcacagcatcactgacaagggattcctgccaaaaaggtttaacctggaatctaaccagcctctaacttcacttnctcatttgctaaa

SEQ ID NO: 53947 - DNA, 1206 bp, Homo sapiens
tggctgccactcaaagtatcttcacaggaaaacagggcttgaggcacacacacaacagacagacacacacggctcacccaaaaagtcactgtgtacggacttaactttgttcaacatggattttggttttgtggaatctaaatgcagacactcgtttacctcacacccttggatttgtctgtttttggacatatatatatatwttttgtttgtttctttctttcttccataacatcaatgcttcgtctgaatatcatcatcgttcaagagttgggggaagaaagacttcatatgcacagggccgggtggggaatgtttgttttggctgtttgctgcctccattcagattttcctatcgcagctcagctggtgacctgaaggcgagcaacaggcacaagggtccccagggccttccggatggctgctttcacctcctgcctgggccaccgagtctctacacagaaaaatgagtcacccgactcaaaaggggtgggggtagaggcagggacaaggcatgaaaaccacagataaccaaggtgtttcttccaagtggtcagtttaaaacaaacaactgccaccaaaaaaaaaaaaaaaaccccacaaaaaatatttattcagaatcaaagataaaatactgtgtgagagccaggctacaggggccctttctctggggccatcgcttcctcagtccgctgtctgtttcctcatacggaacagtgagacttgaaggcccgcagggtgtgtgcttgcgatgcaggctgacacgggtcacctgtgaacacagaccaaagggcagagaggcagagagctgcacctctatccactgctgcggcttagggcctcctgctcacagaggttccaagacagccgccaccccagccttcacacgagacatcttctggctcaacagcaggcaggctctttgaaggccaacttgggaaagagccacaaacgtcattttccagaagagaattcttgcctgcccaccggtgaagttcttgttttcagctgtcttttgctgtttgtttttagagaaaaaaacaaacaaacaaagaaaaggcagtataacctttcacaccagaaccagcctgcggccagccagagcctgcggggaagaggcccctcaaggacgcatggggtgcatagatcttgtcacctggaatttgacagatcaacaagcccctaccaacctatcatacaacggcc

SEQ ID NO: 53948 - DNA, 549 bp, Homo sapiens
actgtttgtaagcttgattttgttttggttttgtattaggcaacatcattgcaacaagtcacactttgagaactcaagagaatatgtttgttctgaaaatccaggaattattgccaacccatggttgtctccatatgtcttgggaaaaataggaaaaggattttttgagttggtgatttgaatccaagacacaaagattcaggctctggtaaaaagattgtataggctatattggctgacataaaaggtaagagcaagaatgcagaggatttctatcaacataaagaagagtcaaaggtatgcgacttgtttgagtacaaagattctgaagcagaggtactgcaactccttagcatttgcagaagcaaagacttgacagtgaaaattaattgtcataaaaatktttaaggtaaaataaaaagaatactggaacactcataaaggcaaaattgctattttaaagttatcctaaaagatatcaaatattttgataaagagctagaaattcagataatatggtataggtgtagtgaaggaaaaaaagtcaat

SEQ ID NO: 53949 - DNA, 594 bp, Homo sapiens
ttctgaaattccccatacaagcaaaaatgtatttataatatatatgtatagttttaactaataataaaacccactcttttatgtaaatgaaatactatatgaggaaatagatataatatggctggtacatgacattacttaaatcaacgaaaaaatatttttttccatcaaggttacaaaaatattgtttgcttatgtgtaatctttcaccggaaattgctctactttattcatttctcagtataattatgaatattcagctaaaaatcactttttcctccttaagaaaaaacatcagttttgaaaggtggattcaattattaaacctttacattattaagatatgatatatatgggtgtaaatctacatatgtaaacattcacatttgtatgtatgtatgaatacacatgcactcatactacttgtcttttataggaggcaaagacaattaaaatgcactaatgtagaaatataaaatttgatccctaayctgcatttccttcaaggtagcaattttacagaatcacttgaaaaaataatgacatcatgagaatttttgacatcatgtcaagaaccagtgtaaattaaaataa

SEQ ID NO: 53950 - DNA, 713 bp, Homo sapiens
ggcggagacgctcctcactttccagactgggcagccaggcagaggggctcctcacatcccagacgatgggcggccaggcagaaacactcctcacttcccagacggggtggcagccgggcagaggctgcaatctcggcactttgggaggccaaggccggcggctgctccttgccctcgggccccgcggggcccgtccgctcctccagccgctgcctcccgggcggcgctcgccggcgcggcggcaaagactgattgtgggtcttaagaccctcccataagagggtcccatcctataccctgaggtaaggaatgctgatgtcatgaagcctccgtgaaaatccacgaggacagggttcaggagcttctggatacttgaaaaagtggagcctcctgaagggtggcacaaccagggaggccatggaagctctgagccccttcccccataccttgccttacatgtcccttgaatttcctcttgccttatcctatatcctcttggatatagaaacttatttttaaaaagtaatatattggatctgtctttaagactttggtgaaaacaggccgggtgcagtggctcacgcctgtaatcccagcactttgggaggccgaggtggrtggatcacctgaggtcaggagtttgagaccagcctggccaacatggtgaaaccccttctctactaaaaatacaaaaactagccagtcatggtggt

SEQ ID NO: 53951 - DNA, 713 bp, Homo sapiens
ggcggagacgctcctcactttccagactgggcagccaggcagaggggctcctcacatcccagacgatgggcggccaggcagaaacactcctcacttcccagacggggtggcagccgggcagaggctgcaatctcggcactttgggaggccaaggccggcggctgctccttgccctcgggccccgcggggcccgtccgctcctccagccgctgcctcccgggcggcgctcgccggcgcggcggcaaagactgattgtgggtcttaagaccctcccataagagggtcccatcctataccctgaggtaaggaatgctgatgtcatgaagcctccgtgaaaatccacgaggacagggttcaggagcttctggatacttgaaaaagtggagcctcctgaagggtggcacaaccagggaggccatggaagctctgagccccttcccccataccttgccttacatgtcccttgaatttcctcttgccttatcctatatcctcttggatatagaaacttatttttaaaaagtaatatattggatctgtctttaagactttggtgaaaacaggccgggtgcagtggctcacgcctgtaatcccagcactttgggaggccgaggtgggyggatcacctgaggtcaggagtttgagaccagcctggccaacatggtgaaaccccttctctactaaaaatacaaaaactagccagtcatggtggt

SEQ ID NO: 53952 - DNA, 640 bp, Homo sapiens
gaaaaatatgatttctgataaactgttatctgtatctgtaaattcagatttaattgccaacttttgaaaaggaagaaccattatctgtagtgaacgttaacagtgaggtagtgaagggacccctccctcccagtcctgttactgattcactgtctcatgaagagtcacacgattcattatggggccggccrattcaacctcgccaggtctctggcggctgtgtctcttgggagatttgtaatcatcataggtggggagacccttaccccaggaagagactgcagtgcattattgctaagttacaggaagaaaagttaccaccactgttctcaatacttgaaggtgttctgctcagctgtccccaaactctctaatgtatcagaaaaccgatgagcgatgggaagaagtggtggttttatccaggcttgataaggtaataataataaaagggggtgggagtggttgggtgtaaccatgccctgagtgggcactggcacaggctagggccactgggtcacctttctgctgtgccttagggcagttgcaggtgctccaagacagggcctgagcctgggttcagtctggacaggatgggatgaaggagggacagtgtatgaaaaatctccctggctctttccaa

SEQ ID NO: 53953 - DNA, 640 bp, Homo sapiens
gaaaaatatgatttctgataaactgttatctgtatctgtaaattcagatttaattgccaacttttgaaaaggaagaaccattatctgtagtgaacgttaacagtgaggtagtgaagggacccctccctcccagtcctgttactgattcactgtctcatgaagagtcacacgattcattatggggccggccaatkcaacctcgccaggtctctggcggctgtgtctcttgggagatttgtaatcatcataggtggggagacccttaccccaggaagagactgcagtgcattattgctaagttacaggaagaaaagttaccaccactgttctcaatacttgaaggtgttctgctcagctgtccccaaactctctaatgtatcagaaaaccgatgagcgatgggaagaagtggtggttttatccaggcttgataaggtaataataataaaagggggtgggagtggttgggtgtaaccatgccctgagtgggcactggcacaggctagggccactgggtcacctttctgctgtgccttagggcagttgcaggtgctccaagacagggcctgagcctgggttcagtctggacaggatgggatgaaggagggacagtgtatgaaaaatctccctggctctttccaa

SEQ ID NO: 53954 - DNA, 640 bp, Homo sapiens
gaaaaatatgatttctgataaactgttatctgtatctgtaaattcagatttaattgccaacttttgaaaaggaagaaccattatctgtagtgaacgttaacagtgaggtagtgaagggacccctccctcccagtcctgttactgattcactgtctcatgaagagtcacacgattcattatggggccggccaattcaacctcgccaggtctctggcggctgtgtctcttgggagatttgtaatcatcataggtggggagacccytaccccaggaagagactgcagtgcattattgctaagttacaggaagaaaagttaccaccactgttctcaatacttgaaggtgttctgctcagctgtccccaaactctctaatgtatcagaaaaccgatgagcgatgggaagaagtggtggttttatccaggcttgataaggtaataataataaaagggggtgggagtggttgggtgtaaccatgccctgagtgggcactggcacaggctagggccactgggtcacctttctgctgtgccttagggcagttgcaggtgctccaagacagggcctgagcctgggttcagtctggacaggatgggatgaaggagggacagtgtatgaaaaatctccctggctctttccaa

SEQ ID NO: 53955 - DNA, 648 bp, Homo sapiens
tcagccctgtctcatcaaatactcagattgttcatggtagtgaggattttagacgctgaaattagagtgaaggatgaaatctacaagatctacaaaattgagacaaaatcagagttgtgtgaatttgtcacatctgcccagatccaacatcttgagagtaggattagggcgccacaggcatggcctgagactaggaagagagccttgctcactgacccatcccttgtctgggcttccaagtggaactagagtttcactcaacctacatgtgcctatagttcctccctgtggcaatgacatctctcagctcagtaagggccacttgcagtaggaatatgaccctaaccagaagactcagtggatccttatcaccttcatagaaaggtactcaccatccatgtcaacagccaagccaacaygctgttgctccaatacataaaaggcacttctgtagggctggcatgagtcagtcagttcaagacaacctgaaggagttgaataacatctatccagtgagtcctgcaagacttcaggccctttctcatccagcagctccctgctgagcctggaaaagtgggaaaaagtaaagaataagccagggggaatcagaaaccacacagccccagctagatttcatggctaacgtaa

SEQ ID NO: 53956 - DNA, 699 bp, Homo sapiens
tggaaggttttcagcaatactgacatcctccatcagaaagacaacctaagttatcacaccactacccacccccaaccccygcaccgcccccgccagcagcagcaatcattacttgatagctcctaggcaccaggcaacaaatgtctctggttctaaggcacacttcttttaccatttctttaattaggatacatttagtaatcgtgtgtacatttaaaagctgttttggttaacccttcaattaacaccatttttgaagccagaaaacatgacattcaattagaaaaaagttaaaaacataaacaggccgggcgcgggggctcatgcctttaatcccagcactttgggaggccgaggtgggcagatcacttagagtcaggagttccagaccagcctgaccaacatagtgaaaccctaactttattaaaaatccaaaaaaattagctgggtgtggtggtgcacgtctgtcattccagctacttggagggaggctgaggcatgagaatcaggcctgggagggccttgaacccgggaggcagaggttgcagtgagctgagattgcaccactgtactcaagcctgggtgatggagtgagactctatctcaaggaaaaaaaaaaaaaaaagatggcggggcgcggtgtctcacgcctgtaatcccagcactttgggaggccgaggcaggcggatcacgaggtca

SEQ ID NO: 53957 - DNA, 502 bp, Homo sapiens
aaaaagagcaggcgctggccgcaagtgacaagagacsagaattttgaagccatcttagagttatgggaaagtttgaataccactttgacttggaaggcgttttcaacaaaaacaacaaagtcctttcctcaaaaaacacctcgcatttaacacagcctcacccctaccaggaaaaaaaaaagaaaaagaaaaaatccaactcacgaggcatccagttattttcctacctcctatctattcctctcctggctcccaaaaaggtggggaggggaattgtgtggctatcacttccttttaaattactatcttctcaagagttttaagggtggaaaaaagtttaaaacaccttgtatcaggaaggcgctcagatttaaaattccaaatggtactaaggacacaaatcagcctcacatcctaatgaaaaaagtactagattcttacatttttggagggcatgggaagggggagggggttctgggggaaatgtgcagtgattagggaa

SEQ ID NO: 53958 - DNA, 739 bp, Homo sapiens
tatcatatcttatatatattatatatatataatatatatatatatattctgtttctcaggagaacactaatacaccagctaaatggcttgaaagagtgattgctggggaatggagggagggggccatttcgggggagggatgggaccaggaactccattttttacaagccttatcatcctttttggcttttaaaactatctgcatacattaatgtgacaaaaatttaaagtaaatttagaaaacacaacaaacccaagatgtttcctttgttaaaattaaattatattaaaatgtgaccgactcctttaaactagtgtagtgaaataaacaataaaaacttgtttgttcctgtcttgttccatttcaatgattcccaagtttttcctctgtgctccagkttcctcacattgtattaaaggaaaaccattttaccatcttcacaaggaaggaggaagaactaataaaaatggttgataagtgtaaagaggcctgaaaggataaggagtctagggcaagtctttttggctgaaaattgttagaatgtgagatatgaaaaataattatagataaaagctggcaattactgaccagttgctaagtggcacatgttgtgctgggccctttctttgcattacatcatttaaatcctcacaatgatcctataagttaggctattttccccattctacagatagaaaccttttaaaggatgagtaatttgtcaaagaaagtggcaga

SEQ ID NO: 53959 - DNA, 1342 bp, Homo sapiens
ttagctgttaatttaaaaggcaacattactgtcagagaaagttttaggaataccccgaagttcattccaccaattttattattttattatgttatttttttttaagacaggggctcacattgttacccaggctggagttcagtggcacaatcatggctcactgtagcctcaaacccttaggctcaaacaatcctcttgcctcagcctccaatatagctgggaatacaggtgtgtgccactatgcctagctaattttttaaaatttgaaatcattggttcattttattagaaatgaatatgcagttccaggaaggtatatactagaaatataaggtaaagatttgtgtcaaaaggccaggggtatatgattaaagccataattcacattaaaagatcaatatttttatagtgtaaatgaataaacaaatgaggcaaagaatagtgatcagtgtcattgtaggtagtcaagtggtttagggtgagaaaatatttgtctgagaaaatattgacgcagctataagaaagtgacttatagtcactgaaggagtaattttagggaaattatactgcaggaacaagagaagaaatagtaataaaatgtagcatgactattaacatgtgaaataaagtaaatcaaaatgccacaatagccattgtctgataacagtcattaaatttagtaaaaattacttttttctctacctaatatcagcaatctaaatgctcacattaatataagtacttctatgttatggttcttaaatattattttgtcaaatagtttcagtgctcatttagctttttgtgttttatattgtcaaataattatgtggcagaattgaatatgatgatgacctttacatttattactctactgggagcaatattatttcagaagaatgtgattggtttttctaagaatatrcaatatttctgtggctgaactattataaaatttgagcttttttcttaatctcttctccttacattttcatttttcagagtcacctatgctattttgcttatacttcactcttcggtatattaggttaaaacctctgctatcagaaaagaaagaaaatattggataaattatataactaaatttcctacttggttttatgctattgtagcactattggataattaatttttttcacataaagagcaagtacaatccatctcatttcattttctgctaggtttgtgtattcatgtgtatgtctgtgtgtgtctgtgtgtgtgtgtgtgtgtgtgtgtgtgtgtgtgtgtgtgtgagacaatagccttgagaattgttcggaatctccattatgtctttgttaggaagtgggtcagaaaa

SEQ ID NO: 53960 - DNA, 777 bp, Homo sapiens
tcttacatgtattttaccagttactaaaattgaagaaaagtattaaaacattgataatatatgttgaagaaaaatatctgctatcagtgacataggtagactccaggatatgtgttaaaaatactcggagaggcctgactgtgaagtgaagcataagttaagacatgaacacacgagatggatgtgtgttgggaggaaagcttagtgttgggagaaaagttgaggcagggcttggaacatgtccggggtccaggataaaaccccttgtggcctttgtaatgtgtccagacttgctggctccttgcttctagcactcccattatctcaagtagccatatgtttcaaagaaaatgctaaaccctcacagctgtagttcattcgcttgatacaccactttctttcaacycccacatcctcatcacctgtttctttgtttgatcaccaacaaatagtgtgggcttccagagcttggggacttcacagcctccatactagcattggccccctggtcccactttctctcttgacttgtcttttctctttcctttgactcggctggactttgtagcccccatggccgggtgttgggtctgatcaccccaacagatgtgttttcattgtgtagtctccaaaacgttgataaaacaagaggaaaaagtcacagccacttggttacttattttaaatccttattctgagtttattttatcctataactagttcaaatgttcacatgattaagggtttttcagaaaaggagtaggctggagagtccct

SEQ ID NO: 53961 - DNA, 777 bp, Homo sapiens
tcttacatgtattttaccagttactaaaattgaagaaaagtattaaaacattgataatatatgttgaagaaaaatatctgctatcagtgacataggtagactccaggatatgtgttaaaaatactcggagaggcctgactgtgaagtgaagcataagttaagacatgaacacacgagatggatgtgtgttgggaggaaagcttagtgttgggagaaaagttgaggcagggcttggaacatgtccggggtccaggataaaaccccttgtggcctttgtaatgtgtccagacttgctggctccttgcttctagcactcccattatctcaagtagccatatgtttcaaagaaaatgctaaaccctcacagctgtagttcattcgcttgatacaccactttctttcaactcccacatcctcatcacctgtttctttgtttgatcaccaacaaatagtgtgggcttccagagcttggggmcttcacagcctccatactagcattggccccctggtcccactttctctcttgacttgtcttttctctttcctttgactcggctggactttgtagcccccatggccgggtgttgggtctgatcaccccaacagatgtgttttcattgtgtagtctccaaaacgttgataaaacaagaggaaaaagtcacagccacttggttacttattttaaatccttattctgagtttattttatcctataactagttcaaatgttcacatgattaagggtttttcagaaaaggagtaggctggagagtccct

SEQ ID NO: 53962 - DNA, 595 bp, Homo sapiens
gactgagtctggaaaacaatcggttaacattatatcagactatgactagaacccagtaaaaaaaatakagaaatagccttgaatgctataaaagaggaaaagcctaaaatagcctgtagtggtgaatccccaaaaatcttggtcttgtaagtgatcaaggaggggtaaatttatgatgaactctaaggtcttgaaatagggttctgtcattttcagagcctacactgggcaatttaaaaatgaaatatcaactgaattaaaaagtccacatagaaaagttataatatctaccaaatactaatataaaaatactctaagaagataagatcataaaaatctagggggaaaatattttatactaagattcagactcctactatcatgaagataagtggtagagaattataactcgtctctggtcccccagattattttatcagtactaaacagaagtggacataggccaatataaaacataccagtaaataaatttgttcaggtggttgtttttcatgaacaacatatattaaacagccactgtgatgaaggctttgtgaaagtgtgaaatgtaaatgccttctgctgggtagtcatg

SEQ ID NO: 53963 - DNA, 595 bp, Homo sapiens
gactgagtctggaaaacaatcggttaacattatatcagactatgactagaacccagtaaaaaaaatatagaaatagccttgaatgctataaaagaggaaaagcctaaaatagcctgtagtggtgaatccccaaaaatcttggtcttgtaagtgatcaaggaggggtaaatttatgatgaactctaaggtcttgaaatagggttctgtcattttcagarcctacactgggcaatttaaaaatgaaatatcaactgaattaaaaagtccacatagaaaagttataatatctaccaaatactaatataaaaatactctaagaagataagatcataaaaatctagggggaaaatattttatactaagattcagactcctactatcatgaagataagtggtagagaattataactcgtctctggtcccccagattattttatcagtactaaacagaagtggacataggccaatataaaacataccagtaaataaatttgttcaggtggttgtttttcatgaacaacatatattaaacagccactgtgatgaaggctttgtgaaagtgtgaaatgtaaatgccttctgctgggtagtcatg

SEQ ID NO: 53964 - DNA, 595 bp, Homo sapiens
gactgagtctggaaaacaatcggttaacattatatcagactatgactagaacccagtaaaaaaaatatagaaatagccttgaatgctataaaagaggaaaagcctaaaatagcctgtagtggtgaatccccaaaaatcttggtcttgtaagtgatcaaggaggggtaaatttatgatgaactctaaggtcttgaaatagggttctgtcattttcagagcctacactgggcaatttaaaaatgaaatatcaactgaattaaaaagtccacatagaaaagttataatatctaccaaatactaatataaaaatactctaagaagataagatcataaaaatctagggggaaaatattttatactaagattcagactcctactatcatgaagataagtggtagagaattataactcgtctctggtcccccagattattttatcagtactaaacagaagtggacataggccratataaaacataccagtaaataaatttgttcaggtggttgtttttcatgaacaacatatattaaacagccactgtgatgaaggctttgtgaaagtgtgaaatgtaaatgccttctgctgggtagtcatg

SEQ ID NO: 53965 - DNA, 552 bp, Homo sapiens
gaagggccacacatagatgaaaatgcatggtccaaagaataaagtgaccacagtgatgtgagcagtcaatgtggagcgggccttcgccatgcttgcagaggagcgattcctaactgtaacaagtattacagtgtaggagacaaccaagaggagaaaggaactcagagaaagaaagccactatctgcaactattagtaagctgacaacataagtgtctatgcaggctaacttggtcactagaggaaggtcacagaaaaaactgtctaccttattaggaccacaaaatggcagattaacagtgaatgccaactggctggtagtatggatgaagcccacaaaccakgaaatgaggacgagcacaacacatacacgacggctcatgactgtcatgtagtggagaggtttgcatatagcaacataacggtcataggccatggaaactaggagcaccatttcactgccagtgaagagatgaacaaagaaaatctgggccaggcaggcatcaaaagaaatagtcttgcgctcaaccagaaagtctgcaatcattttagg

SEQ ID NO: 53966 - DNA, 552 bp, Homo sapiens
gaagggccacacatagatgaaaatgcatggtccaaagaataaagtgaccacagtgatgtgagcagtcaatgtggagcgggccttcgccatgcttgcagaggagcgattcctaactgtaacaagtattacagtgtaggagacaaccaagaggagaaaggaactcagagaaagaaagccactatctgcaactattagtaagctgacaacataagtgtctatgcaggctaacttggtcactagaggaaggtcacagaaaaaactgtctaccttattaggaccacaaaatggcagattaacagtgaatgccaactggctggtagtatggatgaagcccacaaaccatgaaatgaggacgagcacaacacatacacgacggctcatgactgtcatgtagtggagaggtttgcatatagcaacataacggtcataggccatggaaactaggagcaccatttcactgccagtgaagagatgaacaaagaaaatctgggccaggcaggcatcaaaagmaatagtcttgcgctcaaccagaaagtctgcaatcattttagg

SEQ ID NO: 53967 - DNA, 552 bp, Homo sapiens
gaagggccacacatagatgaaaatgcatggtccaaagaataaagtgaccacagtgatgtgagcagtcaatgtggagcgggccttcgccatgcttgcagaggagcgattcctaactgtaacaagtattacagtgtaggagacaaccaagaggagaaaggaactcagagaaagaaagccactatctgcaactattagtaagctgacaacataagtgtctatgcaggctaacttggtcactagaggaaggtcacagaaaaaactgtctaccttattaggaccacaaaatggcagattaacagtgaatgccaactggctggtagtatggatgaagcccacaaaccatgaaatgaggacgagcacaacacatacacgacggctcatgactgtcatgtagtggagaggtttgcatatagcaacataacggtcataggccatggaaactaggagcaccatttcactgccagtgaagagatgaacaaagaaaatctgggccaggcaggcatcaaaagaaatagtcttgcgcwcaaccagaaagtctgcaatcattttagg

SEQ ID NO: 53968 - DNA, 551 bp, Homo sapiens
gacagaatggcttctacttatgaaacttactaacagttgacacacaaagcttttagcccctcccctgcacttccccactgtcttttattgcagtagcagaacgcttgtgggcaaaatttcagtggaattaaaatcttacatggaatccaaatcttacacagaacccttatgtatcaaccagaaagaatgttttctgtgataggtccctactttggaaaarctttaacacagagattttcaaaactttctatacatgaaagtttctgcagaatctcaatatttaaagcagaaaacataaggcagagctgatatggatgaaatgtgtggtgagaagctttctcgcaccaaaccctccctggaggcaccttgtagagctgaggccctatgaagacaccagataaaaagccccccgagagaaagaactcagctcgagctttgcctctcccttacgccactggtggcccatttcctgacagaacgtttaggtgaactagagacactctagcaaccatacgtgcaggcagtcctacgtgaggaaacttgaggaaaat

SEQ ID NO: 53969 - DNA, 551 bp, Homo sapiens
atcaaagccttagcagctaatcctgtctgtgctgttttctaggaaaccaggactaatcacaagtatagactgttattattaagaatggttatctctgaagaatcatggtgtgcagtaaaaaacaaagaatggttatctctgagtaaaaggattatagtttatcttaattttcttccttttagcttttccataatgttctataacatgtatttcttttgttaaaggttagggggaaaaaaatccctaaaaacgtatatgtttgatgcatatacccaacatcagtacaagagatattttttaatagtcaacatcattcatcaatcaaagtggtatgctttcaccagatatttttaaggcaaatctcagtacctaactacttttggtctttcttacattatgtcttacaacgtgtctggttttaaaatatgtttwatcagtactgttatcttgggttcatttgttttagttaaacaaaaccattttcctttgtaacagtgactattaacaaatctaatgctgcaatcacagaggtaacacaactaactgataac

SEQ ID NO: 53970 - DNA, 666 bp, Homo sapiens
tcccactcctaatctctgtactatcttctccatttaagctgaggtgatcagttattccagtttccgtcttttctttgttttgttttgttttgttttatgtttttcctggatgaagctggaggaagattttagataccgggaagggaaagaaaggatgaaaggaaggaaggaaaaatggaagggaaagagagagaaagaaggaagaagcaagggagggaaggaagaaagaaattctgattagaaacttcagagtttaattgggcaatttatacaagaagggggtaaacctcctagcatatttttaatattttctaatacaaaaaaattcttcctctttattcactggttttagttgcattacagaaggttcccttgaattttcttgcttgttcagttctgtattcaaagaaaggcagtggggattatcctgtgcacccagacctcaagccctcaggctcatagatgccacatagacgwtaaagaaaaaggaaagttattacagcctcaaaagctaagaatattttaaagggaactagggagaatgggactggggaaatattgagatatgggaaaagagtaggtagagcagaaaaacttgctgagtgatggacatggacactgagagtgtggaatcaaagagttgtaggtgttttgcttgataaatcg

SEQ ID NO: 53971 - DNA, 746 bp, Homo sapiens
ctaacatgctcagctaatttgttttgttgttgctgttgttgttgtttttcttttttggtagagatgaggtctcactatgttgcccaggtttgaagtaagttgtttatagacaacacttagttgaatcacgatttttaattcagttttccactctctgttatttgattggtgtatgtagatcatttacacttaacgtaatcagtaacatgttaggtcttaagtttgtcattttatctttgttttctgtttgttctgtctgttgtcatttctgttttctctgttttcttttttataccttcccatgagctacttgaacatttttgataattccattttgattaatctatagtgcttttgagtatgtctctttgtataagctttttagcgcttgcttttggtagcaatattaaatacacataacatatctactggcatcatctttttactagtttgaatgatataagtgattgaatcaggtgaagttctttccaaagtctttagtatttaacaataacacgtcacttgagaaggtcttgatgtcatagaggcccagatttctaaccttcctcaggtcttcagaggtggctgtctatgaaatccaggctgtcaactccataggaaaaggaaatgtactgaaatrttcacctaaaaagctatcagttatccatgctggtgagcaaagggaagactaaataattaaaattcaaatggagcttcccaaattccaaatgttagctgcatatgcc

SEQ ID NO: 53972 - DNA, 630 bp, Homo sapiens
gtgctgggattacaggaagaagagctaccatgcccggccccaaattatcttttaattataaagatatacatattgtttaaacaattcaataaataagtatactgaataacaaagtgaagtcttccctttaccacaatcaacctactgttctctctctatctgaggctctcttcctacgttccactgtcccagacttctgcaaagtatttaygtatctatttaggtatctgtccatctttccattcctctttcaattatatattctggtggtttcactctccatgtggcaactctacatccaggatcaaaacggcatcaaaggaagcttggaacagtgacaactcctacctgagatgtctccattctaggggcaaggctgcgtggtgcctgatatccatgagattaggaaaagtaggtggggtcctgtccaccccttctattcccgaacgcttggcagggtttctgtggctaacatgccagttgtatcgactcctgcacagtctcatgtgaagtgccacactacattctcagcctggaaggtttcagggctcagctggctcagattccatgtgtggggagcattaagaaaaataggtcacctgtataagactagtggcaaaaatctgactc

SEQ ID NO: 53973 - DNA, 557 bp, Homo sapiens
tattaatgattttttttaatctatcaggaacttttgtcttgattgacataatagaactacagagcttcataaatgcaawtataatgatacttggtgttttgataacatatctcctttaaaaatttttaatacatatctaaaaatagaataaacttttagagattttagcaatttacatgtataaaccaatctggtgactataagtttgtcaaatatttgatcaacaaagaagtatgaggaaaatattcatactatcaatgaaaaatataacatttgaaagacataaattggtaactcagcttgggaaatggaaatgaatgtgagtgatggaaatataagacctagaatgactgattaaaagtctgtatttagaagagttaaactttctccccaccacccttcttcagtgacttcctttatttatacaggcagatgactcctctgaagaacttaggaaagttataaattgaagaaactaaacaagaagagctttgaaattagaaaccaaaaatgaagcagagggcaatgaaaaattgtgaggaaaaaatgatagctta

SEQ ID NO: 53974 - DNA, 607 bp, Homo sapiens
attaaaatacacataagagaaaggaggtaatcaaagtggtacactacaaaaatatcaactaattacaaaaatgaaataattgaaaaaytgagaaacaaaaaacatatgcatcaaacataaaacaaatggataaatgttaagtaattgctttcttataagtaataaaatgcatcaaatcttcaattaaaaggcaaagtttagtagaacaatttaaagaaatgatctatctgtatgtgccacctacaagaaacttactttagatccaaagacacgaagaggctaaaagtaaaataataaaaatagatagctcatgaaaacagtcaccaaaagagcacttggatgtctcttaataatgagatgaagaaacagacagaaaaccagtatgaaaatagtggacatgaacaatataataaaccaattaaacctaacagatatatacacaaactattccgcccaacacagaagacccatttttgtattcaacatataactggaagttctagatagggcaagagttacatagaacattttccagcatataccatagcttacaccaaaacacaagccttaacaaatttaaggagacttaaatattacaatgtatttt

SEQ ID NO: 53975 - DNA, 2308 bp, Homo sapiens
agagtaccctgcctcagtgcctagcatgagacatacatccaggaccatgtttttattcccatcttatggatgagaaaactgaggttcagaaagggtaggcaaaatcccctagctcacctggctggaagggggcagaacttccctgtacgtgctgagaacaccactgttcgagcagaggggaaacctctgcaaatttcactctgtgttcagtgggtgacttgccaaaatgacttgccaaagccctttagggccaataaattagagtgtttgcatcaaatttccatgcacaagagccaactcaaaaccttagatccaattccattggttcccatagctctgaagtggagagatgctagtaataaatcctacaggctgatggcaggactttgatatataatattaactctgatcttggtggtggtctgactcaagacagagggaatattaaaagcagtagtaatccttctaaaagttccatgcgcttctgcccagatatccagggtttctggctgaattagcctgcagaagcaattgtgcagattaggtgatgttgaaccacgagaaagtgtcttcccacttagcaaatcaagggtccatgggatggagagaaaggagggaatagagtttgtcacttgggctgtactgaccccagtggtgatgtcttccctttgatgggtggtgttgggacagcaaggcagtcatcatttagcccactagtgctaaggcggaaggcatccgcagtgcatggtctggcatccccaggcaaagacaagaggatgggccctgcagagtgttttgggttagaaacaagctgagtgaactgagtgtttcttcagggagcgcactaaagatgagccgacaaatccacgacagtggggagtgaggtgaggcagggacacaaatccacagctgactcacccagcacattcccacctcctcagcatagaaaaccacagggacaaactgaccagaaggccattcatccatgggtctatcccgtgccttgatcagtcttcctaaatcccacctttgccaaagtcactccagtctgtgaattttccatggcttcctgatgcatatggaaagacgttcagactcccaatctgaggtccaatgctctccagaattccatctttccctaccttcytggaatgatttcccattgacttgccatctacctggacaagctggaatggctgctttggctgtcttctgaaaatgccctgaggtgtctctgccccaggcctgtctcctgtgcccccagagctgcccaggcccctgcttcctacagagaccagctcacagtcttcttgtcagtggtcatctaacagtggtcttgtaaaagcagagcaagttccaatcttatttatagcattcagcagttttttttttttttagagctggtgtcttgctctgttgcccaagtttgagtgcaatggctcaatcacagctttactgcagccttgaactcctgggccctagtgatcctcctctttcagcctcctgagtagctgggaccacaggtatgcaccaccatgcccacctaaacacagtctacctttatgtgtgtgtgtccatccatcaccagatgctcacggaaggtagggcagaaacattttgaaaaataatttttacctttgaagagtaatcttaatgataacctagcaggtgctcagatacatcgggtcgattcacttcctatggctgtgtaacaaattaccacaaacttggtgatttagagcaatgcccatttattatctcagggtttctataggtcagaagtttgggtgttgcatggctggattgtctgtttaggatctcacagggttgagatcggggtagccagggttgcttctcatctggggctccaagtcctctttgcaagctcactggttgtcagtagaattcagttcctgtggttgtaggactgaggtccccatattcttcttgctgtttgtcagtctggggtgctcccagcaactcaaggccactctcaggttgttgacacagggtgccaacatctatcttcaaaaccagtaggaggatttctcttgcactgaatctcttttgcatctctgacattctcagtctctgacctctagatccagatttaaagggttcacttgattctgtcagacccactcaggacaattattttgttgtgcgtccctttttctgggaagtgggtctaccacttctatcacgttcttaaaagggtctgggaatgttcacccatcacagacatccacaccaggccagttaagtcagaactgctggagattccacattctcctgggcagcctgggtg

SEQ ID NO: 53976 - DNA, 2308 bp, Homo sapiens
agagtaccctgcctcagtgcctagcatgagacatacatccaggaccatgtttttattcccatcttatggatgagaaaactgaggttcagaaagggtaggcaaaatcccctagctcacctggctggaagggggcagaacttccctgtacgtgctgagaacaccactgttcgagcagaggggaaacctctgcaaatttcactctgtgttcagtgggtgacttgccaaaatgacttgccaaagccctttagggccaataaattagagtgtttgcatcaaatttccatgcacaagagccaactcaaaaccttagatccaattccattggttcccatagctctgaagtggagagatgctagtaataaatcctacaggctgatggcaggactttgatatataatattaactctgatcttggtggtggtctgactcaagacagagggaatattaaaagcagtagtaatccttctaaaagttccatgcgcttctgcccagatatccagggtttctggctgaattagcctgcagaagcaattgtgcagattaggtgatgttgaaccacgagaaagtgtcttcccacttagcaaatcaagggtccatgggatggagagaaaggagggaatagagtttgtcacttgggctgtactgaccccagtggtgatgtcttccctttgatgggtggtgttgggacagcaaggcagtcatcatttagcccactagtgctaaggcggaaggcatccgcagtgcatggtctggcatccccaggcaaagacaagaggatgggccctgcagagtgttttgggttagaaacaagctgagtgaactgagtgtttcttcagggagcgcactaaagatgagccgacaaatccacgacagtggggagtgaggtgaggcagggacacaaatccacagctgactcacccagcacattcccacctcctcagcatagaaaaccacagggacaaactgaccagaaggccattcatccatgggtctatcccgtgccttgatcagtcttcctaaatcccacctttgccaaagtcactccagtctgtgaattttccatggcttcctgatgcatatggaaagacgttcagactcccaatctgaggtccaatgctctccagaattccatctttccctaccttcctggaatsatttcccattgacttgccatctacctggacaagctggaatggctgctttggctgtcttctgaaaatgccctgaggtgtctctgccccaggcctgtctcctgtgcccccagagctgcccaggcccctgcttcctacagagaccagctcacagtcttcttgtcagtggtcatctaacagtggtcttgtaaaagcagagcaagttccaatcttatttatagcattcagcagttttttttttttttagagctggtgtcttgctctgttgcccaagtttgagtgcaatggctcaatcacagctttactgcagccttgaactcctgggccctagtgatcctcctctttcagcctcctgagtagctgggaccacaggtatgcaccaccatgcccacctaaacacagtctacctttatgtgtgtgtgtccatccatcaccagatgctcacggaaggtagggcagaaacattttgaaaaataatttttacctttgaagagtaatcttaatgataacctagcaggtgctcagatacatcgggtcgattcacttcctatggctgtgtaacaaattaccacaaacttggtgatttagagcaatgcccatttattatctcagggtttctataggtcagaagtttgggtgttgcatggctggattgtctgtttaggatctcacagggttgagatcggggtagccagggttgcttctcatctggggctccaagtcctctttgcaagctcactggttgtcagtagaattcagttcctgtggttgtaggactgaggtccccatattcttcttgctgtttgtcagtctggggtgctcccagcaactcaaggccactctcaggttgttgacacagggtgccaacatctatcttcaaaaccagtaggaggatttctcttgcactgaatctcttttgcatctctgacattctcagtctctgacctctagatccagatttaaagggttcacttgattctgtcagacccactcaggacaattattttgttgtgcgtccctttttctgggaagtgggtctaccacttctatcacgttcttaaaagggtctgggaatgttcacccatcacagacatccacaccaggccagttaagtcagaactgctggagattccacattctcctgggcagcctgggtg

SEQ ID NO: 53977 - DNA, 1158 bp, Homo sapiens
aatcttcttcatagtaatacccatcataatcggaggctttggcaactgactagttcccctaataatcggtgcccccgatatggcgtttccccgcataaacaacataagcttctgactcttacccccctctctcctactcctgctcgcatctgctatagtggaggccggcgcaggaacaggttgaacagtctaccctcccttggcagggaactactcccaccctggagtctccgtagacctaaccatcttctccttacacctagcaggtatctcctctatcttaggagccatcaatttcatcacaacaattattaatataaaaccccctgccataacccaataccaaacgccccttttcgtctgatccgtcctaatcacagcagtcttacttctcctatctctcccagtcctagccgctggcatcactatactactaacagaccgtaacctcaacaccaccttcttcgacccagccggaggaggagaccccattctataccaacacctattctgatttttcggtcaccctgaagtttatattctcatcctaccaggcttcggaataatctcccatattgtaacttactactccggaaaaaaagaaccatttggatacataggtatggtctgagctatgatatcaattggcttcctagggtttatcgtgtgagcacaccatatatttacagtaggaatagacgtagacacacgagcatatttcacctccrctaccataatcatcgctatccccaccggcgtcaaagtatttagctgactcgccacactccacggaagcaatatgaaatgatctgctgcagtgctctgagccctaggatttatttttcttttcaccgtaggtggcctgactggcattgtattagcaaactcatcactagacatcgtactacacgacacgtactacgttgtagcccacttccactatgtcctatcaataggagctgtatttgccatcataggaggcttcattcactgatttcccctattctcaggctacaccctagaccaaacctacgccaaaatccatttcgctatcatattcatcggcgtaaatctaactttcttcccacaacactttctcggcctatccggaatgccccgacgttactcggactatcccgatgcatacaccacatgaaa

SEQ ID NO: 53978 - DNA, 1158 bp, Homo sapiens
aatcttcttcatagtaatacccatcataatcggaggctttggcaactgactagttcccctaataatcggtgcccccgatatggcgtttccccgcataaacaacataagcttctgactcttacccccctctctcctactcctgctcgcatctgctatagtggaggccggcgcaggaacaggttgaacagtctaccctcccttggcagggaactactcccaccctggagtctccgtagacctaaccatcttctccttacacctagcaggtatctcctctatcttaggagccatcaatttcatcacaacaattattaatataaaaccccctgccataacccaataccaaacgccccttttcgtctgatccgtcctaatcacagcagtcttacttctcctatctctcccagtcctagccgctggcatcactatactactaacagaccgtaacctcaacaccaccttcttcgacccagccggaggaggagaccccattctataccaacacctattctgatttttcggtcaccctgaagtttatattctcatcctaccaggcttcggaataatctcccatattgtaacttactactccggaaaaaaagaaccatttggatacataggtatggtctgagctatgatatcaattggcttcctagggtttatcgtgtgagcacaccatatatttacagtaggaatagacgtagacacacgagcatatttcacctccactaccataatcatcgctatccccaccggcgtcaaagtatttagctgactcgccacactccacggaagcaatatgaaatgatctgctgcagtgctctgagccctaggattyatttttcttttcaccgtaggtggcctgactggcattgtattagcaaactcatcactagacatcgtactacacgacacgtactacgttgtagcccacttccactatgtcctatcaataggagctgtatttgccatcataggaggcttcattcactgatttcccctattctcaggctacaccctagaccaaacctacgccaaaatccatttcgctatcatattcatcggcgtaaatctaactttcttcccacaacactttctcggcctatccggaatgccccgacgttactcggactatcccgatgcatacaccacatgaaa

SEQ ID NO: 53979 - DNA, 1158 bp, Homo sapiens
aatcttcttcatagtaatacccatcataatcggaggctttggcaactgactagttcccctaataatcggtgcccccgatatggcgtttccccgcataaacaacataagcttctgactcttacccccctctctcctactcctgctcgcatctgctatagtggaggccggcgcaggaacaggttgaacagtctaccctcccttggcagggaactactcccaccctggagtctccgtagacctaaccatcttctccttacacctagcaggtatctcctctatcttaggagccatcaatttcatcacaacaattattaatataaaaccccctgccataacccaataccaaacgccccttttcgtctgatccgtcctaatcacagcagtcttacttctcctatctctcccagtcctagccgctggcatcactatactactaacagaccgtaacctcaacaccaccttcttcgacccagccggaggaggagaccccattctataccaacacctattctgatttttcggtcaccctgaagtttatattctcatcctaccaggcttcggaataatctcccatattgtaacttactactccggaaaaaaagaaccatttggatacataggtatggtctgagctatgatatcaattggcttcctagggtttatcgtgtgagcacaccatatatttacagtaggaatagacgtagacacacgagcatatttcacctccactaccataatcatcgctatccccaccggcgtcaaagtatttagctgactcgccacactccacggaagcaatatgaaatgatctgctgcagtgctctgagccctaggatttatytttcttttcaccgtaggtggcctgactggcattgtattagcaaactcatcactagacatcgtactacacgacacgtactacgttgtagcccacttccactatgtcctatcaataggagctgtatttgccatcataggaggcttcattcactgatttcccctattctcaggctacaccctagaccaaacctacgccaaaatccatttcgctatcatattcatcggcgtaaatctaactttcttcccacaacactttctcggcctatccggaatgccccgacgttactcggactatcccgatgcatacaccacatgaaa

SEQ ID NO: 53980 - DNA, 1158 bp, Homo sapiens
aatcttcttcatagtaatacccatcataatcggaggctttggcaactgactagttcccctaataatcggtgcccccgatatggcgtttccccgcataaacaacataagcttctgactcttacccccctctctcctactcctgctcgcatctgctatagtggaggccggcgcaggaacaggttgaacagtctaccctcccttggcagggaactactcccaccctggagtctccgtagacctaaccatcttctccttacacctagcaggtatctcctctatcttaggagccatcaatttcatcacaacaattattaatataaaaccccctgccataacccaataccaaacgccccttttcgtctgatccgtcctaatcacagcagtcttacttctcctatctctcccagtcctagccgctggcatcactatactactaacagaccgtaacctcaacaccaccttcttcgacccagccggaggaggagaccccattctataccaacacctattctgatttttcggtcaccctgaagtttatattctcatcctaccaggcttcggaataatctcccatattgtaacttactactccggaaaaaaagaaccatttggatacataggtatggtctgagctatgatatcaattggcttcctagggtttatcgtgtgagcacaccatatatttacagtaggaatagacgtagacacacgagcatatttcacctccactaccataatcatcgctatccccaccggcgtcaaagtatttagctgactcgccacactccacggaagcaatatgaaatgatctgctgcagtgctctgagccctaggatttatttttcttttcaccgtaggtggcctgactggcattgtattagcaaactcatcactagacatcgtactacacgacacgtactacgttgtagcccacttccactatgtcctatcaataggagctgtatttgccatcataggaggcttcattcactgatttcccctattctcaggctacaccctagaccaaacctacgccaaaatccatttcrctatcatattcatcggcgtaaatctaactttcttcccacaacactttctcggcctatccggaatgccccgacgttactcggactatcccgatgcatacaccacatgaaa

SEQ ID NO: 53981 - DNA, 1158 bp, Homo sapiens
aatcttcttcatagtaatacccatcataatcggaggctttggcaactgactagttcccctaataatcggtgcccccgatatggcgtttccccgcataaacaacataagcttctgactcttacccccctctctcctactcctgctcgcatctgctatagtggaggccggcgcaggaacaggttgaacagtctaccctcccttggcagggaactactcccaccctggagtctccgtagacctaaccatcttctccttacacctagcaggtatctcctctatcttaggagccatcaatttcatcacaacaattattaatataaaaccccctgccataacccaataccaaacgccccttttcgtctgatccgtcctaatcacagcagtcttacttctcctatctctcccagtcctagccgctggcatcactatactactaacagaccgtaacctcaacaccaccttcttcgacccagccggaggaggagaccccattctataccaacacctattctgatttttcggtcaccctgaagtttatattctcatcctaccaggcttcggaataatctcccatattgtaacttactactccggaaaaaaagaaccatttggatacataggtatggtctgagctatgatatcaattggcttcctagggtttatcgtgtgagcacaccatatatttacagtaggaatagacgtagacacacgagcatatttcacctccactaccataatcatcgctatccccaccggcgtcaaagtatttagctgactcgccacactccacggaagcaatatgaaatgatctgctgcagtgctctgagccctaggatttatttttcttttcaccgtaggtggcctgactggcattgtattagcaaactcatcactagacatcgtactacacgacacgtactacgttgtagcccacttccactatgtcctatcaataggagctgtatttgccatcataggaggcttcattcactgatttcccctattctcaggctacaccctagaccaaacctacgccaaaatccatttcgctatcatattcatcggcgtaaatctaactttcttcccacaacactttctcggcctatccggaatgccccgacgttactcggactaycccgatgcatacaccacatgaaa

SEQ ID NO: 53982 - DNA, 664 bp, Homo sapiens
aaataaccaagaaaatacaaaagtagacgacaacttcaatttttcaattttgtacaagactgaaagcaagattaaatttgcggcaaaagtcctaacagaataagacagcaatctgaaaagaagatacaatagtttttattatttayataccaaaaaaatttatagagcttatatattatatatattataaatatatttattcatagaacaaatattcataaagtataaaccaatatcctagtctctcaaaagtttcatgggttttctaaatatttgatccctgttatgctcacagacatacccatacttctctttgaaatatgcttccctatctagaattaattacaggtgctatgagaaaatcagaagatcatatcaatagactttttaggagccattatacgcagatgaaaggatctgctgtctctcctttagatgaaatttgtacgttcttacgtatagtatttttatcatttgtttagatattctaaaattttggttttgatttcaaagatttcagccaaaagttctttaagagatcatttaaattttctgattgatggaggctttttattttcagcctttattttaattacatgccagaattattgcattgtgataagtagatgttttgtactatttcttcttatagaacttatgaaat

SEQ ID NO: 53983 - DNA, 664 bp, Homo sapiens
aaataaccaagaaaatacaaaagtagacgacaacttcaatttttcaattttgtacaagactgaaagcaagattaaatttgcggcaaaagtcctaacagaataagacagcaatctgaaaagaagatacaatagtttttattatttacrtaccaaaaaaatttatagagcttatatattatatatattataaatatatttattcatagaacaaatattcataaagtataaaccaatatcctagtctctcaaaagtttcatgggttttctaaatatttgatccctgttatgctcacagacatacccatacttctctttgaaatatgcttccctatctagaattaattacaggtgctatgagaaaatcagaagatcatatcaatagactttttaggagccattatacgcagatgaaaggatctgctgtctctcctttagatgaaatttgtacgttcttacgtatagtatttttatcatttgtttagatattctaaaattttggttttgatttcaaagatttcagccaaaagttctttaagagatcatttaaattttctgattgatggaggctttttattttcagcctttattttaattacatgccagaattattgcattgtgataagtagatgttttgtactatttcttcttatagaacttatgaaat

SEQ ID NO: 53984 - DNA, 622 bp, Homo sapiens
gaaataactataactacagaaaattacaataaccatatagatttccctgctcaactctgtgcaaataaatttgagaagccagataacatatataatttcctagaaaaatgcaattagcccagaccagctccagacaaaacagtaaatctgaacaaactagtatctacagaaaaaaataggggaaactgcaaaaaagctctctctcaccaacttcccatttaaaaaagcaatgggctcagatagtttcacagggaaatttggcaaatcttaaaagaatacatattttcaacattatttgaattgttgtagagtatgaaaaaagaagaaaaacttctgaatatttttaatgaagtaatatggacaccaaaatttagcaaagattaaacagaaaagtatagatcaaacttttgtataaatatgaatagaaaaatctttaacaaaatattaacaaataatatccagctataataggataacacatctgatttagtggactttatcctagaaataaaagaattatcaataataaaattaatttattaatgctttaccatatcatattctatgaataaaaattaatataatcatataattataatataatttccatgagtkatactga

SEQ ID NO: 53985 - DNA, 550 bp, Homo sapiens
ctagatgatgagttagtgggtgcagcgcaccagcatggcacatgtatacatatgtaactaacctgtacattgtgcacatgtaccctaaaacttaaagtataattaaaaaaaagttaaaaaaaataaaaaataaaataaaaaacatacctatgaaatctaaatttctatctctaaatcctgatccatatatccaactgcttgcagacatctactattaatatcttaccatcaactcaaattgaaaatgcccaaaaccaagctcataatctttccctaaaatgtatccctcctgcagtgttcttctgagagaatcccctattgtgtattcagggatgttgctgagaacctgtaagatatccatgctgcttgatcttgaatcttttgccagcccattggcaagttagtttttctcctaattgtctttcaaatacacctatacttctccatctgcacatttcaagctattgtaataccktgctgatacagctgcctaattgatctcctcactatcactactccacactgcagtagaggtaatcttccaaaaagg

SEQ ID NO: 53986 - DNA, 654 bp, Homo sapiens
gtttaggtatataaatattaattggaaacatttatttgtaaatatcagaaagaagactttgtagagaatgaccctcccactgcccccacaaaataagaattatgctggaaaagtatagctcaaggctgggggcagtggctcacacctataatcccagtgctttgagaggctgatgcaagaggattgtttgaggccaggtgttcgagatcagccttggcaacatagtgagaccttgcctctaccaaaaaattaaaaaataaaarcaataacgagcattagttgtatgacttgtaatcctagctacttggaaggctgagataggaggatcgcttgaacccaggagttcaaggttacaatgagctagggtcagaccactgcactccatcctgggcaatagagcatgactctatctctaaaaatcaaacaaaaaacaaaaaacaaaaaagaaaagaaaaataaagaaagaagagtgtatctctctctgcagcaacttaagtctggcatgggaggggacttgttcttccccgtctctattgtccagctcttaccccatctccaccactgccctaggaaaggattaagatagaggcagaatggcagccacctcaatagggcaatgagattgggagaatacatgagatcctgcttcccaaa

SEQ ID NO: 53987 - DNA, 1161 bp, Homo sapiens
  misc_feature (1)...(1161): n = A,T,C or G
actgcaaaggaatgaggatgggacaggtttaggctttgtaacaagacctcccaaaggctaacacataggcggctgcttcctcggcaagcagagatgacgcttgtggccctttttgaaacaccttttttacatgccagaggtatttaacttgtccgtaccaaatggtacggacaagttaaaagggttatccgcccttttaactcaaatatcccgttgggatcaaacatttttgctctggagacctttgtacctgtgcagcatcagtataaggatagcctgggggtggtaacccagacacagctaacagcggggtctgagtggcttggccagagtcttggcctcaaattgagggcacagcagtggttctgactgtcctnnnnnnnnnnnnnnnnnnnnnnnnnnnnnnnnnnnnnnnnnnnnnnnnnnnnnnnnnnnnnnnnnnnnnnnnnnnnnnnnnnnnnnnnnnnnnnnnnnnntaccccttggccgagatcttgagcctcaaatgaagggcacagcagtggtatctgaactgttcctcttcggggaacgttgtacatcaggaggggcctgaaggtaagttggtgtaaaagtctctgctgtgatccaccctttaagaattgtgaactgtgcagaacgaagcaggtcatggcttgtcctctaggatgtgatgggaggctgaaagcatctctctgctgtgacgtaggagggaccgtaagccttatgctaggcactccttccagcccaaggcagcatcgtctrctttggttttctttctttctttttttgaaacactctgcccaggctggagtgcagtggcacgatctcggctcactgcagccttaagctcctgggctcaagctatcctcctgactcagcctcccaagtagctgggacaacaggcgtgtgccaccatgcccggctacttttttaaatatttttaatagagatggggtttcgccatgtgtcccaggctggtctcaaactcctggattcagacaatctgcctgcctcggcctcccaaagtgctgggattacaggcgtgagccaccgtgcctggcctgctttggttttattctgactgtggctcctaggaagaaaaagaaaagatgatgctttggaagctgtagggttgggaagctggagacttcttgtgatgga

SEQ ID NO: 53988 - DNA, 1161 bp, Homo sapiens
  misc_feature (1)...(1161): n = A,T,C or G
actgcaaaggaatgaggatgggacaggtttaggctttgtaacaagacctcccaaaggctaacacataggcggctgcttcctcggcaagcagagatgacgcttgtggccctttttgaaacaccttttttacatgccagaggtatttaacttgtccgtaccaaatggtacggacaagttaaaagggttatccgcccttttaactcaaatatcccgttgggatcaaacatttttgctctggagacctttgtacctgtgcagcatcagtataaggatagcctgggggtggtaacccagacacagctaacagcggggtctgagtggcttggccagagtcttggcctcaaattgagggcacagcagtggttctgactgtcctnnnnnnnnnnnnnnnnnnnnnnnnnnnnnnnnnnnnnnnnnnnnnnnnnnnnnnnnnnnnnnnnnnnnnnnnnnnnnnnnnnnnnnnnnnnnnnnnnnnntaccccttggccgagatcttgagcctcaaatgaagggcacagcagtggtatctgaactgttcctcttcggggaacgttgtacatcaggaggggcctgaaggtaagttggtgtaaaagtctctgctgtgatccaccctttaagaattgtgaactgtgcagaacgaagcaggtcatggcttgtcctctaggatgtgatgggaggctgaaagcatctctctgctgtgacgtaggagggaccgtaagccttatgctaggcactccttccagcccaaggcagcatcgtctactttggttttctttctttctttttttgaaacactctgcccaggctggagtgcagtggcacgatctcggctcactgcagccttaasctcctgggctcaagctatcctcctgactcagcctcccaagtagctgggacaacaggcgtgtgccaccatgcccggctacttttttaaatatttttaatagagatggggtttcgccatgtgtcccaggctggtctcaaactcctggattcagacaatctgcctgcctcggcctcccaaagtgctgggattacaggcgtgagccaccgtgcctggcctgctttggttttattctgactgtggctcctaggaagaaaaagaaaagatgatgctttggaagctgtagggttgggaagctggagacttcttgtgatgga

SEQ ID NO: 53989 - DNA, 546 bp, Homo sapiens
agtagagagaggtacagagaattttaaagaacaccagtaataagtaaacaaatattttccaaagaaactttttcatattaaattcttgcaaatgagttcctaatactgatttcttagtcccaactgaagaccatgctaaatataacatggatattttagctttatttttcactttgcttctatatacctgttagctttttcttgctttgtgctattgtcatacaaataaatcacatctttatattttatattcccatcaatgaagattctaatattgctttatgtatgtatgtatttatacaactgtattttaaatctgataagaaaataaaagaaacacaaactaagtacatttattctggcttttatattgatgtatgtaattaactattccagtgctttttatgtcattgtttggatttgagttactgtctagtttcctttcattcagcctaaaggaatttccttcctatttcttrtagggcagatgtgctagtctcaaattctgggtttttttaatccttaatttcaccttcagttttgaag

SEQ ID NO: 53990 - DNA, 600 bp, Homo sapiens
agttcccttttgctctttttttttttttttttttttttttgagacggagtcttgctctgtcacccaggctggagtgcagtggcacaatttcggctcactgcaacctccgcctcccaagttcaagtgattctcctacatcagcctccctagtagctgggattacaggcgcccgccaccacgcccagctaatttttttttgtattttcattagagacggggtttcgccatgctggccaagctggtytcaaactcctgacctcaggtgaactgcctgcctcggcctcccaaactgctgggattacgggcatgagccaccactcctgcccaccctcttgccgtttcccgctgctttctcaacagccccatcacccccacactcttactcatcgctgtgcctttgtttacagattcccaaatgtggtactcattctacctggatataccagaggattttgtgggaataaaaggatgactgttttttcacttgaataattaggtatttatttatttatttatttattcatttatttttgagatggcgtttcactcttgtcacccaggctggagtgcaatggtgcaatctcggctcactgcaaactc

SEQ ID NO: 53991 - DNA, 664 bp, Homo sapiens
taaattcatactagtttagaatcaattcattttcaattccatttccaacacagtttgtatctccaatccctgcagtattatcgattcactggttaaaacagatttggtataaacagtgatagcacagtgattataaaaatgaaaaatcagaygctaattcagatgtgaaatattttattggatctgagtagtatatttaaaacttatatccattcttcttcaatcattcattgtttacaaactgaagaaaaaaatcaagaaaattattgctgactgcatggtttttattgaaaataatgttgtcatatagaggacagtaatgtgaaaaattatctgttccaggcgtcaaacacattatgtgaactttcactgcactccatcaaaatgacccaatccacagaaagaaccagcatcgtgctggaggccgggaaaaccactctgtgacttggccaacaatcgaactttttgttcacaatggtgagtcactaaaaccagccattttccagcaaggccatgcttctgttttcttcttgtaagaaaagtataccctttcaaagggatttatcactgcaataatccttacctttaaccaaaaacatataatattccatgaaaaatcaatggcttttcttcaaattcaaatatttccaattttttgtcaaat

SEQ ID NO: 53992 - DNA, 664 bp, Homo sapiens
taaattcatactagtttagaatcaattcattttcaattccatttccaacacagtttgtatctccaatccctgcagtattatcgattcactggttaaaacagatttggtataaacagtgatagcacagtgattataaaaatgaaaaatcagatgctaattcagatgtgaaatattttattggatctgagtagtatatttaaaacttatatccattcttcttcaatcattcattgtttacaaactgaagaaaaaaatcaagaaaattattgctgactgcatggtttttattgaaaataatgttgtcatatagaggacagtaatgtgaaaaattatctgttccaggcgtcaaacacattatgtgaactttcactgcactccatcaaaatgacccaatccacagaaagaaccagcatcgtgctggaggccgggaaaaccactstgtgacttggccaacaatcgaactttttgttcacaatggtgagtcactaaaaccagccattttccagcaaggccatgcttctgttttcttcttgtaagaaaagtataccctttcaaagggatttatcactgcaataatccttacctttaaccaaaaacatataatattccatgaaaaatcaatggcttttcttcaaattcaaatatttccaattttttgtcaaat

SEQ ID NO: 53993 - DNA, 530 bp, Homo sapiens
gatactggaagctacacgaatgtaaatgagctcattagtaagtgggaacctaacctgtcacccacccccaagggaggactgctgagtgacagacagaggctcgagaatgccggtacattcagaacaatcacagcaaagtgaggcacatcctagaaggaggtatgcttgatttgcatagaaactgcatagggtgtgagcccaagccaggcaccgagggccacgtcagccactctggaggaaggagcatgggatacagacayactcaagtgactccagcctgtagaagaagcacatttatttgctctacatactctttcagccactgtccccattcatctaatcttctgcagagcaaaattgctagagtgttcttccaatggtagctgcttccttcacctgtttactttgcacttcattctatctactatttgttcttagcaatctactgatccactctcacaaaagtcgctagtaacctccttagtgtcatatccaaaggatattgttttggcctcatccaagtcagcttt

SEQ ID NO: 53994 - DNA, 593 bp, Homo sapiens
cagccccaaacgagaggcccagggcctttcaaattcactttgccaatggctcctccagaatacctgagccctttccagtccttacgtttctctatagcttttaccaccctctgacgtgatatattttacttatttttgtgtttattgtctgtctccctccactaaactataagcttccaggaagcaagaatctttaactgctgtatccccagcaactagtatccagtacaaagtaggcttttaataaatatctgttaggtaaatraatgaatgaatgaatgaatgaatgaatgaatgaatgaagagtctaaggctaggaaagcaaacccctgacttttctgggtctcagctttcccatataaaaatgagagatgaaactaagagatcccagaagccctgcctatttgatgttttgataatgcctcttctcaaggggcctcctttgagtgaaagaatgttccagaaagaggcttgatactctccctgaagggaaatcctatttcccagaagttagttaaaagaaattccctctccaccaggtaaactcctacatataccttagggcccagctctaaagtctcccactctgagat

SEQ ID NO: 53995 - DNA, 570 bp, Homo sapiens
ttgcatgagtcagagacctagaaacagaaaaaggaagacaagccaagctcagatgatattttgctcctgctctccacccttcagtgggttccccactgcctgctgtgtgactttcagaaccccyattggagcttctaggacttttacaataaggttctaacctatttttccttctaccctactgattccttgcaggtatactatattccagattaaacggactattttctgctccctgaagggtccaatcatgtaaccaccttccacacctttgcacaagctatccctccacctgagatgcaccctccctccccaccatcctatcctaagtgctacctcttctctagagcctttcctgattttccttccaacctcataggctaccattaattggatgtggccccagctatcatgaaacttttgcacttttgtaaaaagtaactcactcatagcaattattttctaaatggtgtggcagtaatttgggaatcttttttcttgctctcaatcaaaattagctgaacatctactgtgtgtcagatgttgtgctgggtgcctgagacacaaaca

SEQ ID NO: 53996 - DNA, 570 bp, Homo sapiens
ttgcatgagtcagagacctagaaacagaaaaaggaagacaagccaagctcagatgatattttgctcctgctctccacccttcagtgggttccccactgcctgctgtgtgactttcagaacccctattggagcttctaggacttttacaataaggttctaacctatttttccttctaccctactgattccttgcaggtatactatattccagattaaacrgactattttctgctccctgaagggtccaatcatgtaaccaccttccacacctttgcacaagctatccctccacctgagatgcaccctccctccccaccatcctatcctaagtgctacctcttctctagagcctttcctgattttccttccaacctcataggctaccattaattggatgtggccccagctatcatgaaacttttgcacttttgtaaaaagtaactcactcatagcaattattttctaaatggtgtggcagtaatttgggaatcttttttcttgctctcaatcaaaattagctgaacatctactgtgtgtcagatgttgtgctgggtgcctgagacacaaaca

SEQ ID NO: 53997 - DNA, 570 bp, Homo sapiens
ttgcatgagtcagagacctagaaacagaaaaaggaagacaagccaagctcagatgatattttgctcctgctctccacccttcagtgggttccccactgcctgctgtgtgactttcagaacccctattggagcttctaggacttttacaataaggttctaacctatttttccttctaccctactgattccttgcaggtatactatattccagattaaacggactattttctgctccctgaagggtccaatcatgtaaccaccttccacacctttgcacragctatccctccacctgagatgcaccctccctccccaccatcctatcctaagtgctacctcttctctagagcctttcctgattttccttccaacctcataggctaccattaattggatgtggccccagctatcatgaaacttttgcacttttgtaaaaagtaactcactcatagcaattattttctaaatggtgtggcagtaatttgggaatcttttttcttgctctcaatcaaaattagctgaacatctactgtgtgtcagatgttgtgctgggtgcctgagacacaaaca

SEQ ID NO: 53998 - DNA, 587 bp, Homo sapiens
tgaccttgtttattcatttaacaaatatttatttcaagtactagtttatggcaaacattattatatgtrataaggatatggaaagaaccaaatagacacagcacccatctcatggacttaacattctattcggagagatatacaaacaaacaaataaataagggtaaaatatgatattggagatggttaagtgctgtgaaagaaagttaaactggaatatgcctaacatcaacatattctttattcgccctgcttcaactcttttgccaagattaaattttccacaattgactgtcctactatagtgggtttctttctttctttcttttttttttttttttttttgagacggactcttgctgtgtcgcccaggctggagtgcagtggccaatctcggctcactacaagctccgcctcccaggttcacgccattctcctgcctcagcctcctgagtagctgggactgcaggcgcccgccaccacaccggctaattttttgtatttttcagtagagacggggtttcaccgtgttagccaggatggtctcgatctcctgacctcgtgatccactggcctcggcctcccaa

SEQ ID NO: 53999 - DNA, 587 bp, Homo sapiens
tgaccttgtttattcatttaacaaatatttatttcaagtactagtttatggcaaacattattatatgtgataaggatatggaaagaaccaaatagacacagcacccatctcatggacttaacattctattcggagagatatacaaacaaacaaataaataagggtaaaatatgatattggagatggttaagtgctgtgaaagaaarttaaactggaatatgcctaacatcaacatattctttattcgccctgcttcaactcttttgccaagattaaattttccacaattgactgtcctactatagtgggtttctttctttctttcttttttttttttttttttttgagacggactcttgctgtgtcgcccaggctggagtgcagtggccaatctcggctcactacaagctccgcctcccaggttcacgccattctcctgcctcagcctcctgagtagctgggactgcaggcgcccgccaccacaccggctaattttttgtatttttcagtagagacggggtttcaccgtgttagccaggatggtctcgatctcctgacctcgtgatccactggcctcggcctcccaa

SEQ ID NO: 54000 - DNA, 587 bp, Homo sapiens
tgaccttgtttattcatttaacaaatatttatttcaagtactagtttatggcaaacattattatatgtgataaggatatggaaagaaccaaatagacacagcacccatctcatggacttaacattctattcggagagatatacaaacaaacaaataaataagggtaaaatatgatattggagatggttaagtgctgtgaaagaaagttaaactggaatatgcctaacatcaacatattctttattcgccctgcttcaactcttttgccaagattaaattttccacaattgactgtcctactatagtgggtttctttctttctttctttyttttttttttttttttgagacggactcttgctgtgtcgcccaggctggagtgcagtggccaatctcggctcactacaagctccgcctcccaggttcacgccattctcctgcctcagcctcctgagtagctgggactgcaggcgcccgccaccacaccggctaattttttgtatttttcagtagagacggggtttcaccgtgttagccaggatggtctcgatctcctgacctcgtgatccactggcctcggcctcccaa

SEQ ID NO: 54001 - DNA, 553 bp, Homo sapiens
ctaatcctttgggtgtatcatccaaggcttaaatggcttaaaacacttatctattatttctagtgcctctattgggtgtttaggtgggttctcctgacttaacctgggctcactcaggcaggtgctttcagctggaggctcagctgagctgaaaggtccaagatggccgcattcacctgtctgctaattagtgctgactacacgggggtacctccattctccctgatggctttcatcctccagtaagttagactggccttctggccttcttacaaggaggtctcaggacagcgtttcaagaaaggtgagaaagctctaagacctcttgacgtctaggctctataactagtaaaatgtcacttctacaacatycttttgttcaaaacaagtcacaagaccagtccaaaatcaaggtattagaaacagactctacttcaggacagcaagagcatcaaagtcacattacaaaggggaataccagtcaggatgtaagggatttgtagctgttaatctaccttatgctgcaatgaacatttttataaattgagcttta

SEQ ID NO: 54002 - DNA, 619 bp, Homo sapiens
aaataggtttttaaatagaatggcacccattctgctgatctctaatcccaagagagcaagttcaacatcagaagtcaaaagaccattatttgtatctggatcatccacccagggcgatagatcagagaattaagataattacatactttctggttaattatctgagatgaaatattctatagatgtgttatatgtcagtggagctgcaatctggtccaggctttcacaggaagctattaaaaatgtccttgatgctcagcaagagtcacatggactgtctatcagagaatggagggccacagaactcccactcaccgatgccgcttggcttgcagcctttcttggcattagcctcagcctcgctaccaacatccacctggcctccccagtccagttccctccatatgaatcccggtcccttgcttttacatcacaccatccacaggcttaacctcmgctttaccagtggctacccaggacccctgaaaattaagggtagtgggttaaaagtgtgaagaagggggaaccccatacatctatacatatggacaaaataccttgcaaaccctcacttccaattagatctgctctcaagatattggccacaacagatgaggca

SEQ ID NO: 54003 - DNA, 619 bp, Homo sapiens
aaataggtttttaaatagaatggcacccattctgctgatctctaatcccaagagagcaagttcaacatcagaagtcaaaagaccattatttgtatctggatcatccacccagggcgatagatcagagaattaagataattacatactttctggttaattatctgagatgaaatattctatagatgtgttatatgtcagtggagctgcaatctggtccaggctttcacaggaagctattaaaaatgtccttgatgctcagcaagagtcacatggactgtctatcagagaatggagggccacagaactcccactcaccgatgccgcttggcttgcagcctttcttggcattagcctcagcctcgctaccaacatccacctggcctccccagtccagttccctccatatgaatcccggtcccttgcttttacatcacaccatccacaggcttaacctcagctttaccagtggctacccaggacccctgaaaattaagggtagtgggttaaaagtgtgaagaagggggaaccccatacatctatacatatggacaaaataccttgcaaaccctcacttccaattagatctgctctcaagatwttggccacaacagatgaggca

SEQ ID NO: 54004 - DNA, 472 bp, Homo sapiens
tgtattaacaaagagagcaggayacaaacatgagtggaagaaggccagctgtgtcttttcattgagttttactctgcagtaaaaatgatcataactgaggcttattttctgaatagaacatgacacatacgaagccagtctcattaacttaaacagtaccacaaaggagactttaccaggtggaaaggtcacttctgctgaggttgaagagatctctacagataaaaggaagaagagacatacaccagtggaggggactcctgggtttctgtttttactgaggctatgttggggacaaaatttttgagtttcattttgataaacagatctccaagaagaggcactgatgggatagcagacagagtgttctacctggtgtggaggtcacgggagtggagatggaagctgcaggtgaacacaaaggacaagggagcaataagaccgtctcgtcaggcacacatgcctctacaag

SEQ ID NO: 54005 - DNA, 624 bp, Homo sapiens
ctgttgttaagaggcaagttacttgctgtcttggtcaactctgcatctcttactgccttggccatcctcactgaatgctggcaaacgtcaaggaggatcagggaaaaccatggcttgacttctttccattctggaaacaccacttggtggctggtctccaggagaagttctctccacagactcaagtaggtgattaccttagaccagtggtccccaacctttttgacaccagggattgttttgtggaagacaaattttccacagatggcggggaggatggtggatggtttcaagatcaaactgttctacctcagatcatcaggcattagtcagattctcataaggtacactcaacctagatccctcacacgtgcagttcacaacagggttgtgctccygtgagaatctaatgctgccactgatctggcaggaggcagagctcaggtggtaatgctcacttgctcatcattcacctcttgctgtgtggcccagttcctaacaggctatagagccctactggtctgtgacctgggggttgaggatccctgccttagactaccagtcagtgaatgtcttcatggattcaacttggcctaatgggttgaacaaatttttcccttggct

SEQ ID NO: 54006 - DNA, 910 bp, Homo sapiens
  misc_feature (1)...(910): n = A,T,C or G
aagaaactggttttaccggcttagttttgaccaactgatggcaatttgtacctgctaaactcccaattttttacttgctggttgtgtacgtaggcagtgaggtttgttggactgggcatgcagggacaagcagttaggccaatacatggactgaagattatatctatttatctgccttttgtttagctatttgcataaatatacagagtgggtttatttgcacacttagagctttagaataaaagaactttgactttcaaattggtttttcttgattttttaaaatttttatactccactttttcttccgtctttctcaaactcatttttccctagtagcagagttgagacttaatattacaaaactctgcttgctttaaagaatctaagaagaagaagaagaagaagaaaagacactaaagaacttccaagcagaagtttaagaagttctgctatagcccatccactcgtttgtggaatttaaatatatgcgtttttgccacaataacagcgtagccttgctagaatcatatacaaagcagcagatttgtttctataaattactgnnnnnnnnnnnnnnnnnnnnnnnnnnnnnnnnnnnnnnnnnnnnnnnnnnnnnnnnnnnnnnnnnnnnnnnnnnnnnnnnnnnnnnnnnnnnnnnnnnnnaagtgggtaaaaagagcattgaactctgagtcggaagacgacttcaaggcccagctcagcactctagcagaactttaggtaagttttttagacactrtgtacttcagtttccccatgtgaaaatgagaataacgtctgttctgcctacttcacttgaactatttgaggataaaagaaggtaaaatgcaataatggtcatgaagattttataaaccttgaagtgatgtacaagtataccatactg

SEQ ID NO: 54007 - DNA, 993 bp, Homo sapiens
ctagcttactataagtaggctaggcatattaatagcgtataaggtgctctcacagacatgttttccctttgatactcaccatagccctgtgaagttgatagctactatcccccattttacagataaattttctaatctgtaatcaaaatagctgctctttgcttgaagaaaaagtccagagggacaccctatatgtcaagagagctccagggggtgggtaatttctttcataattgctagaagagccaattctgaatgtgaggctttttctrtctgctttattacaaccagagatggaataggaaggctttcagttacagtttatcaattccttctgcttttgccagttaatctctagctttactcttttgaaaaaactacctgtttcccactccacttctgctaccaccactaccaagtcagagtcctctttctattccagccaaacctcttcctgttcttgagaattgcatcacattcttggcttaacgtaaccaacacccccacattggcaccagggagtgtgtagcccttctttattggctgaaagttcttgtctggtgagcatggaataagtcactcacttcctgaatttcagccctggctaaatttgcttctggaaaaacatatatatattcctcagatttttgtctgttggtttgcaaatctccttcactccagccctgtcctggaatgagcaagatttaccaaatagggacagcatgaaagggaatttagagggtagaggtagagggaaaaggaatagtatgtgtagcttgctgaatgagatgtctgctcttgctgtttccatttcttcacttctcaaacaatttttaacccaatctaaactggcatcagctcccattgtattgaaagggctttcactcaggacactaacgcccccccgccacctcccatattactaaatccagtggatacatcagccttgatcttacttggcatcagggtagcatgtgatgcttttggtcacat

SEQ ID NO: 54008 - DNA, 546 bp, Homo sapiens
aaaaagtaattacataaaacaatatatgtaatataaaagtgtattgttgggcctcaaaatggcctcaaaaaatggggagagaatggaggaatataagggtaaagctatatttctctggaaatgtcagaataaacttgatatattaagatatatactgtaagccctagggaaaccacttaaaaaaccctcaaaatataatataaaatttatttaagaaattagtgatgtctaktgttacattagaaaatatctacttaatacaaaatgaaacaataaaggagaaatcatgtaacaaagatgataagagacctatagaaaaaggtaaaatgtcaaatgtcaatctaactatattgatcataacattaaatatgaaagaattaaacactccaatcaaaaggcagagattgtcaggttgaatttttaagagattgaggccaggcacggtggctcacacctgtaatcccagcactttgggaggctgagacaggcagatcacgaggtcaggagattgagaccatcctggctaacatgatgaaatcccatctc

SEQ ID NO: 54009 - DNA, 546 bp, Homo sapiens
aaaaagtaattacataaaacaatatatgtaatataaaagtgtattgttgggcctcaaaatggcctcaaaaaatggggagagaatggaggaatataagggtaaagctatatttctctggaaatgtcagaataaacttgatatattaagatatatactgtaagccctagggaaaccacttaaaaaaccctcaaaatataatataaaatttatttaagaaattagtgatgtctagtgttacattagaaaatatctacttaatacaaaatgaaacaataaaggagaaatcatgtaacaaagatgataagagacctatagaaaaaggtaaaatgtcaaatgtcaatctaactatattgatcataacattaaatatgaaagaattaaacactccaatcaaaaggcagagattgtcaggttgaatttttaagagattgaggccaggcacggtggctcacacctgtaatccsagcactttgggaggctgagacaggcagatcacgaggtcaggagattgagaccatcctggctaacatgatgaaatcccatctc

SEQ ID NO: 54010 - DNA, 566 bp, Homo sapiens
ctactgtactgggacccagattccccagaatataggacaccaaggtatttagggtgcccgagcagccatgaccactctgctggacctgggctctagttctttggagggtgaggtgtgggaaacccccaggatgagagttataggtacataactgccccttgggcctgaactaataggggactatctgagaatcacagtctkcatctttgtgggagagctacttctaccaatgtcttagagagtgaatctatgcccatgtcaaagctgccataatagttcagcaaagcactgagccaagaaccctagctcaacagctactctgaggacttgtcccctgaaacacaatgctactgcggctgcctgtgagctacgtatccttcagaagtgaagaagaaataaagtatttcccagataagcaacagctagggaattcatcaccattacactagccttataagaaatggttaagggagttttttttttttttttttttttttgactagaaagaaaaggagagtaattactatcatgaaaccatataaatgaagaaaactcactggtaaatg

SEQ ID NO: 54011 - DNA, 639 bp, Homo sapiens
tgtgactgtgggcagctccccagttttcttctctgaataatgaggcccctccaagggcccttctcaatctgattttctggggcagcatagcccccatgtgcatggtgggcagagaagtctcttggaaacagctctgcccaccagtctgtctcttccagaccacgccactgaagggcgtggtgttcccgtgacagggaggaggcaggcatcactgggaatctcagaacctcatctgatacttgccctggccccatacagacctctcaggaccagccccactccaatgcagggtgcagccccagagccacgtcacayaggtgctgggtctcagaaggaagagacctgtaccaaggtcaactgtgtgcccctaggtccatctccttgcctctatgaacctcagtttcctcacccacaaaatgtggatgaatcttgctggccccaagggctccggcacactcagcagcaacccagatgtgaaagtcctttgtgaattgctcccatcaggcataatcatgataattactatctgtaaaacgagggggttggaccagctgatctctgtgggctccttcccagctctgaagctggggatttcttgggtttccaagctgggaatttacacagacgtagggggccagg

SEQ ID NO: 54012 - DNA, 622 bp, Homo sapiens
ttttcttgaagctttggggcctgcttttgcttgtcttatacaaacaacattaatgaaaaagcagcacatagatattactagtaaacctgaaaatagctgatgacttcggtcattgacttatgtacccatggttacagggatacacaatgcaaacatatgatatatctactagtaaaatgtttactgttttgtatcactgaattaatacatcaatattatacaaagttatacagacaggactaccaggtatacaatgatctggatgagatttccaaccattaggggtctaccgtacctaatcacaagctgtcctatgctgtgtcaccctatcctaagtgtgtcacctcttgttttcttcctgttactttgcattatatatctaaattgatttaatagtcttgataatttgatctacttagtttggtctgagagcctttctactaatggccggcctctgggaaagtcgaccaggcatagaggtatcaaaataccaagaaaatgtatcactggtcactcttttattttcttctacttcttacaactagggtgaaaacattatggaaactgggcatgtttgaagaggaaataraaaggcaacatatttagatattgcaacatattt

SEQ ID NO: 54013 - DNA, 2954 bp, Homo sapiens
tgcatggctattttttttttgtatttttagtagagatggggtttcaccgtgtgagccaggatggtctcgatctcctgacctcatgattcgcccaccttgtcctccgaaagtgctgggattacaggcatgagccactgcgcctggcctggagttatttttttaatattgtgcattgtatatttttttctgttttcatagatttatttaggagagtgtatgacatgatgaaacagtgagacagtacttggtaagcttagtagaggccaccttaaatagcaatctcattccttctagtttttcagtcaaagaagaaaaagtacaaatgaaatatttgcttgcactaatcaaaacacacagcaaaaattctgagcaaaagtgtctctgaaaaattagagaacatttaaatttatttcccaagtgaaagaataaattcgatagtataagaatagtaattggtatttgtttacacagacacacatgtcagaagcatgtgaaccagagcaactccatcttaaataggagctgggtaaaatgaggctgaaacctactgggccgaattcccagatggctaaggcattctaagtcacaggatgagacaggaggtcaacacaaaatacaggtcataaaaacactgctgataaagcaggttgcaggaaggagctggcaaaaacccaccaaaaccaaaatggtgacgaaagtgacctctggtcgtcctcactgctacactcccatcagtatcatgacagtttacaaatgtcatgacaacatcaggaagttactctatatggtctaaaaaggggaggcataaataatccaccccttgtttagcatatcatcaagaaattaccataaaaatgggcaatcaacagccctccaggctgctctgactatggagtagctattctttgattcctttactttcttaaaaaactagctttcactttgcaatgtggactcccccagaattctttcttgagcgatatccaagaaccctcttttggggtctggatcaggatgcctttcctgtaacacacaaaccaccaccatcaacaacaaagcattccttctttataaagatacacttccaggcatatacctcccttggtgtggatatttttatatttgggttgtctgctgtagctaaagtaataataattaagaagttccaaaacaaagaaatgataaggactcaaggtgatggataccagaaatgcctgacttggtcataacatattctatgcatgtagagagctcttacatgtaccccagaaatatgtaacacattacgtatcaataacagaaaaatatgtaaaataaaataattttttaaaaagcagttacatacaaaataagaccctattgatttttgttattgttttatgaattagaaaaacaaagaccaacatcggcttatagtcacataactaactaggaataaattagaaaaaaaaatcttttttttgtcacagatatcaagttattcattgaacaactataatgtaagaagactgtaattaccaaacattcctggggttgtggcaaccatacggccctaatttgacatgcagacattttagctaactcctctttttaaaatccagtaaatgtatttaatgctacagtgttattaaatgaatattatagcttacaatcaactggatcttagaatcacagaaaatttcatttgctcaatgaactatcaataggaactaaaaataggtaagtaattattcttcagtgtaagaaaattttggtctacttgaaaaaatatatgcatgtattatattcagattctttatagatatgtttgatatatgtgtatatatacttatatgtatattatatttatgtatttgtgtatatatgcatatataaaaaataaggaaagaataaaacctaaaaaaatacaatattaaaatgaatacttcaaaatgctatctatattttaaaggaaatcttttttactgagaaaaatatcctggtaaaacattagtctatgttctaaaaattcaaactaaatcactaaagctacatgttgtgttaaaataaaataagtagtctctttctctgagttttattagactgagttgagattggtaacaattcacaaattgagaaaatgttattatttcaaaaattgatgattatttgtccaataaataatgtgatataaattcattattactcctcaaaatttcataagactatgaagtacttcatgactgtctttagatatcatttcttctgctccttcaaaagaatttccaccaagatgcaatcagtatttgtcaaattatcaatcattttatcattccaatgcttgtaaacctttaagcattatatctaatctcacttaaattattcagaaaaatgtttaactgtgaagaaactatagatattacactatatgtttgttgacaaatattacattgttgacaacttaatttttattatctaatgtttgctctgtaagctcattttaactttataaaaatttatgtaggaaatgttattggctatttaaagttgtatttactttctcttattttaaacttaaagttagtacttttctctaaagtatcatttttaacaaaatatctattaagcatggaatcaaaatatgtgtacacatgtacactgrtttatcaccaaaatttttagcacttcctctctccaccatccagacaatatggtagttaataagaaaaaaaattgaagaaacataaaatataggccataatattattaaaattaagatgactggcaaatgtcagttagtgtaattaaaagcctaatttacactcaatatgaataatatttatcagattatttattcatttagcaaactacattattgaatttgacatgtattatgtaccaggacaatattgtatattataaaacctattcattagttgtctctttaagaacagattattctgttttgaggatcg

SEQ ID NO: 54014 - DNA, 628 bp, Homo sapiens
cacataaacgcttgcctgctttccctttgacttctgccatgagtaaacgctccctgaggcctcctcagccatgcttcctgtacaaccttcaaaatcataagccagttaaacttttttttttaattataaattacccagtctcaggcatttctttatagcaatgcaaaatcaaactaatacaataatagtttactacgtaatccatatttacttacgttcccattgttaactatggtttccaagatgatggaactagacaataaaatataaatttttaattttaaaattatgaatttctctgatgaaatattttcttctcttcagtatatagttrtcagagaaataatcacataattggcattatttcaaagatgtacaatggaacaagtgtgattgtaatatttaatgaggaaaaccaagtcaccatctaatttttgactctataaggaaagtcaatttttaaaaatgcaaattccaatatccgaaactgtatttatttttattttttgtgcttatttttccatattatatgctttaaagattttgttaactttctaactagagtattacttcttttagaataattctttctatgcaatattaaacctaaattaaaaagaataattct

SEQ ID NO: 54015 - DNA, 541 bp, Homo sapiens
tcccatgcacaataaattcttagactatttacattgtgtcagaagactgaatatatatatatatatatatatatwtatttttttttttttttacgagacaggggtctcactctggcccaaggctggagtgcagtggcacaatcatagttcactgcagcctcaacctcctggtcttaagggatcctcccacctttagcctccaagcctgactaattctggggtttctctatgttgcctaaacaggtctccaactcctggcctgaagcaatgctcccaccttggcctcccagggtgctggggttatagatgtaagccaccttgcccagcctgaggatttaatttttattaggtttagagagcccctttacatcctactatacaaaggcaaataggataaactcaggtaagaagatattcctgtgttctaaaatctttaaactttacatacaataaggcttcccaccaagttttaaagtcaacagacttctacagatgaaccttatggaactgctttaccaacactcttgaagacttcataatt

SEQ ID NO: 54016 - DNA, 541 bp, Homo sapiens
tcccatgcacaataaattcttagactatttacattgtgtcagaagactgaatatatatatatatatatatatatatwtttttttttttttttacgagacaggggtctcactctggcccaaggctggagtgcagtggcacaatcatagttcactgcagcctcaacctcctggtcttaagggatcctcccacctttagcctccaagcctgactaattctggggtttctctatgttgcctaaacaggtctccaactcctggcctgaagcaatgctcccaccttggcctcccagggtgctggggttatagatgtaagccaccttgcccagcctgaggatttaatttttattaggtttagagagcccctttacatcctactatacaaaggcaaataggataaactcaggtaagaagatattcctgtgttctaaaatctttaaactttacatacaataaggcttcccaccaagttttaaagtcaacagacttctacagatgaaccttatggaactgctttaccaacactcttgaagacttcataatt

SEQ ID NO: 54017 - DNA, 530 bp, Homo sapiens
ttgtggcccccacttcttgatcgatttctattcccacttcgtcttctaccatcttgtcgacttcctgagcgacttccttgtcgactctgtctacctgaccggccgccagatcgaccacctgaccggcctgaccggcctgatcgaccacttgaccagccactcctctgtctggaattagaagatgtgtttccatcataatattcttcaatttcaggtaatttggctggcactgagagtatccagtcggaatcatgccactctgcctgttaggggaatttacaggattaatataaatgcaaaatagaaaccataagcaaacatgttaagtacaagaagacacctttttcatatctattagctaaaggccatctattctgttaacgtatctggaacaaaaatgaaaaccagaaaataagcaaaaatattttcaattttcgagatcataaattcatactcagtttatacattctaaaattaaactatgtattactaattamatgtactaattaaatacattctataaatataca

SEQ ID NO: 54018 - DNA, 1342 bp, Homo sapiens
tgactctcctctggctgcaactcctgactcaacatgtcttgtggcctccatccagaggcagaagcagtgcacgaggaccattttccacactccctatgatttcattcccaaccaatcaacatttcccactccctagcccccggaccatcaaactatccttgaaaaaccctaacctctctgcctttcgggggactggtttaagtggtaactccatcaaccattatggccagacttgcatcagttaaactctttactacaaagccacaatctcagtgaattgattttgtctatgtagtgggcaggaagaacccatcaggtgatcacaggactttatatcacaaatattccatttaagtcatggcaatacactgactttgggcaaatcagtttatcttttggggccttcattgtctcacctataaaatgtaaaataattttacctgccctctttatttcctaaagttgttgtgagggttgcatggtatcatattttgaaatggtcctataatttagaaataatcatatagaaagagatcaatggtgaatatgttgcattttataggagaggcaacagggttcggagaacctaactgactttcccaaagcaatgagttaattattatctgtcagtacttatgcgataatgaacataacgatagcaataaacatagctagtacttactgaaaatttactgtgtgataaccactctttcaagcattctgtatgttaatatacgtagtcctttctgaaacaaactatgaagtagctactcttattatccacatttttccggtgagcaatatcagagagagatttaagtaacttgtctaaggttatgcaattagcaaatggtagagccagtatttcaacccgggagtctaggttcagaatctatatttacagaacaaattacggtcatatttatgttttttgcagatgtgaaagatccgctttcaatcaattcccaacagttgattgagcctcagtgatgaacattaggataatacttgccactttctaaagcctcattagtaaatgtaatcattttctaatcttggggaagttgttcttttttgtctaggtctttgcatggagatttggtgactgtgttggtgttttactttgttttattctatttcctttattgttcgtccaccaatttgttgtgtattatatctgaaccccttgatctgtgaatcagcccggctaaactcttatgtcttgtatcataatacactttacaaatgaaatctcaccccatggcttacatttcagtcctgactttaagttaactaccaggctaaactcagtaacwgttctagcaactgccctcactaaaaa

SEQ ID NO: 54019 - DNA, 598 bp, Homo sapiens
taatacccaggaccacattcttcaaagacgataagcagctgagtgaatacggtgcagcacatctaggaaagttttcttctgactgacttagttttccagtgaggtatgaagacagtcatcatctgagcatgaaattggaggaggaggaggaaattttggaggtgtgaggagagagagaaatgaatgaaatatagaagaagggaaggctgaattggccagggaagtatagtatgatttttctgtaataagccaaaaagtgtgaatttagagctaatcagctagaatcctgcataacctataggatgcctctgcatgggagtgtatgcagcgcagcagtatgtggatacaaaagtgggtaatcaggatagcagtctgcggaaaaaggaaaccaataaaatatttataagcagttcctctgcttccttgtagtcccactctcttctgttcagccatccaacgttggaatgtctcaaggctttcttgtcttctcaccctacacttgcccttctggcaatcatgtccactccctggatttcagttgcctttctatatgcarctgacactcaaaagcatatcgtcatatatactagtaccttga

SEQ ID NO: 54020 - DNA, 534 bp, Homo sapiens
ggttgtagccactaaatattcttacttagaaatgccacggaatggctatgttaaacagtacacaggttcctctttctagtacttttcattgaaataaggttgtgtatcagaaaaatgtttttttctctctttctaccttccctactatattgtgagcatttgaatatgaaatttaacataatttatgtagactgccctttgcctactttatgggcatagtttttctctttttttttcttttttctttttttttttyttttttttttttttttttgagacagtctcactctgtcacccaggttggagtgcagtggcatgatctcagctcactgcaacctccaccgcctgggttcaagtgattctcgtgcctaagcctcttgaatagctgggattataggcatgcaccaccatgtatgggtacagttttttactcattaatcatgttcttgaggaattgctaattgcattaactgcagttgtagaataaaatttataaaaaactttggactgagaagtggaagctcaaaaggaata

SEQ ID NO: 54021 - DNA, 530 bp, Homo sapiens
acttattctaggtactccttaacaaagactaacaccaagctctgctaaaatttagagggaggcggaattttaacggtgagtcccaccaagttagaagagtttaggaacatccttggatttccacagatttcatcactttttacattaaacgtaaatggcaaacaaaggttcaaaagggacagcaggtaattgaactgtctactaaactaaaacttggcactctttacagggtgaaagagagcacagtccagttatttatcatatattcttcataatgttcattaaacaataaaaaattacctgacatgaaaagaaaataggaaaatgttacttttggtccagaataatagtagtttattaaaaactaaccttaaggtaggccagatgttggatttagcaaaragcttcaggtagctattatgaatattttcaaagtattatgggaaaatatgttcaaataattaaagaaaaatgcagattttgtgagcaaatgagtaagaaattttagcatacaaaaaaccctaaaaaac

SEQ ID NO: 54022 - DNA, 613 bp, Homo sapiens
ataagttgcattttattatggaaaaatgtaacaaatgacagtatgagaatgtgatttaagtatttgtcttctcatgttttcattaagattaaaacttagtgcattttctaaacagtaattcagggaggctgtcctctgagattgaaacttcttcaggcatataaaatatttcatcgctatatatgtctgtggtttttctagacataagtatcataaatgttgtgtgaataagttggcctctaatctatgaatatgcaggctgcagtacrtgagggccatggttatgtctattttgttcatgtcctgtagtcagaacccagcctagtggctagtcttgaggaggagcccttcaaatatatcttaaatgaaaaagaaagacacaaacattgtttttgatatctatgtatatcttcctattgagatgccaacaagaaagcagatgaaaatatttgaggctaaagagttttaaaacttagaaaagtttttaagacttaaaagtatatttatctctagttcattctgcatgattctatagatttttatagtgcttactggtttttattggactaactgacaaaaatatggttaaactaaggaggggctatccagaatg

SEQ ID NO: 54023 - DNA, 545 bp, Homo sapiens
gtactcagaaaacaagacataacataaataagtgcatcgcctcaagcactatcacctagaacttgacaaagtttgactgtgagtttcaagaaaagggctgacgaggccaagaagttccttcccctctccccttacctcccattttggtgacaaacttaatgcagagaaattcctgtttcaggtttgccggcattggagcaatcctggcatttattcacccaggacactagaaggctgaagtctgcagggtgcacatatttaaamtcacggaagcactggagtaatggaaagaggtgcccgcgaaggcatcatcctttccaggacaggctctaattccgcctccgggcccttttgcaaaaagccatttctacaaacccacggccaccaggaggaaacacacaaaagaccccactgccctcctggcttcccagaaggcctcagaaggacgagacacggagcccgcacacaatcctggaccctcctccttgcattcagtttgatgcatgtcacctgcctgcatgatggaggtcccacaatgggcacaa

SEQ ID NO: 54024 - DNA, 487 bp, Homo sapiens
tatactaaatcttatgggaattttatttggcttttctttaatccccagcctccttagatgtgatctttcattagcatgaaaaagaaaatggcacatagtggggatgagaaattgagggagaggatggtgactggccacacctctctttccctacaggacaattatgtttgattaagaaccgatattaggcatccaagattgtcattgtcccttaggagcttatgatctaactagagagacaaagtcttcatcaatctaaaagataacsaagacttgatgtgtaagtgttgaaggagtggtaccagcacacgtagtaagcaaggagagatccctgacccctaaggcagcctgggcttggggaaaagtggggttctgatatggtttggctctgcatccccacccgaatctcagatcaaagtgtaatccccacatatcaaattggaggaagggcctaggcgggaggggattggttcatgggggtggattt

SEQ ID NO: 54025 - DNA, 978 bp, Homo sapiens
aaccaaagttctagtagtttgttctgtttttattccacacaattaaaaattattaaaaaaaaaaaaccacctggaattctcagtgttcgttcttccccctccctttaaatagtgaaggagtgggaatatctctcttcccaggaaactgatgtaatcatttagtaattggtgtgacagcatgcagtgtccttaggtaagtgtcccaaagggcaagaccgccagctgagcagaggcaaggccagacagcaagtgacatagttccctgtattttgccctttgtttgctctctttattcacacacagtggctatttttttcacagcgatccattttttttttctagctgctatgtcagatcctctctcagttaaagcaaatttcgttttattgtaagttttaaaaaaattaaaaagttctacctatttaaaagcaactcttctgtcccaataacttttaaaggtgactttgggtgcttcatacgagtattatctacacttttgctaagtacccaggaacagagaggctctgccaagtttataggcatcatttggaacgaaagtgatcatctaattagggccctgtaaactcatctgaggktctaagtgatagggagaaatatgtattaggacatagatattcattgtattattaaaagtaacggaatacattaaaatggaaaattgaaagaactactgcattggctaatgaaagcagcatgatatgaaccaggaattttgtgcacacaaaagagctatcttacttatattatttaggactgatttattctattacacttggaagtttattgtttttcatttaaaatgaaaataaatcaaaaggcacaaaatatgataaaataaatttaaacaaactaaatgaaataaacttaagtaaaagcagcaaaagtttgctattacatataacatatatacacacatataaaacacacaggaaagaccaaaccatatcctaataaata

SEQ ID NO: 54026 - DNA, 540 bp, Homo sapiens
actcagttcagattctacccttggagagagaactatatccatctcctttgtttggatgcttgcttaaaagtgtctattgacaggtgaagagcatatgcccatgaaacagacaccttttctctgaagtctcctggcttcccattctcctggactgtgccttatggaatgagarctgtcaggaccaaagttgcacctcagaagttgtttgtctgacaagtcactgctgactgtggcagaaaagcctttcaaaaatttcctcccactacctgtgggttgcaatagctaagcatgttgttaaaataaatatgacaattttgaagatcaaagactgccttcaaagggatatggttaattctacttaccatgcttgatttgtatttaccaaagagagctagaaatcctgagactagctgcgaagatccaaccagcttgttgcttttatgaccttggcttttactgttgaattacaaaaggtggatagctggagatagcagacttagctatggtactgcaagtgacagaaacaggaagaggtccaaa

SEQ ID NO: 54027 - DNA, 547 bp, Homo sapiens
ggatgagctcggcacaggtgagggacagcaagtgtggccagtgcacggtgacccaggggaaaagttgaggtcagagacctcagggagccctgtgggcsaggcaaggtgctagggctttattctaagtgcagcgggaagtcacagaggggctgtcccattttccaaagctctagcagaggctgtatggggccaagaacagcagagccagcataggcaggcagcagcccagtgaggccgaggctgtggcaccactgcagaccaggggctcggacccgtgtggccaggggctgggatcagattcaggatctgctgtctgggggaggcaggctggctgggctgaggagctggacatgaggcaagggaacaagagggctagtaacatgtgtgcagagacaaggggagccccacacatgtgatgaacaaagagagacaggaggctgtcgaagccacttcctcggctgaagctgacctggcgcttctcaggtgggagaggaaaaccatgtccactgtggcccgctgctccctgaatgtccctccctcatattgc

SEQ ID NO: 54028 - DNA, 558 bp, Homo sapiens
attattttgggtatacacctgcggaagataaactgacattcttactttatctttttttaaattcaaagaaatgatgtgtgcatgttgtcttgtatttaatgcccaataaatgtaagatcatttatggtcctagactagaccaaatttccttatagtagaaggaactcccttccaatatttctgacttaagtgtatgaaaaagtcctcatgcttcaaaatattttgcttacatcatgagatattttgggaaataactctttaaatacataagtgtttctcaaagcttattcttgcaaatctactccttacattaaactaaaaattgtgactaaaagcctatkttcatgaaatgttatttagtcaaatactttgccatcaatgatttattgaattatttcttctttccatgcagtagtagagtggaagaaggaataatttcaaagcaaagtgaatggagtgtgggcattgatatgagactttaggtaatagaaggaaagcaaagggaacagtagaatagcaggcgttcattgaggaatggaagaaaagaaagagagagaa

SEQ ID NO: 54029 - DNA, 527 bp, Homo sapiens
aacttcgtaggatgctgactcaatacagaaaagatatttgattgtttcttaaaccagaatttgaacagacaaaaattattgagtgttattttaatataaaaaatgaatctcagtttaaatttatacttaaaaatcccattaacatgaatgttcttagatagttgatttagtatcttttttgcttatatatatatgtatatgttatgtttattcagaaagagagagagaagaaggaaggaaggaagggagggaagagagagaagaaggaaggaaggaaggaagagaaattggaawgactgacaatgtattcttcagcacggccaggtaagatgcgctaaaagtagcctctaattattttattggtcaatgtattaataaaaggtacaatataatcacttatgtaagtcaccaattacataaaacaaaaatattgtgaatttgttaaaatgtctgtgatggatcctccagaacaccctctgtgaaagcacaatgtgggtttggttgaggattttcgatcagatttctca

SEQ ID NO: 54030 - DNA, 534 bp, Homo sapiens
atatatatatatatatataaattgaaaagagagaaacagtaagatataaagagactctgtatagtaccctagggccgaaggagatgatgcaagggaggataagctgggaaggggttcagatcttattggagaaggtgtggttcagcctagcacatagcacggaagtttgttagcttagttagactagagctggtctagagttgttgggcaatcagtaaataaccctctggagtgcaggcaagggaggaggctgtccctccatggtagtggtggagtgtgggcagagggccttcaaagtgaatggcccatgcaggggatgggatggagagggacttgcagaaggagtgactrctcactttttgaccctcaggccattggcagctgggagtatggacaagtggcaggatcactggtttctatgttgaggagctatagaaagattgtcactaggccaaagctgtaaggtcataggactgtgtgctgggctattggataggcggactttcctggattttctcataccttcatggcatc

SEQ ID NO: 54031 - DNA, 534 bp, Homo sapiens
atatatatatatatatataaattgaaaagagagaaacagtaagatataaagagactctgtatagtaccctagggccgaaggagatgatgcaagggaggataagctgggaaggggttcagatcttattggagaaggtgtggttcagcctagcacatagcacggaagtttgttagcttagttagactagagctggtctagagttgttgggcaatcagtaaataaccctctggagtgcaggcaagggaggaggctgtccctccatggtagtggtggagtgtgggcagagggccttcaaagtgaatggcccatgcaggggatgggatggagagggacttgcagaaggagtgactactcactttttgaccctcaggccattggcagctgggagtatggacaagtggcaggatcactggtttctatgttgaggagctatagaaagattgtcactaggccaaagctgtaaggtcataggactgtgtgctgggctaktggataggcggactttcctggattttctcataccttcatggcatc

SEQ ID NO: 54032 - DNA, 556 bp, Homo sapiens
taagggaaaaaagttttttctccctactcgcactgaatgcagctcagaatatttatcagatttatgggggttttcacacacacacacaccaaaattctccagcagatgccaactgggtgtcctctaactcaattcaattctgatgctatctgaagcccacagataggggcttagtcccacaagactgcygccattttgagacaccaattacatgtcccagacagtgacctgtgcttctgactgactataaatcaggggtcccacaacccccctcctcggctgtgataatttgctaggatggctcacagaactcaggggaaatgctctacttatgttaaccaatgtattatgaaggacacaaatgatcactccaagaagatatgcaaagggcatgattgtggaaggaggtgtcacaaagcttccgtaccttgactgtgcacactgacctcccagcaactcgaagtgttcagcaactccttgttcaaaagtttctatggagcatcatctcctgaacccctccctcccccaccccctctgcctttccaatccactaatc

SEQ ID NO: 54033 - DNA, 553 bp, Homo sapiens
cagtagcatcctccaagctatgacaaccaaaaatgtctccagacattgccaaatgcccctggaggaggaggaggatgacacccagacttgtctttagagaagtagagtgagtgctggtggtgtcggccgtgttggctgaagctggacctaggagagcagaaggcttccagcagatgaaccagtgccacccaatttcagaaccccagatgggaaaggaatagtcaatgaaggagtttttatcactgcctttgtcactgaaagtgtgactcattgattccctaacattcattgactatcgattgtatcatttgatgtgcaaggaaagacatctcaaagagggtcacatgcttccagcactcaaaagcatgacccattgcttccctgcttgggcctgtctttcgtgggaaggcagccagcagcaggagaacagacccttgtttggagtttagaacarctatgggaataatcagaacaatgagcccacatggcagcagattcacacacagtttccaggtcctagaacctggtcaacctgttctttgactcataaaaa

SEQ ID NO: 54034 - DNA, 553 bp, Homo sapiens
cagtagcatcctccaagctatgacaaccaaaaatgtctccagacattgccaaatgcccctggaggaggaggaggatgacacccagacttgtctttagagaagtagagtgagtgctggtggtgtcggccgtgttggctgaagctggacctaggagagcagaaggcttccagcagatgaaccagtgccacccaatttcagaaccccagatgggaaaggaatagtcaatgaaggagtttttatcactgcctttgtcactgaaagtgtgactcattgattccctaacattcattgactatcgattgtatcatttgatgtgcaaggaaagacatctcaaagagggtcacatgcttccagcactcaaaagcatgacccattgcttccctgcttgggcctgtctttcgtgggaaggcagccagcagcaggagaacagacccttgtttggagtttagaacaactatgggaataatcagracaatgagcccacatggcagcagattcacacacagtttccaggtcctagaacctggtcaacctgttctttgactcataaaaa

SEQ ID NO: 54035 - DNA, 530 bp, Homo sapiens
tcgatttactatgttttaaatgtctatcagtgagacagaaataagagaaagtaggacttggtttatgaaagacaactatccatgccatcctagaaacaacttagcaggttttaatgtagatacattttcactttaaatgttataaccattcttctctaaaggtatgtttttccagattcatctttcatcttgatgtgagaaaaggactgttttgtcatattgtggttctgcatggggttctagatgtagcaaaacttcaaatattaagagaagtattctcaattgttctacaataattactgttataagcaacagtggctatggtattttcaggtttcagcttttacagtattsagattgtgtaacatagattaattatcaagtcatatcaaatcatcctaaaactctctttctgtactccccaagtccgctaaacaacatacctgggaatgggtctgctttattgtcttcaggtcttcagttaggtttccacattgcttttgtgactcaaccaaggaacaaatggtatt

SEQ ID NO: 54036 - DNA, 464 bp, Homo sapiens
  misc_feature (1)...(464): n = A,T,C or G
cnnnnnnnnnnnnnnnnnnnnnnnnnnnnnnnnnnnnnnnnnnnnnnnnnnnnnnnnnnnnnnnnnnnnnnnnnnnnnnnnnnnnnnnnnnnnnnnnnnnnaaatggaataaattgagtgtggtcacatcatatctacgggctattggcaaaatattgaaagctcctaaatagggacaagtcasaaaagctgagtttcatttcatgcactttcttgggcaaatatacatgggaatgcatgtttggggttagttcaacatattttttagttttgagaccttagctaaagattcccccagaactcctgaaaaataagcttgcactgactagtattctgagcctgcacaggtttgagacttatattcttatttgctttttttttttttccatgcttgttaaaactggcaacatcaactacttgggctcctctaagcagaccttagcccaggcagcctggcatgggcc

SEQ ID NO: 54037 - DNA, 559 bp, Homo sapiens
agtgcaatggcgtgattttggctcactgccacctccatctcctgggttcaagcaattctcctgcctcagcctcccgagtagctgggattacacgcatgcgccaccatgcctagctaatttttgtctttttagtagagatggggtttcaccatgttggccagtttggtctcgaactctttacctcaggtgatccacccgcctcggcctccctaagtgctggtattacaggcatgagccaccgcgcccggcctggactgttgtttcttgrggcaacctcctggtgggtgagagttccactttgggacttccaagcacgtggttagataaactcaccctgaagggagtatctggtgaaggggaggtaaaaggctataactgcctttccaaagagctaagtaggcactgggataaacgaggaaaaagaaaggaagagagagaaaaaatataaactatctcttagaaaaatgggattatttggttacaaaaagtcatgctttgccagggcctacttatgtcttgttggaagaaattgtgagggggacagtgatattgggagggt

SEQ ID NO: 54038 - DNA, 559 bp, Homo sapiens
agtgcaatggcgtgattttggctcactgccacctccatctcctgggttcaagcaattctcctgcctcagcctcccgagtagctgggattacacgcatgcgccaccatgcctagctaatttttgtctttttagtagagatggggtttcaccatgttggccagtttggtctcgaactctttacctcaggtgatccacccgcctcggcctccctaagtgctggtattacaggcatgagccaccgcgcccggcctggactgttgtttcttggggcaacctcctggtgggtgagagttccactttgggacttccaagcacgtggttagataaactcaccctgaagggagtatctggtgaaggggaggtaaaaggctataactgcctttccaaagagctaagtaggmactgggataaacgaggaaaaagaaaggaagagagagaaaaaatataaactatctcttagaaaaatgggattatttggttacaaaaagtcatgctttgccagggcctacttatgtcttgttggaagaaattgtgagggggacagtgatattgggagggt

SEQ ID NO: 54039 - DNA, 544 bp, Homo sapiens
gaagtttagatttttaggaattaacagcaacmaccaccacacacacacacacacacacacacacacacacacacacacaaaaagcagctgtgaaaatttcgatctgtaggacattttcagaactggtatgtgagtgtatagagtgttacaggctaaagccaagggccaccacgagaagcagagggtggaggcaactatttgaatttttctcttgtaacagatatgatcattaattgtcctttgaaaataaacctgtagcaatagccaagcccctggtatggacaggataaagtcaaggcaggaaaaacccatgctaaggtaaggcactgatgaaaacagatgcaggattacctgccagtgttgggaagtcactactccatcctttccgcaaaaccaccctggctggtatattataaataggtaacttgacttttatcagtgtggtcttgcactacaatttaaatataactcttaccatggaaattgccttttggagtggaagctaattggtatgatcagcagtgcttctttgaattccttagga

SEQ ID NO: 54040 - DNA, 586 bp, Homo sapiens
actgatgccaagttcaaatattccaggtattttaaaaccaaaactgaaaccagacttgcttgccattttctctgtgacattgcgttcaaaatctgagtatgattcatactcttttaatatgaattcgtatttgccttgggtctaaagaagaaaaaagaaagggttttttatttcatttgactcaaatcagttcaataccagtgagcagacagccactctactcctaccatgtgctggatactgaactagatgctctggatacagagaaatcagggccgatttgtgtccccacctcagggctcttggttcgktagcagagacagacctgatcaataccttgggtgaaaacttagaggttggtttttgatttgtatttcaactggcaaaaatgcaggggaacattctgggctgtgggctcagcttaagcaaaagcatggaggtgggaaaggggagggtgtgccccaggaactgcaaggatagcagtgcagttcattgagaagttgaaacagcgaggagaaaaaggggatgttgtgagaggatattctgacatcaaaataggcttttgaattacttctcctgaaatctg

SEQ ID NO: 54041 - DNA, 663 bp, Homo sapiens
tgtcataaatactgcttagacacacaccttacatgcagggtgttcagtccttggagcctaaatctaagcacacagacctggagctttccattttggggatattgtttcctcagtcagtaatcagggaggtcagaattcagagctttaggcttcgaatcttaggcaaaacccagcaagagttttgaaaggaccatagattactcttaactgacatggcatccctgagactaatctgcatttggatacaccaagctttgtgaagaccataaaagcctctrttgctttcacaattagtttgccactcttctttcagagctagaagccaagagcaaaatgggcattagattactcgaagatttagtgtattaggtactccagtgccaggcatacactgtaaatggattaaagaaacttcaggatacactccacccttatctttactagtttaatttgctcctctatagagagtacatttaatagataattgcctctattctcctcccccagtcccttggaaatagcatggtttcttcctgcagcagctaatgaattatctttattagtaataaagaattctgccttttcattcttataactcatctgaaatgcaatatatttgaacactaacattcaggctcaaattgatctttagtggaagcatat

SEQ ID NO: 54042 - DNA, 663 bp, Homo sapiens
tgtcataaatactgcttagacacacaccttacatgcagggtgttcagtccttggagcctaaatctaagcacacagacctggagctttccattttggggatattgtttcctcagtcagtaatcagggaggtcagaattcagagctttaggcttcgaatcttaggcaaaacccagcaagagttttgaaaggaccatagattactcttaactgacatggcatccctgagactaatctgcatttggatacaccaagctttgtgaagaccataaaagcctctgttgctttcacaattagtttgccactcttctttcagagctagaagccaagagcaaaatgggcattagattactcgaagatttagtgtattaggtactccagtgccaggcatacactgtaaatggattaaagaaacttcaggatacactccacccttatctttactagtttaatttgctcctctatagagagtacatttaatagataattgcctctattctcctcccccagtcccttggaaatagcatgstttcttcctgcagcagctaatgaattatctttattagtaataaagaattctgccttttcattcttataactcatctgaaatgcaatatatttgaacactaacattcaggctcaaattgatctttagtggaagcatat

SEQ ID NO: 54043 - DNA, 625 bp, Homo sapiens
gggaggcggagcttgcggtgagctgagatcaggccactgcactccagcctgggcgacagagcragactccgtctccaaaaacaacaacaacaacaacaacaaaaattgcacaagttatatgtgactatatgataagttctttaaaaactagaatgttatggttagaaacaaactcttactttgacccctatcataatccatattgactcaacctccaagcagaaccaatcgctattatcagggttcttttatatactttcacccccacacactcacacacatatagccacagaaaatactctctttctggggtttcatacacattggtacacgttatttgacagcttacttgtttactcaatgttatttttggaactatatatatagatacctataaatatagttcattcttataactactgaataatcatccatgtgatttcaattcatttgctcacttatttactcattcccctgttgaattatgtggttactttctaccttcctcctttcctctcttataaagaatgctgtaatactcatctttacatatttccatatccacacatatttaacctagagactgaaaagaatctctgagaaatagagcatgtatattttcaca

SEQ ID NO: 54044 - DNA, 560 bp, Homo sapiens
cttcttccaaggaagagccccctcatgcttctgttctgaaaatcagctttcctctgctggggtcgggtcttaagaaccagctatcttcagggattgagcagctgcctccaagattccacccacctccccaccaaaaacaaacaaacaaacaaacaaaaaaataccttacagttcactggttcactgccgagagctcagacctggggctgcccttggaaggaatgtgaggagcaggtgtggyttgcccagcaagttgcagcctgccttctgagcctcctgaggacacttgactgatttccttgtgtaggtcaccagggctttatccattcttactgtttcttttattgaagcatttttttaaagatcacccattcctccctctgcttacaaattttttgcttaccattttccaagtggaatcacagaatgttatgtcagagctggaaaaagcttagagagtcatttagttcaacattctgattctatagatgaagacactgaagctcatagaggagaatggatttacccaagtcagacagagaggggcagagccaccctag

SEQ ID NO: 54045 - DNA, 596 bp, Homo sapiens
tcacatttgcattataaaatgggtctagtaatatccactcactctagctcatagagctcctggctcctcatctgacctcagtgggactggggtgatctcgactaagcagccagtttgaccagtgttggctctagctggagtgcaaaggccccagtgattgtgagcagttaccctgaagcaggcacaagttggacagtctgtgtcctcagagatgcctagcgttggtcatttatttgttccctcaaatattttttgtcttatttgatgccagatatcatactagtttggggaacatatgaattgaacagatayggtttctctgctgctcttttttttcttacttggcatccccacaatgttttcaatgggggaaacacccacattgtgtgaaccttgatgggaggcctgatggtcctgttccctggcaggtgggatatgggcatgtgacatggctcagccaattgaactctcctgcctgggcagagacctagaggatatgaagccatagatcaggacaattgagaaattttctcagaacagtactggctttgtcaagagcacagctgttccatgggtgccagtgtccagtggcagca

SEQ ID NO: 54046 - DNA, 928 bp, Homo sapiens
ttttgtatttttagtagagatgggggtttctccatgttggtcaggctggtcttgaactcccgacctcaggtgatccacccgcctcaacctcccaaagtgctggattacagacgtgagccaccacgcccggccctattggctttcttaaagcagaacattttactagtttcctccaggtctttttgttttgtagtttaacaaatgttgattcttgatatttgctatcatttaaaacttcactttgtagcaaatgtaaaatcactggttttattttttaagaatagctgaaagaatcaaaatatatcatctggaatacatagctaaagtaactaccaattaaaaactcagctatgagaaaatatatcttaaacaaaatgaaaaaatacagactaatatttgttgatgggggggggtataaaggttctatactgtttttttctatttttgagaygtagtcttactcttgcccaggcttgagtgctcactgcaacctctccctcccagtttcaagtgattctcctgcttcagcctcctgagtagctgggactacaggagtgcaccaccatgcccggctgattttttttttttcagtagagatggggttttgccatgttgaccaggctggtctcgaactcctgacctcaagtgatctgcctgcctgagcctcctgccgtgctggaattacaggcatgagtcactgtactctgcctgtttctgttttttaaactttcaaaggcaaattataattttgtttttaagaataaaaaatacaatctgattagctgaagcagctttttttttcagtgtgatttttgttgttgttgtttgagacagtcttgctctgttgcccaggctggagtgcagtggtacgatctcagctcaccacaacctctgccgcccgggttcaagcgattctcctgccttggtc

SEQ ID NO: 54047 - DNA, 634 bp, Homo sapiens
gtaagaaactggcttagagaaattggcccaaagccagtcagctgattagtggcagagtaaatgcatcactagctatttagtggatcactaatttgatgttttcttctactttaatttttaatattttgtatttttcatagctgtctatagtttaatatactgccataaaactaacaggttgttgatgctttgtactgatgcctgctaccagtaatgtactttattggaactcttacccatgaagctctccagtcttcacaaagtgagtttttacaaaaaaagattatcacattggttaacaacttattcatgtacaaatgacagtacccagcacatctcagtgctctttaaatgtttgttraatatacataacaaattttgaaagatgcggctgggggtggtggctctcgcctgtaatcccagcactttgggaggctgaggtgggtggattacctgaggtcaggagttcaagaccagtctggccaacacagtgaaaccccatctctactaaaaatacaaaaattacctgggtgtggtggtatacacctgtaatcccagctactcgggaggctgaggtaggagaatcacttgaacctgggaggcagaggttgcagtgagcctagattgtgccact

SEQ ID NO: 54048 - DNA, 634 bp, Homo sapiens
gtaagaaactggcttagagaaattggcccaaagccagtcagctgattagtggcagagtaaatgcatcactagctatttagtggatcactaatttgatgttttcttctactttaatttttaatattttgtatttttcatagctgtctatagtttaatatactgccataaaactaacaggttgttgatgctttgtactgatgcctgctaccagtaatgtactttattggaactcttacccatgaagctctccagtcttcacaaagtgagtttttacaaaaaaagattatcacattggttaacaacttattcatgtacaaatgacagtacccagcacatctcagtgctctttaaatgtttgttamatatacataacaaattttgaaagatgcggctgggggtggtggctctcgcctgtaatcccagcactttgggaggctgaggtgggtggattacctgaggtcaggagttcaagaccagtctggccaacacagtgaaaccccatctctactaaaaatacaaaaattacctgggtgtggtggtatacacctgtaatcccagctactcgggaggctgaggtaggagaatcacttgaacctgggaggcagaggttgcagtgagcctagattgtgccact

SEQ ID NO: 54049 - DNA, 512 bp, Homo sapiens
aataaataattattawaagtgatttttaatgatatatttatttaatatggaatcaaatattgtataagattaaactacagtttaccctaagacactaagacaaacatcatgtgattacatatttatgttttatgtttgagtttagagattatctttggcttttattttcgtattagcctaaaatgtggccggttttccttttcaaaacaattccatctctatctttctaaaatttgtttcattcaaattaaatagtattatgtggagtaaggtacataaattaattgattatttgaacttaaatttatatgattaaattggatctgctaccctaaaaatacttttttttttgtttttgtttttaattttttttattatactttaagttctgggatacttgtgtagaacgtgcaggtttgttacataggtatacacatgctctggtggtttgccgtacccatcaacccatcatctacattagttacttctcctaatgctatcccttccctacc

SEQ ID NO: 54050 - DNA, 512 bp, Homo sapiens
aataaataattattataagtgatttttaatgatatatttatttaatatggaatcaaatattgtataagattaaactacagtttaccctaagacactaagacaaacatcatgtgattacatatttatgttttatgtttgagtttagagattatctttggcttttattttcgtattagcctaaaatgtggccggttttccttttcaaaacaattccatctctatctttctaaaatttgtttcattcaaattaaatagtattatgtggagtaaggtacataaattaattgattatttgaacttaaatttatatgattaaattggatctgctaccctaaaaatacttttttttttgtttttgtttttaattttttttattatactttaagttctgggatacttgtgtagaacgygcaggtttgttacataggtatacacatgctctggtggtttgccgtacccatcaacccatcatctacattagttacttctcctaatgctatcccttccctacc

SEQ ID NO: 54051 - DNA, 447 bp, Homo sapiens
gggaatggtttactagtaactcatttgtacttgagtatccattatattggaaactaggaccatttctttctcattaattgagagtcatgatttgtctataatgtcctttatgatgcagaatttatctgatactttgagttaaatcaggcttgctttttggctcataagtatttatgtatagacagaaattgtggctttatctatttttattaagtaaaattgtgactgattttatagcaattaagatgaatttttctttgcagacaaattttattgaaggaatattgacaatcaactttcattgaaagcartgggttttgtgatttcatggaataaatgctctgttctaagagttaactgacctatgtttttgttcagggttttggctaaatagctgcacatctgtagcacaaagcctttttcctcagtttcctattgtgtagaaaa

SEQ ID NO: 54052 - DNA, 1188 bp, Homo sapiens
gttgtgctatgaaggacaactctggaaaattgttaactgtcatctcagttgaagttttatttttttccctgtctttcagacatctcgagatctggcgtgttttatacagtttgaaaatgtcaacatttactatgggactcagcataaaatgaaatataaagcgcccactgactattgctttgttttaaaggtatgttataagaagtcattcatttagatttataagcaatttcagttaattttttttcaaggaagaaaatgttaaattatagttagccatatgtgtaacaataagaaattgtttaaccaaaataggaatgagggaaacatttctatcaatttgggacattttccccaaagcctcctatctgaacctaaaactttaaggtaactctgtctggggatttcttcacttctgaaaatgaaagttccacattttaaacaaattaatttataatgttatcgataagactaaaaaaagttttcagttcttattgggctcattccaccataagaagattttagaaattagaaacttgcaagatttcctagacaacttatagaaaatagccaaaaaaaagttgttttaattactgggtcatgaaacttcaggtgtatattgtcaaaaggcaataggtattatcaaatgttagatatggtttacatttttttgagaccgagtctcactctgtcacccagggtggagtgcagtggctcaatcatagcccactgcagcctcagccccccaggctcaagcaatcctcctgccttagcctctcaagtatctgggactagaggtgtgcaccaccacaccagctaatttttgtatttttagttaagatagggctttaccatattacccaggctggtctcaaactcctgggctcaggcaatccacctaccttsgcatcccaaagtgctggggttgcaggcatcagccaccactcctggccgatttacattttttaaaattagaatctcagatcagtctgatcaggagatgggttattacaaccacacatgtgatgcattacgggtctttctgtatgcctgcagaactctggattaaggactatggtaagtttttgtctgcgtttctttttagtcaaatgcaataaccaggtgaattcaatcatatttagtaattttgactccctgaacaattacaatcacttattataatcatca

SEQ ID NO: 54053 - DNA, 1188 bp, Homo sapiens
gttgtgctatgaaggacaactctggaaaattgttaactgtcatctcagttgaagttttatttttttccctgtctttcagacatctcgagatctggcgtgttttatacagtttgaaaatgtcaacatttactatgggactcagcataaaatgaaatataaagcgcccactgactattgctttgttttaaaggtatgttataagaagtcattcatttagatttataagcaatttcagttaattttttttcaaggaagaaaatgttaaattatagttagccatatgtgtaacaataagaaattgtttaaccaaaataggaatgagggaaacatttctatcaatttgggacattttccccaaagcctcctatctgaacctaaaactttaaggtaactctgtctggggatttcttcacttctgaaaatgaaagttccacattttaaacaaattaatttataatgttatcgataagactaaaaaaagttttcagttcttattgggctcattccaccataagaagattttagaaattagaaacttgcaagatttcctagacaacttatagaaaatagccaaaaaaaagttgttttaattactgggtcatgaaacttcaggtgtatattgtcaaaaggcaataggtattatcaaatgttagatatggtttacatttttttgagaccgagtctcactctgtcacccagggtggagtgcagtggctcaatcatagcccactgcagcctcagccccccaggctcaagcaatcctcctgccttagcctctcaagtatctgggactagaggtgtgcaccaccacaccagctaatttttgtatttttagttaagatagggctttaccatattacccaggctggtctcaaactcctgggctcaggcaatccacctaccttcgcatcccaaagtgctggggttgcaggcatcagccaccactcctggccgatttacattttttaaaattagaatctcagatcagtctgatcaggagatgggttattacaaccacacatgtgatgcrttacgggtctttctgtatgcctgcagaactctggattaaggactatggtaagtttttgtctgcgtttctttttagtcaaatgcaataaccaggtgaattcaatcatatttagtaattttgactccctgaacaattacaatcacttattataatcatca

SEQ ID NO: 54054 - DNA, 578 bp, Homo sapiens
taagaaacctctatggcatgggaggctttgaggttattttaaaaatactttgaaaaacaaaaacatatcctatatccattcttgggttcaaagaccttatacaatttgtttctagcctgcagactttttaaattttattgtagcactggtaattaaatttactttttaaaaaaatttcaatagtttttagaggagcaggtggtgtttggttacatgaataagttcttcagtgctgatttctgagattttggtgcgtccatcacccgagcagtgtacactctacccagtgtgtagtcttttatctctcaccccctccctccctctcctccgacaccctaaagtccaatgtatcattctctcttctgcctttgtgtcctcatagcttagctcccacttrtgagtgagaacatatgatgttcgccatttcattcctgagttacttcacttagaataaaagtctccaattccatccaggttcctgcaaatatcattattttgttcctttttatggctgagtagtattccacggcatatgtatatatatataccacagtttttttatccgttcatggattgat

SEQ ID NO: 54055 - DNA, 578 bp, Homo sapiens
taagaaacctctatggcatgggaggctttgaggttattttaaaaatactttgaaaaacaaaaacatatcctatatccattcttgggttcaaagaccttatacaatttgtttctagcctgcagactttttaaattttattgtagcactggtaattaaatttactttttaaaaaaatttcaatagtttttagaggagcaggtggtgtttggttacatgaataagttcttcagtgctgatttctgagattttggtgcgtccatcacccgagcagtgtacactctacccagtgtgtagtcttttatctctcaccccctccctccctctcctccgacaccctaaagtccaatgtatcattctctcttctgcctttgtgtcctcatagcttagctcccacttgtgagtgagaacatatgatgttcgccatttcattcctgagttacttcacttagaataaaagtctccaattccatccaggttsctgcaaatatcattattttgttcctttttatggctgagtagtattccacggcatatgtatatatatataccacagtttttttatccgttcatggattgat

SEQ ID NO: 54056 - DNA, 486 bp, Homo sapiens
cagggtctcttgaattgtaaacaaagagccctgacagattagacggggttctcaaggaacactcattgggaacctgtatacacgtgattgtgtgtggttcaggaaagccctggttggttttggtttctttgtcattccttgggagtgataaatattgacatattcacgccaataattcatagagtgcagcctcccttccctgcgtagcagcccctgttcgtctcctgaaatctctggaagcctgtgcaccaggtctgctgtgtttatcctgcgccctttaaccggcttaaagcacagccacaggctgaacaaatatttaagagctgcctacaccactcgttcagggtctcgctttgagagataacatttcaacaggacctccgatcccktgtgatcaataaaataacttcatagccagtgtgtggaatagaatatgggctctgaaggagaaaagacaatcttctcctcttcagttccatggtgtaa

SEQ ID NO: 54057 - DNA, 1234 bp, Homo sapiens
  misc_feature (1)...(1234): n = A,T,C or G
caaggttttcatttcctgtgttgcgacttggagttgaactgagagacaaataaggaaggcaagcacagtgcttgttgtaaaaatgcagcatcaaaacaccctaatgatacttataattgctagaagtaatttaaaactgtctttctgctttaggaaggaatgaaactctaaggaaatacaaatgagggaattgaagagaacatattttaggaagaaaatgtattcaaagagaatctttccattttaatttcctcatgtcagtagaaattctagatacatttaacaggaaaactcctcaagacttttttttctggaaatccctaaagtttttytggggggtctctccttatgtatcattttttattttactccttgctaagaattcttattagtcattctaaccattcaatttgtcctgcctgttttgtaatgaataaatagcatatactgttaattggccacctgaggttcaaagaggggaaaaatggagttgatgtctgcacactgttatgtgctgacaacatattgaccacactctatttcacaagatttaaaatcaagcttcctcaccctattcacacttccctacctttgctccattcttgactgtttgttggggctaatataattttctttaagnnnnnnnnnnnnnnnnnnnnnnnnnnnnnnnnnnnnnnnnnnnnnnnnnnnnnnnnnnnnnnnnnnnnnnnnnnnnnnnnnnnnnnnnnnnnnnnnnnnngggacacagacaggcaagttcacccaagtcattgaactaagtggcagagccaggacctccaacctatctcctctgactacagatgtttctgattatctatttaaactcagaatatttgtaatattcttcatggaatggggttggcagtttcataacctcaaaattgttatggtgcattgtgttctaggattttgttttaattgcgtttgaaaataagcagtgacaattgctggaggggagagaaggagtaaggagctcctaaaagcattgtacattgagaccacagaagtgtgactgctttagagaatatatggttcctagtttttatacttatttttgttttcctcttagtgttaggcaacattaaattaactctagttggaaaattacattcctgaagtatctcccaaatgagcctgagcaaagaataaccatttggctattcagagagaactgaaaatgtgatttctctaaacacaggctactcaggaggaa

SEQ ID NO: 54058 - DNA, 652 bp, Homo sapiens
ctttatttatttttatttttatttttttgagatgaagtctcactgtgttgcccaggctggagtgcagtggtatgatctcggctcactgcaacctctgcctcccaggttcaagcgattctcctacctcagcctcctgagtagctgggattacaggcacacgccaccaagcccagctaatttttgtatttttagtacagacagggtttcatcatgttgtccaggctggtcttgaactcctsacctcgggtgatgtgcccacctcagcctcccaaagtgctgggattacaggcgtgagtcaccgcacccagcctatcctttattctttaattttttgtgtgtctttatggtggttgtctcctactatgtatcccacttgtaccagcaagggatatgaatacaaaagattcatatgaagaatgttaacatgatttgtacatataatttaagcattattagtatgttacatcccatgcccacactcaagaaatttgcgcgattatagaagacaaatgtgggtatggtgggaaaagtaccaaaattagaatcaaaagagtgaagtttgaacattagcaacttgcttgatttatggccttacaggggaatatttaacttatcttggtcactgttatcctatagtaaagtaaggctcata

SEQ ID NO: 54059 - DNA, 662 bp, Homo sapiens
gcccaggctggagtgcagtggcgtgatctcagctcactgcaactgcccccttccgcgtttaagcgattctcctgcctcagcctcccaagtagctgggactataggcgcccgctgccacacctggctaatttttgtatttttttagtagagacgaggtttcgacatattggccaggctggtcttgaactcctgacctcaagtcatctgcccacctcggcctcccaaagtgctgggattacaagcatgagccactgcatccagcctagagtatttttaatgttcaagaaaactaaaccaatgggtcagtacagagaggtaaaarctaaactagctattggctttattcagacaaaaatgtttgactagctaatgtcagtgtccagcccatatccctccggcccacgctggaggtcaactgtatttaggtagacaatgacttttcaccttaagcatccctctgcctgagagctctcagggagttaatttcctggggagcaaacttcaaccagtaatgggcagacattgatggataaaaacccttgcttccttgtctcttggaacaatttcagatgtgctttacaatgtgtctcagagtgtccatagtgatagtgagccccaattactcatggcagtaacctgtacattgcattgtacaatgcaaa

SEQ ID NO: 54060 - DNA, 658 bp, Homo sapiens
ttgtgcagatcagcagtcctagtctggaatttaaacactgtcaacggggcatattgggaaagatatttatatatatatatacatacacacacacacacacacacacacacacacacaaacacattaagcaaaataagatttgtccatgttataatccagtctcacagtcaagtcacccaccccagccttttgaagtcatttggcagctaatgctaaaaagtaacaggaactatgagagttgcatagaattgatcagaaacatgaataatgccaaacccaaaacctgcacsatacagtttaacagaaccaggtggcttcagatgcaactatgaaaccctcctatttaaaacaaagtgcttctccatgtctacctgggggaccttctgctggcattgaagcagaaaagaattatttgaatttctgatcccttgccccacccccactatatatatatatatatatatatatatatatatatatatatatatatatgtatattaaaaaaaaaaggtttagaaaaaaaatcaacagactgaaggatcccctaactctgatcatgtaaactcagcctttaggctgggtgaggtgttgacgtacacggggaagaggcctgggaggtcacactgaggagtgatttctagagtgtccagagcgtcgg

SEQ ID NO: 54061 - DNA, 976 bp, Homo sapiens
tgcatataataagtagctcgatttagccatttcatatatatatatatatatatatatatatatatatatatatgtatttcaaaacctcatgatgtgcatgataaatatatataattttgacttgccaatttaaaaattaattaattaatttttgttttttgagacaagctcctgctctgtcgcccagactggagtacagtggcacgatctcagctcactgcaacctccgcctcccgggttcaagagattctcgtgcctcagccttccgagtagctgggattacgggcgcatgccaccacacccagctaatttttgtatttttagtagagacagggtttcaccatgttggccaggctggtcacgaactcctgacctgaagtgatctgcctgcctcggcctctcaaagtgctgggattacaggcatgagccaccacacccgaccaaaaatcaatttttagaagtaaaaacccttatcctaaacatcacagaaattagattaaaaataaaataggccaggcgcagtggctcacgccttttccttccacatctttccattttgttgtacttyttatgataattattttatgataaccatttgtagcatgagaaaagttattttaaattcaacaaaaatattgactcactcatatgtctataagtaaacactatatagttctcatgaaggaaatgttggaactaaaaagggtcaaagaaaagtaacgggaaaggtcagaaaaatgggtaataagttagtactatcatatatgggagttatttttaaatttctgaaacacacagacagggaatgccacaactgatgcaggcccagctggagctaaatggatagagctcctgactgggacagggcagaggcccaggccagctccatcatctctgatctccctctcagccaaaacctttcagagtcatcttcccttcctacctccattcctgcctccccatttactctttaact

SEQ ID NO: 54062 - DNA, 557 bp, Homo sapiens
ttttttgagacggagtctcgctctgtcgcccaggctggagtgcagtggtgtgatctcggctcactgcaagcaccgcctcccgggctcatgccattctcctgcctcagccccctgagtagctgggactacaggcgcccrccaccacgcccggctaattttttgtatttttagtagagacggggttttaccgtgttagccaggatggtctcgatctcctgaccttgtgatcctcccgtctcagcctcccaaagtgctgggattacaggtgtgagccaccgcgcctgaaccctttctgtgtttcctaaacgtgatagtgcacatgactcctgcggctgacagcgccaacagaacgtcacgcgtatatgcggcgtccatgcgtctgccacatcggggccagtgcagggtgcccacatggcatggcatgcctctccagtcttcgtggttgatgctcattttatctgaattgcagaggcagtaggatatgagagttcacgtggtggagaatggaccttgcaccagggcagcccaaggcagggaggacaaagctggccgggagg

SEQ ID NO: 54063 - DNA, 557 bp, Homo sapiens
ttttttgagacggagtctcgctctgtcgcccaggctggagtgcagtggtgtgatctcggctcactgcaagcaccgcctcccgggctcatgccattctcctgcctcagccccctgagtagctgggactacaggcgcccgccaccacgcccggctaattttttgtatttttagtagagacggggttttaccgtgttagccaggatggtctcgatctcctgaccttgtgatcctcccgtctcagcctcccaaagtgctgggattacaggtgtgagccaccgcgcctgamccctttctgtgtttcctaaacgtgatagtgcacatgactcctgcggctgacagcgccaacagaacgtcacgcgtatatgcggcgtccatgcgtctgccacatcggggccagtgcagggtgcccacatggcatggcatgcctctccagtcttcgtggttgatgctcattttatctgaattgcagaggcagtaggatatgagagttcacgtggtggagaatggaccttgcaccagggcagcccaaggcagggaggacaaagctggccgggagg

SEQ ID NO: 54064 - DNA, 590 bp, Homo sapiens
tttcattctttgtgacccatgtcgtccactcttttctcagtttgactagggaggcagagctacagagatttcrtgaatggacatcactgaggtagcgtaccaagtcaggagtcaagatatctgtattctaattttacttctgggaaagctgtactcctagccaagtcttcaaaatatttggggctctgttttctctgagaattatgaagatgatcccagatttcataactgtattgtttcctttgggtttcttgaagaggaaaaagtcatgttctgcctcccacctcttccttttgttatcagctaggaacgtgagtaagtgtagccaaatctagtacataaaggataattgtttgggacaaagcattccaagcaacttttttcagtttaatcagagtcactccccgacaagggaaagactcatttccaagttccttgtatctcaccacaccctgtagcccctattgtcctagctgcgcatctctaactctctgagcagctaaattccagtaagttcaaagtctctagtatatattcatttttttgtttgttttttaaatagtagaaatggggtttccctatgttggcca

SEQ ID NO: 54065 - DNA, 571 bp, Homo sapiens
acctgatgtggcagccatgacatcccttagaaagaatctgccattcaactgccagaaagcaattcactgtcagcccacagctgcatcacctttgggatccactaccatgtcagagctaaggccacactcttcctgaacagccccaagccaatgactgacagtgtggttactgggacctggccgtttctgcccactgttgatttctctatgtgataacctttgccctggtgctttccactgggtagactgccacttggaaggatctgcaccacagcttgaggtttttcttgccygattttgcttctgccttcctttactttatcaggatagggaagcctatccaaagtctttctctgcccattcctgcctccttctttatctttcacaggtgttgccagccagtaagcctcttgcactcctaactttgtctcagtatctgctccccagaccacctgaactgactcaggtgaccactccagaagtggtctgaaaaagcgagcagtaagataggtttagggaactgcagtactcactgcctggctggcaacaagaacccctcctggatgttgtg

SEQ ID NO: 54066 - DNA, 580 bp, Homo sapiens
cctgtcctcataactacctcatgaaaagtcatgagggcagccccttatcccaacagtgcctgaagctgagtgagcaactgctgggcgccaggcatactcaggccacatcatctttcaccaggatgtctccagcagccctgtgaatgggtgctgatcttatctctctcagatgcattctccactccagctggagcgattctcctaaatcccagatctgatcccgtaactttcgctaaaaacctgttcagggcttccctggctttggggacaaaaagtccatattccttctgatggctataaggaccccctggtcatccagtcttatcttttgccacccagccccaccagaaatcgtgtcaccccctaccctccagctacagaaccctcttccagggctccgtatgttccaggtggtcacgcatccgmggatcacccagtagcccaggctggagaaagagctcagctcacatcactgctctgcttaaagactgcgggtggcttctcactgctcctgccacatcctctttgtcttcatcacatattattcacatttcctgcttcctctccctggaaggccagg

SEQ ID NO: 54067 - DNA, 580 bp, Homo sapiens
cctgtcctcataactacctcatgaaaagtcatgagggcagccccttatcccaacagtgcctgaagctgagtgagcaactgctgggcgccaggcatactcaggccacatcatctttcaccaggatgtctccagcagccctgtgaatgggtgctgatcttatctctctcagatgcattctccactccagctggagcgattctcctaaatcccagatctgatcccgtaactttcgctaaaaacctgttcagggcttccctggctttggggacaaaaagtccatattccttctgatggctataaggaccccctggtcatccagtcttatcttttgccacccagccccaccagaaatcgtgtcaccccctaccctccagctacagaaccctcttccagggctccgtatgttccaggtggtcacgcatccgcggatcacccagtagcccaggctggagaaagagctcagctcacatcactgctctrcttaaagactgcgggtggcttctcactgctcctgccacatcctctttgtcttcatcacatattattcacatttcctgcttcctctccctggaaggccagg

SEQ ID NO: 54068 - DNA, 534 bp, Homo sapiens
tgcttgaagctcttaacccaaatgttaactggagcagaacaaatatgtcaaaacagcagtggttaattagcaagcagtgatgagcacagactgttacaataggtacagttagtagatggtgatgatgaggctgggattgagggggaaagattcattgcggatttctgaagtgaaacatattatatgataaaagaatcttaatagtggcttgacacaaaaatatacctcttcaaccaatctcaagatttacaaatgtgcatggtggaataagtgagggctcctaatcagagttcttgcgtggggaagaacagagaagggatagagtttgaatgctgccttttggtggaaacagaaatgtgtaataaggcatcttagtgagtggtctgataattatttatttttatattattataaagaaattgactgtaaagaaactttttttttttaagacagattcttgctctgtcccaggctgsagtgcagtggcacgatctctgctcactgcagcctccgtctcctgggttcaagtgattc

SEQ ID NO: 54069 - DNA, 528 bp, Homo sapiens
acagagggagatgagaactggttcattacagagtgactctttctaatatctccttggttctttatgatactaatacattcttcccactccagttgcctttttctctatttagctccaatacaattcatagaaatgagatcattcggcttaagggtacattatcttcacttcaacccatccttctttaagatgaacaatgctgcctttagattctgatactggctctgccacttattagctggatagccccagacaatttactgactctgagtttgtttccatacttatggaatagggaaaatatattctgcatatctcatggagtggcaacaaaagccaaaattgacaaatgggatctaattaaactaaagagcttctgcacagcaaaagaaactaccatcagagtgaacaggcaacctacagaatgggagaaaatcttcacaacctaytcatctgacaaagggctaatatccagaatctacaatgaatgcaaacaaatttacaagacaaaaacaaacaaccccatca

SEQ ID NO: 54070 - DNA, 604 bp, Homo sapiens
tggggaagggagtggggggaagattaactagaaacagacaagcttggtgactggattgattggaagccaccagctccatccagcctccctgagcctggcttctgccttagcccttgcctgcctgtgacctagcatagcctcccagtsccccgatgcctcaccctggcctccctcctccgcctcactgaatgggcccctctcttcaaaggtggattctatttgagcatccttgcccgtttgacctgagaggtgagagctgttcctgctcttgttttttgggaggcagctgaagctcagagagaggcggggatgggctcgggctgcacagcaagggcccctagaggtgccctgccccgatcatctcccatattttcgagccgtagctatcttcctgcctgaccggggttatcgggccgtacacctttgcccctgcagctcccactgcctggtgtgccctccctctcagtgcccctccagtggctgagatgcttctggcttcagaaggcctttgtgaacaccctgccggtcccactgagtccatgagtccgtactgaccccacatccaccattgaacttcaccttgtcccttctttgcccttcctca

SEQ ID NO: 54071 - DNA, 604 bp, Homo sapiens
tggggaagggagtggggggaagattaactagaaacagacaagcttggtgactggattgattggaagccaccagctccatccagcctccctgagcctggcttctgccttagcccttgcctgcctgtgacctagcatagcctcccagtgccccgatgcctcaccctggcctccctcctccgcctcactgaatgggcccctctcttcaaaggtggattctatttgagcatccttgcccgtttgacctgagaggtgagagctgttcctgctcttgttttttgggaggcagctgaagctcagagagaggcggggatgggctcgggctgcacagcaagggcccctagaggtgccctgccccgatcatctcccatattttcgagccgtagctatcttcctgcctgaccggggttatcgggccgtacacctttgcccctgcagctcccactgcctggtgtgccctccctctcagtgcccctccagtggctgagatgcttctggcttcagaaggcctttgtgaacaccctgcyggtcccactgagtccatgagtccgtactgaccccacatccaccattgaacttcaccttgtcccttctttgcccttcctca

SEQ ID NO: 54072 - DNA, 641 bp, Homo sapiens
aagtacctgcagacagtaacacttaggtcagatgtgacccttcatactaacttatttttttttttttttgagacggactcttgctgtgtcacccaggctggagatgtgacccttcatactaacttwttttttttttttttgagacagactcttgctgtgtcacccaggctggagtgcagtggcgtgatctcggctcactgcaacctccacctcccaggttcaagcgattctcctgcctcatcctcccgagtagctgggactacaggcacatgccaccatgcccggctagtttttatatttttagtagagacgggttattgccctgttggccaggctatccatacagacgtttaatattgtttatgtgtaaagatgtcaggggatcttaggtgctgaactttgacccagaatattaaatattgcatattattctagtggcttttatctcttacgaaacatactgtggtaaaatgactagtgatttgcaatagacagacaactctttgtaaatctaaattttaattggattataaggcctgtttacattgcatctgtgggcagatttctttgagatggatggtatgtgttggtgctggcatattttatcgtttcaatagatgttaattctaggaatatacagt

SEQ ID NO: 54073 - DNA, 649 bp, Homo sapiens
tttgatgcagaaaccctctccacagcatccaacagttgcttctccatccccaactggaaccctttgttgatgatggggtgtaaatttagaaaaaggccaattccactgtccgctagggctttttttttttgagacagagtctcactctgtcaccaaggctggagtgcagtggcgcgatcttggctcactgaaacctctgcctcccgggttcaagtgattctcctgcctcagcctcccgagtagctgggactacaggcacgtgccatcatgcctggttaattttttgaatttttagtagagatggggtttcaccgtgttagccaggatggtctccatctcctgacctcgtgatccacccgctttggcctcccaaagtgctgggattacaggtgtgagccactgcaccyggcctagtgctcatttttgacaagttattgagcccaaattaatgtctccccagcttgcacatagtcctcctagttctggtctccagagtaacaaataccacccactgccctcattctaaggggagcttccctcctaccccttccctatggtcaaagtcactcactgtaaactccgttatttcttttccttctagaccaaaatgacgtatatctttcctcatcttctctcctgttttcctcaa

SEQ ID NO: 54074 - DNA, 542 bp, Homo sapiens
taaatcctgcattcatgcaatttgcatgttcatttcctcttttacaaaatgctcctggaattcttatggtttcattgttagtgaaaattgtttctttttttccccttcacaatcctatattacaaattctccaaacctggcacttcacggcatattccttttgaatgtctttaattctgcaattttatacacccccttatcttacaaatttaattagtttccagaagttctgcagagaaaatgggccataataattcttgattattgccacttatcttcttataatttgatacaagaggattttattgcatttttaaagtagttttaatctgaaaaagatagtcctctccaagtytaacttcatgcagtagtaataatttaactactatttcctggttctagaagtatttttctatctaaaaagaaattgcttttctcaaattattgtactaccattgtattagtctgttttcacactgctgtaaagacatactcaaaattgggtaatttataaagaggtttagttgactcagagttctgca

SEQ ID NO: 54075 - DNA, 645 bp, Homo sapiens
tgcatttctacttacctattctacatcctaccgtctagatgttcagaaactactgaagagctagtgtggcagggcccctatgcccccttttatactctcctcagtaccctaggacataatgcccaattgatgagttcattttctgctcggccaatccctgttgagctgattgctcattgaggtcataactggtctctgggagcaaccacatagtaattrctcaggattgattgttgaaattaaataaaaaattaaatgtctaagccatcccagtatcacactataataaaacagaaaaaattaaattgagtacctagataatgtcttgggacattcctctctctctcaggaaccactaaaataataacaacaacaataataataataataaactgtatcgctgagtgtacatcttatctcttattcacataataactttaccattttcattttctaatcccttttctagcatcccttcaattacctttggctaagtgcctatcatagaatttaaaggcgcatcctacttattttcttaatatctcatattttatgttacagccatcagatacctcattatttaaacagttaattcatatgtacagttttaaaaatccatttcgttaatggaatatctctttattt

SEQ ID NO: 54076 - DNA, 618 bp, Homo sapiens
agcaaagctctggagctgttggcagccatgctgtctgccatggggaaaagcgggattgcagtcggggaggaagaaggctggcactagcaggagatgcgtgatggaaaagacagtgatggagctggagttcctgttctaattcttaccgaggaccagctgtacccccgactttcctgtcgcttagctgttccatccttcctttgactctgctcactaacaaattactgttttcgtttaaccttttttcatttagatcctgtggtagcgatggtgatgaggctgctactggtgattgtttgaaagtaagttcctcacatttctaaatgacagagctactatgaattgaggtctttaggagtcaaaaggattttaacaggttgtaattatgggtgaaaccaaccagattaattttaacaaagataaatgagaacaccagcatttttattcaaataatcaatgacgtatagctgatgggaaggacctggyttaaaaagagtctctgttaaaaatcaccggggaatttaacttcaacatcatccaccagtataaagaggctgttaaaaacctaatgccatccttggctggattgatgggagtgcagtgtctggaaaaagggag

SEQ ID NO: 54077 - DNA, 506 bp, Homo sapiens
tcctcaaatctacaacaagcacattccttcctgatacaccaacgtgtattaacaattcagagggacttttctacttgctgtggtatactctaccgcacttatatttgctttggtggaaatgaaaacagtactgagttttacatacattatattcattttacatgcattatattcatatatacatttgaaaacaagttatgaagttcctttttacacttcctttctctaggaaatatacataaaatatgtaagtgtataatcttttggtctttattttttgaaaatcccattttgtaacccttaattcagtttttgtctttctctagacattgaaaggttttyggaggcagtcagacgtctatttaaatctgaaacattttggagccattcagactcctacttaactcttggctctgctatttaccaactacagtattttgaaaaacaattatttaactccatctggtttttgtcatctgaaaaacagtgataatgatacctggaaa

SEQ ID NO: 54078 - DNA, 2217 bp, Homo sapiens
tcctccagacaacccgggacacccaaaagctccagccctggaggatgtgcgcctgggggcctaaagcacggcctacagagagagacaggagctcagcggcgggcccgcacccagcacaggagacacagtgatggagatgagcaggggagccttggcaatgaaaccctccttcctctgaccctcctgcctcgcaacaggctgaccacctctaaccttggcctgcgctgggccttctggggctggggggtgtcctctggtgtcacagccacagaggagctctgccctctgtctgctggggaagcccttgactcccagggctggtgagcagctgccagaggctgggagggagcaccaggtgggggtctcaccacgtgaaggagggcaggggcagggagccctacatacctggagtgactctgtgtccagggacttcctctttaactccagctgtgtcagctgcaataactcagtttctattaacttaatctaaacagaagacgagacagggtttttttttactcacattaaccacagttcagttttgtgctgctactctctggtgaccaagtgggtctaagaagcctttctggggaggctggggaggctctggaatgaggggaacctgcgggcctgggaacctcgtcaaggggcttgaacaagaattcgttccttcatggcctcgcgttcctggggtcatggacgtgcttgttgtggccaaaattgtttaccaagaggccagcacaggatctctcctagagtgggatcaggataaaggcttgtgcaatggagagggggctttccttggggattcaggccagagtaaagcacagacagagctatcacccagtctcctgctggtcaagttctcttgtccctcgcatcgctgttgcaggggagagcagagggtagtggaagtgactgagtaacagtggtagtagtagctggtatgtcttgagcacctactatgtgctaggcctgtgctgcacacttgatgtatcatatttcatcaattctctggctgctaggaggtattattgcctccattttatagacaagaaaactgaggctcagagaggttctcacttgctcaaggacacagagcaggtaagggagagatccctttctctgggatgcctcagctcagggtttaagggcaatagctgacctggtcaaaaccatctgcagtgagaatgtggggggccctcacaggctctccagggtgtgtctaggggattttagccctgggcaggggtgggggtcagaccccatagccagtacttctctatcctgtgcccatgaccctgtgaccctcatccctaagtccctatgacaccaccaacccctggtcagaggaatgagcttcatgtccggcaatgtggaattgaaattaaagagggaaattaaaaaggtaaattggtccaaaaaaagaaagaaagaaagaaagaaagaaaaatagagaaagaaaaaaaccatgcaaaaatgcaaaattcagtgtgctgaacatgatgcaggagtactcccatagcctgacgctcacttcagccccagccccagccccactccacaggcggtgaccaccaagccgtgtaggtgggcttgcccaaggatagcttgaaggtcagcagccggcctgcggggggtggggggtatcttgtcacatgagggagggtctawgaggaggaccgcctcctcctgggccgaggtcacttttcagcaggcgtcaggaccacggtggctcacagctccccctgccctcttctgggggaaatactatatgcccctgagacgcctctgtctgtctgagctgtaggagcgctggggcctgcgccggctgcttttcccagtggggaagtcctgcctggagcagggacagcagaggcagctggagcagtcaaagccacacatcagcaccagcctccctggcccaggcgtggtggagacccgcctcgctggcaagaccctcgccagaccccggaataggaggtctctagacaccctcccagcagccccgacacaaggctgggagcaaagggaggttctgagggcaaggcctcgacctcttgttgggctagcaagccaaggagctggggttcaaacctcaactgctgcgacctgccgccctggagggccactctgcaagtctctgagagagcaggtccagggaccccagccccagcgctcacctggctcctgatctgccgatgcatcaggtctttc

SEQ ID NO: 54079 - DNA, 2217 bp, Homo sapiens
tcctccagacaacccgggacacccaaaagctccagccctggaggatgtgcgcctgggggcctaaagcacggcctacagagagagacaggagctcagcggcgggcccgcacccagcacaggagacacagtgatggagatgagcaggggagccttggcaatgaaaccctccttcctctgaccctcctgcctcgcaacaggctgaccacctctaaccttggcctgcgctgggccttctggggctggggggtgtcctctggtgtcacagccacagaggagctctgccctctgtctgctggggaagcccttgactcccagggctggtgagcagctgccagaggctgggagggagcaccaggtgggggtctcaccacgtgaaggagggcaggggcagggagccctacatacctggagtgactctgtgtccagggacttcctctttaactccagctgtgtcagctgcaataactcagtttctattaacttaatctaaacagaagacgagacagggtttttttttactcacattaaccacagttcagttttgtgctgctactctctggtgaccaagtgggtctaagaagcctttctggggaggctggggaggctctggaatgaggggaacctgcgggcctgggaacctcgtcaaggggcttgaacaagaattcgttccttcatggcctcgcgttcctggggtcatggacgtgcttgttgtggccaaaattgtttaccaagaggccagcacaggatctctcctagagtgggatcaggataaaggcttgtgcaatggagagggggctttccttggggattcaggccagagtaaagcacagacagagctatcacccagtctcctgctggtcaagttctcttgtccctcgcatcgctgttgcaggggagagcagagggtagtggaagtgactgagtaacagtggtagtagtagctggtatgtcttgagcacctactatgtgctaggcctgtgctgcacacttgatgtatcatatttcatcaattctctggctgctaggaggtattattgcctccattttatagacaagaaaactgaggctcagagaggttctcacttgctcaaggacacagagcaggtaagggagagatccctttctctgggatgcctcagctcagggtttaagggcaatagctgacctggtcaaaaccatctgcagtgagaatgtggggggccctcacaggctctccagggtgtgtctaggggattttagccctgggcaggggtgggggtcagaccccatagccagtacttctctatcctgtgcccatgaccctgtgaccctcatccctaagtccctatgacaccaccaacccctggtcagaggaatgagcttcatgtccggcaatgtggaattgaaattaaagagggaaattaaaaaggtaaattggtccaaaaaaagaaagaaagaaagaaagaaagaaaaatagagaaagaaaaaaaccatgcaaaaatgcaaaattcagtgtgctgaacatgatgcaggagtactcccatagcctgacgctcacttcagccccagccccagccccactccacaggcggtgaccaccaagccgtgtaggtgggcttgcccaaggatagcttgaaggtcagcagccggcctgcggggggtggggggtatcttgtcacatgagggagggtctaagaggaggaccgcctcctcctgggccgaggtcacttttcagcaggcgtcaggaccacsgtggctcacagctccccctgccctcttctgggggaaatactatatgcccctgagacgcctctgtctgtctgagctgtaggagcgctggggcctgcgccggctgcttttcccagtggggaagtcctgcctggagcagggacagcagaggcagctggagcagtcaaagccacacatcagcaccagcctccctggcccaggcgtggtggagacccgcctcgctggcaagaccctcgccagaccccggaataggaggtctctagacaccctcccagcagccccgacacaaggctgggagcaaagggaggttctgagggcaaggcctcgacctcttgttgggctagcaagccaaggagctggggttcaaacctcaactgctgcgacctgccgccctggagggccactctgcaagtctctgagagagcaggtccagggaccccagccccagcgctcacctggctcctgatctgccgatgcatcaggtctttc

SEQ ID NO: 54080 - DNA, 1427 bp, Homo sapiens
  misc_feature (1)...(1427): n = A,T,C or G
aaaggatttccctttcctcaatcccttcaacctcttatgaactgttgtatcatgtttctttccatcttgctacctacaaatcactcctcaggaaggaagcgacaagtgacaaagcagaaagagctgttggaaaagaacttacatctttcaagggcaccagtttcatagctgtttgataggaaggcgtgagagtggctgggtagttgtagtcgacaatatcatgtttataatcagctttgtaggcaacctaaaacaggaagaaaagaagaagaatggagaaatcaatttctactttcttttggctttgtttgaatgccataagaaatattttttaaatacccagaaacgaattcagtttcatcaccttcaaggaaaattaaattatgttcacacttttgtctttaatgaatctgaattcctcttaattagtccaaaattagttaacttccatctgtagcacatttactttatatttcatattaattatgaagctgcttgtcatttttgttgaaaagaagcattttcacatggataggcaatggaagagctccttggctaaccccaagaaaatagatggaaaggtgaagagtcttcagagtatttaattttttttctaaagatcaaattgacattcttaagcagagaaaatccgacatttgtatgttttaataatgaaatcagtttcctttaagtgtcctttacctccaggatttacaatctggtatttgtaaatctataaactggattgacgaagctaaagagagattaatagagtatatgctacaggggaaaacaaggacttgatctactctgttatcccactaccctgaccagtgccaggccacagtaggttttcaatgaatacaatgatcaaaaaaatgaatgaaggaacaaaccagcttaccaaccaaccaaytctcaataaatcacaaaagctttggaaccctggggaatttggaataagaatcataattattcatttctctttttctctcagaaattgaaagtgttaaccacactggattcattataatagactgaagtactcttcaaattagagaaagctaatataaacaaattgaagcctttgaaaattttcagggatcttacctagccttggttgtatccgctaacatttagaaactcttttgggtcagtctttacacagtctttaaaatagaagacagatttttttttaaggggaatttaaaaagaattggctgaattcttcatgccctgccccactccatcccaacagaccctggcataaaaggactcacgttgcttgccaggctgccaactntcatagcatgcagagtgcgtctgnnnnnnnnnnnnnnnnnnnnnnnnnnnnnnnnnnnnnnnnnnnnnnnnnnnnnnnnnnnnnnnnnnnnnnnnnnnnnnnnnnnnnnnnnnnnnnnnnnnna

SEQ ID NO: 54081 - DNA, 559 bp, Homo sapiens
gaagccaaggggggtttggggaggcattgttttaatcagataggattggtggccttacaaaaagaggaaatgagagatctctctccacatgcactcactgaggaaaacccgtgtaagccctcaggaagaaagttctgtctgcaagccaggaagagggccttcaccagaaactgaccatgctggcaccctaatctcagacttctagcttccagaactaagagaaaataaatttttgttatttaagtcaccctgtctgtggtatttgtttcagaagcctgagctgactaaaacaacataaaactcrcattcatgaaaattgtggactccattcctagctgttgatttttcacctacatagatcagtagtgggtcatcattaccctgggcggctgcatcttcaaatccaaaacatttgaaaagagaggcagcatgagttttcattatgaaaatagatagtattcaggcagcagcaacgcggaggaaacgggaatgaaccgagagcgtagtgaccatcatgagcctccttaacaagtccaagagtgagatgaccccaaaggag

SEQ ID NO: 54082 - DNA, 548 bp, Homo sapiens
tgaaaataaaccagatgtccatcagtgataagtgggtgaacagttacatacatataatgaaatattagtcataaaaaaaactcaaatatatatactataacttggatgaatcttgagaccattatgttaaacgaaagaagccacacaaaaaaggtcacaaattgtatgattcctttttatgatacattcaggacaggcacatccatatagagaaaaagcagattaaaagttatgaggggacctgcttagggggaggttagggaatgattacctaatggagtatagggtgtttctggagtgtgatgaaaaaattttgaaactaraaagagctgttagttttggttgcacattatgaatacactaaataacacagaaaagtacatttgacaatgattatttgactgtgaagtgattttcacctcaattaaaagaatgtatttgaagaaaaatatgtacaatttaaagacttagaaaatgagtacttaaataacacaccaccatgatgatgggaaataaaactcttccaccaccctcagaaatctctcaag

SEQ ID NO: 54083 - DNA, 1670 bp, Homo sapiens
  misc_feature (1)...(1670): n = A,T,C or G
catgacacgtaaccaccattatagtatcacacagaatagtttcatggccctaaaaatcctccgtgtcttacctatttatcacctcctttcctgttaaaccctggcaaccaccgatctttttaccatccccgtagttttgccttttccggaaagccatgtagttggaataatactgtaagttgtctttcatattggcttttttcacttaataataagcatttaaagttcctccatttcttttcatggcttgacagctcatttctttttagagctgagtgatattccattgtctggatgtgccaaaatttatttatccactcacctactcgaggacatcttggttgcttccaagttttggcaatgatgaataaagctactgctgtaaacatccatgtgcaggtttttatgtgaacataagctttcaactcctttgggtaaatatcaaggagtacttttgctggattgtatggcaatggtgtgtttagttttgtaagccactgccaaacttcagccgattcctggtttccctattctcggcaggctggcctcacaaagttcgtctcctgcagagctccaaggaagctggttttggctgaatctgaagatgatcaacactggtaggatgctgctgtgtcatagactggaaccccagctcctgatcatgctggagtggggctgctgctccctgcaaccccacctgcctcccccttgagctggaagagaagggctgacggccagagttctgccataccccactacgatcagatcaagctctgatcccaccaggccaggggctgtgcttccttgatcatataagcccaaggtccggggtcgctctcctggagtctgacatcagcccggctaggtcccagtgcgctgctctggaagggtcagaacgcttgttcctgagcttatctctgtggattttccctgatgaactctgatctagcaggcagtgtatgggctgctaagtacttttcccttgtttgctcaaggagtttgcggccccaagatcatttccaaagccttttgcttcagcttgctaaagggaagctgctgtcactctcttcagcttgctaaagggaggcggagttctgaggaaggcaggcaccttaagggatgttgaaagttgcctctgtttgctgtgcctaccacctacttctagtcctcctctcgccgcccagatcatcccctacaatgcattacccatgcctgccccccaccacccagaagctatgggggctctggtccaagccccacacttgtccgaaagaggtgcctgggccccacagaagccttgtcagatgatggcagctctcttctgatagttcaatggatctgccacctacacagagaggtctccaagtagctaactctctttgagtacncagctaaccatagtagtcaaatgaagggtttgaaccagaatattttcaagaatttgtgctcttctaagagtccatggtttttttaaaagttaatttaagttttaaaatttattttttattttayttaaacatttttatttattttttaaaatctttaattttaggtttncagggtacatnnnnnnnnnnnnnnnnnnnnnnnnnnnnnnnnnnnnnnnnnnnnnnnnnnnnnnnnnnnnnnnnnnnnnnnnnnnnnnnnnnnnnnnnnnnnnnnnnnnnctg

SEQ ID NO: 54084 - DNA, 525 bp, Homo sapiens
ttcttgatgctgaccttgtgatactgagttccaatgagatctcattgtataacagtgtggaaccttctcctttctctgtcttgctcctacttctgccatataaaatagcccattgctgcttggtcttctggtatgattgggaggcttcatgattcctcctaggagcaggagcctctatgattcctttaaagcctgcagagccatgagccagttcaacatcttttctttatgatcttacagaaaattagtgctctgaagtggaggtatgaaatgccttcraggtcttttccttcttgtcttggtaatcagctctcagcttcttttcatgcaaatatctgtagcctgcatgaattttccccctgtgaatggacttttcttcttttaccacactgacaggctgcaacaaagagagctgaaaatgtagaagcaggttgagaattgtctaacagccagaggttggagagtttggaggacttggaagaagacaggaagatgagggaaagtctggaccattgtagagacttg

SEQ ID NO: 54085 - DNA, 1042 bp, Homo sapiens
tttttctcccttcacaagtgtgaaagaatccagagggcaggaatcatttctgtctctccctcaaaataccagcattggattggatgacaccagtgtctctcccagtgtccccactgtgtcctcccaccccatcctgctcagggaagtactcaatgcccaccctcccccagaaacctgtgccgtgtccccactgtgccccaaatgcattttgcttttcaggttcctgcctcactgcggggcggggtttccttgtactttggaatagctgttctcccttcacaagcatgagacaatccagagggcagaaattctttcttccctcaataccagtatccgactgcctgaccagcattttgtctctaaggagtgataacgggggtaagagaagaaaaaaaaatctaagtccyagtggattagctttttagaggaagagtatagaagagtatcccaggagactcctctcggtcccaggggattcatgccatccagctgctcctctgagaggctccacccctaaacctcaccttgtcttctgggagaagaggacccaacagctgacattcactatttatgacactccaagagacagggccagtgtgggcacattaggtcatcctcaaacagttttgaacccaggacccagaaaagacaggagggtggctgaggacacaacaccacgtgaaggttccaaagggaaacctccatccaaagacgtttgtgagtgtgcctagggaagacaaaaggaggagaggtacaaagaattttttatagtggactagatcaggtgattattctctgttttcacaaggaatgttcagaaacagctcctcactgctcagtgaaaacatgataaacaattacaatactgcatctggttcaaatgcacaataaagaacaaataataatgttgtaaattggaaaggggaagttggagtttgagagtacgaggaagaaactggaaattcagaattttactgcaagttctagaagagttaggctggggaatacggtcatggatttgagaccctgcttgccttacatt

SEQ ID NO: 54086 - DNA, 968 bp, Homo sapiens
tcaccgctccttggacttcgagtggcgctactctaacgctgagtcctgacctggatccctgtttgcttgcctagacctaaggcggtggtgcagaccttcccccaccccacataccatcgccttctggaatgtggctttgtggaactgaggctgagwcaatcacagtgccccattcttctggtcatgtgacaggtctggacctggtcatgtggcaaagtcgaatctaagtcacatcaaagcagggagagttaaagcaaatcttttctctcttgttgtggagctggaatatgagcccagaagcttccagaacacatggtcctgccctcataaagaagctcaagtgagggaacaaaatcgacttaggtagcagcgagcatggatggggcctggctacatcaagttctcagatcctgttgtccccacccaccccctgtaacttgccaattttatccatcaagcatcctctcctctctcccaacttgtctgagttctgtttctgtcattgtcaccaagagagctttgatgagtaagaaatcccaacattccacgggagtcttggtggtttaaatttttaagtgagtcctcacttgttaaagtcttattcctgttagagggcacttccatagtccagaaggtggggaattcctataggtgacctgtggtctctctaagcaatttgaccaggactatttaataaaatattttaaaaatggttccttttaattattcattttcaaatgtatatttgttcttggcaaacaagagatgatttgcgttaatcagtgatctttaagcaaattccttgcaatactttatctccatataaactcgaagcttcttaaatgaaatagtacctgtgtatttcatatggcttcctcttttataaataaaatgaatggacttgggaccaaaacagaattttttttttcgggaactataggactggaatctttttatccaaggcagtt

SEQ ID NO: 54087 - DNA, 968 bp, Homo sapiens
tcaccgctccttggacttcgagtggcgctactctaacgctgagtcctgacctggatccctgtttgcttgcctagacctaaggcggtggtgcagaccttcccccaccccacataccatcgccttctggaatgtggctttgtggaactgaggctgagacaatcacagtgccccattcttctggtcatgtgacaggtctggacctggtcatgtggcaaagtcgaatctaagtcacatcaaagcagggagagttaaagcaaatcttttctctcttgttgtggagctggaatatgagcccagaagcttccagaacacatggtcctgccctcataaagaagctcaagtgagggaacaaaatcgacttaggtagcagcgagcatggawggggcctggctacatcaagttctcagatcctgttgtccccacccaccccctgtaacttgccaattttatccatcaagcatcctctcctctctcccaacttgtctgagttctgtttctgtcattgtcaccaagagagctttgatgagtaagaaatcccaacattccacgggagtcttggtggtttaaatttttaagtgagtcctcacttgttaaagtcttattcctgttagagggcacttccatagtccagaaggtggggaattcctataggtgacctgtggtctctctaagcaatttgaccaggactatttaataaaatattttaaaaatggttccttttaattattcattttcaaatgtatatttgttcttggcaaacaagagatgatttgcgttaatcagtgatctttaagcaaattccttgcaatactttatctccatataaactcgaagcttcttaaatgaaatagtacctgtgtatttcatatggcttcctcttttataaataaaatgaatggacttgggaccaaaacagaattttttttttcgggaactataggactggaatctttttatccaaggcagtt

SEQ ID NO: 54088 - DNA, 968 bp, Homo sapiens
tcaccgctccttggacttcgagtggcgctactctaacgctgagtcctgacctggatccctgtttgcttgcctagacctaaggcggtggtgcagaccttcccccaccccacataccatcgccttctggaatgtggctttgtggaactgaggctgagacaatcacagtgccccattcttctggtcatgtgacaggtctggacctggtcatgtggcaaagtcgaatctaagtcacatcaaagcagggagagttaaagcaaatcttttctctcttgttgtggagctggaatatgagcccagaagcttccagaacacatggtcctgccctcataaagaagctcaagtgagggaacaaaatcgacttaggtagcagcgagcatggatggggcctggytacatcaagttctcagatcctgttgtccccacccaccccctgtaacttgccaattttatccatcaagcatcctctcctctctcccaacttgtctgagttctgtttctgtcattgtcaccaagagagctttgatgagtaagaaatcccaacattccacgggagtcttggtggtttaaatttttaagtgagtcctcacttgttaaagtcttattcctgttagagggcacttccatagtccagaaggtggggaattcctataggtgacctgtggtctctctaagcaatttgaccaggactatttaataaaatattttaaaaatggttccttttaattattcattttcaaatgtatatttgttcttggcaaacaagagatgatttgcgttaatcagtgatctttaagcaaattccttgcaatactttatctccatataaactcgaagcttcttaaatgaaatagtacctgtgtatttcatatggcttcctcttttataaataaaatgaatggacttgggaccaaaacagaattttttttttcgggaactataggactggaatctttttatccaaggcagtt

SEQ ID NO: 54089 - DNA, 968 bp, Homo sapiens
tcaccgctccttggacttcgagtggcgctactctaacgctgagtcctgacctggatccctgtttgcttgcctagacctaaggcggtggtgcagaccttcccccaccccacataccatcgccttctggaatgtggctttgtggaactgaggctgagacaatcacagtgccccattcttctggtcatgtgacaggtctggacctggtcatgtggcaaagtcgaatctaagtcacatcaaagcagggagagttaaagcaaatcttttctctcttgttgtggagctggaatatgagcccagaagcttccagaacacatggtcctgccctcataaagaagctcaagtgagggaacaaaatcgacttaggtagcagcgagcatggatggggcctggctacatcaagttctcagatcctgttgtccccacccaccccctgtaacttgccaattttatccatcaagcatcctctcctctctcccaacttgtctgagttctgtttctgtcattgtcaccaagagagctttgatgagtaagaaatcccaacattccaygggagtcttggtggtttaaatttttaagtgagtcctcacttgttaaagtcttattcctgttagagggcacttccatagtccagaaggtggggaattcctataggtgacctgtggtctctctaagcaatttgaccaggactatttaataaaatattttaaaaatggttccttttaattattcattttcaaatgtatatttgttcttggcaaacaagagatgatttgcgttaatcagtgatctttaagcaaattccttgcaatactttatctccatataaactcgaagcttcttaaatgaaatagtacctgtgtatttcatatggcttcctcttttataaataaaatgaatggacttgggaccaaaacagaattttttttttcgggaactataggactggaatctttttatccaaggcagtt

SEQ ID NO: 54090 - DNA, 463 bp, Homo sapiens
tgccatttagaaatgaataaagttatttctgataccagttatttgaagaaatatcatcagaggacttaatttatatatccaactaaaaatgatggcagtgctgctgtttctaagctgtgtgtaaatactcagttacagtttcttaatttggtctcaaatagattttttttttcaacttgcgtgctacaggtttatttttctgttgtattttcagcaatgttttaaaactcattctttgaaattctaaaatttgtcaattaagattgggtttygtagttcttaacatcttttatcctctctaaaattaagtctactttgatggtaataattaggtttactgtgttgataaactaaggaaagcatacaatttaaaaaagtgattttttaggctgggcgtggtggctcacgcccgtaatcccaacactttgggaggctgaggtgggcgggtcacctgaggttggga

SEQ ID NO: 54091 - DNA, 620 bp, Homo sapiens
aggtagagaccagtactgatgtcctttaattacatatgttagaaaccacagctaattcaggacaagctaaaacatttgaaataaataccagattggcagagcactagatggtataccaaccagcgccacgttacataaaacaaccaaataaagacaaaayagaaaacaaagcaagatgtttaatgtcccccttttctcaaatactggattctgacatgactgttctgattccattcaaagaaaaagtcaattccatatgatgggaattccatatacattatcaatcaatgtcattaaaacttctggaaatcatttggacattgttcatatccattgatatttaaatcccacaaagacacagagactgggggaaaatgttggaagcgcaggataaaaatttatctaacacaggggtgaatgaatgaacaagtaaatagatgcagaccttctctgacttaaccgcagggaggtctgcatgtggaaactcaaccaagaaggtgataacaggaatttctccttactttaataagaatatctcagtttagtgtgtggcctgtcttcctttaactaaatattggtgtttaactggttctacttcgtttgctgtgctattcaatgca

SEQ ID NO: 54092 - DNA, 601 bp, Homo sapiens
tcattaaaagattgccatttttctctgataagtatctataggtggcttcagcacctgcagtgatatctcatatatttctcattcccaggaaacaaggagttgtagacaaataacattttttcagaaaattactaccttaagagctaaaacagtgtgaaaaaaaatgtaactgtttttctcctgggaaatagttccaaaatatatcagatgcttcctgctttagaaaagagagtttatagaacacccctttcttgatgacttagcctcagtcaytatgactaggttattatatagtgaatctcttattgctgaagtttataggaccatttgctcctgctataaatgtccttagagactgtgtcatttctcttgttgatacttctttcttttctcgaaattctttctcactcctcctatataaaattaaaagctgttacctatggaaagttaggagagaatcaaaatgggtagggaaaccagctatatctaagattattcaatcagaaaatttcatcttgtatagacagtattgaatccacaaatgtgacacatctgtctcataagtgcgtaggctttgcaatgactgtttattttaatagat

SEQ ID NO: 54093 - DNA, 578 bp, Homo sapiens
tgagaaaagtgacaggctcctctgcagcaaatggtctgattttctgtcacctttcaggatgccaggtaggtgggaaatctccagatttgcccaattttagggagtcataaacctgtgaaccycacccagagaaccccccaacccccatagctagtggcgatgaaggggccagttgagaaagtagtgtgttgggagaatgtaaaagtcccaagagcagagcatgccttggcttgcggggaaaaggcagtttatcagctcaccttcctctcagatgtctgttcttcccaaaattgttggcctgccttcttcccatacttggggccagccggtcattgtatatttttgtaaatttaggtttaagtttggggatttgatttctttttcccacctggattcctatcatgttcaccccacctcccccagtcccactccttgggagtgtggaagacgaacacatgcagaccaaacttgccaagcaaataggtcagagcctttgccagcccccacctcagggcccagggataacagaaagccagctgagagggcgagataagccctaatgcataatcttccccacc

SEQ ID NO: 54094 - DNA, 605 bp, Homo sapiens
  misc_feature (1)...(605): n = A,T,C or G
ggaattgacttttactaagtgcctatgcgctcagtaataagccattagagacgttagagcctcaattaccaagaagggacagaaaccttttggatgacagaatgttaggaaatttctggaccttgtgatttctgacaagacatgaaagcatagtcatgagcatctncagcttangacaaaagcagatgttctcaagctgacacaaaggaaatgcaaggagaaaactcctcctagaacaagattttgctacttattccctcacaattatgcccctttccaagttattaacccmttttcacatgacaggaggtggaggaggcactgctaagagaggtggaagaagtcagcctcccactaatatgtttcctttcttccgtattttccttgtatacactcgctacctggcactatctggtacctcaaaagcatctgagctttctaagcatcttggtacttgtagcaaatcagatcagacaaatataagcaattaaacagctcctacctatatatcaacacttatcagccaaatgaatgtcacttatcatctggtgactctgtttggtagagaggactacagggatggagactatcacactgcttactcc

SEQ ID NO: 54095 - DNA, 565 bp, Homo sapiens
atcagatttttatttctaggcaatgctgctagggaaaaactctttcccctggagaaatcaaacaaaaacacagcttgggatgattcatacaaaggttctcaaacttagctgtactttttaaatcatctgggaagctttaaaaacctacttatgcctgggccccaattaaatccaaacatcttggggtagaaccaaggcacttatagtttttaaaagctcccaaagtgattctaatgtgtagccagggttgagaattactgatttacacagtcctgctcttcatatgcagkttaggcttgtggttacagttacttagctgctcacctgtctgcactaatatatacactactatgctttgctgctgggaaagaaatatggcaaggatgaaaaccagttctctcggtaaacacctggttctattaagatgtccagctggtgccaggcatggtggctcatgcctgtaatcccagcactttgggaggacaagggaggtggatcacgaggtcaggggttcaagaccagcctggctaacatggtgaaaccccatctctactaaaaatacaaa

SEQ ID NO: 54096 - DNA, 565 bp, Homo sapiens
atcagatttttatttctaggcaatgctgctagggaaaaactctttcccctggagaaatcaaacaaaaacacagcttgggatgattcatacaaaggttctcaaacttagctgtactttttaaatcatctgggaagctttaaaaacctacttatgcctgggccccaattaaatccaaacatcttggggtagaaccaaggcacttatagtttttaaaagctcccaaagtgattctaatgtgtagccagggttgagaattactgatttacacagtcctgctcttcatatgcagtttaggcttgtggttacagttacttagctgctcacctgtctgcactaatatatacactactatgctttgctgctgggaaagaaatatggcaaggatgaaaaccagttctctcggtaaacacctggttctrttaagatgtccagctggtgccaggcatggtggctcatgcctgtaatcccagcactttgggaggacaagggaggtggatcacgaggtcaggggttcaagaccagcctggctaacatggtgaaaccccatctctactaaaaatacaaa

SEQ ID NO: 54097 - DNA, 565 bp, Homo sapiens
atcagatttttatttctaggcaatgctgctagggaaaaactctttcccctggagaaatcaaacaaaaacacagcttgggatgattcatacaaaggttctcaaacttagctgtactttttaaatcatctgggaagctttaaaaacctacttatgcctgggccccaattaaatccaaacatcttggggtagaaccaaggcacttatagtttttaaaagctcccaaagtgattctaatgtgtagccagggttgagaattactgatttacacagtcctgctcttcatatgcagtttaggcttgtggttacagttacttagctgctcacctgtctgcactaatatatacactactatgctttgctgctgggaaagaaatatggcaaggatgaaaaccagttctctcggtaaacacctggttctattaagatgtccagctggtgccaggcatggtggctcatgcctgtaatcccagcactttgggaggacaagggaggtggatcacgaggtcaggrgttcaagaccagcctggctaacatggtgaaaccccatctctactaaaaatacaaa

SEQ ID NO: 54098 - DNA, 558 bp, Homo sapiens
tcagtcatttctgaattatgctttttaaatagtatctgtaaacaatgattgctttttgtcaatatgtaccacttctttgtttcccttatagaataacactaccactataaccaagtcaaaattttaatgaacagctagctcattaaattagtatgagctaatttaaaattgtttacaggaatttaacataggatctctaacgtaatactagattaccataaaaaacaaacatgattaacacaaaaaaggtatgagactatttcagttaaagtgtgaatggtgaaataaatgtaatgycacctatatgttccaattatacatatgtaaatttaatgaattagtatctggtatcttttgggcatgttacatatataaataactataatggcatggattagttatatataagtctgcatgtatatatacataatttttgtatatagtatagtgttatatacatatatatgtacaccaagttgctcaattataaaaggtaagagaataatgtgaagtttaacaattattttcaccactccaaatattctagaaatagcaaaa

SEQ ID NO: 54099 - DNA, 601 bp, Homo sapiens
agccagggatgttagcaggtttaaagctctttctatattttcccagtttttttagggggattgatagaacattgttttatttttgttatatatatgaataaagatatcttaaaattattttaatttgctttttcaattgaaggctactatgcatctctccttgtggtgaactgcttgctcataatctttrccagttttactattgggttatttgtctttttcttacaggtttttagggactcttcaatatattatagatattctttctttgtctttatgttgcaaagacttttccatgtctgtgcataatgttccttctgtaacttttggattttgtgtttcaagaatattttctccacttgaagatgatgttaaaaattctacttacaggtttttgttttgttttgtcttacaagtcatttagctctatactctggattttatgtatgttgtgaggtaatttttttttcctcagatgatatacctcactactgctagttattaaatctattttcacactggttcaaaatgccaccttttagtgtttgcaaattctttttactcttgggcctgtttctgggctctttcttttgagggattt

SEQ ID NO: 54100 - DNA, 595 bp, Homo sapiens
aaagtgtggagatgggatctgaagggacaaatagaaaagagccacatagacagctgctaggttagggcccaaggacccgtatgttagctgttgccccaatgatgctgtgtaatgaacaacccaaatctccatgggatatatatatatayagcattaagcatttattctcacagtctgggttgactgatctcagctgggcttggtgggactgctttgctgcaggctctgaaggttgggctggctctgcttctcatcacaggtctgtttggctggggcagctttgttccaggtgtgttcactctagggccctggccacaggaacagaggcgaaggccaggggaactctgcacggtgatggcagatatgcaagagggcaagcccagtgaccctggtgctttccaaggctttggctgtatcacatccaccaacattggccaaagcaaggcgcgtgactgagcccaagtcaaagggcaggaaagtacactcctcccatagagagggggagctgccaggttacatggcaaagagggtagatatggggagctgtgaagaatggagccagtaattaaatccactgaagtctccacaggagggc

SEQ ID NO: 54101 - DNA, 604 bp, Homo sapiens
caaaaattagccgggcgtggtggcaggcatctgtagtctcagttgctgaggcaggagaatcacttgaacccgggaggtggaggttacagtgagccaagatggcaccactgcactggcctgggtgacagaggaagactctgtctcayaaaataaataaataaaataaacaattaaatccctcaaaagaaagagcccagaaacaggcccaagagtaaaaagaatttgcaaacactaaaaggtggcattttgaaccagtgtgaaaatagatttaataactagcagtagtgaggtatatcatctgaggaaaaaaaaattacctcacaacatacataaaatccagagtatagagctaaatgactggtaagacaaaacaaaacaaaaacctgtaagtagaatttttaacatcatcttcaagtggagaaaatattcttgaaacacaaaatccaaaagttacagaaggaacattatgcacagacatggaaaagtcttggcaacataaagacaaagaaagaatatctataatatattgaagagtccctaaaaacctgtaagaaaaagacaaataacccaatagtaaaactggtaaagattatgagcaagcagt

SEQ ID NO: 54102 - DNA, 604 bp, Homo sapiens
caaaaattagccgggcgtggtggcaggcatctgtagtctcagttgctgaggcaggagaatcacttgaacccgggaggtggaggttacagtgagccaagatggcaccactgcactggcctgggtgacagaggaagactctgtctcataaaataaataaataaaataaacaattaaatccctcaaaagaaagagcccagaaacaggcccaagagtaaaaagaatttgcaaacactaaaaggtggcattttgaaccagtgtgaaaatagatttaataactagcagtagtgaggtatatcatctgaggaaaaaaaaattacctcacaacatacataaaatccagagtatagagctaaatgactkgtaagacaaaacaaaacaaaaacctgtaagtagaatttttaacatcatcttcaagtggagaaaatattcttgaaacacaaaatccaaaagttacagaaggaacattatgcacagacatggaaaagtcttggcaacataaagacaaagaaagaatatctataatatattgaagagtccctaaaaacctgtaagaaaaagacaaataacccaatagtaaaactggtaaagattatgagcaagcagt

SEQ ID NO: 54103 - DNA, 604 bp, Homo sapiens
caaaaattagccgggcgtggtggcaggcatctgtagtctcagttgctgaggcaggagaatcacttgaacccgggaggtggaggttacagtgagccaagatggcaccactgcactggcctgggtgacagaggaagactctgtctcataaaataaataaataaaataaacaattaaatccctcaaaagaaagagcccagaaacaggcccaagagtaaaaagaatttgcaaacactaaaaggtggcattttgaaccagtgtgaaaatagatttaataactagcagtagtgaggtatatcatctgaggaaaaaaaaattacctcacaacatacataaaatccagagtatagagctaaatgactggtaagacaaaacaaaacaaaaacctgtaagtagaatttttaacatcatcttcaagtggagaaaatattcttgaaacacaaaatccaaaagttacagaaggaacattatgcacagacatggaaaagtcttkgcaacataaagacaaagaaagaatatctataatatattgaagagtccctaaaaacctgtaagaaaaagacaaataacccaatagtaaaactggtaaagattatgagcaagcagt

SEQ ID NO: 54104 - DNA, 623 bp, Homo sapiens
ctatctttcaaaaggagtagtaagtattttatgggattggtggctgttgtggttcaaaggtgaaattcatcagattagaccaaagaagtgacagtcagcaggttaacctggctcgtccattgtaaaattgttattttcactcagatttttctaatgctgagaagtactgcaactagagaacccgtgttttgacctggtgtcctcaaatttacccacaaattcttttatttcactacctcccagaactgggttttggaaccactgcttctgaccatggtcttggcagtcctctgcttgcgcccttttctcacgtgccctcagctgcccctgctctgtgctgtcgtgtgccagcctctgcccctgctctgtgctrtcatgtgccagcgtctgcccctgctttgtgctgttgtgtgccagcctctttgggccctctgtgggtctttactacatttagtcacctgtgggcgtggcagctaatcagcgtgtgttgtcagagcagatggggctctaagggagggccaagtgggtgcgtggtccctgccatttctctgtctgcggagcagcctttgttactgtctgctgggcttgcccatgtgtgactatattcaccacaaccaatggga

SEQ ID NO: 54105 - DNA, 619 bp, Homo sapiens
ccaggcacrgtggcacgcacctgtagtcccagctactcgggaggctgaggcaggagaatcgcttgaacctgggaagtggaggttgcagtgagctgagatcgcgccactgcactccagcctgggtgacagatcgagactctgtcttaaaataaaataaaataaaataaaaatgccaaatgctttaatgtagatgtttataatataaaattgctttctacttcattctcacataataaatgaggtttcatgagttcctgtacacaaatatatacattcatgcattaatttatatttggtcaatgttgcgatttatgaataaggcaggagatattaaagctcacagaccttcccatttgggtctaaatttatcgtcttgtattaaatcttgtttatgaagcaactttgagatttgctttttctctaaatataatgactgggattctttcattttaatatatcaaacttcccagtcccttctatctccctcagtcacaccacgcactaatttgcacctgaagagggtttcccttttattcctatggtgttgtttatgacagagtttgacacatggagggtggtgaggaagaagagttgctttaaggatcataggacaaaaaac

SEQ ID NO: 54106 - DNA, 1033 bp, Homo sapiens
gattcttaaaaagtctatttgttgaatttattgtacattgctgaattaaaagcaactgaatgtaaagaaaaaatgtatggggtgttaattgtgtttctgaagctcaaataagcacaaactgatgaggcaattattttgtgcagagagggatggataaaaaaacactaatcagcgtaggaacaaagtgtgctgtgaaaacctgactaaaataaagtgcatctagttatgatgtagttttaatatattaatgacctattaawtataaaaacaaagggttgacatattcagtttgggtatcattttgttaatatattaaggaagaaaactcttaacataaaatctgaaaaacaaagactttgagcaaaaacacatttaccacaagaataactcggtgatattttataggacacaaattaaaaagtataaaaattaagttgtagactttaattatgacattctagaatattcattaatgttaaatcaagctgcttcaaaacaacggttatcatcatgaagtccatccacttgtacacataaatcttgttaatatgtatacacagttttgtgacatttggagaagctataaaaaccaacacgcatgttatctcacatagtacatgcatttgagttcatgatttcacccataaatggtaaatgcaaatcataaaataattcattcaaaaatatatattgaacttctatttaccagcatattttgtttatgaaaatactaacatgaacatgatgcagatgttgccttgaaggggctcagtctaaagatacgtatacaaagtaaacgcttcccacacaggaacagaaaaccaaacaccaccaaacacctcatgttctcactcataagtgggagctgaacaatgagaacacatggacacagggaggggaacatcacacaccaggcctgtcgggaggttgggggaaaatggagggagagcattaggacaaatatctaatgcatgtgggacttaaaacctagatgatgggttgatgggtgcagcaaaccaccacggcacatgta

SEQ ID NO: 54107 - DNA, 1033 bp, Homo sapiens
gattcttaaaaagtctatttgttgaatttattgtacattgctgaattaaaagcaactgaatgtaaagaaaaaatgtatggggtgttaattgtgtttctgaagctcaaataagcacaaactgatgaggcaattattttgtgcagagagggatggataaaaaaacactaatcagcgtaggaacaaagtgtgctgtgaaaacctgactaaaataaagtgcatctagttatgatgtagttttaatatattaatgacctattaaatataaaaacaaagggttgacatattcagtttgggtatcattttgttaatatattaaggaagaaaactcttaacataaaatctgaaaaacaaagactttgagcaaaaacacatttaccacaagaataactcggtgatattttataggacacaaattaaaaagtataaaaattaagttgtagactttaattatgacattctagaatattcattaatgttaaatcaagctgcttcaaaacaacggttatcatcatgaagtccatccacttgtacacataaatcttgttaatatgtatacacagttttgtgacatttggagaagctataaaaaccaacaygcatgttatctcacatagtacatgcatttgagttcatgatttcacccataaatggtaaatgcaaatcataaaataattcattcaaaaatatatattgaacttctatttaccagcatattttgtttatgaaaatactaacatgaacatgatgcagatgttgccttgaaggggctcagtctaaagatacgtatacaaagtaaacgcttcccacacaggaacagaaaaccaaacaccaccaaacacctcatgttctcactcataagtgggagctgaacaatgagaacacatggacacagggaggggaacatcacacaccaggcctgtcgggaggttgggggaaaatggagggagagcattaggacaaatatctaatgcatgtgggacttaaaacctagatgatgggttgatgggtgcagcaaaccaccacggcacatgta

SEQ ID NO: 54108 - DNA, 1033 bp, Homo sapiens
gattcttaaaaagtctatttgttgaatttattgtacattgctgaattaaaagcaactgaatgtaaagaaaaaatgtatggggtgttaattgtgtttctgaagctcaaataagcacaaactgatgaggcaattattttgtgcagagagggatggataaaaaaacactaatcagcgtaggaacaaagtgtgctgtgaaaacctgactaaaataaagtgcatctagttatgatgtagttttaatatattaatgacctattaaatataaaaacaaagggttgacatattcagtttgggtatcattttgttaatatattaaggaagaaaactcttaacataaaatctgaaaaacaaagactttgagcaaaaacacatttaccacaagaataactcggtgatattttataggacacaaattaaaaagtataaaaattaagttgtagactttaattatgacattctagaatattcattaatgttaaatcaagctgcttcaaaacaacggttatcatcatgaagtccatccacttgtacacataaatcttgttaatatgtatacacagttttgtgacatttggagaagctataaaaaccaacacgcatgttatctcacatagtacatgcatttgagttcatgatttcacccataaatggtaaatgcaaatcataaaataattcattcaaaaatatatattgaacttctatttaccagcatattttgtttatgaaaatactaacatgaacatgatgcagatgttgccttsaaggggctcagtctaaagatacgtatacaaagtaaacgcttcccacacaggaacagaaaaccaaacaccaccaaacacctcatgttctcactcataagtgggagctgaacaatgagaacacatggacacagggaggggaacatcacacaccaggcctgtcgggaggttgggggaaaatggagggagagcattaggacaaatatctaatgcatgtgggacttaaaacctagatgatgggttgatgggtgcagcaaaccaccacggcacatgta

SEQ ID NO: 54109 - DNA, 1456 bp, Homo sapiens
tttatggtacttacacattttcccatgaatatatttgccttattaaattttcacatagttatagctttccttttgartagattatacattctgagaaatgatgaattatataaaatcatcttttttgtgtgtagcacctagcacacggctgaaaaagaggtcaaacatctacaatacttcatttcttcattttttttttaaatgataatctcttgaaatcttttaaaaaatgacgatctcatgaaaatgaggtgttgcaagaatgttctctgtgatggaggttgaacttcatttctggaaagaagctgtgagcaaatgatcaaatagaacatagaaggaaagacgtggccaagaaaggtggtcaaaataaaaatgaggacataagtgatctcattttgttaagaaataagagatcatgaaattgaaattgatttaaaattaatcataaattcaactttttatgattctgccaatttatgaatcaattaatttttaacgatatttaaaagttttacagcatgagcattttgtatcatgtcatacagaaaacaataaatttatgctaaggttgaacatatgtcttatttctcattgacaacaacaaactgctactttctgttcattctacaattgttagaggtgttctacataaatatgttgaagggattcactcttggaagttgaaagatgttatgtcatttttgtcttctatccagataaagtcattatttaaagacatcaggtatattttaagtgctattggtaccttataaacaacatgacataacatgaatcatttgataactgatggtcagaaatatcattgaaaaattttcccaattcagtttagcttatttctgtccaaaccaattctctgtagggaataatgtcaaacaataacaacaccacaacaccattagatatgatgggattcttttcaagcaaacttattcaaaaatgattttttttttttgtgattgaatataacagaaattgattgggtttttctcaatgcctggagtacaacagcaaaggaacaatttgctaaaggtcttctgttactcttaagaaggcattttatttctcaacaaatttatagacttcatgttattctatatatttcctgtcacttttaaacataccaatagagaaaactattaatggaagagagacaaatatttaaaaaataaaacttcatgatgacttcaactggtttagaccttgaagattaaatattatgatcttgaattaaccagtgaggctttttttgcccttaaattgtccatgcaattagttatactttccatataacaccccttatacacgctgttatgaattatgtcattatgcatgatttaagggaaacaatatgggctaatttgtatccctcctaaaattcgtatacagaagtcctaatgcccattaccttagaatgtgagctgatttagagaaaggg

SEQ ID NO: 54110 - DNA, 593 bp, Homo sapiens
ttttcattcacgcatctgttcattcattcattccacaaaatatttattgagtattgtttagtacaataaatgttttcataagaggccattagactaaacgaatgaaaaagacaagcttgatttctgttgtcatggagcttataccttcaaatgagacttagaggctttcttgcgtttccctaaaatgttgcaagttctttacaagaaagattcatgaattattcaatttagtatctcagaatytaacatagttactgacactggctgtaaacaataaataagcaaggtttttaatgatatgcaatgaaaaacagggttttttttttgtttgtttgcctgttttaaaagatagagacattgtcatatttaacacaatgtaaattctactatggaagaaggaacaaatggattaaaatttttgccacagacaagtattatcatttctattttaaataacatgattgattgagtgctcagagatgttaagtaatttttcaaaggtcacagaagtttcactgctaagattcaagcacaagctgactctaaagtgtctgcttttaaccaaatctgcagtccaggaggtttattctcca

SEQ ID NO: 54111 - DNA, 602 bp, Homo sapiens
ataaaaacatgctttttggatgctctttgcatttttgtgtttaattaagaacaaggctggccaggtgcggcagctcacgcctgtaatcccagcactttgggaggctgaggccggcggatcacgaggtcaggagatccagactgtcctggctaacacgatgaaaccccgtctgtactaaaaatacaaaaaattagcctggcatggtggcgggcacctgtagtcccagctactcgggaggctgaggcaggagaatggtgtgaacctgggaggcggarcttgcagtgagcccagattgcgtcactgttctccagcctgggcgacagagtgagactccatctcaaaaacaaaaacaaaaacaaaaacaaaaaaaacaaggctatccaaaaaaatggcatatttgggtaatttaaaaataactggagagctcactaattactgggcctgtgctgggcccttccaggtaaatctcgttctcatcgttacctgttagctgtgcccagtgcacctacgtgctgccagggccatctgaacacgattccaaattccagctccttgctgagaactgttattaaattcgtattggaattagttagaattctttt

SEQ ID NO: 54112 - DNA, 921 bp, Homo sapiens
ccaacacagtaaaaccccatctctactaaaaatacaaaaatcagccacgtgtggtggtgcatgcctgtaatcccagcttctcaggaggctgaggcaggagaatttcttcagcctgggaggtggacgtcgcagtgagccgagatcacaccactgcactccagcctgggtgacagagtgagactctgtctcaaacaaactaacaaaaagaaatatgttcaaaatttggagaatttttttgcttggrttttgttttacctttttccatggaaaagatttttctatgataggtttttataataggcctcaggaccacccctatgcccacactacctcccaaaatttgaaccaaaatgtgacatctaaggtagctgcttaaatcacatataataactttttctacctattggaagcttccacacttctcttaaagattttccacattaaaatttgttttattcaataggtgctaactgaatgtccagggaagcagttttccaagtgtggtctggagagtcctgggagtctccgagatgcttctggaggcccaggggttcagaactatattcataataatactagactttgcctttttgtctcattccctcttgagagcacagtagagttttcagagcctacatgatgggtgttgatgtgagacgaaatctagaaacagatatgggaatcaaatttaactctttgctattaagccagacttcaaagagatttacaaaaacataaatcaatgccatgcttctcactaaatttaaatcaaatcactctccttgttacacatctttgtgtcagaaaatatagttatttttcataaagcgtgatttattttaatatttaatatgttttcatttgtttgtttgtttttgttgtggttgtggttgagactcgctctatcgccgacgctggagt

SEQ ID NO: 54113 - DNA, 921 bp, Homo sapiens
ccaacacagtaaaaccccatctctactaaaaatacaaaaatcagccacgtgtggtggtgcatgcctgtaatcccagcttctcaggaggctgaggcaggagaatttcttcagcctgggaggtggacgtcgcagtgagccgagatcacaccactgcactccagcctgggtgacagagtgagactctgtctcaaacaaactaacaaaaagaaatatgttcaaaatttggagaatttttttgcttggattttgttttacctttttccatggaaaagatttttctatgataggtttttataataggcctcaggaccacccctatgcccacactacctcccaaaatttgaaccaaaatgtgacatctaaggtagctgcttaaatcacatataataactttttctacctattggaagcttccacactwctcttaaagattttccacattaaaatttgttttattcaataggtgctaactgaatgtccagggaagcagttttccaagtgtggtctggagagtcctgggagtctccgagatgcttctggaggcccaggggttcagaactatattcataataatactagactttgcctttttgtctcattccctcttgagagcacagtagagttttcagagcctacatgatgggtgttgatgtgagacgaaatctagaaacagatatgggaatcaaatttaactctttgctattaagccagacttcaaagagatttacaaaaacataaatcaatgccatgcttctcactaaatttaaatcaaatcactctccttgttacacatctttgtgtcagaaaatatagttatttttcataaagcgtgatttattttaatatttaatatgttttcatttgtttgtttgtttttgttgtggttgtggttgagactcgctctatcgccgacgctggagt

SEQ ID NO: 54114 - DNA, 669 bp, Homo sapiens
ggtaactggagatgcaggttggaaaagcctccatgggtaggaagaagacatgtggccactatgtgtatgtgggggagaatcctgagtatctataaagcaagagtggggacctaaggagtgggcagctgcagtgggacccagggagaaaagttccaaccaaagggtgtgagtggagacagagaaggaggacgtctcagccaggcccacctgagtcttagaatagctgggctctttcccgctgattgtcctttactgaaattgaaatatgaacaaacaaaaatgtttctgggttacacagtgggatgataatggatacagwggcgctcattctagaagactgtttgtaagtactagatgaacagaaaaggactctggtcatcaccttctgagaggaagaagcgaagtctaccccactgagtttttattccatgtccttgcaagtttctaagttaacttctaaaatcccctgatgagtaaagttttacaaacgtcatatatttttgttgtcttaaagtgaacaggagcaagtgagtgttgaaaggagaaacaagaagcaccatatgcaggttagtcctggaaagttgacagcttttgacaaattacagagatgatggcacatcccgaagtgagcagcatctgcactggcatcagcattatctgaatgaggca

SEQ ID NO: 54115 - DNA, 553 bp, Homo sapiens
ggggtttcactatgttggccaggttggtctcgaactcctgacctcatgatccacccgcctcagcctcccaaagtgctgggattacaggcgtgagccaccgcacccggccttattgatttattaatttgttgagcacaggcgagttggacgctaagaatatcaacatagaaaaagcacagaacctgcttcatgggacttattgactagaaacagatgatcagatgagaaaataggcaattacaacatgatgtcatgtgctgtgatagaggtaagcacaggcttccatggtgccaaggaggratctcttacccagcctgcaatggtaagggaaagtccccagacgtaatggcaccagaacttagtcttgaaagaacaggaattacagaggagaagtggagatggttgagggcattcccatcaaaaacccagagagggccgaatgtggtggcacctatattttagggtatatcatatatgataagttgtaaagaaaagcaagagaatgattagcataaaatttagagtagcagcctcttttttttttttttttttt

SEQ ID NO: 54116 - DNA, 553 bp, Homo sapiens
ggggtttcactatgttggccaggttggtctcgaactcctgacctcatgatccacccgcctcagcctcccaaagtgctgggattacaggcgtgagccaccgcacccggccttattgatttattaatttgttgagcacaggcgagttggacgctaagaatatcaacatagaaaaagcacagaacctgcttcatgggacttattgactagaaacagatgatcagatgagaaaataggcaattacaacatgatgtcatgtgctgtgatagaggtaagcacaggcttccatggtgccaaggagggatctcttacccagcctgcaatggtaagggaaagtccccagacgtaatggcaccagaacttagtcttgaaagaacaggaattacagaggagaagtggagatggttgagggcattcccatcaaaaacccagagagggccgartgtggtggcacctatattttagggtatatcatatatgataagttgtaaagaaaagcaagagaatgattagcataaaatttagagtagcagcctcttttttttttttttttttt

SEQ ID NO: 54117 - DNA, 553 bp, Homo sapiens
ggggtttcactatgttggccaggttggtctcgaactcctgacctcatgatccacccgcctcagcctcccaaagtgctgggattacaggcgtgagccaccgcacccggccttattgatttattaatttgttgagcacaggcgagttggacgctaagaatatcaacatagaaaaagcacagaacctgcttcatgggacttattgactagaaacagatgatcagatgagaaaataggcaattacaacatgatgtcatgtgctgtgatagaggtaagcacaggcttccatggtgccaaggagggatctcttacccagcctgcaatggtaagggaaagtccccagacgtaatggcaccagaacttagtcttgaaagaacaggaattacagaggagaagtggagatggttgagggcattcccatcaaaaacccagagagggccgaatgyggtggcacctatattttagggtatatcatatatgataagttgtaaagaaaagcaagagaatgattagcataaaatttagagtagcagcctcttttttttttttttttttt

SEQ ID NO: 54118 - DNA, 229 bp, Homo sapiens
aggcagcctttttcatttaacagcagtgttaaattagtatattcccattttattgaagttttttgaagaccttttcaaatagcagcttattatgcaacgtgtgaacagtaatttaacaattctcccattcagagatgtgtamatttgtttctgttttttcaatttatcaataatttactggcacagccttgcacccctgctgcagtgtaagacagtaccctgtgacctt

SEQ ID NO: 54119 - DNA, 562 bp, Homo sapiens
agaaatccacacttagggacgtctcaatgaaatgcttagaaacagagaaaaagaatttgaatcatcctgggttgtagtaatagggggcagggggcggggggcgggcmgtggaagtacaaattatgttcaaagttgcaacaatagtatttgtcaaaacaaataacaaaacaaaacctgaatgaatgtcagaagataatggaatggcatttttaaggagctgaagaaagtcattcccaaacaaaaattatatactcagtaaatatatccttcaaaaataaagataaaaaaacagattttagacaaattcaaagagaatttgttgccagcagacctacattacaatagaaataatattgtttgtataaagcaatgataatgctacctaatggcaactaaaatacatgtagataaaaaatgcctaaaacagcacaaatggaaagaataaagtaaatgtatttcaaatgttctatgttttttttattaaggaaatgataaaagtaacattgttcaaaggtaacaaagcaagtattgataaagaagcttttaatccgccacttaaaaa

SEQ ID NO: 54120 - DNA, 526 bp, Homo sapiens
ttaaaataagcaaacacatgaataaacatttttcaaaagaagacatacaaatggccaacagatatatgaaaaaatgctctacatcactatcatcatggaaatgcaaaccaaaaccacaatgagataccacctcactctagttagaattactgtaattaagaaaaataataaatgctgggaaggatgatgagaaaagagaactcttacacactgttgataggaatataaactagtacagccattatgaataacaatatggaggtttcccaaaaaattaaaaatgaaatgaccatataatacagcaatcctattattgattatatatccaaagggaattgktatttttaaagatatgtttcaggatttattcatttttattttagatacttttcctctttaaagagttttaggtcaatcttcttgttatataatagactaaatgtaagcattacaagttacgggttcctactctgtaatatttgcaagaaaacagcagtgttaaaatatatgaatttttatgtcacag

SEQ ID NO: 54121 - DNA, 577 bp, Homo sapiens
aaataataaaattctcaatctgatgaataaagaactctgttatctgacatctttctcactcttcagccttattttgcctctagccacgtttgattctgtgtaacacaacactttctgtattgtagctttattaacacttttcaccagacctcagttatagcatgttacctccaactgtagagacttcacattgaacaccttgtttcagccaccacttgtgctcctctccacttctcatggcatggtcagcacatgctttgatcagctttcarcaggtgtatttgatagaactcactgtctagggccttccctaatgccagcatttgaatactcatagggagaattctgaaatgcacttcagaaggtcacggcagtatcacatactagttgcttcccatggaaccaacacaataatgtttatttctattgattggacttttctctgtctttgttttcactctctattccctcacttttgctccctgggatcactaagaaaaacatctgcaaggaggtatttgccccaggcattcctctgaaggtaattccagctaacacacacgggctactccctatg

SEQ ID NO: 54122 - DNA, 558 bp, Homo sapiens
tattgcaaatagggaaaatcattttagtatatcagcagattattgcaagaaatcttccaaggtgaatggaaaatgttaaaatttaaaaakgggggagaaagacaggtgaaggtgggataaaaatgtacaggagatcattaggaagtcactttaaaatagaatcattaaaatgaatgagaaataatgaacttcattagcaatccaataaattcaaatcaaattaaatgagattttttttcaaaaattaggttggcaaataaaatactgataacaaaaataacaaaggataataaaaatgataatacatcagtgccagagctaacattttgtagggcaatttggcaataagtaccacaatttttaatgtgcagatacattgacctacaaatgtcacttctgaaaatttaactgaaggaaataattagatatattgtaagtgataaatgtgcaaggaaatacacagctgaattgtttatagtagcacaagacagcattagcctaatgctcatgaacggtatttagttacatactgtagatcaatacaattttaaaaatatt

SEQ ID NO: 54123 - DNA, 509 bp, Homo sapiens
ttactgctrctttacagtgtatttcctttccctgaataaatctgatgactaattttaaaatttattttatttattttaattatttccctttttttgaattcttgttcatataataatatgatatgtttatatcataatttatcataaatgtggcattttaaatcggcagtgatagtatggacgatgtaacaactgatcttaaaaagctatattcaaaatgtattgctacttgcagcagaattctatataaaggtacatgtataaaataaacaataggcatgctagaataaaacataaatattttctatgttttgagtgttgagtatcactttaagaaggctataaagccaaaaaacattataagatataataacagaaaacaaactccactagtatttgtaacacataaacatttttaaggaacataaaaaactgaatttgctgcaggaacaatggagtcatcattttgatatattcattgttctttagtcatttttgtgcactcttta

SEQ ID NO: 54124 - DNA, 558 bp, Homo sapiens
tcccagttccaatgtgataccaaaggggtggcccccctgggacagttactgtaattgctgacaacatatgatctataatcttctcctaggcttggttacagaggaattctgggctcygtttttattctcctcttgggaggtgtgtgaccattttccttttgctggtcagcaattagaggctcctgacaatgtggtcggcccaaacacgctccccagagggaaggagaatcccctatatttggcagtaaagtttctcttgatctaggcttcccgtggcttctgattctcccttctttcctgtttttggggatttttttttttttcaaatagagattgaatagtgaaatgctgggatttttgtaaaaccttgaaagcaatacacaggaaacaagttgttaaattcaagaaacatgtgataaactcatactatgctgggcactattctaggtataggaagataaggagaaaagacatcgtcgctaccctaagttgctcatgaatctttccatggtagtttaggggtaacctgtcttgagacagcaaaattgaccagtgaca

SEQ ID NO: 54125 - DNA, 558 bp, Homo sapiens
tcccagttccaatgtgataccaaaggggtggcccccctgggacagttactgtaattgctgacaacatatgatctataatcttctcctaggcttggttacagaggaattctgggctctgtttttattctcctcttgggaggtgtgtgaccattttccttttgctggtcagcaattagaggctcctgacaatgtggtcggcccaaacacgctccccagagggaaggagaatcccctatatttggcagtaaagtttctcttgatctaggcttcccgtggcttctgattctccyttctttcctgtttttggggatttttttttttttcaaatagagattgaatagtgaaatgctgggatttttgtaaaaccttgaaagcaatacacaggaaacaagttgttaaattcaagaaacatgtgataaactcatactatgctgggcactattctaggtataggaagataaggagaaaagacatcgtcgctaccctaagttgctcatgaatctttccatggtagtttaggggtaacctgtcttgagacagcaaaattgaccagtgaca

SEQ ID NO: 54126 - DNA, 292 bp, Homo sapiens
cacacacacacacgcmccaaaaaaaaaaaaaaaaactttcagaggatgagtggtgatcctgatcctggactagccatttgacactaaatccttaccaatgaataaaaaatattttaaaactctaaacattacatttggttccccaattctctttattttttgtcttaaaatatatgagattaaacaataaaataatgaaataattttaatacctgaaaaatcagatttatagatggccacagaaagccaaaattgtcatttgtaaaatatggaagttcagacgctttatata

SEQ ID NO: 54127 - DNA, 292 bp, Homo sapiens
cacacacacacacgcccmaaaaaaaaaaaaaaaaactttcagaggatgagtggtgatcctgatcctggactagccatttgacactaaatccttaccaatgaataaaaaatattttaaaactctaaacattacatttggttccccaattctctttattttttgtcttaaaatatatgagattaaacaataaaataatgaaataattttaatacctgaaaaatcagatttatagatggccacagaaagccaaaattgtcatttgtaaaatatggaagttcagacgctttatata

SEQ ID NO: 54128 - DNA, 510 bp, Homo sapiens
attacattgaaaaaaatttttaatccttcaaactacctgtattcctgagacagtcatacttcaaaaatacttayatacatatccatgagggcaaatgtgtgatctactactggaaatgatataataaaccataacacccagttcatttttattaagaatcaagttttgtgaaacaataagatgaacacttaaatcctgagcaacttacttatgagatcttgggaaaaggtctatgactttttgagcctcaatctcctcaattttaaaatgaagtaaaattataccttctctataatgtctttgagagtactgaatgagttaatgtatgtgaaaagttcggtaaactgtcgggtaggcagtaaatgttcaaagatatctgttttaataagcaagacagaatcagaaccacaaataaaacaaagatactccaaaagctgacaagaaaaccaaaaccgttactaccagtttcaatctctatctaggtggaaaatttattaaatctttctggtg

SEQ ID NO: 54129 - DNA, 510 bp, Homo sapiens
attacattgaaaaaaatttttaatccttcaaactacctgtattcctgagacagtcatacttcaaaaatacttatatacatatccatgagggcaaatgtgtgatctactactggaaatgatataataaaccataacacccagttcatttttattaagaatcaagttttgtgaaacaataagatgaacacttaaatcctgagcaacttacttatgagatcttgggaaaaggtctatgactttttgagcctcaatctcctcaattttaaaatgaagtaaaattataccttctctataatgtctttgagagtaytgaatgagttaatgtatgtgaaaagttcggtaaactgtcgggtaggcagtaaatgttcaaagatatctgttttaataagcaagacagaatcagaaccacaaataaaacaaagatactccaaaagctgacaagaaaaccaaaaccgttactaccagtttcaatctctatctaggtggaaaatttattaaatctttctggtg

SEQ ID NO: 54130 - DNA, 2233 bp, Homo sapiens
tccagccccagctgaatttcacacatgaatcaaaagtccatcagacaggaccggactgcaacggtgtggccttatcaggaatccctagggttctttaaatattcttactctcttcataaaaaaccataaattatattttttcaattctctggatagaacagatattgttgttcatcactatatattagcctcaaagactagtggatgagaggctgtgttcttagttcaggtatccgtgtggtctctggttcaagatgaaatatgcttctggagcctgcgcagccaagtggaaaatgggaagaggaaatttaactgaggctacatgcttttcttcattcttacagatgtcgtggagtccatgagatgcaggatacaagataggaacatgaaagagagtacttattaagtaggggtgagtaaacaaagctatggaatgccaaacaatgaaaaatggggacagcccacacgaaaaatggcctaggaaatacctctggctaaagggaaatctttcttgattcttggcttatctgtcactttagtcttagtcaagctaatttatctaattttgcaaagtggtctaaaatttcttatatctcatctcccaggatatgctatcaaagggcatgaatacatagaatcacctggctcttgtggttttgttagctttcttatctgcagaattttttggagggtcccaattataagttcttataataactctgaatccagttatagaagaggtgtagtgagcctagatttttttttcccagggatggctaggctggatgagatgccatcactgggatccaagtggtcatagcttccaccgtgagggagttctctgatgaaaaaaactttcctgattgtctccaaacttaatggtagtatagtggttctggtggtgagtgaagcttatatccattctacaggataatctccccagggccaggggctgacttaagagagctctctctcttctaatgccatttcattttcaagaaccacataaccatgaagagcactattaagtgaaaatatgtttttgatacctttaaaaattcttactaatttctccagaccacaggtaggaaagaaaatcagtggaaatgatggaggcaggctcaggttaccatcagcactgtgagttttcaggagacaaaagtagacattcaaaacttcaaatcctgactccacaaatcaaaagggattcctttgctacaaagagcccccgagccacactgtgaatccaaaagctggtaacagccagttaataccaagtccatgagttttccgggaatggaatggagcttccttgtctctggctattgaaaatgggagtgacaaatgggtctttgaactttactgccatttatttataaaaggcatatgcggaagtccatactgtggttgcttttattgtttgaaaaccttggcacatatgctgttgagtacagttgtttaaaaattcatgattttaaagtaccaacttttagaaaagatgatgcaagctttgcattatgaaaggtggattcaggacttcatcaattcctgcatctttctcttcagaacttcaggatgaagatgatggcagtaggcatcttttctcttgggcaacgcttgtttctttggcattgtacaaatgtttctcatactcctactatgttcctatctctgtgtgaaaagccggagataataaaggtactatagctatttatgctacagactgagcttttggcatgaggttggtctgcacggtcttagctctctttggcctttctctgatcaccaacataaaacttstttccttgacttgcctctaccaacagaggtttccaaaagtttctcttgggataatcttaagaatcttcaggggccccctatccaaagttatggagaacatggcaagaggctttccattcttactctccaggagcctcagggcaactcgaacggctgcatcattggtacatgttaggccacaagaaacaaggatcactacagcaggtgatgggttggcggttctagtcatctgaacttctttcggatgggtgacaaaccaccaaagagatgttcttgctaagctcttggatacatcagtgctcttctctctttggataagtggtcagtgacacccacactgagagaaattcaaagccagattcccaccccaccacgtgtgggctgaagtctcccaggatcatcagcaaattaaacttgtgctctgataacttga

SEQ ID NO: 54131 - DNA, 570 bp, Homo sapiens
tttccagtcttcctgcccaaaaaagttacatcgaatatcccaaattgcttttgaataattaaatcatcattttatcttccttcactagttttttaggacagattttttttttcttttcatttcagccatgaaccagagaatcagtcagagtgctccagtgaaacagccaccacccctggctccccagagcccacagggaggcgtcatgggtggcagcaactccaaccagcagcaacagatgcgactgcagcaactgcagatggagaaggagaggctgcggctgaaacagcaagaactgcttcggcaggtgaggccacaggttagaaaccagccttccactttkgggggtttgttttcttaaagttgggcagatttcattttaacatttattagttacagaggaatgttgtctttgtaaaactgagtgacacagaagcattctatccagccctgtccttgtcttagttttgtgactgtgaatggcctttgatcaagttacaagggatgtgacttggaaacctgtatcatgaagagctgttttggtcatggtcattgcaattgagcaaaaat

SEQ ID NO: 54132 - DNA, 574 bp, Homo sapiens
tttttttaattataaaccttgcttatatcttttttttattttgattcttaggtaaactaaaatcaggcagaatgtgtccaaaattatgttctgcctcagctgttgccttcccctgttgtttggtaaccatcacgccattaataactaaaatgtgagaggctctcccattgttgcatttccaggcataatattggactaaagagtgtccacttatatttgaactttaaatacactayacatacatttttagtatacatatgtttcatgaaatatttaggacatacttatactaaaaaatcatagtagatcaaatttaagtttgatctaccatttaatttgacaaatttaatccatctactgtgcattaaattcaaatttaactggatatcctgtattttttattgctaagtctgttaactcctcctaaaactatgaaagcactggacttgaagcagttctcatctgttagtgaaaagataacaaacaagaattgagtatctgtaacattcttctttaaattaaactaatctaatgttttatatggcacatgtatgagaagaataaattattttct

SEQ ID NO: 54133 - DNA, 574 bp, Homo sapiens
tttttttaattataaaccttgcttatatcttttttttattttgattcttaggtaaactaaaatcaggcagaatgtgtccaaaattatgttctgcctcagctgttgccttcccctgttgtttggtaaccatcacgccattaataactaaaatgtgagaggctctcccattgttgcatttccaggcataatattggactaaagagtgtccacttatatttgaactttaaatacactacacatacatttttagtatacatatgtttcatgaaatatttaggacatacttatactaaaaaatcatagtagatcaaatttaagtttgatctaccatttaatttgacaaatttaatccatctactgtgcattaaattcaaatttaactggatatcctgtattttttattgctaagtctgttaactcctcctaaaactatgaaagcactggacttgaagcagttctcatctgttagtgaaaagataacaaacaagaattgagtatctgtaacattcttctttaaattaaactaatctaatgtttkatatggcacatgtatgagaagaataaattattttct

SEQ ID NO: 54134 - DNA, 612 bp, Homo sapiens
gcaacatagggcaaccctgcctctacaaaaaaataaaataaaaaaactagctgggcatgttggcacgtgctcatgatcctagctacttgggagcccaaggcaggaggatcacttgaacctgggaggtttaggctgcagtgagctgtggtgttaccactgtactccagcctgaatgtcagaatgagacccatctttaaaaaaataaaaaaaaaaaattagtttcttccatttttttgtagattacattaatcagaatttccttttgtttttggcagtacagaaaaaaaacattgaataagtattcttaagctcttcagagtctgaatccatctgtcttcacttttattgttcctttctctaacatcctggatacagagatgaacctgactcagagagcaagcttttgggctctaagcagtgatgtttccttgttctttgttgtctgtaattaaaacttctggttagatcagtgtgtttataacatgttatttgagatgtgtggtatttttaatcttcagatttcagtcttcttagggaatgtgcaakgctagtagaagatattgaaaatgagaatgaaatcactccttgttactttaaatccaccttttcaaa

SEQ ID NO: 54135 - DNA, 1200 bp, Homo sapiens
ggcataggatggatcctcttaggtaagcaggaaagtgggacatcaacagtaagcagaaggaatggcatgcacttaccaggcactcagcgcaacggacacaaagcctcgccatacacgcctcttcctcctcctgatcagtgctgtaaaaagaggacaaaccaaatctgaatcaccactatcctcaatagagtagagcagttgaaagtacaggtgttgaaatcagacaggtctggttttagattccagttcttccactcactagctgggtgactgggcaaattgtttaagccccagaagcctgtttcctcatctataaaatgcacayattggccaggcgcagtggctcatgcctgtaatcccagcactttgggaggatgaggtgggtggatcacctgaagtcaggagtttgagaccagcctggccaacatgacaaaaccccgtctctactgaaaatacaaaaattagctgggagttgtggcgcacacctgtaatcccacttactcaggaggctaagatggggaatcacttgaactcagaaggcagaggttgcagtgagccaagattacaccactgcactccagcctgggtgtcagagtgagtgagactcccatatcaaaaaacaaacaaacaaaaaatgcacatattaccacccacccttaaagcacagttgttaggaataaataaaaaataaatacatgtgaaacacataccatagtgcctggcacataataaatgctcaataaattatccctcattcagaagtgtactgagcactgacaaagtctgagcattgtgctagcctagaggtaaaaagataaataaaacttgagcctgtgaagggctcatgatgggggtgagagacctgttaaaacttaacaaatatgttataatgcagtgtgataagtgttttaatagagttaacatcaaactgctgcagcagcaaagagtgaggagtgactaattgtcccctgaggtctcagggaaactcaagagaaggggctatttcagctgggtcttggaggataagaaagagtttccaggcaaacaagagaaggaaagagggcattcccagcaagtcaaaaggaggggtcttagaggatgagaatgagttaggaaaaatatacgaatgaagtacagtatgttagggcacataaataagttcatggcagctgggacgtggggagatgtcagggaacaatg

SEQ ID NO: 54136 - DNA, 1200 bp, Homo sapiens
ggcataggatggatcctcttaggtaagcaggaaagtgggacatcaacagtaagcagaaggaatggcatgcacttaccaggcactcagcgcaacggacacaaagcctcgccatacacgcctcttcctcctcctgatcagtgctgtaaaaagaggacaaaccaaatctgaatcaccactatcctcaatagagtagagcagttgaaagtacaggtgttgaaatcagacaggtctggttttagattccagttcttccactcactagctgggtgactgggcaaattgtttaagccccagaagcctgtttcctcatctataaaatgcacacattggccaggcgcagtggctcatgcctgtaatcccagcactttgggaggatgaggtgggtggatcacctgaagtcaggagtttgagaccagcctggccaacatgacaaaaccccgtctctactgaaaatacaaaaattagctgggagttgtggcgcacacctgtaatcccacttactcaggaggctaagatggggaatcacttgaactcagaaggcagaggttgcagtgagccaagattacaccactgcactccagcctgggtgtcagagtgagtgagactcccatatcaaaaaacaaacaaacaaaaaatgcacatattaccacccacccttaaagcacagttgttaggaataaataaaaaataaatacatgtgaaacacataccatagtgcctggcacataataaatgctcaataaattatccctcattcagaagtgtactgagcactgacaaagtctgagcattgtgctagcctagaggtaaaaagataaataaaacttgagcctgtgaagggctcatgatgggggtgagagacctgttaaaacttaacaaatatgttataatgcagtgtgataagtgttttaatagagttaacatcaaactgctgcagcagcaaagagtgaggagtgactaattgtcccctgaggtctcagggaaactcaagagaaggggctatttcagctgggtcttggaggataagaaagagtttccaggcaaacaagagaaggaaagagggcattcccagcaagtcaaaaggaggggtcttagaggatgagaatgagttaggaaaaatataygaatgaagtacagtatgttagggcacataaataagttcatggcagctgggacgtggggagatgtcagggaacaatg

SEQ ID NO: 54137 - DNA, 679 bp, Homo sapiens
gtcaccctggctggagtgcagtggcacaatctcggttcactgtagtctcaacctcccaggctcaagcaatcctcctccctcagcctcccaagtagctggcactacaagcacacaccactatgcccagctaattttttttttactttttgtagagatgaggtctcactatgtggcccaggctgttctccaactccagttcgagtgagccaccacacccagcccgcaaacaataatttttaaaatataaaatacatacatgctttaaaaaaaaacttctaaattattcataggtcaaaggagaaatcataaacaaaaatgtacctaactagaatgataatgwgaaaaatatatataatatacatatacacacacacacacacacacacacacacacacacacacacacacacacacatatgtacattcatggaatgtctcagtgtgacatttagcagctaaccttgaaatgcttgtgctctttcctgatctggacttggactgagatgcacctacctttgcacgttacactcagagcacaagtgattctgctggggaggtcaagagggaaccaggaagttatgacttgactaacatggcaaatcctcactgtctttggaagggaggatgtggagaggaggatgatgggtagagaagatcctcccctttttcacaaggaagg

SEQ ID NO: 54138 - DNA, 679 bp, Homo sapiens
gtcaccctggctggagtgcagtggcacaatctcggttcactgtagtctcaacctcccaggctcaagcaatcctcctccctcagcctcccaagtagctggcactacaagcacacaccactatgcccagctaattttttttttactttttgtagagatgaggtctcactatgtggcccaggctgttctccaactccagttcgagtgagccaccacacccagcccgcaaacaataatttttaaaatataaaatacatacatgctttaaaaaaaaacttctaaattattcataggtcaaaggagaaatcataaacaaaaatgtacctaactagaatgataatgtraaaaatatatataatatacatatacacacacacacacacacacacacacacacacacacacacacacacacacatatgtacattcatggaatgtctcagtgtgacatttagcagctaaccttgaaatgcttgtgctctttcctgatctggacttggactgagatgcacctacctttgcacgttacactcagagcacaagtgattctgctggggaggtcaagagggaaccaggaagttatgacttgactaacatggcaaatcctcactgtctttggaagggaggatgtggagaggaggatgatgggtagagaagatcctcccctttttcacaaggaagg

SEQ ID NO: 54139 - DNA, 679 bp, Homo sapiens
gtcaccctggctggagtgcagtggcacaatctcggttcactgtagtctcaacctcccaggctcaagcaatcctcctccctcagcctcccaagtagctggcactacaagcacacaccactatgcccagctaattttttttttactttttgtagagatgaggtctcactatgtggcccaggctgttctccaactccagttcgagtgagccaccacacccagcccgcaaacaataatttttaaaatataaaatacatacatgctttaaaaaaaaacttctaaattattcataggtcaaaggagaaatcataaacaaaaatgtacctaactagaatgataatgtgaaaaatatatatwatatacatatacacacacacacacacacacacacacacacacacacacacacacacacacatatgtacattcatggaatgtctcagtgtgacatttagcagctaaccttgaaatgcttgtgctctttcctgatctggacttggactgagatgcacctacctttgcacgttacactcagagcacaagtgattctgctggggaggtcaagagggaaccaggaagttatgacttgactaacatggcaaatcctcactgtctttggaagggaggatgtggagaggaggatgatgggtagagaagatcctcccctttttcacaaggaagg

SEQ ID NO: 54140 - DNA, 679 bp, Homo sapiens
gtcaccctggctggagtgcagtggcacaatctcggttcactgtagtctcaacctcccaggctcaagcaatcctcctccctcagcctcccaagtagctggcactacaagcacacaccactatgcccagctaattttttttttactttttgtagagatgaggtctcactatgtggcccaggctgttctccaactccagttcgagtgagccaccacacccagcccgcaaacaataatttttaaaatataaaatacatacatgctttaaaaaaaaacttctaaattattcataggtcaaaggagaaatcataaacaaaaatgtacctaactagaatgataatgtgaaaaatatatataatatacatatrcacacacacacacacacacacacacacacacacacacacacacacacacatatgtacattcatggaatgtctcagtgtgacatttagcagctaaccttgaaatgcttgtgctctttcctgatctggacttggactgagatgcacctacctttgcacgttacactcagagcacaagtgattctgctggggaggtcaagagggaaccaggaagttatgacttgactaacatggcaaatcctcactgtctttggaagggaggatgtggagaggaggatgatgggtagagaagatcctcccctttttcacaaggaagg

SEQ ID NO: 54141 - DNA, 679 bp, Homo sapiens
gtcaccctggctggagtgcagtggcacaatctcggttcactgtagtctcaacctcccaggctcaagcaatcctcctccctcagcctcccaagtagctggcactacaagcacacaccactatgcccagctaattttttttttactttttgtagagatgaggtctcactatgtggcccaggctgttctccaactccagttcgagtgagccaccacacccagcccgcaaacaataatttttaaaatataaaatacatacatgctttaaaaaaaaacttctaaattattcataggtcaaaggagaaatcataaacaaaaatgtacctaactagaatgataatgtgaaaaatatatataatatacatatacasacacacacacacacacacacacacacacacacacacacacacacacatatgtacattcatggaatgtctcagtgtgacatttagcagctaaccttgaaatgcttgtgctctttcctgatctggacttggactgagatgcacctacctttgcacgttacactcagagcacaagtgattctgctggggaggtcaagagggaaccaggaagttatgacttgactaacatggcaaatcctcactgtctttggaagggaggatgtggagaggaggatgatgggtagagaagatcctcccctttttcacaaggaagg

SEQ ID NO: 54142 - DNA, 375 bp, Homo sapiens
aaaaaaaaaaaaaaaaaaaaaggaaaaagaagagtcactctggagaacagctaagtccaagactcctggcctgtagcttccagtcacgttctatcagtgctcaacttgccatccccactgaggctggtgtgatgaaatcaaaattaccygaccccggcctgctgctcagggagtaaccacactcatgaagagtggcaaaagtgtaacgtgctttgcagacgtgcttatgagatgtaaattgcctttcggtaaatagaaccctgcttcccattcatgtaattatagcttccagcctctgccccatgagagaaaacacttgtcctgaggggaatcacagtaataatttagagaataacacaagaaaccttctcctca

SEQ ID NO: 54143 - DNA, 375 bp, Homo sapiens
aaaaaaaaaaaaaaaaaaaaaggaaaaagaagagtcactctggagaacagctaagtccaagactcctggcctgtagcttccagtcacgttctatcagtgctcaacttgccatccccactgaggctggtgtgatgaaatcaaaattacctgaccccggcctgctgctcagggagtaaccacactcatgaagagtggcaaaagtgtaaygtgctttgcagacgtgcttatgagatgtaaattgcctttcggtaaatagaaccctgcttcccattcatgtaattatagcttccagcctctgccccatgagagaaaacacttgtcctgaggggaatcacagtaataatttagagaataacacaagaaaccttctcctca

SEQ ID NO: 54144 - DNA, 1216 bp, Homo sapiens
ggtaaaattaagaagggtcctgagagatgaataggagttcataagcccaaagggcagaggcggtggacayctgcaaagtcctggagacatggaaggacagggtgtcttatggaaaggagggtgagaagttcagcgtggccagtccagaaagtttaaaaggggatgatagctggccggacgtggtggctcatgcctataatcccagcactttgggaggctgaggcgggtaggagatcgagaccatcctggctaacatggtgaaaccctgtctctactaaaaatacaaaaaatttgccaggcgtggtggcggccgcctgtagtcccagctcctcaggaggctgaggcaagagaatggtgtgaacccggcaggcggagcttacagtgagcccagatcgtgtactccagcctgggcgacaaagcgagactccacctcaaaaaacaaaaaaaagggatgatagctgaggaccattgaccttaggagatgggggcatctgcctctaggtgagggccctgatcagcaccctaggggcacattctgtcttcaccacctcctgattttgcagcgtctcctatctgagccttagtttctgctctgtaaaatggagatgataatagtacccaactcactaaggatgaaataaaacagcaaaagatgcgtgagcaccacgtcgggtgcgtggtaagcattcggtaactgttagcagcttttgttatttcctggaatctaatagcaaagcctgtacttttctactggcttcaactaatcagccccagccccagcccagccctccaacttcctcctggcccccagccccaagtgtggcccaaccattccagggctgggtgtcttcccagagcagagagatccaggcctcccactgtacagagaggcagggacagtgacttgcttggggacacacagtgagcaggagcaggggtagcccgggcttgaacccagggcagtagctgcccttccctgactgttggctgtggcaggcagtgccccggaagggctgctctgggctttgagccagcagcagcccagccagcaaggaggtggccgctattgacagatgataacacgtgtttgtttagctagagccactcaccaaaggggcgttcaactccctgcagcagggagctgagcttgaggccagagtctttctgcccttcctcactgacacccacaagggctgctctggccttagagatcgcc

SEQ ID NO: 54145 - DNA, 1216 bp, Homo sapiens
ggtaaaattaagaagggtcctgagagatgaataggagttcataagcccaaagggcagaggcggtggacacctgcaaagtcctggagacatggaaggacagggtgtcttatggaaaggagggtgagaagttcagcgtggccagtccagaaagtttaaaaggggatgatagctggccggacgtggtggctcatgcctataatcccagcactttgggaggctgaggcgggtaggagatcgagaccatcctggctaacatggtgaaaccctgtctctactaaaaatacaaaaaatttgccaggcgtggtggcggccgcctgtagtcccagctcctcaggaggctgaggcaagagaatggtgtgaacccggcaggcggagcttacagtgagcccagatcgtgtactccagcctgggygacaaagcgagactccacctcaaaaaacaaaaaaaagggatgatagctgaggaccattgaccttaggagatgggggcatctgcctctaggtgagggccctgatcagcaccctaggggcacattctgtcttcaccacctcctgattttgcagcgtctcctatctgagccttagtttctgctctgtaaaatggagatgataatagtacccaactcactaaggatgaaataaaacagcaaaagatgcgtgagcaccacgtcgggtgcgtggtaagcattcggtaactgttagcagcttttgttatttcctggaatctaatagcaaagcctgtacttttctactggcttcaactaatcagccccagccccagcccagccctccaacttcctcctggcccccagccccaagtgtggcccaaccattccagggctgggtgtcttcccagagcagagagatccaggcctcccactgtacagagaggcagggacagtgacttgcttggggacacacagtgagcaggagcaggggtagcccgggcttgaacccagggcagtagctgcccttccctgactgttggctgtggcaggcagtgccccggaagggctgctctgggctttgagccagcagcagcccagccagcaaggaggtggccgctattgacagatgataacacgtgtttgtttagctagagccactcaccaaaggggcgttcaactccctgcagcagggagctgagcttgaggccagagtctttctgcccttcctcactgacacccacaagggctgctctggccttagagatcgcc

SEQ ID NO: 54146 - DNA, 570 bp, Homo sapiens
tccttttgtatttcgctattcttgctcccggtctctgcggccttggaaacttccctcgaggagcttagaaacctgtcttctgagggagcaattctcactacacactcaccctcaggtttgatacttcactagagtgactcaaaaattcagctgttatggactgaatttttgtattccctcagaattcatctgttgactctgaagcctcaattggtgattcaggaggtaaggattttggaagataaagtcatgagggtagagctcttctgactgagatgtgtttccttatgaaagagaacccagagagctctcttgccttctttgagtatcctgcaaacccgaagaggcccctcatcagaacttgaccatgctggcaccctgatcttggatttcctacttccagaattggaaataaatttcttttatttataaaaccacccaatctatgctaatttcctakagcagcctgaactgattaggatagaagttggtataaggggtggtgccgcccattagaaattcctaatattgtagaaatctgctttggaactgggaaataggtagatccta

SEQ ID NO: 54147 - DNA, 563 bp, Homo sapiens
taattcagcaccttccttcctcatctcctgagatattgctgcagagcgaacacatccttgttgctttgcactctagcttttaccgacataggtccatgtggagaggcctgtgtccagatgtgcttgtgattgggtgagcaggtctgtttaattcagaataaattacttgcatagtcactagctgtaaacctcagctggattctctgaaatggattttatctataataaaactgacattttaatccctacttgtctaacttaggtgtttctctcttaattccaacttgggtagaagatgactggtgcctgttagcctctaccacatagragataaaatatccaattagacagaggtaaaagaaaatggtttcaccaatccaaaggcccattaaaaagtcctccaaagaaagcttatgcttcatataccttggacttggaaattaggttggccctgaaataatcaaggtcccagggtagcaaatagaaaaattttaggatgctttagatcacatgttgacaaactgtggcccactgggtcaaatcaggcccatcacctgttttca

SEQ ID NO: 54148 - DNA, 619 bp, Homo sapiens
agttgggtagctgatggcaagtgggaatgaaggtaattgattaagcagcagcacctgtgttcctgatatgtacccagtccagtgctagatacagtaaaaatgtaaaagtttagggcaaggtcccatcctctacccagttttgaggactacataacatagttgaagggagaagtttcatgtaaaggaagtaagataagtatataaaagaataagcacatagatgctaagggatttggcacaggctgtaaatgctgtagtccctcaaatgaggaagagttcactgtcactgagaatatcctggaaggtaagacttcatctgggccttggagctgcataggaattagactggtgcaggaaatggtgagacttggaaatgagaatggataattagaaatttgtcatgtggaaatcaaacacacatgcatacctatgtatacatattacactacagaaacaataacccaakactacttcattttcctttaattccctaataactaaacagtacctgattgtgggttccagtagtgatgtacattgacatcttgtagtaagaccttttttcctatcctaagaggatggacaatacatcttcaaaagccagagtggttggccaggc

SEQ ID NO: 54149 - DNA, 619 bp, Homo sapiens
agttgggtagctgatggcaagtgggaatgaaggtaattgattaagcagcagcacctgtgttcctgatatgtacccagtccagtgctagatacagtaaaaatgtaaaagtttagggcaaggtcccatcctctacccagttttgaggactacataacatagttgaagggagaagtttcatgtaaaggaagtaagataagtatataaaagaataagcacatagatgctaagggatttggcacaggctgtaaatgctgtagtccctcaaatgaggaagagttcactgtcactgagaatatcctggaaggtaagacttcatctgggccttggagctgcataggaattagactggtgcaggaaatggtgagacttggaaatgagaatggataattagaaatttgtcatgtggaaatcaaacacacatgcatacctatgtatacatattacactacagaaacaataacccaatactacttcattttcctttaattccctaataactaaacagtacctgattgtgggttccagtagtgatgtacattgacatcttgtagtaagaccttttttcctatccyaagaggatggacaatacatcttcaaaagccagagtggttggccaggc

SEQ ID NO: 54150 - DNA, 732 bp, Homo sapiens
ggctcagcaaaagacagctgctggtattttccctcttgccctttccattctgtaggcatgaatttcttacaaggcccaaacttttattgagatcttcctccagtaagtggaaacacagtagtagacatttcagtcatcattttaaatcaagtaaagacttgaagacaagaaggtttaattatctaagtttgtcactcatcactgttatcaayagatgtctttctaaggcttccaatatgcaagaccaaattgtaagtcttttcacactcttcatctgaaggtgtggaccagctcaccctgtgccttcgcatgtgtcaccaacaagtccatagggttggctggcggcaatgactgatattctagtagggtaagggaaagtgtgaatattaaacactgatttctcaagtcagcttaatgtgaagaaagcagtttcaacttgtcagtgacttagagaaatcctcttctagggaatatgaagggaaagaattgcagttcacacaatcccgtttaaagattctgttatgttttggaaaaaaagacttcaaagaaaacatgagacacaataaagagatgggaaataaaaatgatgacaagaccaatattgataagatataataaatttgtaattggctttgctgttttacagaagacccttcataaagcttatctgatcttcaatgtagccctatgcaataagtattgatattaattattttataaatagaaaaaatg

SEQ ID NO: 54151 - DNA, 732 bp, Homo sapiens
ggctcagcaaaagacagctgctggtattttccctcttgccctttccattctgtaggcatgaatttcttacaaggcccaaacttttattgagatcttcctccagtaagtggaaacacagtagtagacatttcagtcatcattttaaatcaagtaaagacttgaagacaagaaggtttaattatctaagtttgtcactcatcactgttatcaacagatgtctttctaaggcttccaatatgcaagaccaaattgtaagtcttttcacactcttcatctgaaggtgtggaccagctcaccctgtgccttcgcatgtgtcaccaacaagtccatagggttggctggcggcaatgactgatattctagtagggtaaggkaaagtgtgaatattaaacactgatttctcaagtcagcttaatgtgaagaaagcagtttcaacttgtcagtgacttagagaaatcctcttctagggaatatgaagggaaagaattgcagttcacacaatcccgtttaaagattctgttatgttttggaaaaaaagacttcaaagaaaacatgagacacaataaagagatgggaaataaaaatgatgacaagaccaatattgataagatataataaatttgtaattggctttgctgttttacagaagacccttcataaagcttatctgatcttcaatgtagccctatgcaataagtattgatattaattattttataaatagaaaaaatg

SEQ ID NO: 54152 - DNA, 732 bp, Homo sapiens
ggctcagcaaaagacagctgctggtattttccctcttgccctttccattctgtaggcatgaatttcttacaaggcccaaacttttattgagatcttcctccagtaagtggaaacacagtagtagacatttcagtcatcattttaaatcaagtaaagacttgaagacaagaaggtttaattatctaagtttgtcactcatcactgttatcaacagatgtctttctaaggcttccaatatgcaagaccaaattgtaagtcttttcacactcttcatctgaaggtgtggaccagctcaccctgtgccttcgcatgtgtcaccaacaagtccatagggttggctggcggcaatgactgatattctagtagggtaagggaaagtgtgaatattaaacactgatttctcaagtcagcttaatgtgaagaaagcagtttcaacttgtcagtgacttagagaaatcctcttctagggaatatgaagggaaagaattgcagttcacacaatcccrtttaaagattctgttatgttttggaaaaaaagacttcaaagaaaacatgagacacaataaagagatgggaaataaaaatgatgacaagaccaatattgataagatataataaatttgtaattggctttgctgttttacagaagacccttcataaagcttatctgatcttcaatgtagccctatgcaataagtattgatattaattattttataaatagaaaaaatg

SEQ ID NO: 54153 - DNA, 732 bp, Homo sapiens
ggctcagcaaaagacagctgctggtattttccctcttgccctttccattctgtaggcatgaatttcttacaaggcccaaacttttattgagatcttcctccagtaagtggaaacacagtagtagacatttcagtcatcattttaaatcaagtaaagacttgaagacaagaaggtttaattatctaagtttgtcactcatcactgttatcaacagatgtctttctaaggcttccaatatgcaagaccaaattgtaagtcttttcacactcttcatctgaaggtgtggaccagctcaccctgtgccttcgcatgtgtcaccaacaagtccatagggttggctggcggcaatgactgatattctagtagggtaagggaaagtgtgaatattaaacactgatttctcaagtcagcttaatgtgaagaaagcagtttcaacttgtcagtgacttagagaaatcctcttctagggaatatgaagggaaagaattgcagttcacacaatcccgtttaaagattctgttatgttttggaaaaaaagacttcaaagaaaacatgagacacaataaagagatgggwaataaaaatgatgacaagaccaatattgataagatataataaatttgtaattggctttgctgttttacagaagacccttcataaagcttatctgatcttcaatgtagccctatgcaataagtattgatattaattattttataaatagaaaaaatg

SEQ ID NO: 54154 - DNA, 732 bp, Homo sapiens
ggctcagcaaaagacagctgctggtattttccctcttgccctttccattctgtaggcatgaatttcttacaaggcccaaacttttattgagatcttcctccagtaagtggaaacacagtagtagacatttcagtcatcattttaaatcaagtaaagacttgaagacaagaaggtttaattatctaagtttgtcactcatcactgttatcaacagatgtctttctaaggcttccaatatgcaagaccaaattgtaagtcttttcacactcttcatctgaaggtgtggaccagctcaccctgtgccttcgcatgtgtcaccaacaagtccatagggttggctggcggcaatgactgatattctagtagggtaagggaaagtgtgaatattaaacactgatttctcaagtcagcttaatgtgaagaaagcagtttcaacttgtcagtgacttagagaaatcctcttctagggaatatgaagggaaagaattgcagttcacacaatcccgtttaaagattctgttatgttttggaaaaaaagacttcaaagaaaacatgagacacaataaagagatgggaaataaaaatgatgacaagaccaatattgataagatataataaatttgtaattggctttgctgttttacagaagacccttcataaagcttatctgatyttcaatgtagccctatgcaataagtattgatattaattattttataaatagaaaaaatg

SEQ ID NO: 54155 - DNA, 543 bp, Homo sapiens
tgatcctggagctgccacttctcctttacttccacgtactgtttctacccattcccccagcccaacacctccaggcgtgactcttttctagccagatcctcagccaaatgctagaaacacaatgctgtaagcagacaaggagggaaaaatcaaagtgcaggcagtaagcctcctaccctgcagcaaatcatacatggacaaacgcagggtccattcatcctttctttcacactgttgttgttgctcatctctatttcatctcaactactccaaagacaggaggaggccaaggtctatagtattttaaaggagagttctcayactctagactaataaagccaaagtaaattgctgttaagaatcatttagtgaggtttaactacagcatctaatagatgtgcctgctaatctctcccccatgggacccaatgatagttgcatctagtagtaactccattgattatgtaagcgtaatttgtgccaagtcatagtatgatattataataaccattttgtactaagcacctattatttgataatccc

SEQ ID NO: 54156 - DNA, 572 bp, Homo sapiens
gggtctcccagattgattgggtgggggctgtgctgtgtggagaagttgtggctgactgacccaaaaagtgaataaaatacaaagaatataaaatgactgggtcttcttcaatattacaaaggtattgaatagatttttggagatgtagaaattgtgcatggctttatttatcactcttaggaagccatagacatagaagccaatgacaataaaaataacttcatgttaacacttctcccctgaagaactccaagcatgtttatataattgytgcaagtttatcattgcaatgcccttgcactgtgaagaagggaggtgtgtgtcatctctccccattagcctgacggagaaactgccatctgaagaagcagggatctgctcaaagtgtgaaggtgagccaggggcagagctggcactaggaattaagccagcctcaccccagactgggtgttccttgaggcctgtgagacatgagaaaacctaggatttgggagctctgtcccccaacacattaatagttccagagtgcatgctctaataaagaatatctttatctctttttatgtcacttg

SEQ ID NO: 54157 - DNA, 1853 bp, Homo sapiens
tcctggaaactttgttcaccctgactcctgccctcttgactttctctgagaacacttttcactgaaggatcctttcaaatgtatctaaaaattgccaaccacttgttaaagtgtaagcaggtgcatacatctccttctcctttagattaatgattgcagatattctttccagtatggggcacattttagaattttaccttgctgtgtgcagcagggcagaagaatgggcctacatccattgctgaacctcctctttctatccttattgttacaaaattcacctccttggttaactgaactagcaacacaaatcatccctacctatttgcattttgctgttacaaaatrtagagatggtttgtccaccctgtcccatgcaattgtgaccaggagaaacgctctggctcctggtacaaagagatagtctggaggcatcccagtagaacgcagaatgcagggaggaattacgtccctcaatcctctggtctgcagtaatcttatttccattatttttcatgctttctggtgctgccaacaaatgttgcaaaggcaagagccgatctttgacattctcgactgcctaaagtgcagcaaagagctgctttaatcccccttttgtgcctgcaatgactagaagaaaatttttgatcccatgcttggactgactaatggtgcattttgagtggcagccttccacttctgcagaaactgtaaaactcaaccaaacctggaaacatttgaagtttctgggttcaagaaccatgggttcagagaccctcacctccatgaatatgacttgttggacattcaatgactgtgcagtagagacaacaggggtgagtgtttagatagacccagtagctctgcctgctgagcccctctgccagtactctaacttcaatggatgtgcatgattcttccgttgtagcaaatatcattgtagtaaaaagtaatacatctcctcgtttaagtgacagcaggtagggtttgttactttaattcactttgcctttctcttctgaaaattaattgagtcagatactgaatctggagcctaactccttggcagctgagcaggagacaggaggatcatcatctgctatagagagttcttgagaagccaggaatagttaagaggaaattgaggcaacttggaaaggcaaagcaggtcaccagaagtggtaggagagagatcttcaagcagcacagcagttaaagaactttatagcctcttcccaacaaatgctcattgtcgcacttcctgtcacctctctctcctgcatccctctctatctatgttccaggcacacgggactttgcattacttccaaaggtcatggtcaccgtcacaatttccatgaccttactcatgctggcaactctgcttgaaacgtccttaactcatcttctccacctggaaaaaatccaaacctttgatgaagtttgggtaaagtcactttctgcagtggagaatgctccaggaagaatgtattgttcttacgtcagcactcccataaaacctctattttagcatttacttccttacacatagactttttccattcccacttcacactgtgaggatctcctggacaagcattagtctcagaacttatgtttggaactcttacacaggctggattttctaaaagctactaaaaaaatgcttgtttgaaattaaagatccaatgttagaaagtatgttatattaaaaaatggccatcctatattacccagaatcaaaattggaatggagaggtggagacataggttttgaatcgatacaaagaactttctgatcactggagcagttcaacaatggaagcttctcaaagacatgagccccctgttcc

SEQ ID NO: 54158 - DNA, 1853 bp, Homo sapiens
tcctggaaactttgttcaccctgactcctgccctcttgactttctctgagaacacttttcactgaaggatcctttcaaatgtatctaaaaattgccaaccacttgttaaagtgtaagcaggtgcatacatctccttctcctttagattaatgattgcagatattctttccagtatggggcacattttagaattttaccttgctgtgtgcagcagggcagaagaatgggcctacatccattgctgaacctcctctttctatccttattgttacaaaattcacctccttggttaactgaactagcaacacaaatcatccctacctatttgcattttgctgttacaaaatatagagatggtttgtccaccctgtcccatgcaattgtgaccaggagaaacgctctggctcctggtacaaagagatagtctggaggcatcccagtagaacgcagaatgcagggaggaattacgtccctcaatcctctggtctgcagtaatcttatttccattatttttcatgctttctggtgctgccaacaaatgttgcaaaggcaagagccgatctttgacattctcgactgcctaaagtgcagcaaagagctgctttaatcccccttttgtgcctgcaatgactagaagaaaatttttgatcccatgcttggactgactaatggtgcattttgagtggcagccttccacttctgcagaaactgtaaaactcaaccaaacctggaaacatttgaagtttctgggttcaagaaccatgggttcagagaccctcacctccatgaatatgacttgttggacattcaatgactgtgcagtagagacaacaggggtgagtgtttagatagacccagtagctctgcctgctgagcccctctgccagtactctaacttcaatggatgtgcatgattcttccgttgtagcaaatatcattgtagtaaaaagtaatacatctcctcgtttaagtgacagcaggtagggtttgttactttaattcactttgcctttctcttctgaaaattaattgagtcagatactgaatctggagcctaactccttggcagctgagcaggagacaggaggatcatcatctgctatagagagttcttgagaagccaggaatagttaagaggaaattgaggcaacttggaaaggcaaagcaggtcaccagaagtggtaggagagagatcttcaagcagcacagcagttaaagawctttatagcctcttcccaacaaatgctcattgtcgcacttcctgtcacctctctctcctgcatccctctctatctatgttccaggcacacgggactttgcattacttccaaaggtcatggtcaccgtcacaatttccatgaccttactcatgctggcaactctgcttgaaacgtccttaactcatcttctccacctggaaaaaatccaaacctttgatgaagtttgggtaaagtcactttctgcagtggagaatgctccaggaagaatgtattgttcttacgtcagcactcccataaaacctctattttagcatttacttccttacacatagactttttccattcccacttcacactgtgaggatctcctggacaagcattagtctcagaacttatgtttggaactcttacacaggctggattttctaaaagctactaaaaaaatgcttgtttgaaattaaagatccaatgttagaaagtatgttatattaaaaaatggccatcctatattacccagaatcaaaattggaatggagaggtggagacataggttttgaatcgatacaaagaactttctgatcactggagcagttcaacaatggaagcttctcaaagacatgagccccctgttcc

SEQ ID NO: 54159 - DNA, 1853 bp, Homo sapiens
tcctggaaactttgttcaccctgactcctgccctcttgactttctctgagaacacttttcactgaaggatcctttcaaatgtatctaaaaattgccaaccacttgttaaagtgtaagcaggtgcatacatctccttctcctttagattaatgattgcagatattctttccagtatggggcacattttagaattttaccttgctgtgtgcagcagggcagaagaatgggcctacatccattgctgaacctcctctttctatccttattgttacaaaattcacctccttggttaactgaactagcaacacaaatcatccctacctatttgcattttgctgttacaaaatatagagatggtttgtccaccctgtcccatgcaattgtgaccaggagaaacgctctggctcctggtacaaagagatagtctggaggcatcccagtagaacgcagaatgcagggaggaattacgtccctcaatcctctggtctgcagtaatcttatttccattatttttcatgctttctggtgctgccaacaaatgttgcaaaggcaagagccgatctttgacattctcgactgcctaaagtgcagcaaagagctgctttaatcccccttttgtgcctgcaatgactagaagaaaatttttgatcccatgcttggactgactaatggtgcattttgagtggcagccttccacttctgcagaaactgtaaaactcaaccaaacctggaaacatttgaagtttctgggttcaagaaccatgggttcagagaccctcacctccatgaatatgacttgttggacattcaatgactgtgcagtagagacaacaggggtgagtgtttagatagacccagtagctctgcctgctgagcccctctgccagtactctaacttcaatggatgtgcatgattcttccgttgtagcaaatatcattgtagtaaaaagtaatacatctcctcgtttaagtgacagcaggtagggtttgttactttaattcactttgcctttctcttctgaaaattaattgagtcagatactgaatctggagcctaactccttggcagctgagcaggagacaggaggatcatcatctgctatagagagttcttgagaagccaggaatagttaagaggaaattgaggcaacttggaaaggcaaagcaggtcaccagaagtggtaggagagagatcttcaagcagcacagcagttaaagaactttatagcctcttcccaacaaatgctcattgtcgcacttcctgtcacctctctctcctgcatccctctctatctatgttccaggcacacgggactttgcattacttccaaaggtcatggtcaccgtcacaatttccatgaccttactcatgctggcaactctgcttgaaacgtccttaactcatcttctccacctggaaaaaatccaaacctttgatgaagtttgggtaaagtcactttctgcagtggagaatgctccaggaagaatgtattgytcttacgtcagcactcccataaaacctctattttagcatttacttccttacacatagactttttccattcccacttcacactgtgaggatctcctggacaagcattagtctcagaacttatgtttggaactcttacacaggctggattttctaaaagctactaaaaaaatgcttgtttgaaattaaagatccaatgttagaaagtatgttatattaaaaaatggccatcctatattacccagaatcaaaattggaatggagaggtggagacataggttttgaatcgatacaaagaactttctgatcactggagcagttcaacaatggaagcttctcaaagacatgagccccctgttcc

SEQ ID NO: 54160 - DNA, 1853 bp, Homo sapiens
tcctggaaactttgttcaccctgactcctgccctcttgactttctctgagaacacttttcactgaaggatcctttcaaatgtatctaaaaattgccaaccacttgttaaagtgtaagcaggtgcatacatctccttctcctttagattaatgattgcagatattctttccagtatggggcacattttagaattttaccttgctgtgtgcagcagggcagaagaatgggcctacatccattgctgaacctcctctttctatccttattgttacaaaattcacctccttggttaactgaactagcaacacaaatcatccctacctatttgcattttgctgttacaaaatatagagatggtttgtccaccctgtcccatgcaattgtgaccaggagaaacgctctggctcctggtacaaagagatagtctggaggcatcccagtagaacgcagaatgcagggaggaattacgtccctcaatcctctggtctgcagtaatcttatttccattatttttcatgctttctggtgctgccaacaaatgttgcaaaggcaagagccgatctttgacattctcgactgcctaaagtgcagcaaagagctgctttaatcccccttttgtgcctgcaatgactagaagaaaatttttgatcccatgcttggactgactaatggtgcattttgagtggcagccttccacttctgcagaaactgtaaaactcaaccaaacctggaaacatttgaagtttctgggttcaagaaccatgggttcagagaccctcacctccatgaatatgacttgttggacattcaatgactgtgcagtagagacaacaggggtgagtgtttagatagacccagtagctctgcctgctgagcccctctgccagtactctaacttcaatggatgtgcatgattcttccgttgtagcaaatatcattgtagtaaaaagtaatacatctcctcgtttaagtgacagcaggtagggtttgttactttaattcactttgcctttctcttctgaaaattaattgagtcagatactgaatctggagcctaactccttggcagctgagcaggagacaggaggatcatcatctgctatagagagttcttgagaagccaggaatagttaagaggaaattgaggcaacttggaaaggcaaagcaggtcaccagaagtggtaggagagagatcttcaagcagcacagcagttaaagaactttatagcctcttcccaacaaatgctcattgtcgcacttcctgtcacctctctctcctgcatccctctctatctatgttccaggcacacgggactttgcattacttccaaaggtcatggtcaccgtcacaatttccatgaccttactcatgctggcaactctgcttgaaacgtccttaactcatcttctccacctggaaaaaatccaaacctttgatgaagtttgggtaaagtcactttctgcagtggagaatgctccaggaagaatgtattgttcttacgtcagcactcccataaaacctctattttagcatttacttccttacacatagactttttccattcccacttcacactgtgaggatctcctggacaagcattagtctcagaacttatgtttggaactcttacacaggctggattttctaaaagstactaaaaaaatgcttgtttgaaattaaagatccaatgttagaaagtatgttatattaaaaaatggccatcctatattacccagaatcaaaattggaatggagaggtggagacataggttttgaatcgatacaaagaactttctgatcactggagcagttcaacaatggaagcttctcaaagacatgagccccctgttcc

SEQ ID NO: 54161 - DNA, 583 bp, Homo sapiens
gcacacttttccaagaaagcagccaggtcttctatgttctcttgcttacgcagacgagatgtgttcctcatagacacgcttccttcctggcgtttgttttctaaggctgggctccttggaggaattgggttgggggaggtggaagggggacgtccaaggggagtgatggccgtggtggggagtggggtggagggtctcgggcctgggagcaggggcaggtccctaccctctggcgagagggtctttgtagtgctgtttgctctgcctgaaggttctttcccccaggtatttgtatgacktcttcacttaagcaaagtgttatttctcgagatcttcctgaccagtctgtctaaatggcagccttcattagtttccttcatgtcacctgataggtgcttcttcttggctcaagaactacctgacatatgatatatgtattttattatggtttattattatttgtcccactcctagaatgtaaaagtcccagatttttgcccatgttggttcactgctctatccccagtgcctacatcactcaatggcatcttatgatgaagaattttatgtgtcagcttggcta

SEQ ID NO: 54162 - DNA, 2253 bp, Homo sapiens
ctcgaggaatcgcctaaccctggggaggttgaggttgcagtgagtgagccatagttgtgtcactgtgctccagtctgggcgaaagacagaatgaggccctgccacaggcaggcaggcaggcaggcaggcagaaagacaacagctgtattatgttcttctcagggtaggaagcaaaaataacagaatacagcacttaattaattttttttttttccttcggacggagtttcactcttggtgcccacgctggagtgcagtggcaccatctcggctcaccgcaacctccacctcccgcgttcaagcgattctcctgcctcagcctcctgagtagctgggattacagggaggagccaccacacccagctgattttgtattgttagtagagacggcatttctccatgtgggtcaggctggtctcgaactggcgaccccagtggatctgcccgccccggcctcccaaagtgctggggtgacaggcgtgagccatcgtgactggccggctacgtttatttatttatttttttaattattttacttttttttagttttccattttaatctatttatttatttacatttatttatttatttatttatttacttatttatttattttcgagacagactctcgctctgctgcccaggctggagtgcagcggcgtgatctcggctcactgcaacgtccgcctcccgggttcacgccattctcctgcctcagcctcccaagtagctgggactacaggcgcccgccaccgtgcccggctaactttttgtattttgagtagagatggggtttcactgtggtagccaggatggtctcgatctcctgaccccgtgatccgtccacctcggcctcccaaagtgctgggatgacaggcgtgagccaccggccccggcctatttatctatttattaactttgagtccaggttatgaaaccagttagtttttgtaattttttttttttttttttttttttgagacgaggtttcaccgtgttgccaaggcttggaccgagggatccaccggccctcggcctcccaaaagtgcggggatgacaggcgcgagcctaccgcgcccggaccccccctttccccttcccccgcttgtcttcccgacagacagtttcacggcagagcgtttggctggcgtgcttaaactcattctaaatagaaatttgggacgtcagcttctggcctcacggactctgagccgaggagtcccctggtctgtctatcacaggaccgtacacgtaaggaggagaaaaatcgtaacgttcaaagtcagtcattttgtgatacagaaatacacggattcacccaaaacacagaaaccagtcttttagaaatggccttagccctggtgtccgtgccagtgattcttttcggtttggaccttgactgagaggattcccagtcggtctctcgtctctggacggaagttccagatgatccgatgggtgggggacttaggctgcgtccccccaggagccctggtcgattagttgtggggatcgccttggagggcgcggtgacccactgtgctgtgggagcctccatccttccccccaccccctccccagggggatcccaattcattccgggctgacacgctcactggcaggcgtcgggcatcacctagcggtcactgttactctgaaaacggaggcctcacagaggaagggagcaccaggccgcctgcgcacagcctggggcaactgtgtcttctccaccgcccccgcccccacctccaagttcctccctcccttgttgcctaggaaatcgccactttgacgaccgggtctgattgacctttgatcaggcaaaaacgaacaaacagataaataaataaaataacacaaaagtaactaactaaataaaataagtcaatacaacccattacaatacaataagatacgatacgataggatgcgataggatacgataggatacaatacaataggatacgatacratacaatacaatacaatacaatacaatacaatacaatacaatacaatacaatacaatacgccgggcgcggtggctcatgcctgtcatcccgtcactttgggatgccgaggtggacgcatcacctgaagtcgggagttggagacaagcccgaccaacatggagaaatcccgtctcaattgaaaatacaaaactagccgggcgcggtggcacatgcctataatcccagctgctaggaaggctgaggcaggagaatcgcttgaacctgggaagcggaggttgc

SEQ ID NO: 54163 - DNA, 531 bp, Homo sapiens
ctgggcatggtggtgcatgcctgtagtcccagctacttgggagactgaggcaggagaattgcttgaacctgggaggcggaggttacagggagccaagatcrtgccactgcactctagcctgggtgacagagcgagactccagctcagggaaaaaaaaaaaacagaggctggagacccctctggttgcatacaaacggctcacaagatagatggcctggcttcgctggcttggggtttcccacttcttaattttcaaaaggagtatgaatgaagctgtcaacattttcaaaatcaggaggtgttatgtcaaaatccagatatccagcttctcttgacaaactggagactgcggccatactgaggtccatgttctcctgcagcagcagttagaagaagctggaatctgtgctttctgatttgccccagtctctaccaggccctgccatctccctggcacaaaagctgaatgtcccatggactgcatgtattagcatgcctgcactgttgttttaatagaagagaatggtttct

SEQ ID NO: 54164 - DNA, 1169 bp, Homo sapiens
  misc_feature (1)...(1169): n = A,T,C or G
taaatcactctggtgagcaatgcaaaggcaatgcaaggatatgcatgaatcagagtctccttcctcctttatgcaatgagatcgggaagaatgaaaatagttaaggagatagtctctagggctttgatctcaaatagcactaaatgctaaaagcttggagtgagaatggagttttaagtgcattctggaagctttatgactgtaataagagattcagatgagttgattttattcaatctcagacacagatgcatagattctatagatatttttgaattaaaatttggtgaggaccaaccctagagaaacctgtgcccatgagctcaacattcatgtcntagaatgttcataggaacattgttaaagacagccctaaaatggaaacagcctaaatgtgcctctgctctagwcctgataaatgcattgcatactcacaggataaaacactatacagcagtgagaataaaggtagtagagctacatgcatttatgagagtgaaactaaatacataatacggagcagaagaagcaaaaatagaaagaatatatacagtataattaaatttatacagggttcaataatagtcaaaatgatactctattgttaaggggcacagctgtaggttgtaaaattaaaaaggaagtcaagaaaaagttatctcaaaagcctgaggggaggtagagagttatgatggggaaatgaccctggggctccttgggatattgagaatgctctgttcatgacctaggtggcaggtgcccggatatttgcttactatttagtaagtagtatatttacatttttgctcttttcttctgtattgatatttcataataaagtatttttaaagttagaaaaagcctttgatcataataaatgaaaaaaggtgtcatggggaaaagcttaagggagggaaattccacaatatgccaaggctttttttttgagatggagtctcacactgtcccccaggctggagtgcaatggcacagtcttggctcactgcaacctccgcctcctgggttcaagcgattctcctgtctcagcctcccaagtagctgggattataggcatgtaccaccatgcccggctaatttttgtatttttacaaaattacaacatggctttgccatgttggccaggctcgtctcgaactcctgacctcaga

SEQ ID NO: 54165 - DNA, 1381 bp, Homo sapiens
ctaatttttgttgttgttgttgtttgttttttttttgatagagaagaagtttcaccatgttatccaggctggtctcaaactatacaattattatttgtcaattaaaaatttaaaaagataaccacaaaaaaggtaatcatgtatgtcactgtttttctttgagaccttctattatgtttatgcttggtctatcctccatacctacgatatccttatacacccctaatcttgatagtctttacaatttaattatcagctataatatttaaaccatgtgaactttgttgcattatgccaggtgatatttttcacttaaaattttttcagctaaccaattttctcaataccgtttgttttcaaaacatccattcctctctccatttatgtgtgaaggttcttttataaattactaagtttttatatgagaawgtatttctgagcattcaatttggttttcacaattctacaaatgacacacactgtttttaaaattactacattttaagtggctgggaggttaatcccatgtccctaagccccccaaatccctctttttaaactttccttagataatattggctgtgtttattttgaaattaaatcttcaatcatattattaaggtctagggtgatatctaattcccaatttcatacttgatagctttacagctcttaatttgaaaagaattagcatcttaatattattcaatctttccttccaggaacatgatatatttttccatgtcttctataattctcacaatatttctgatatttactctttgtagactcaaccttttaattaggtcattccttagtatggttttgttattttgtgaataaggtctagcttttttcaactatatccttaaatagttattgctatccttcagaagaaacgcttctagttttcttattgatcagtctattgaaattatgtctgcactactaaatgatttagttagtgttccctgattcttgtgcattttgataatttcacaatcttttaaaaatttataacaagagttaaaattttatatctgctataggtcttcagatttctggtacagtatgacattaagtaatacttctgtatatttgtctccagttcagggttgcgggtggatagagcctcaattttgagtttgtacttcaataacacaacttcaacaaagttttacagtgaaagacatatttttcaaggaaaaaatgtgaagcaacattcaaaataatacttattaagttttgtggttcacaaaggaagtcttctatctaatcaagattccttatttctcttaaatcaacgaaactttcctttgctcagctacacacaaatgaatcagaggcaggattcgtacctgccacttcaaatgatgccaac

SEQ ID NO: 54166 - DNA, 1220 bp, Homo sapiens
cccccgaaaagactcagggatttttctccctgttgcccccagcctaccctgtgttctgacaccagccacacagaattgaaaaagcctgttcagtatcagtctccctaaccacctgggagcaatttgagaggagcgacagagtcctgttcatctgcgtctccagtgcccagaatgatgcctggcaccatgaaatgcaccacaaatattggttgagctaattaatttcaaataaaaacagaaccgaaaccaactggctggatgctagaaaccgtcacaggctggagaagaaggaggaaagggaacaggaatgggctgtttcttgaacccagaagaaacctggaccaggtgtgacccagattctagtccaggctcagccacaaactgctttgaccttgaaaaaaggcaactctagtcactggatccagcctctctccctacaaattcaatcctctctaagttccctttcatttctaaagcactttgtagaaggaggccattgactaaggtcagggttctagtcctcccatcttcctttcagctcaggaccaagcctttctaggaaaaaacacacctccaggagagggcatattgttatctccccagacaagcctctaatgggctgcacagcttgaggcaaagaagagaacaattgttttaggcatgcatgcctcatgatccagccttattaccagcaggttttccatcctatttgtttccttctgagtgatttgagacattcattcagcatcagcaacacttacaagaaatatgagaggaaataaatttgccacagacactatacaccatgctgcagtaattacaaactgctgtcctgaaagcagcctggggtagttgaagcatatgaatgcataatgctggggaggaggaaagataaaaaaagagagaaagaaggaagaggaggagaaggagggaagatgggagggaaggaaaatagaccccaccgattatcartgatctatatggcaagcacaatgccaggcttctcaccggtgcaacctcatgtaattctttcaggattcatatgaaataagatgattgttgacttcaggttatggaagagaaagagagatgaaaagtagaaaaacagatacagcaacagtagaatagaacaatgagaaatgagtcaaatcaccctgcagaagctccgaaaggccctcatgcagagcgccgggtacttaggaaggtaggagcaaggctga

SEQ ID NO: 54167 - DNA, 632 bp, Homo sapiens
tgctcatttccttgactagatcacctcatgtgaaaggtatggattggttttgcttttacccagttagctcccatgcctayctcagtacctggcacataatcatcatctactgaaagtggaatgaccacttcagaagggcaccctgggtaagatttctctttctgtttttacagctatgttattttatcttttgaaaacaatggtgactacatggacatgaagcaggctgatactacacagtatgtccccatgctagaaaggaaagaggtttctaaatattccgacatccagagatcactctatgatcgtccagcctcatataagaagaaatctatgttaggtaaaagtgtctatactcactctgggtgttgggactttccagtggtttaatatgatacttaaagtatttagagggaagtgtatagggatggtaagtgaacctggcagcccacgtggtctctaaatgcaggtctgcacaaccagttctgtgacatgtttccaggtttgtggcctgtaaattgaaaagaataaaagctgacaatgtaacaaattttttaaactttaaatttaatagttttaaagaattttcttggtgtgttcctgcagtaaacattttttaaaaaaaataatta

SEQ ID NO: 54168 - DNA, 632 bp, Homo sapiens
tgctcatttccttgactagatcacctcatgtgaaaggtatggattggttttgcttttacccagttagctcccatgcctacctcagtacctggcacataatcatcatctactgaaagtggaatgaccacttcagaagggcaccctgggtaagatttctctttctgtttttacagctatgttattttatcttttgaaaacaatggtgactacatggacatgaagcaggctgatactacacagtatgtccccatgctagaaaggaaagaggtttctaaatattccgacatccagagatcactctatgatcgtccagcctcatataagaagaaatctatgttaggtaaaagtgtctatactcactctgggtgttgggactttccagtggtttaatatgatacttaaagtatttagagggaagtgtatagggatggtaagtgaacctggmagcccacgtggtctctaaatgcaggtctgcacaaccagttctgtgacatgtttccaggtttgtggcctgtaaattgaaaagaataaaagctgacaatgtaacaaattttttaaactttaaatttaatagttttaaagaattttcttggtgtgttcctgcagtaaacattttttaaaaaaaataatta

SEQ ID NO: 54169 - DNA, 550 bp, Homo sapiens
ccatgttggccaggcaggttttgaactcctgacctcaggtgattcgccacctcggcctcccaaagtgctgggattacaggcgtgagccatcgcgcctagcccatttccattttctatcccacacagtttgggaagggttgactccaggattctggatggaaaaggactctcaggcttcaatcagcacccgcattccccaggccaatcaaatagcctcaggactttgggtgaagcgcctgcattttagctggactttaacctaggggaaggctggagaasctgggagcacctaggatcctaagaacaaagcttgcatggcaaaagatagggttaaaagatgcagaagtaagtgagagctaaataatgtgtacacatggacgtagagtatggaacaatagacattggagacttggaaaggtgagagagtggaagtggggagggtgacgatcaattacctcatgggtacaatgtacagtatttgggtgatggacatgctaaaaaccaagagttcactactagacaatatgtgtgtgtaacaaaattgcacttg

SEQ ID NO: 54170 - DNA, 554 bp, Homo sapiens
atttttagtagagttggggtttcgccatgttggccaggctggtcttgaactcctgacctcaggtgatccacccacctcggcctcccaaagtgctgggattataggtgtgagccaccrcgccccagccctgagctatccttactcggcaggctgtagttgcctagtctctaatgtgggttgaatggttgcaatttcatagaatgttgggagaattcactgagatgtcatatgtgaagtgagtaccccccaaatggccagtccccttctcttttccttctccatgtgcatagggtgggcaagctgattgagtacagggcctatgttgtatatatctgtattttcccaggacctggaacatagtagatgcttagaaaatattaacggaaggatgagagaataagccaattaatgagaggcattgggttgcattttcactcttgggcttgataacttaggtcttaggatgatgaaagtgatcttgcggattggggccagactatgccaatggcggtcaatggaatagcagcatggggagatggtgggaaatgcagaat

SEQ ID NO: 54171 - DNA, 2268 bp, Homo sapiens
tgtggtcccagcgtgggttctggatttcctttaccaaatgctgcagcacagatgacaaagtgcttttacgctccattataaaagaagaaatggaaatgaagtcagtaggtatcagatcagaagtcagtgggtatctctgtccatgaagatgtccacacagacattctctacctgtggacctgaaggagaacaggctgagtcccagggtagagtcgatgcgaacaagaggcccaggttggatctgtaaggtgatccatggccctgagcatcatggcagactaccctggagctaaaaccaggctgccctgaaagagttcgtgtagttgggaagtcaaaaggaaatttttctgcttttccaagagtggcaaaagtccaagataaaagaaagagtgttgagagtttatttctgtarataaaagggggagaaatggctaataaagatcagactgagtaggatttcactacatatgttaaaatatgccaactaacaatctcaaaaagtgttctgatcatttctacctttagccagtacgtcaaataagttagagtattatgaaacaacaaaaactttgttcaaataagcttcactgttctccactgtgtaactgtggaatataaatttgtatttgtatgttgtttttcttgcctatttttggtggattgagtgaaagttttagctttaaatagtggcagagcatgaaggactatattaggtatgaaaaatgaagaatgctgggaacatatgtggggggtaagaactagaagtgaggtcatctgagttggcattttgctgaacaaaagggcaatagacaccacatcccattttgttgtacagttctgaagtcttaaaccccttatttctaggatggacttgttttcattctttctgatgacaattgtgaaccagatggttaaaaacccagcactgagaaacagtcttatttagatattatgtttcttaaattcaggtacatcttgagggaatattgaagcttctagctgcaactgttatttatacatcttcttgtcaatttaaagcataaatttggtatatttaagagcattaaccctaagggccactgggatgagttccacgagatgaaagaaaaaaataaacctcaagtacatgtcagtaacttttcctgttgctgctggtagtcacctggaaactcaccatagtgtctctaccatatcgttctgtgaccctccccccacccagcacagcctccaaagcctgcctagagactcaagttcatgccagcctgactcacgcacagactcatgtggacactttaaaagtgaggcagctggagcccaatcttccttgattcatgaaaccactgttcatttagacattgatttaattatatttttcaacaattgcattaaagcccttagacttattccatataaatttttgaaaagccagtctcttcaacctaatcatgaaatttagtttagccaaatttaattcagcctgtcaagatcatctttctacttattacctattcccctctcgtgtgtatgccttctgcagaatcaataaacacaccactttgtttttccctaaaataaaaatgttgcagacacagtcggaacagggtactcctcaaattgagtaccttttattcacctatgattctgcttaacacttgtacatttagtacatagagaaatgtaaagaattttttcaaatgtctgaataacaatggagcagcagtatataaatattaataatacatttctgaataatacatttccattaaaatggaagatatctgtctttattgtctacttttattagatcccaaagaataatgtaataaactatccactgttcaacacaaatatcaaaagtttccaacttttaatgcattcaaaatttcttcagatgatatttttcctccattggcttattattttctcgttcaaattttctaaaatgaatcaaactgccttaagatgtacaatttaagatacattctggccaggcatggaggctcacacccataatcccagcactttgggagaccaaggcgggcagattacctgaggtcaagagttcgagaccagtgtggccaacatggtgaaaccccatttctactaaaaatactacaattagcctggcatgatggcacacaccggtaaccccagctactctgcaggatgaggcaggagaattgctcgaacctgggaggtggaggctgcggtgagccgagattgcaccactgcactccaccctggccaacagagcgagactctgtctca

SEQ ID NO: 54172 - DNA, 2268 bp, Homo sapiens
tgtggtcccagcgtgggttctggatttcctttaccaaatgctgcagcacagatgacaaagtgcttttacgctccattataaaagaagaaatggaaatgaagtcagtaggtatcagatcagaagtcagtgggtatctctgtccatgaagatgtccacacagacattctctacctgtggacctgaaggagaacaggctgagtcccagggtagagtcgatgcgaacaagaggcccaggttggatctgtaaggtgatccatggccctgagcatcatggcagactaccctggagctaaaaccaggctgccctgaaagagttcgtgtagttgggaagtcaaaaggaaatttttctgcttttccaagagtggcaaaagtccaagataaaagaaagagtgttgagagtttatttctgtagataaaagggggagaaatggctaataaagatcagactgagtaggatttcactacatatgttaaaatatgccaactaacaatctcaaaaagtgttctgatcatttctacctttagccagtacgtcaaataagttagrgtattatgaaacaacaaaaactttgttcaaataagcttcactgttctccactgtgtaactgtggaatataaatttgtatttgtatgttgtttttcttgcctatttttggtggattgagtgaaagttttagctttaaatagtggcagagcatgaaggactatattaggtatgaaaaatgaagaatgctgggaacatatgtggggggtaagaactagaagtgaggtcatctgagttggcattttgctgaacaaaagggcaatagacaccacatcccattttgttgtacagttctgaagtcttaaaccccttatttctaggatggacttgttttcattctttctgatgacaattgtgaaccagatggttaaaaacccagcactgagaaacagtcttatttagatattatgtttcttaaattcaggtacatcttgagggaatattgaagcttctagctgcaactgttatttatacatcttcttgtcaatttaaagcataaatttggtatatttaagagcattaaccctaagggccactgggatgagttccacgagatgaaagaaaaaaataaacctcaagtacatgtcagtaacttttcctgttgctgctggtagtcacctggaaactcaccatagtgtctctaccatatcgttctgtgaccctccccccacccagcacagcctccaaagcctgcctagagactcaagttcatgccagcctgactcacgcacagactcatgtggacactttaaaagtgaggcagctggagcccaatcttccttgattcatgaaaccactgttcatttagacattgatttaattatatttttcaacaattgcattaaagcccttagacttattccatataaatttttgaaaagccagtctcttcaacctaatcatgaaatttagtttagccaaatttaattcagcctgtcaagatcatctttctacttattacctattcccctctcgtgtgtatgccttctgcagaatcaataaacacaccactttgtttttccctaaaataaaaatgttgcagacacagtcggaacagggtactcctcaaattgagtaccttttattcacctatgattctgcttaacacttgtacatttagtacatagagaaatgtaaagaattttttcaaatgtctgaataacaatggagcagcagtatataaatattaataatacatttctgaataatacatttccattaaaatggaagatatctgtctttattgtctacttttattagatcccaaagaataatgtaataaactatccactgttcaacacaaatatcaaaagtttccaacttttaatgcattcaaaatttcttcagatgatatttttcctccattggcttattattttctcgttcaaattttctaaaatgaatcaaactgccttaagatgtacaatttaagatacattctggccaggcatggaggctcacacccataatcccagcactttgggagaccaaggcgggcagattacctgaggtcaagagttcgagaccagtgtggccaacatggtgaaaccccatttctactaaaaatactacaattagcctggcatgatggcacacaccggtaaccccagctactctgcaggatgaggcaggagaattgctcgaacctgggaggtggaggctgcggtgagccgagattgcaccactgcactccaccctggccaacagagcgagactctgtctca

SEQ ID NO: 54173 - DNA, 1078 bp, Homo sapiens
tctttccacatctgggttggttcatgttatggataaatataagcrtacacagaaaaactggacaatggattttaaaatcaagatataagaatgtaccgattaaaaaaaaaacagaaaagctaggcacagggatgaaaatagatgttggctttgaaacattcagtctctatatatgatgatgtctacatcgtaagattgttgtccaagcctaaattacgcattatttgagtgagctgctgatataaaaatgggagataattgaatgattgggggtggtttaccccatgctgttctcatggtagtgaataagtctcacaggatctgatagctttagaaactcctttcgcttggttctcgtttcttctcttacctaccactatgtaagacgtgccttttgccttctgccatgattttgaggcccccatagccacgtgaaattgtgagtccactaaacctctttttctttataaattacccagacttggggatgtctttatcagcagcatgaaaatggactaatacatgtagcctcagattctaggaacttggcaaaccctatttgaaggtgggagtgaagatggtgggtaacttgactttccctgtaattccagcataagtctagagaccagtgtcattggatcagaagcatagtatattcccttgaacaaattactgtgactctgactggccaagacttcttcccatgaccctgcctagaactagggactgatcactcccccaaatgcaatggacaaaggatgtgaaagggaagcaccctccaaggaaaactgaactgctgtgatcagaagaaaggagatagacgctgggcagggctccactacaaaatggctgctggaataaagaagaaagctctgaatagatcaagacgcacaacttagtggtgagtagaaatcagaacatttgaggtagaaagaataacaaatgcaaacgctggggtcagaaatgagcagtctatatgcatgaggtgaacagaacagcttgaagtggcctgtttgggaaaataatgaggaattaggttgattaggtggggcaagagaaaaactaattagtatcaaga

SEQ ID NO: 54174 - DNA, 621 bp, Homo sapiens
ctaaaactgtaactttcgacattgtcatagactatgttgcattgctgaaacagagtatcacagactggataatttatgaactaatttatttcttacagttctgaagtctgggaagttcaagatcaaggggccggtgtctggtgagggcctttttgctgtgtcataacatggtggagggcatcacatggcaagagggcaagagcgagccagctcaggtctctcttcctcttttaaagccaccagtcccatcatgggggccccgccctgatgaccatatccaatcctaattacctctygaaagtcctacctctaatcaacacatgaacttggggattaagtttttaacacgtgaaacataggggacccattctaatcatagcagacatgatttatgttttacttttccaattataggcatcttaaagtacggagaccatcttttatatttctctgtattttccacaacatttagcatagtcttatgtattcagcaagaactcaattcaacaaatatttaacacttcaatgaatacataaaaatgcaaagggctgcacatctgttagtaaaagtaacacagaatctagacaaaagtaaactgaatggtttttcttcataatgaa

SEQ ID NO: 54175 - DNA, 956 bp, Homo sapiens
ggatcccaccaactcattctaatcagtgatcactgaggaaatgcattgtattcctattcactatttcaaagatcaggcctacctcattggcatattaagaaagttttctcaagtatatttagtgtttatcattttactatagttcttcaaatgtctgacattcatcttttccctacctctaaattcctttctttttcacattatctttcttgattgctttttaatagaaaaacaaacaaagacatggatttactgtgcatattagcagatccatactggaaaatgcatggaggtttcatatacaccacttacagtaagtaataactcagagtataaagtcgaaaagaaagaatctgaaatattagacttgttctgaaataagcttacctaggatgataccactttcgcttaatcagaatttcccctttccaactatttaacagtggcaaatataaaaaatctggtagttaaaatacacagcagtcacttcatattactgcctccctcaacccactcaccttctgaagaacagggctttttcaagttttgttcccctttaagttttaatagaaaaaaaaaagttttaagtcatgttgtaccaatatatccccagaaagaattgcaatttaccaaggttttcacgtgttttgagagaaatcttactgaaagactagtgatgtccattttccagtaaatactgagcgaaaaacaatttttataccccaatctgaggtataaacttgctttttgtgggatcacaactgctgtaaattagacarttgtagcaacaatccaagacaataacagaatgcctatgacagtctgccatattctggtgagtgtctatcaaagctcatcatgattttttgtgagatcttccccgtaattggtagcttggcttccgacaaacatgttccagttctccaatatttcctctttagttagcttctcatcct

SEQ ID NO: 54176 - DNA, 520 bp, Homo sapiens
taccaagtgcgccacctggtggcagcacagataaaatttacactctaggaccaagatcacgtgtagaattcaaatagcataaagtaattatagttttaacacaattggcttggacttttcaaaaatatccatgtcagaaaagatcaaaatggtctgaaaaactgctctagattaaaagagaccaaagggtctgaaccgctaaatgcaatctgttcaaaaagctattcaagggcaggcacggtggctcatgtctgtaatcccagcactttgggaggccaaggtgggtggatcacctgaggtcaggagtttgagaccagtctgaccaacatggtgaaaccctgtctctattaaaaatacaaaaattagccaggcatggtgacaggcgcctgtaatcccagctactcgggagactaaggcaggagaattgcttgaacccaggaggcagagattgcagtgagccaagatcgtgccactgcactcyagcctgggcgacagagcaagactcagtctcaaaaaaaaa

SEQ ID NO: 54177 - DNA, 520 bp, Homo sapiens
taccaagtgcgccacctggtggcagcacagataaaatttacactctaggaccaagatcacgtgtagaattcaaatagcataaagtaattatagttttaacacaattggcttggacttttcaaaaatatccatgtcagaaaagatcaaaatggtctgaaaaactgctctagattaaaagagaccaaagggtctgaaccgctaaatgcaatctgttcaaaaagctattcaagggcaggcacggtggctcatgtctgtaatcccagcactttgggaggccaaggtgggtggatcacctgaggtcaggagtttgagaccagtctgaccaacatggtgaaaccctgtctctattaaaaatacaaaaattagccaggcatggtgacaggcgcctgtaatcccagctactcgggagactaaggcaggagaattgcttgaacccaggaggcagagattgcagtgagccaagatcgtgccactgcactccagcctgggcracagagcaagactcagtctcaaaaaaaaa

SEQ ID NO: 54178 - DNA, 520 bp, Homo sapiens
taccaagtgcgccacctggtggcagcacagataaaatttacactctaggaccaagatcacgtgtagaattcaaatagcataaagtaattatagttttaacacaattggcttggacttttcaaaaatatccatgtcagaaaagatcaaaatggtctgaaaaactgctctagattaaaagagaccaaagggtctgaaccgctaaatgcaatctgttcaaaaagctattcaagggcaggcacggtggctcatgtctgtaatcccagcactttgggaggccaaggtgggtggatcacctgaggtcaggagtttgagaccagtctgaccaacatggtgaaaccctgtctctattaaaaatacaaaaattagccaggcatggtgacaggcgcctgtaatcccagctactcgggagactaaggcaggagaattgcttgaacccaggaggcagagattgcagtgagccaagatcgtgccactgcactccagcctgggcgacagagcragactcagtctcaaaaaaaaa

SEQ ID NO: 54179 - DNA, 520 bp, Homo sapiens
taccaagtgcgccacctggtggcagcacagataaaatttacactctaggaccaagatcacgtgtagaattcaaatagcataaagtaattatagttttaacacaattggcttggacttttcaaaaatatccatgtcagaaaagatcaaaatggtctgaaaaactgctctagattaaaagagaccaaagggtctgaaccgctaaatgcaatctgttcaaaaagctattcaagggcaggcacggtggctcatgtctgtaatcccagcactttgggaggccaaggtgggtggatcacctgaggtcaggagtttgagaccagtctgaccaacatggtgaaaccctgtctctattaaaaatacaaaaattagccaggcatggtgacaggcgcctgtaatcccagctactcgggagactaaggcaggagaattgcttgaacccaggaggcagagattgcagtgagccaagatcgtgccactgcactccagcctgggcgacagagcaagactcmgtctcaaaaaaaaa

SEQ ID NO: 54180 - DNA, 520 bp, Homo sapiens
taccaagtgcgccacctggtggcagcacagataaaatttacactctaggaccaagatcacgtgtagaattcaaatagcataaagtaattatagttttaacacaattggcttggacttttcaaaaatatccatgtcagaaaagatcaaaatggtctgaaaaactgctctagattaaaagagaccaaagggtctgaaccgctaaatgcaatctgttcaaaaagctattcaagggcaggcacggtggctcatgtctgtaatcccagcactttgggaggccaaggtgggtggatcacctgaggtcaggagtttgagaccagtctgaccaacatggtgaaaccctgtctctattaaaaatacaaaaattagccaggcatggtgacaggcgcctgtaatcccagctactcgggagactaaggcaggagaattgcttgaacccaggaggcagagattgcagtgagccaagatcgtgccactgcactccagcctgggcgacagagcaagactcartctcaaaaaaaaa

SEQ ID NO: 54181 - DNA, 581 bp, Homo sapiens
tctctgcaaaagaggaatggtgagggggccattaccagcagctcagtaattccagagaaaaaggcagatggggaaagggctgcagatggggaaagggctacagatggagatttgggcagaaatcagtttccttttctttcctttttttgggacaaggtcttactctgtctcccagactgaagtgcagtggcatgatcttggctcactgcaacccggcctcccaggttcaagyaattctcctgcctcagcctcccaagtagctgagattacaggcatgtgccattaccacctgctaatttttgtattctattagagatggggtttcgccttgttggccaggctggtcttgaactcctgacctcaaatgatccacctgcctcagcgtcccaaagtgctgggattatagacacgagccaccatgcccaacccagaaatcagtttctgaaatccttatataaaactttaagatgcttggacataggtattcaggagtggttcacagatctatttgcattagagataattaactctaattattgtgaggagcataaaattctgaggcacataaatcaatgaacaaa

SEQ ID NO: 54182 - DNA, 581 bp, Homo sapiens
tctctgcaaaagaggaatggtgagggggccattaccagcagctcagtaattccagagaaaaaggcagatggggaaagggctgcagatggggaaagggctacagatggagatttgggcagaaatcagtttccttttctttcctttttttgggacaaggtcttactctgtctcccagactgaagtgcagtggcatgatcttggctcactgcaacccggcctcccaggttcaagcaattctcctgcctcagcctcccaagtagctgagattacaggcatgtgccattaccacctgctaatttttgtattctattagagatggggtttcrccttgttggccaggctggtcttgaactcctgacctcaaatgatccacctgcctcagcgtcccaaagtgctgggattatagacacgagccaccatgcccaacccagaaatcagtttctgaaatccttatataaaactttaagatgcttggacataggtattcaggagtggttcacagatctatttgcattagagataattaactctaattattgtgaggagcataaaattctgaggcacataaatcaatgaacaaa

SEQ ID NO: 54183 - DNA, 575 bp, Homo sapiens
tgaccttgttttaccacagaaggcaaattaatgttgataatgcagcaataatgataatatcaataagagtttaagtatataaagcgattaatgtgtgccagaaacacttctaagtgtttagtaagcattgtctgatwccatttttgttgacaattttgtgaataaatactctattatcttaattttactatgaaatatattgatggcaagacaatctacctacattaatcaaatttttggttaggtgattagaggtaggtaattcagttaataaaaaaaagacaaaacaaaaaataaaatgaatgtaacacttttaaaagactaaacgagagcaaaaaagggagctaaataggaagagttcgagttatgcttattttttaaatttttttattaagtacatctaactcatagtataacccattatgctataccactgtctcctgttgccagtgatctgtgttttatcttcaaacctagtcaaaaatataaagcaatgattaggtcagttgagacgatgagttctccatgggaaatcaaagcaatctttaaatgagtgtatcttttttgtttttttg

SEQ ID NO: 54184 - DNA, 598 bp, Homo sapiens
tgaacgaacatcagcttacagatgatgaggacttaaggttgcaagaatgaagatttcagactccaagatcccttattctttgggccttgagcaggttagtagtcccctggtgagaagagaacattttgtttgtggggctaatgggcccagaggagggtaagactctgctgtctaagctgaagcctcttcctcgcagcgagggtcttcctaggaacattgatgctgcctcagacatcctcttttctccagagtagggaagactcccactgatctgagaatgagcccagasgcttgtttggggactgttttactctgatactacctggatatctagcttcctttacccctgttctgcttaacagaactgccaagcccagaagtacctttgcactcctggttttcagtggacagaggaagctttagatagagactttagaccctgccctgcagagtcaagacttgaggccattgaagctgcaggaagccctgcccagggatggtcctgccatgaggaggctgcaaccctataagagggctcaagattgtgaattctgctcctgccatgaggagctcagaaggccaggaagccagcaatagg

SEQ ID NO: 54185 - DNA, 1490 bp, Homo sapiens
cagaccttcactgaagttctagccatctccccggaagaagccacattgctgctgtcttcccaagttattaaaagtatggctgttaaacccaatgggttcccaatgaactccatcttatacttctcttagatagggggaggcttttaatacctttctcatcctccccctaccatcctcataccaacctaggggagtgaagttacccatcagggcataagtctcggtgtgtcccatacagcacataaatacaggacatctgctcagagatggggtcactgcatgataaaattccatgcatgcacctatgattctttcatttcttcttctacatggtcatattgttaggtgtattcacccgccttgtctagaaaacacttccaggcattatctagtggcaaatgatgccctgcaaggggacatttccaccaactgggtctgttcacaaatgtgccacaaattccacctacaactccaaaataggagtccaaaaatagttgaaacattggcagcctcactgagaaggagagtggcttcccgcaggggccgcttctgagaagacaacttcattttgacagatttgtgctggtgtgtctgttaacaacatagtcttctcacttttcaagcttctccaggatttcccagggcttggagagatgtttgcacaaactagcttcccgagataaatcccaagtcacgtagccagggcttggcatcaaattgaaagacagtgcaaaggaaattaattaaaatctggcyggagggatccaacagaagcagacatttcaagtggaatcaatacaaatgtaagcgccacaaaggctgtgactttttgcctattttattcacggctaaatctccaaagctagaaacattcctggcacacagaatgtgattaataaatatttgaatgaatgagctagattcagttcattctgcatttgttgaactgctactgtgtgaggatttgggagctggatttacaaaggtcccagactggtggaggaaagaaatttaaaacaaaaaacaacaacaaataactatataggatatgttaaatactgtgataaaatgtgtaaagtctctgggggaaacgtgaccaagatataattaattgtactggcaaaggatggagtagctgcagaatgaaggtaacattctaggacttggtagtgttagcaggtagtaggagcaaaagggctttccaggtggaaagaggatcacagacaaaaatatggaggtgtgaaaatgagtggtgtatttagggatcacctcatggagttaaaaaagcagctaccaagagcaagggcaaggggggccctccctcaacagcatgcagagacaccgtttgttttgttttgttttgtttttaagagcatctaccaacttccaggcactgtgcatgtttagtagtagagacacaaagcaaacagcatagatgtgcccttggccacaaactatttacaatctgataatctgcagtgagacatgca

SEQ ID NO: 54186 - DNA, 1981 bp, Homo sapiens
ctgcccacctcagcctcccaaagtgctgggattacaaccgtgagccactgggcccggccaaaacttgtattttattctgagaacaatggagaacattaaggagtgagtgcatgtgtgtgcgtgtgtgtgtgtctgtttgtgtactgaccccatttgtactgagaaggccaatggaatggggatagggaagctagaggccaaagaccacttttcaagtactgttggttgcaactcagtgaaatcaatttagtgggtgacattatcaatgtctgtttaaaatgaattcaaatggaatagaaaatatcaggggttccctctctcagccttggagcctcctccctctgtctctgtacaggggagctgcttctttcttccttcccccttctttcttttctttcttgcctattaaactccttgctccttaaaactaaaaaaaaaaaaaaaaaaaagaaagaaagaaasaaaagaaaatatcagagattacctgacattataaggataaattttacagaacttctgtatcagattcatgtgtccattctggtcacaaagtaacatgcatttgttacgatgggtcagagtcaaaaaaattttgagttaggtgactgagcaggtgaaggggtgagagaagagacaaatgagggctcccaggtttctggtgtgggcatgatgccagtggccaagacaggatataggggaggaggcctgcttttatcaagtccacgtggggatgctagacagcgcagacagtggcctctctcagcattttttcagcagccacagtcaatactaatcttgttcagcaaagacaatgaacacatagtcattgcagctgcaagctcaagtgagtatacaactgataagggtcctctaggagctggagggtgtcccagtcctaaatcctaaaccacagaaaaactgtgaaactaaaaaaatcagacaggataagtgaaacaccatttcctccagggaactaacagggtgtgagaaatcttgtccttattctaagagtcaacagggaacccttacccttgggaacctaagcaaaccttctgaaatgtcagcgaccagggtatttttgtttattagtagtttgtttggttttggttttgtttggcggaggaggcattatttctacttttctgttttctaagcctcctcccccaccccacactaccacctccaagaggtacttcaacccctatgcctccagcaagtccactgagtcctgtaatcttgatgtggctatccttcggttaccctcctggagcttcaggctaagagagcagggccaatagaacatggcttctccacagacttggggtggatccatcattcctcctaacagcctgcccaccccgcccctgcacgattccattagaagaaagacttctccgattcttggaggatcacagcacaactgagccccaaactaactactttcctggtgacccttccactacattcctcaataaacctgccccagacacatcaggcaactggctgccctcaaatactccatgttcttgtacacattctatcttttgctcctattattccctcaatctaaaatgcccaccctttctctgacagaaattctagtcactcttcgtggtgcatctcaaatgtcacctctaccacaaagccactctttatccaacactccaccccatcaccaaatctggatttagttacaccactttgtgcttccactgcatctgcctgtgtcttgggcacagcatttctttcactggcatgcattataggcaatcgtgctttatgtctgttttccattagacttacatttcttgaagatacagacacagagtctgtatctgatttgcccaaaagaaattaccagaaaagaatgcatgtcatacccttctctccaacatcccatggtcctgcacacataggaggtcctcaagaagagtgctgattcaaactgaaaagctacagattctttccaccaaaacctgca

SEQ ID NO: 54187 - DNA, 590 bp, Homo sapiens
ctgggctcaagcgatcctcctacctcaccctcctgagtagctgggactacaggcgagccaccacaccaggctaattttgtgtgtgtgtgtgtgtgtgtgtgtgtgtgtgtgtgtgtgtgtgtgtgtgtgtgtgtgtgtgtagagacggggttttattatgttgcccaggctgatccaaggtctttctttttttttttcttgagacggagtctcgctctgtcacccaagctggagtgcagtgacaccatctcagctcactgcaatctcagctcactgcaatctcagctcactgcaacctccacctcccaggttcaagcaattgtcctgcctcagcctcttgagtagctggaactacaggtgcacaacaccatgcccagctaatttttgtattttagtagagatgaggtttcgccatgttcaccaggctggtctcgaactcctgacctcatgtgatccacctgcctcagcctcccaaagtgctgggattataggcatgagccacccatatccggaggtccaakttcattcttatgattaaatatcaaagctttcacagtcacagaagagactgcagacatggcttgggcaat

SEQ ID NO: 54188 - DNA, 2065 bp, Homo sapiens
ccactgaattaacccatgtgatcttttaaaaactaatcttggccaagtgtggtggcttactcctgtaaccccagcactttgggaggccaaggcgggcagatctcttgaggtcaggatttcgagaccagcctggccaatatgatgaaacctcatctctactgaaaaattaaaaaaattagctgagtgtggtggtgcccacttgtaatcctagctgctctggaggctgaggcatgagaatcgcttgagcctgggagacagaggttgcagtgagctgagatcatgccactgcacttcagcctgggcgacagagcaagactctgtctcaaaaaaaataaatacataaaaaataaacaaaaacaaacaaacaaacaaatgaatctgataaaataacacaggttaaaaaaactttactaaccctcttagattaatatttcaaagctctttaacatctgcccactttacctctacagaattttcaacataacatctttgcataaaacattcattccaaccaaccggttctactccctgccatgcaatcttgactgttccttctcattgccactgtgccctgtgtgtgtcctggccttagctgctttcatttttctctctgattatctcctaggctaaattcaagtcatgcttcctccacaaagtttgtgcaaatgactttctctctgaatctctagagtactgatggtccatcctcaacaatttaagatctcttagattattgctatcattttatgtctgtattactatttccaattgaccaggcacttttattttatgtgcttcmaggagattttcagttcctaaagatgtcttgtacttgtcattgtgtctctccaataccttacccaatggcttgcacatggctgactgtctcatacattctctaatctgtatagtccagctgatctagttaaatcatttaacctgaatcaaaagactaagtgatggactgttatggaatagtggtaaaaattttaatcatatttgtagtccaggtgcctttaatagatagatttccagatctgccacttactagatagtgacttatcttggacaagtcatttcaccttttatagccccagttttcttcatctgtaaaattgaaagaataataatgactctcttgcctatttcactagattactgagagaagcaaatgatgtaatgtctttgaaggtgtttatacaaagtcaagtatcttacaaatatgaatgatcctagttgggcaaatgaaacactatttttagaaatcccatatcaaatgcagtcaggaactcctaaactgatcaagactggtgtgatcaagatcattttaaggcatattatgatcaattttaaacagtgctgtgagtcagattgctatccttgccttacaggtggaagtttgatgttatctagaagcaaatggtttaagtaaaatcactgacagcaccactatgagatgtctttactgttccagttggtagctttcagtctatttagcaccactgcttcctcctaaacttttctttaagcctcattaaagttctgattcttagggattaatataagcagacactgataatatcaagctctcctctctataattccaagaacccttggaattagcataaattacattcctgaatccatcatttggttccatatctcttcaaagtcttttctgacccttctcatcaccctcaaatccatgtccctttctcataagctcagttctttgccattccatcattactaacttcctgtaagacatctccacttggatgtctcacaaaaatcttgaatttaagaaaatcaaggggctaaggcaagcagactgcttgaggtcagaagttcaggatcaatctggaaacatggtgaaaccccatctctacaaaaaatacaaaatttaaccaggcatggtggtaagcacctgtagtcccagctacttgggcggctgagacaggaggatcacttgagctggggaggtcaaggctgtagtgaacgtattcaggccactgaactcaagcctgggtgacagagcaagcctctgtctccaaaaaaaaaaaag

SEQ ID NO: 54189 - DNA, 2065 bp, Homo sapiens
ccactgaattaacccatgtgatcttttaaaaactaatcttggccaagtgtggtggcttactcctgtaaccccagcactttgggaggccaaggcgggcagatctcttgaggtcaggatttcgagaccagcctggccaatatgatgaaacctcatctctactgaaaaattaaaaaaattagctgagtgtggtggtgcccacttgtaatcctagctgctctggaggctgaggcatgagaatcgcttgagcctgggagacagaggttgcagtgagctgagatcatgccactgcacttcagcctgggcgacagagcaagactctgtctcaaaaaaaataaatacataaaaaataaacaaaaacaaacaaacaaacaaatgaatctgataaaataacacaggttaaaaaaactttactaaccctcttagattaatatttcaaagctctttaacatctgcccactttacctctacagaattttcaacataacatctttgcataaaacattcattccaaccaaccggttctactccctgccatgcaatcttgactgttccttctcattgccactgtgccctgtgtgtgtcctggccttagctgctttcatttttctctctgattatctcctaggctaaattcaagtcatgcttcctccacaaagtttgtgcaaatgactttctctctgaatctctagagtactgatggtccatcctcaacaatttaagatctcttagattattgctatcattttatgtctgtattactatttccaattgaccaggcacttttattttatgtgcttccaggagattttcagttccyaaagatgtcttgtacttgtcattgtgtctctccaataccttacccaatggcttgcacatggctgactgtctcatacattctctaatctgtatagtccagctgatctagttaaatcatttaacctgaatcaaaagactaagtgatggactgttatggaatagtggtaaaaattttaatcatatttgtagtccaggtgcctttaatagatagatttccagatctgccacttactagatagtgacttatcttggacaagtcatttcaccttttatagccccagttttcttcatctgtaaaattgaaagaataataatgactctcttgcctatttcactagattactgagagaagcaaatgatgtaatgtctttgaaggtgtttatacaaagtcaagtatcttacaaatatgaatgatcctagttgggcaaatgaaacactatttttagaaatcccatatcaaatgcagtcaggaactcctaaactgatcaagactggtgtgatcaagatcattttaaggcatattatgatcaattttaaacagtgctgtgagtcagattgctatccttgccttacaggtggaagtttgatgttatctagaagcaaatggtttaagtaaaatcactgacagcaccactatgagatgtctttactgttccagttggtagctttcagtctatttagcaccactgcttcctcctaaacttttctttaagcctcattaaagttctgattcttagggattaatataagcagacactgataatatcaagctctcctctctataattccaagaacccttggaattagcataaattacattcctgaatccatcatttggttccatatctcttcaaagtcttttctgacccttctcatcaccctcaaatccatgtccctttctcataagctcagttctttgccattccatcattactaacttcctgtaagacatctccacttggatgtctcacaaaaatcttgaatttaagaaaatcaaggggctaaggcaagcagactgcttgaggtcagaagttcaggatcaatctggaaacatggtgaaaccccatctctacaaaaaatacaaaatttaaccaggcatggtggtaagcacctgtagtcccagctacttgggcggctgagacaggaggatcacttgagctggggaggtcaaggctgtagtgaacgtattcaggccactgaactcaagcctgggtgacagagcaagcctctgtctccaaaaaaaaaaaag

SEQ ID NO: 54190 - DNA, 561 bp, Homo sapiens
tgggattacaggcatgagccaccatgcctggcccaaacacatttttttgatattgcatcatataaaaacaggggacagatttttgccatgtatggagggtgtgtttcagatcgtatgacctttaatttaagcatcgtggtatttacaagttcaccttccaggccagtgggagtaatgggagataggttttcacagtctagagtagcaggtagcaatgatttaatgtctgtttttcttaacaaggtctatgtagtaacatactcttgggtaggagacaaatgggaattttttaaytactgtctttgttcgggtgccataacaaaatagcatagactggttagcttaaacaacagaaatttatttctcacaatatggaagattgtgaaatccaagatcaagatgctgctgattcagttttgatgtcctgctgtgacctctctcagcctttcctcagtgtatgcacatggagagagagaaaactgtgctctttcttcctcttctcataagtacacaattctatctattcagggccttactcctatggcctcattttatcttaat

SEQ ID NO: 54191 - DNA, 588 bp, Homo sapiens
atggaaacgcctgagctacatgacatttaaaggaaacgggcagaagcacgtgcaggttattctccaccgtcaccgcccagccccgttctctgcctgcttggccctggaaggtggcagctgamcgagtttggcttagtgaagacagtagagatgtctgggagggaggagcgacttcaggttttcttgccctgtgccctccctgcttgggcaccgcctcatggcgataacagggttcctcctgggttcctcgaacccggtggcctttctcagggtgctgtttctggctgggctccttcactaacgcatgtctttacgttgccctgggtcctggggtgctgtggctccccatttgctggtctctggggtctcactgtgtctttatcacgtccaccagcaggagacactggagccaggtctagtgtattgagatatttttaaagtagtttgaatgacatctcatgatttttatttgttcttagaggtcttccaaaaggcaaagaaaaagaatacatttttttttttttttttttttggccaggtgtggtgggctcatgactatgatcctagcactttgggaggccaaggcag

SEQ ID NO: 54192 - DNA, 588 bp, Homo sapiens
atggaaacgcctgagctacatgacatttaaaggaaacgggcagaagcacgtgcaggttattctccaccgtcaccgcccagccccgttctctgcctgcttggccctggaaggtggcagctgaaygagtttggcttagtgaagacagtagagatgtctgggagggaggagcgacttcaggttttcttgccctgtgccctccctgcttgggcaccgcctcatggcgataacagggttcctcctgggttcctcgaacccggtggcctttctcagggtgctgtttctggctgggctccttcactaacgcatgtctttacgttgccctgggtcctggggtgctgtggctccccatttgctggtctctggggtctcactgtgtctttatcacgtccaccagcaggagacactggagccaggtctagtgtattgagatatttttaaagtagtttgaatgacatctcatgatttttatttgttcttagaggtcttccaaaaggcaaagaaaaagaatacatttttttttttttttttttttggccaggtgtggtgggctcatgactatgatcctagcactttgggaggccaaggcag

SEQ ID NO: 54193 - DNA, 545 bp, Homo sapiens
cagctgagaaggacaggacaagagaaaccccacctgctggggcatgggctctcagaccattcgtgtgtgtgtgcacgcacatgcatgtaactgtgaaaggattcatgattcacagcatcggagagaactatgaacactgcaagtaagtaaatgaggccgggcgcggtggctcacgcctgtaatcccagccttttgggaagtcgaggcaggtggatcacctgaggtcgggagtttgagaccagcctggccaacatggtgaaaccctgtctcttctaaaaatacaaaaattagctgggcatggtggcrcacgtctgtaatcccagctactcaggaggctgaggcatgagaatcacttgaacccaggaggcggagattacagtgagccgagattgtaccactgccctccagcctgggtgacagagcacgactctgtctcaaaagaagcaaaaaagcaagcaagcaaacaaacaagcaagcaagctagaagaaaaaaagaaagtaaatgagtgcatctacctcccaggtcttggtattctaaataccat

SEQ ID NO: 54194 - DNA, 545 bp, Homo sapiens
cagctgagaaggacaggacaagagaaaccccacctgctggggcatgggctctcagaccattcgtgtgtgtgtgcacgcacatgcatgtaactgtgaaaggattcatgattcacagcatcggagagaactatgaacactgcaagtaagtaaatgaggccgggcgcggtggctcacgcctgtaatcccagccttttgggaagtcgaggcaggtggatcacctgaggtcgggagtttgagaccagcctggccaacatggtgaaaccctgtctcttctaaaaatacaaaaattagctgggcatggtggcacacgtctgtaatcccagctactcaggaggctgaggcatgagaatcrcttgaacccaggaggcggagattacagtgagccgagattgtaccactgccctccagcctgggtgacagagcacgactctgtctcaaaagaagcaaaaaagcaagcaagcaaacaaacaagcaagcaagctagaagaaaaaaagaaagtaaatgagtgcatctacctcccaggtcttggtattctaaataccat

SEQ ID NO: 54195 - DNA, 776 bp, Homo sapiens
gtatctaaaataaaagttaaaaaaaaaaaagatctaatgctatagtgacacatgtaaacctcctcgagaaggatctgttcatgtcacccataatagacattaacacagactggttatttgtatacataacaggaaaaaccacttatcttcctaaatgatgcgtayacaaactactgtgggaacttctatttcagacaacagacattcagtgaataatgcaatcctctggaagagaacactaaacagaaacagattcacaattctgtgctatcatttggatgggggaaaaaagacattcattgttgtgtatgcgtatgataaagaaaatatttaattcaaagtaggatttagagaggttcaaagcttcagctgatttgaatcactttaagggtaaagcattatatcaatttcatagcattgtattaataataaggttttataaatggataccacatggtggatttaaaaaaaaacagggtatgggccaggtgggcacggtagctcacatctgtaatcccagaactttgggaggcaaaggtgggcagatcacttgagatcaggagttcaagtctagcctaactaacatggcaaaaccacgtctctactaaaaaaacaaaaattagctggggtggtggtggatgcctgtaatctcaactactggggaagctgatgcaggagaatcgcttgaaaccgggaggcagaggttgcagtgagctgagatcgtgccactgcactgaagcctgggtaacagagcgagactctgcctcaaaaaacca

SEQ ID NO: 54196 - DNA, 477 bp, Homo sapiens
tttctttctttcyttctttctttctttctttcatttattgatgaattatcttatgatttatttgtgtacttattttcagacggagtctcgctctgggcggggcggggcgaggcgaggcgaggcacagcgcatcgctttggaagccgcggcaacgcctttcaaagccccattcgtatgcacagagccttattcccttcctggagttggagctgatgccttccgtagccttgggcttctctccattcggaagctttgacaggcgcaaccccacccagaggctggctgcggctgaggattagggggtgtgttggggctgaaaactgggtcccctatttttgatacctcagccgacacatcccccgaccgccatcgcttgctcgccctctgagatcccccgcctccaccgccttgcaggctcatctcttactttcatttcttcctttcttgcgtttgaggagggggtgcgggaataagggt

SEQ ID NO: 54197 - DNA, 477 bp, Homo sapiens
tttctttctttctttctttctttctktctttcatttattgatgaattatcttatgatttatttgtgtacttattttcagacggagtctcgctctgggcggggcggggcgaggcgaggcgaggcacagcgcatcgctttggaagccgcggcaacgcctttcaaagccccattcgtatgcacagagccttattcccttcctggagttggagctgatgccttccgtagccttgggcttctctccattcggaagctttgacaggcgcaaccccacccagaggctggctgcggctgaggattagggggtgtgttggggctgaaaactgggtcccctatttttgatacctcagccgacacatcccccgaccgccatcgcttgctcgccctctgagatcccccgcctccaccgccttgcaggctcatctcttactttcatttcttcctttcttgcgtttgaggagggggtgcgggaataagggt

SEQ ID NO: 54198 - DNA, 560 bp, Homo sapiens
gtcaatccatccttcattcagtccacagtgctcactgactgccagccatgtgccaagccctgcactgagaatttgaggcgtgggaagatgaaaaacaagattcttactctcaaggaggttaccatccagagggaagctaaggcgtgcgcatgcgcgcgcacacacacatgcacacacacgcacacattggagaggtaagagcacagctgtggagtcagacaggctaccatcagaatccaattttatggtgccactctgtgccaacatttcctcttctgttataaggggtaatattatgcacctcaytgggtcatgtaaacactgaagttgctaataaaaagtcctagtgcaataatggacctaataaatgttcattcccctcctttcttgcacagatgactgcgatgcaaggaagaagctgatgtgtcacaatacacatcagcgttctgagagtttaaagaatggaggtgcaattatttacagcggagcgggggcgggggctcaggaaagagttcacagaagaggtggcacttgaacttggctttgaatatgagcagatc

SEQ ID NO: 54199 - DNA, 560 bp, Homo sapiens
gtcaatccatccttcattcagtccacagtgctcactgactgccagccatgtgccaagccctgcactgagaatttgaggcgtgggaagatgaaaaacaagattcttactctcaaggaggttaccatccagagggaagctaaggcgtgcgcatgcgcgcgcacacacacatgcacacacacgcacacattggagaggtaagagcacagctgtggagtcagacaggctaccatcagaatccaattttatggtgccactctgtgccaacatttcctcttctgttataaggggtaatattatgcacctcattgggtcatgtaaacactgaagttgctaataaaaagtcctagtgcaataatggacctaataaatgttcattcccctcctttcttgcacagatgactgcgatgcaaggaagaagctgatgtgtcacaatacacatcagcgttctgagagtttaaagaatggaggtgcaattatttacagcggagcgggggcgggggctcaggawagagttcacagaagaggtggcacttgaacttggctttgaatatgagcagatc

SEQ ID NO: 54200 - DNA, 543 bp, Homo sapiens
cctgtagtcccagctactcaggaggctgaggcaggagaatggcgtgaacccgggaggcggagcttgcagtgagccgagattgcgccactgcactccagcctgggcgacagagcgagactccatctcaaaaaaaaaaaaatagtttattagctactcttaatttgtttattcttttagatgattattggtatcctttttcttaactttgacttgaactgggattttgatcaaaattaccctagaacagtagacataacatctttaaatatttaaacagaataatacaggttgagcatcccaaatcccaaatccaaaattccaaactttttgactgtcaacgtgaggttcaaaggaaacgctcattggcgcatttcagattttggaattgcgatgctcatccagtaagtatatataatrcaattttatttcaaaatctgaaattctaaacacttctgatcccaagcattttggataagggagactcaatctctaataatgattgagggcagggctatttcaggcactgcactaaatacttagttc

SEQ ID NO: 54201 - DNA, 612 bp, Homo sapiens
ttattttttctcttttttttattatgcaagtaatgcaaaatactctttagttttgatatttagcttattaattttattctttaattgttcatgaaggcatgtgaatgattttaatatcattctcaatactatgttggccacattgttcagcataatttatcatgctttctttcactaactggttacttaaaaatatgtctatatattagtaactattttttgtttttgtttttatagttattgctgtcatggatcactactgtagtcacattatgttgagaaaatacagtctaattctttaaaatttattgagactcacatagtaggtaatcaatttttataatttctgtgtcagaaaaaatgtggattatattattatagtatgtaatatcctctatgaactcccaataatgtttgttcatttgattgttcaatcttctgtggaaactcttcacgttggtacaaattttttggttttgtattcacttgatctataaattactyacagacatattacgtaaagtctaaccaatattgtggctattacaatgtccattgtgttttcattattatttgatttatatatagtttaacagtttttattaacataaa

SEQ ID NO: 54202 - DNA, 744 bp, Homo sapiens
tgaaacaaatggggtattaatttcaccttcagggtgctttctgaattggggaagaaatggacatagagaccagtataacagtaggatgtaggttgtttttaaaaatgactatgcaaactcaagtcataaagattccagctcacagtatcagaagtaatttgggagaggtaagaatgttagagttgatttttaaagatgattaagacacaaaaactgcgttaaattttgtaacctatttgtataacttatcttaatttgtactgcttgacattgtgcaaagaaataaaattgctgggtgagagagcgagactccgtctcaaaaaaaaaaaaaaaaaaaagaaattaaattagtctgcaacatttgaacttaactaggctgtgttaaataatgtaccagaccaagaaatttaagtgatttcttcattggttccagctatgctattaagtgctatgtaaccttaagagagtcacttaacttctctgggccttgctctcctcatctgtaaaatatggcattaaattagatgaactatgagattctaattagttccttactggatgattactgtttatcacctttgacaagtctgaatagccacagaagtttttattaactttcccaaattctccaaagaataaartttatatagaaaaattaatcccggagtctatttaattcctgattaatgcaattttgttctaaaaaacagtcatgaaatgagaaaacaatattcaaaaatttaa

SEQ ID NO: 54203 - DNA, 744 bp, Homo sapiens
tgaaacaaatggggtattaatttcaccttcagggtgctttctgaattggggaagaaatggacatagagaccagtataacagtaggatgtaggttgtttttaaaaatgactatgcaaactcaagtcataaagattccagctcacagtatcagaagtaatttgggagaggtaagaatgttagagttgatttttaaagatgattaagacacaaaaactgcgttaaattttgtaacctatttgtataacttatcttaatttgtactgcttgacattgtgcaaagaaataaaattgctgggtgagagagcgagactccgtctcaaaaaaaaaaaaaaaaaaaagaaattaaattagtctgcaacatttgaacttaactaggctgtgttaaataatgtaccagaccaagaaatttaagtgatttcttcattggttccagctatgctattaagtgctatgtaaccttaagagagtcacttaacttctctgggccttgctctcctcatctgtaaaatatggcattaaattagatgaactatgagattctaattagttccttactggatgattactgtttatcacctttgacaagtctgaatagccacagaagtttttattaactttcccaaattctccaaagaataaaatttatatagaaaaattaatcccrgagtctatttaattcctgattaatgcaattttgttctaaaaaacagtcatgaaatgagaaaacaatattcaaaaatttaa

SEQ ID NO: 54204 - DNA, 588 bp, Homo sapiens
ccataggatgggtctgaattctggaagtattttatgttgaatgctgtccatttacttgctcttctttttctctttgttagaaaactatgtgcaagctgtggaggagttccagtcctgccttaacctgcaggaacagtacctggaagcccacgaccgtctccttgcagagacccactaccagctgggcttggcttatgggtacaactctcagtatgatgaggcagtggcacagttcagcaaatctattgaagtcattgagaacagaatgggtgagtgaagacgagctgcttcatggtgatgttggatccagcaattaacaaggaagaaaacagttcttttttgmgccattactaatcactttattctttttagctgtactaaacgagcaggtgaaggaggctgaaggatcgtctgctgaatacaagaaagaaattgaggaactaaaggaactgctacccgaaattagagagaagatagaagatgcaaaggagtctcagcgtagtgggaatgtagctgaactggctctgaaagctactctggttggttccgttaacattttgataatagcatgtttggtaccatttatgt

SEQ ID NO: 54205 - DNA, 726 bp, Homo sapiens
tttgtatttttggtggagacgaggtttcaccatgttggccaggctggtctcgaactcctgacctaaagtgatctgcccactttggcctcaggaagtgttaggattacaggcgtgagccacttcacctgactgcctggagcatttctgtgtgcgatagagggtttcaaaggcagaaacgagcccaccagtccaaggatgctggtggtgagggcactagtattaatgttagacctgttgtgctctcactggtgtctaggggtcagggctcacttgagactgaactgcctctgacctgactctaagtaccagttaggatctgaattccaaacaatgcctgccctatatcaccacctcartttagtagtcatgacacccatagggctgcttttgttgcactggaggcagaggaagcgatggccggcccctaaattcaacccaatttttcagactaagtaagtttttctgggctggtcacagtaactcatggttgcaggatctctggcttatcctggctgtggagtttcttcctgatgttgcccttgcagtatatgttccaggtcctgaggcgctttgcccccttttcttggtcaggacagtcacgatgtagtttactcccaggcacttgaccttctctggttggcactgggatctagggctaggcacagtatctaagctagatctcacatgtgacccctggttgggggaacaaccttgggctggggacct

SEQ ID NO: 54206 - DNA, 726 bp, Homo sapiens
tttgtatttttggtggagacgaggtttcaccatgttggccaggctggtctcgaactcctgacctaaagtgatctgcccactttggcctcaggaagtgttaggattacaggcgtgagccacttcacctgactgcctggagcatttctgtgtgcgatagagggtttcaaaggcagaaacgagcccaccagtccaaggatgctggtggtgagggcactagtattaatgttagacctgttgtgctctcactggtgtctaggggtcagggctcacttgagactgaactgcctctgacctgactctaagtaccagttaggatctgaattccaaacaatgcctgccctatatcaccacctcaatttagtagtcatgacacccatagggctgcttttgttgcactggaggcagaggaagcgatggccggcccctaaattcaacccaatttttcagactaagtaagtttttctgggctggtcacagtaactcatggttgcaggatctctggcttatcctggctgtggagtttcttcctgatgttgcccttgcagtatatgttccaggtcctgaggcgctttgcccccttttcttggtcaggacagtcaygatgtagtttactcccaggcacttgaccttctctggttggcactgggatctagggctaggcacagtatctaagctagatctcacatgtgacccctggttgggggaacaaccttgggctggggacct

SEQ ID NO: 54207 - DNA, 554 bp, Homo sapiens
ctaagaagttccaaactttatgatttacaccaatctgagttacacccacaaagacctctgacccataagcactttccagggtcatttgataatcacctttccaaatgtttaggtatttacctggaagaatgaagggttctggacttgagctcttaagaagtagtgtttcrtggaggaaataacatacgttctttgccatcactccattttaaagctgaagaatcactcagagaaagtggcttgcacacagtgctatggtgatttaaagaagtaatgctctctccctggtaccaaataagaacacaattaagaaaactgtcttctctagacttgtgttcattcctttctgctactaacaagctcaagatcagaggagattcatgcaggtttagaacaatgttctttttagtctgaacaccatgacttgctatgatgaatagctgaagcggcaggttctaggagatacaggcacatccctgcattgcttattgatgtgaccctatctcatagagaggacacatcctcgaggggccctgcattggcttacacattaa

SEQ ID NO: 54208 - DNA, 657 bp, Homo sapiens
atgctagcaatcttgtctttcaaatccataattataaggaagaaaatgacttaaaacataaattgtcactgcattagccatcatatttacatgtctttgcaatccagtaattgccataaaagcctatcttatttttaaaaccaaaatgtaaaataatcaagttgctgtttttaactctcttgaatgagcagatttattatacagcaaaagttttaataaataaaaaaaaataaatccagtctgtaccattcagtcttgaatgacagcctgttaacaaggcaaggaaagaacaggtgagtgtttcatttaaagatttctgtaactgaaatgagcatcacgccaaccagattgggcagccacaagaaactgtatctgagaaaacaatccaaagctgcccgkgtgtgatacaactgccctgacttattttgagaaggaaaaactcctgctgtatttttccttaactcaaaaattaatcccttcctttgaaaaaaaaaacttatttataaatgaggacaggcagctttaactgtgacaataactattctaactcaccacaaattcaacggaagcctgcttttttcaccttaaattcaatggattttattatcccctttctggctatcttcaaataagagaaaagcagacacaatacaacac

SEQ ID NO: 54209 - DNA, 657 bp, Homo sapiens
atgctagcaatcttgtctttcaaatccataattataaggaagaaaatgacttaaaacataaattgtcactgcattagccatcatatttacatgtctttgcaatccagtaattgccataaaagcctatcttatttttaaaaccaaaatgtaaaataatcaagttgctgtttttaactctcttgaatgagcagatttattatacagcaaaagttttaataaataaaaaaaaataaatccagtctgtaccattcagtcttgaatgacagcctgttaacaaggcaaggaaagaacaggtgagtgtttcatttaaagatttctgtaactgaaatgagcatcacgccaaccagattgggcagccacaagaaactgtatctgagaaaacaatccaaagctgcccgggtgtgatacaactgccctgacttattttgagaaggaaaaactcctgctgtatttttccttaactcaaaaattaatcccttcctttgaaaaaaaaaacttatttataaatgaggacaggcagctttaactgygacaataactattctaactcaccacaaattcaacggaagcctgcttttttcaccttaaattcaatggattttattatcccctttctggctatcttcaaataagagaaaagcagacacaatacaacac

SEQ ID NO: 54210 - DNA, 680 bp, Homo sapiens
accacttcctggtaccaatttctgttagtttgtctgggctgctataacagaacaccattacctggcagctgataaatgataaacatttatttcccacagttctggaggctaggaagtccaagaccaaggcaccagcagatacagtgtccagtgaggcctgcttctgactctctagagagagtgttttcttgctataaccttacatggtagaaggggtgggagatctctgaggtcttataagggcgccatttccattcatgagggttctgccttcatgacctaatcatctcccaaagacctcatcttcaaataccatcacattagcggttaggattttaacatatgaatttttgggaaatgcaaacatttatagtacctccatgtaaaaattttatgactatwctatttgtattagattttttcccccatagtttttcaaatttagattttcaggttcattttaaatgataagttttacatttttttttttaaatttctctctgttcttacttcactttgtctatgggttttttagttttctctcctgagatttctgggccccagtccagaccaggttttatgatgttattttgggggttcctatcccaagtcatagtaaggggagtacagattttgtccctaggccagcagacagcttacttaagttttggacatgaaat

SEQ ID NO: 54211 - DNA, 573 bp, Homo sapiens
tactacaaggttacagtaaccaaaacagcatggtactggtaccacaacagagatatagaccaatggatcagaatagagccctcagaaataataccacacatctayaaccatctgatctttgaagtttgaaattttataacaatttgatgaaaccgttttttgtctgtttgatctagtaaaaattaagggcttttattgtatgtaccaatatactttcattttgctagtaatttcacttgcattttataaaagtatttatcctaattaagttgggaggaaaaacactgattatctattaccaataatttccaaagaactgatttattactgtacacttatctgggactccattatttataaaaggaaatccaatattccatggtatccatgatctagtcttttcctctccctcacatctctttttctattctgatatttttttgtatcactctttatgaattataactctaacacaactcataactctaaaatcaatctgcttgtaatttcttttataaacttatgcctttatgctactctctgtaatttgaatgttctaactccaaaatacct

SEQ ID NO: 54212 - DNA, 649 bp, Homo sapiens
ccaccatgccgagctaatttttgtatttttagtagagacggagtttcaccatgttggccaggatggtctcgatctcttgaccttgtgacctgcctgcctcggcctcccaaagtgctgggattgcaggtgtgagccactgcgcctggcgaataatttttactattaaatttaatggaactactttggccagtctacacagccartgggcagattatgctattggcctatggtaaagaacaaatctcctcttaggccaggtagtcaaatctaaagaggttcttaacataaagacactattatgaagcacagaatccatgctctgaaaattctctcccatttaaagaaggggcaaaaatttctgctgttcattcctacttagtcatgagctatccaacaagagaaaaagaaaaaaaaagtaggacaagaagacagagtgtaggacttgagataaaggctcactacctgtaatttttacactttgggaggctgaggagagtggattgcttgagctcagtattttgagaccagcctggacaacatggtgagaccctgtgtctaccaaaaatacaaaaaattagccaggaatggtggtatgcgcctgtggtcccagctactcaggaggctgaggtgggagggtcgcttgagctcg

SEQ ID NO: 54213 - DNA, 568 bp, Homo sapiens
gcagtgagccgagattgtgccactgcactccagcctgggtgacagagcragactcggtctcaaaaaaaaaaaaaaaaaaaaaaagtacaatgctgatgggcactcagtgcattttcccactggtcctagagtcggcattcgttccccaagtgacttcacctaatcagcaccttctctccccacctcctctagtgagggtgtatcctatgtttgtaatgcagtccgtcttttgtcctagtcttcattccatcctgggatcctctagcttcctaaataattttttaatttgcatagattaaggttaactctttctgtggtaatgttctatgggttttgacaaatgcatcatgtaatagacccaacattatagaatagtttcaccatcctaaaaaattccttatgcttcacctattttaacctctccttgtatttttgtgtttttccattttcaagtaagcagatattttatacaaataatgatacataggtaattagaaaccagtgtaatccttaattgctttatacaatatatttataataaataaaacgtttttccaaataataatat

SEQ ID NO: 54214 - DNA, 577 bp, Homo sapiens
aaatactcttatgtacaaaggatgtgggcggccatattaattccttttcttttacagatcaataattacattgctgatttgcttaaaaggctcaggtcgaggcaggggcgaggacagcccgcctcaytgctccagggagctgaaggctgacatgacagaggctgcagtgacaggggacgatggttggcatgtggcaggcatgtggctagtcctctgcggcagccaggtagggtcacctccagccccagggcttccctttgaactcagtcctccctgtctctgaagctcttctctctgagctgagcagacagtaacgtgacttcagggagctctcccagcctcctctgctcttctctacacacccagcctgcagcccagctcagaggagctgggagaggagacctcgtaggagctctgagcaagaggcctgctaggggagaagggagtggagaggcccaggtggcctgaggccagcgccaatactgctcccaagacaggaacaacagggagtctgggactctgtaccccgagaaggtgtcaccgtcaggccagtgaccagacccctcacagggaccaa

SEQ ID NO: 54215 - DNA, 1500 bp, Homo sapiens
gcatacaatgacatgttatataatagatgttagtcagctgatacttgttcaatgggctcatgaacagatgcacataatattaaggatagaaggtattcacgactttacataatcaaattgtatctggaccaatgtagaacaactaaggctaatatgacagccttccctcaggggctacccagtcaacttgcagattgatgacattgaaacccatccctcagggattttgttctcactgaaatagacacttattctgggtacgaactcaccttttacatttgcaatttttctgctggtactaccatgagtgaacttaaataatttgttattcaccatcatgatatcccatacaacattgtttttgactaaggaattcatttcactgcaaaaaaaatatggtattaggctcatgtttgtgcaattcattggatttacaacataatccctatcacctagaagaatctgacatgatggaatggaatcatgtaactcagttaatgctcccagctggtaaacaacacatagtgaggttgggatgttgtcctacagtgtgtggtataaacttagagtcagtgaccaccgtgtagtgttatttatcttacaacaaaaacacatgaatctgaaagtcaaggggagggggctccctgcactattatgcctaatttgcacttgcagactttttcttcccttttgtgaaactttgggttctcctcatttagagataatgattccccagggaggaaactaacttctttttttttttaatttacaaaaggtaggctatgattattagagtcatacacagttgactgtctcagtgtgactcaagaccacaaaaaaaccatttttccttcacttctgagtcctggggttaagacctagaccagcaagcgtactgcttggggtcccttcacaggtttacaagtttttcattgagggcaatctgtgactgtgtgaggttggccagttaggtcaccatcaacaggtcattgatgttgctgtggagcatggtctcgaagtcatcgggaactatttttggtacttggttaaccaggctcatcaggaagtggcccaccttcctgatggtattgtcagctgacacctttccagatagtatatcctctgcatattgcaacactatgctcagggtatcctggatgcgagctgatgcccctcctacttgctgcaagtcacttgagagtccaaccactctgttggggctaaagcaggtcttcatgatcaggtcaactctgatgcattcagtgtcatagwatgcgtatttcactgtcagaggtgtgaacactcccacgatcctcccagggacacccattaaagtgctgacataggctttgatgctcatatggccgttctggagacttgtgtccacagtgaggtggatggggttgggggcctctcggctgtagtactcatggatcagcacagagtgctctgtgatgtcatggcctgcagcgtaccaccccaagatgagctcatttggag

SEQ ID NO: 54216 - DNA, 1500 bp, Homo sapiens
gcatacaatgacatgttatataatagatgttagtcagctgatacttgttcaatgggctcatgaacagatgcacataatattaaggatagaaggtattcacgactttacataatcaaattgtatctggaccaatgtagaacaactaaggctaatatgacagccttccctcaggggctacccagtcaacttgcagattgatgacattgaaacccatccctcagggattttgttctcactgaaatagacacttattctgggtacgaactcaccttttacatttgcaatttttctgctggtactaccatgagtgaacttaaataatttgttattcaccatcatgatatcccatacaacattgtttttgactaaggaattcatttcactgcaaaaaaaatatggtattaggctcatgtttgtgcaattcattggatttacaacataatccctatcacctagaagaatctgacatgatggaatggaatcatgtaactcagttaatgctcccagctggtaaacaacacatagtgaggttgggatgttgtcctacagtgtgtggtataaacttagagtcagtgaccaccgtgtagtgttatttatcttacaacaaaaacacatgaatctgaaagtcaaggggagggggctccctgcactattatgcctaatttgcacttgcagactttttcttcccttttgtgaaactttgggttctcctcatttagagataatgattccccagggaggaaactaacttctttttttttttaatttacaaaaggtaggctatgattattagagtcatacacagttgactgtctcagtgtgactcaagaccacaaaaaaaccatttttccttcacttctgagtcctggggttaagacctagaccagcaagcgtactgcttggggtcccttcacaggtttacaagtttttcattgagggcaatctgtgactgtgtgaggttggccagttaggtcaccatcaacaggtcattgatgttgctgtggagcatggtctcgaagtcatcgggaactatttttggtacttggttaaccaggctcatcaggaagtggcccaccttcctgatggtattgtcagctgacacctttccagatagtatatcctctgcatattgcaacactatgctcagggtatcctggatgcgagctgatgcccctcctacttgctgcaagtcacttgagagtccaaccactctgttggggctaaagcaggtcttcatgatcaggtcaactctgatgcattcagtgtcatagaatgcgtatttcactgtcagaggtgtgaacactcccacgatcctcccagggacacccattaaagtgctgacataggctttgatgctcatatggccgttstggagacttgtgtccacagtgaggtggatggggttgggggcctctcggctgtagtactcatggatcagcacagagtgctctgtgatgtcatggcctgcagcgtaccaccccaagatgagctcatttggag

SEQ ID NO: 54217 - DNA, 1500 bp, Homo sapiens
gcatacaatgacatgttatataatagatgttagtcagctgatacttgttcaatgggctcatgaacagatgcacataatattaaggatagaaggtattcacgactttacataatcaaattgtatctggaccaatgtagaacaactaaggctaatatgacagccttccctcaggggctacccagtcaacttgcagattgatgacattgaaacccatccctcagggattttgttctcactgaaatagacacttattctgggtacgaactcaccttttacatttgcaatttttctgctggtactaccatgagtgaacttaaataatttgttattcaccatcatgatatcccatacaacattgtttttgactaaggaattcatttcactgcaaaaaaaatatggtattaggctcatgtttgtgcaattcattggatttacaacataatccctatcacctagaagaatctgacatgatggaatggaatcatgtaactcagttaatgctcccagctggtaaacaacacatagtgaggttgggatgttgtcctacagtgtgtggtataaacttagagtcagtgaccaccgtgtagtgttatttatcttacaacaaaaacacatgaatctgaaagtcaaggggagggggctccctgcactattatgcctaatttgcacttgcagactttttcttcccttttgtgaaactttgggttctcctcatttagagataatgattccccagggaggaaactaacttctttttttttttaatttacaaaaggtaggctatgattattagagtcatacacagttgactgtctcagtgtgactcaagaccacaaaaaaaccatttttccttcacttctgagtcctggggttaagacctagaccagcaagcgtactgcttggggtcccttcacaggtttacaagtttttcattgagggcaatctgtgactgtgtgaggttggccagttaggtcaccatcaacaggtcattgatgttgctgtggagcatggtctcgaagtcatcgggaactatttttggtacttggttaaccaggctcatcaggaagtggcccaccttcctgatggtattgtcagctgacacctttccagatagtatatcctctgcatattgcaacactatgctcagggtatcctggatgcgagctgatgcccctcctacttgctgcaagtcacttgagagtccaaccactctgttggggctaaagcaggtcttcatgatcaggtcaactctgatgcattcagtgtcatagaatgcgtatttcactgtcagaggtgtgaacactcccacgatcctcccagggacacccattaaagtgctgacataggctttgatgctcatatggccgttctggagacttgtgtccacagtgaggtggatggggttggsggcctctcggctgtagtactcatggatcagcacagagtgctctgtgatgtcatggcctgcagcgtaccaccccaagatgagctcatttggag

SEQ ID NO: 54218 - DNA, 540 bp, Homo sapiens
ggtgtttgccatgtgtaaggcccttgttcagtcttcccagaacagtcaggtaggtactatcattatccccttttatctatggggaaactaaggcccacaggttaagtaacagcacacaagtggtgagcacacaagacctcacagcacacaagtggtgatgccaggattcaaaccaaggctgctggcttaagtccagggattcaaccatcaaagcagaatttagcttgttagttcagacaaatattccaataaaaatcacacttagtgttaggaagtaacgcagattccatttgagatctccctaaaaattctaataaagcaaatcaagttaaaagcttgggcaggaagctacagagaacctctgagagtagcatggaggtacagtaagggtgggcactccctcctatcaccaagggtgactctcacactggcagtaaaggggccaggacctctgtcccggtccacctctcagctgcasagccatggagctgacatacagctggtccacagtaaactggactgggctcagccaagggtctg

SEQ ID NO: 54219 - DNA, 497 bp, Homo sapiens
atttaaaaacttgcaaaatcccttaatgtccaagatggacacacccagctgtattctgggcctgctgcttgtctagaactattttcaaatgcttttggattcagtgaaacccgaaatgcatattgcctcaagccctttttccctctttaactttgagacccctgtgtatttggaaggaaatgaaatacatgtgtttctgatttatttacactcatcaaaatgttttgtaagagcatttgatgttctagaagcttttgtgaatttttgaaaataaacttttgcaaaccttcmtcaccactctcactgccgctttccatgaaaaagtcatatttagctgagggtaaacaaattgaaatgcccaccagggttgagttcaattctttgtagcttaggcagagtgtcctgggggctccaggtggtaggcacccggctcccacgtttttgtgctggcgtaactgggctcagcaggttgcaatactcttctggttcttcttaac

SEQ ID NO: 54220 - DNA, 623 bp, Homo sapiens
gaagtattttattttttcctaacttttccttgatgttggaaagctgtgaagatttgtgaagctgaaacaaattccttcttaatcattttagacatttctgtaataacacatgtacatggtttctcagctcttttgattcattgtacattagaaacattcctttaaggttagtagctataatttcattttgtggtagaagaaaagaactgcagaggagtttgacagctattttaagacaatgggaaaaagtttgtatgtgtttttggatgatatgagcttaatgaaagctttttatgcttcctgctcttgcatgaggaggcaggtctaccaaaaatggtagatcacagattgacaacttttactacttgtcaaagagacttcaggagccacagggttggatggatagttgctgagggcagactgtcttctggagattctctgttaaattttgcactaagagttcctcggagtcaaaatagtattcagagtatcagkgagtatgtaaactgattcttttcttcccatttcaacttcatattctgctttattgtagacatcattacagaagttaatggcctgcagaatagctaattatattagtacaccacttgaaataggatgca

SEQ ID NO: 54221 - DNA, 478 bp, Homo sapiens
taacaatcacctaaatcttccattgcccagattttgtcctcctcaaattttcttatttaatggaagaagattccattgccttattctgaatattagagtactgtttttctctcaagatttcccctgtgttaagttctagagttgagctgtccaatatggttgcaattagctacatgcaactatttaaatataaaagagttaaaygtgaataaaactaaaaatcagttcctctgttgtactcaccatatttcaagtgctcaatagctacacgtagctagtggctatgtggtgtacaatacagatatagaacatttccagtatcaccgaaagttctattggatagcacagatctagagattcttcactgtctttgcacagataagcttgttatctatcatctgattaactacagtgataattatagattcttaaagaactttttttttgcaagttcttggtatattcataatggtggcta

SEQ ID NO: 54222 - DNA, 478 bp, Homo sapiens
taacaatcacctaaatcttccattgcccagattttgtcctcctcaaattttcttatttaatggaagaagattccattgccttattctgaatattagagtactgtttttctctcaagatttcccctgtgttaagttctagagttgagctgtccaatatggttgcaattagctacatgcaactatttaaatataaaagagttaaacgtgaataaaactaaaaatcagttcctctgttgtactcaccatatttcaagtgctcaatagctacacgtagctagtggctatgtggtgtacaatacagatatagaacatttccagtatcaccgaaagttctattggatagcacrgatctagagattcttcactgtctttgcacagataagcttgttatctatcatctgattaactacagtgataattatagattcttaaagaactttttttttgcaagttcttggtatattcataatggtggcta

SEQ ID NO: 54223 - DNA, 618 bp, Homo sapiens
tttttgtcagtgcttcccaaaagccagtagctgcatcagaatcacctcagcagctttaaaaaacaaaaccaaccaaccagacacttctaaagatctgatttgttgctggctgtgatattgcatgcctgtagctccagctactcaggaagatctcttcagcccaggagattgagtccagcctggacaacatagtgagacctcatctcttaaacaaacaaacaaacaaaattctgattttataaaagagcsggggggagtcctagaaccttttttttttttttaaaaaatactccttaatgttgcttctgatatacaaccaagtttgggaaccagttttattctcatcacctgctctctatctctggctctaaataggagatagtagttaatttagacctaatgagtagctaacataatagggggtgtgtctaggcagaggatgagataagagcccgttgaaccatcccacaacctgctccagtatctttttctcgaaggtactaacaacaagcccaagaagtttcagggaaagtgtatacctgtttctgccagcagtttcacatttattcttgaccaagatactgggaaggctgtctctcttgaggctttcttaagatg

SEQ ID NO: 54224 - DNA, 552 bp, Homo sapiens
aggcttattgtttgttattagttttgttctgtttggttttattgttctcttgcttgggagatgaaaataagcttctaagtatatattctcactttaaaaatcttaagaaagmatgaataagatctacttgttgatagcacaatagagtgactgtagttaataataattcaactgtacatttaaaataactgaaagagtataattggattgtttataacataaatgataaatgcttgaggtaattccatttatccttatgttattattttgatacattgtatattgtatgtctttatcaaaatatctcatgtaccccataaatgtgtacagctactatgtacccacaaaaactaagaattaaaaaaaaatctgaagagcacagtcacttactcggtcgctatacaccaaaatgcatataaatgtagacttgaaatgtagttcgagatgctgatttgggggaactaattgaaaggcttgaaaattgcttagcaattctggacttaatgtatcttagtgctggaaagctaaaggggacttactggtataaaggga

SEQ ID NO: 54225 - DNA, 651 bp, Homo sapiens
tgtgacaataggccttttgtgatgctcgctgacctaatttgtactggtgacctgccttggtggcatgcttcatctcctatggggttggaaaaacttttttctccttcaatagtattttttttccccatgtcattcttacaacactgcagacctcttattttttttattttttatttttttttgatttggagtctcgctgtgtcrcccaggctagagtgcggtggcgccatcttggctcactgcaacctccgacttcctaactgcagacctcttttaaaaattcttggcttggcatggtggctcaagcctgtaatcccagcactttgggaggctgaggtgggcagattgcttgagcccaggaatttgagaccagcctgggcatcatggtgaaagcccatctctacaaaacagcacaaaaaaaatttagctggggatggtggcacgctgctgtagtcctagctacttgggaggcagaggtgggaggattacctgagcccaggaggtcaaggcttctgcgaactgtgattgtgccactgcactccaccttgggcaacagagtaagaccctatctcaaaaaataaataaaataaagtaaaaataaaaattcttggtctcttaattgctgaatgattttttttttagtcgtacctc

SEQ ID NO: 54226 - DNA, 529 bp, Homo sapiens
ccaaaaataatatttgttcatttaatatttattcattgttaatgaataaattaacatttagtaatttattaaaatgcatatattcattaatccatttaaacgttaaaaataacattttattataaaaataacttttttaaaaaatccaagtgagaagagtgacagtgttttacatttttgcaaatctcttgactgtccggcttaatagaagacagctggattctcatatcrgcttctgcattcaatcagctgtgataatgttgttttggataaagtatgcgaaggaaacccagcctcacgtagttattttgttggaaaagggaggaatattttaatagtcttttcagataattgtgaatattcttctttgacattataccaaaactcaaccaatagtagattactaaggttagttgcaatgtggaatctgaaactatatcaatgaactttttgtgctcagttatgttaaaattcagttatctggcttgtactctgaatagatcttttgctcatgcatgattttgaaata

SEQ ID NO: 54227 - DNA, 993 bp, Homo sapiens
taaaaaatacaaaaattagctgggagtggtggctcatgcctgtagtcccagctactcaggagactgaggtgggaggattgattgagcccagaagtttgaggttgcagtgagccatgatggcaccactgtgctccagcctcggtgacacagcaagaccctktctcttaaaagaatcccaggcctacaggcaaggcagaggaaacccagccctgcctctttggcacgcacaaggccaaccggggtctgaactgccgctggcctgggagctggcagacctggcccaggagctcggctccactgctcaccagcctgaccttggcaggtcccagggtcccgcaggcccaggaaaggggctagacagaagggcttccaacctcccggggagctttctactgcccagatcccttccaccttccagacagacggctccgcagggtcccctgttgggaatgcctcggcctgtctctggccctcacggggccatattcatttcctgctgataccaaaatccggcacccaaagtgtcaagcgggtctgcacggggttttggtccatggaggtctggcctgtgcagctcaggaacggggatgggtctgtaaatctcgctgggagaagccgggtgaggtctcgaagcctgatccatgggaaggtccttccctgaccggggcaccaggacttgacagcctcgacttacctcctccacatattccgggcccaccggctgcgcatcagagcagcccgcgggagcttcctttgagcctccttgggtaggtgctccgggaccctctaatttaggttgggctggtttcccccactggggtctgcagcctgctgcctgtggctcaggaggccctgaggggaaaaaccatgtcacttataccctgttccaggagaaagcactgcagctgcagacccgccaggcggcatggggtggagagccacccagactgcaggctgtgccatccccctccctcctgtgatgtcagggggaat

SEQ ID NO: 54228 - DNA, 605 bp, Homo sapiens
tgttaagtacagctcctggggaagaacttctctccgtctgtgaacctgtgaaaataaggaagcaacatatctgctcccaacatgcagtgatgggacgacatagtaacaattatagacactccagttctaaaagggggaattgaaaataaaatggagttgctgctccaaagcagcctggaaacccagcccagccaatgccattgggtttccaggccagagcttatcgaacgtcagcctcagctttgccctccgggtcagatgtcagaaaaagatgacagtggaaatgcctcttgtaagggacttgaatgcatcaggctggtgggggaagaagccctgcttcagtccacttttgagtatcgtgcaaacgtcacacatttccacctgcacagaacgacaaggacagaactgcatttccacctgccgtggaactacaagaggcaggagtggtacctctggtgagggatggcccaggatttgcagcaatccacctgggctgtcctgtggccagatctcaggaagcacttagcacagrgaatgtggttgagtaaaaggccattaacaagatttgcccttggtccaccatgagccagccacagttttagtag

SEQ ID NO: 54229 - DNA, 672 bp, Homo sapiens
tatggtttggctgtgtccccacccaaatcttatcttgaattgtcactcccataattcccacctattgtgggaattaattttatcatggggtaggtcttttccatgctgttatcatgatagtaactctcatgagagctgatggttttataaagggaagctcccctgcacacactctctttgcctgccaccatttaagacgtgacgactttgttcctcctttgccttctgccaggattgtgaaccatgtggtaccgcatgtcaattaaacctctttcatttataaattacccagtctcaggtatgtctttattagcagtgtgagaatgaactaatacagtaagttggtaccaggaatgtggtgttgccgtaaagatacccgaaaatgtggaagcaactttggaacagaggtcggaatagtttggagagctcagaatttgtaatggggtaaacatygctcttgctatgcaaagaaactggtggcattttgcccttgccctagagactaatacctcaacagtgtatgataacataaaattggttaaaagggacacaaaatgctcatcagtaggataaagtaagtcttacattaataataaattggaatgctgacaaaattgttccaggtattacaatgaaatagatatatctgttaagtaatatgtaatcacttcc

SEQ ID NO: 54230 - DNA, 600 bp, Homo sapiens
attctgtttcgaatatagccacagaaataaaggatggacaaaactctgggacaggtaattttgcaatacacatttaatgtcatgttcacttagggtagaagagaacttctcttccctgaataaatcgcagggggctcattgaatctgcacattctgattcagcaggcctgagatcctgcttttgtaataagttctcgggtgacgctgatgctgctggtccttggccatgatctgagtagtaagattatattcttccccacagtgaaattggcaagaacgattggagagcagtgcaagatataacaggttaagggacagcatattcttgctttaattctacagcatgtttccatcgtaaagggaaggagaacgagattaastaataaaaattataggcgtcagatcatattgttaaaaccacatggaagaagtgattggaataacccataaacaatgtagaaacagaactaaggagacgtctgatgtggtaattattttactcaaggaagaaggattgagaggcaagaaggagggaaaagaagatgttatttatgtaattttggggtttctgctgcagaaacctgatgggactcacttcag

SEQ ID NO: 54231 - DNA, 600 bp, Homo sapiens
attctgtttcgaatatagccacagaaataaaggatggacaaaactctgggacaggtaattttgcaatacacatttaatgtcatgttcacttagggtagaagagaacttctcttccctgaataaatcgcagggggctcattgaatctgcacattctgattcagcaggcctgagatcctgcttttgtaataagttctcgggtgacgctgatgctgctggtccttggccatgatctgagtagtaagattatattcttccccacagtgaaattggcaagaacgattggagagcagtgcaagatataacaggttaagggacagcatattcttgctttaattctacagcatgtttccatcgtaaagggaaggagaacgagattaactaataaaaattataggcgtcagatcatattrttaaaaccacatggaagaagtgattggaataacccataaacaatgtagaaacagaactaaggagacgtctgatgtggtaattattttactcaaggaagaaggattgagaggcaagaaggagggaaaagaagatgttatttatgtaattttggggtttctgctgcagaaacctgatgggactcacttcag

SEQ ID NO: 54232 - DNA, 622 bp, Homo sapiens
ctgaaatatttaagagcctcattaatgccaatcaactaaagaagttaaatattgtattatttcttctttgtagaaagaagaaaaagaagcagagatactactttttgatagaataaagcaaaagatattactttttgatagaataaagcaaaaataaataaataaataaagtaacagagattctgggcttccattttccctcatgtaatagcattccctcctcaccaatgtagacagtgaccactgggatttctgtttctataatacaccactttgtggtgtcattcttgtaagtgcactgtcctataagacaacaagcattatccatttacagaaaaagtagaccaacagaaacacctggtattcttttcatactcaccaagatgtttttggtgtatcagagttcaggccagccctataaaatttcagagccacatataagactaaacattaggctgggcacggtggctcacgcctgtaatcccagmactttgggaggccgaggcaggcggatcacgaggtcaggagatcgagatcacggtgaaaccccgtctctactaaaaatacaaaaaaaaaattagctgggcgcggtggcgggcacctgtagtcccagctacttggg

SEQ ID NO: 54233 - DNA, 608 bp, Homo sapiens
aaataatattgtagatagatatgactcttctcatttacagataacaagactggggctcacagaagttaagtaatttgccatcatgacacacattaaaagtggtggtggtgggatttgaacctgagtctgtgtgaggccaacatctgacttcttcccactatgctatttgaaagtaaatttctgttagagagaatcctgactatgtaggaaaatacactgtgaagatgacttccacttaggcaaaggtcatcttccgcatccaccaccaagcccctgactcatgctatttcctgccctgctcccccgtcttagttctccaaactataccattctctgctctaggagccccagctcaggttgctgagtgaaaaaaaaagggaactagggcaagaactagtagagttgataaagttttcttcagaaaccactttgtcaacctgactgyctctgcttttgtctgaaaccagcatggaagcttcccactactgagactagaaacagaaatcccatcctgtttcatgagttttcaaccagaaatatcacccggcatgcgtttctctcttctaccttttctccctggtctgtcaaagcccctttcctggtcacag

SEQ ID NO: 54234 - DNA, 620 bp, Homo sapiens
catgcaatctcactttgtttttttgaagccaggatttaagccttttctattatttaggcgatattttcacaattgtgagaatagtttaattccactaggagtatcttttcacaatgaacatgtctctcacactcacacgacaaataaaaactggaataaaaatttacataattaatatattccacacsacttctgaattttataacagtacgatctatgatatattggttgattatataaccttattttaatatttcaaatgctgggttaataaggtaaaaatacttttattaacttttgtaaagccgtaataaaatgtcctttatcttaactctcagcattttagtagctgaaataacaaaataacaaaaaataaaaacacacaaaaaaattttaaactacaggacagtatgaggtttgcgacttttaaaagacatttatatgtatggcaacctactgtactttgattaattatctcagttatgatttagtttctcatcacatatggtattccacagcatgctatgtaaatgcaccaggccacatgccacttagaaaatggcttagtttttcaagtttgtagtaagcgtaatttagaaagtggcttagtttttcaattt

SEQ ID NO: 54235 - DNA, 620 bp, Homo sapiens
catgcaatctcactttgtttttttgaagccaggatttaagccttttctattatttaggcgatattttcacaattgtgagaatagtttaattccactaggagtatcttttcacaatgaacatgtctctcacactcacacgacaaataaaaactggaataaaaatttacataattaatatattccacaccacttctgaattttataacagtacgatctatgatatattggttgattatataacctwattttaatatttcaaatgctgggttaataaggtaaaaatacttttattaacttttgtaaagccgtaataaaatgtcctttatcttaactctcagcattttagtagctgaaataacaaaataacaaaaaataaaaacacacaaaaaaattttaaactacaggacagtatgaggtttgcgacttttaaaagacatttatatgtatggcaacctactgtactttgattaattatctcagttatgatttagtttctcatcacatatggtattccacagcatgctatgtaaatgcaccaggccacatgccacttagaaaatggcttagtttttcaagtttgtagtaagcgtaatttagaaagtggcttagtttttcaattt

SEQ ID NO: 54236 - DNA, 608 bp, Homo sapiens
tgcattcaccaattctttgtagaatgctgttatgtcccaggcactgtgcagtttggaagacaagcagcaatagcacaaatagaagtcattgtctgaaggaagtttgtggcaagctctttactgaaacatctcaagtgtggtgtgtactgaggatggcatatttatataaaaagggrcatactagtaaataaatacctaagtagattattttagattggaaatatcactcagtacttaaaagactttaataatgacttgatttcctttcaatgtttgcctctggtaaataagtataccactaaatatagtatatacctaaaatacaagacttttgtgagtctaacataaaaaacagtgtttcttcaagtagcaattcttatatctgcctgtaatatttagttacatttgaaaatatctatttaggttaattcctgtttcacagattatacagattgtgagttcatacattatgggggaagattaccaaagcgggttaataacatgttaatagtggtttgaattctccaagaaaactagccttgaacttttaaactatgtgtaactgggagagagctaccagattactaattattataagataaaaatat

SEQ ID NO: 54237 - DNA, 902 bp, Homo sapiens
caaaggagttagaggattcagctagcagccattgaaattcaatatatcttgtctttctgaattcccataaaatactttaatgttccattgattgccaactcaactgttttaaccagtacctaggacctacttggcagacagtcagttttgcaagatattatgccatttaattgcatgataatattacattcatgatggtaatataaatgaggcagtaaaaagcagttgtgaataattaaatgtcaaggactaagaaaatacattggatgacactgaagcatggtataactttagaaagacacccttcaatttcgaacacaggcaggcagcgtatttaatgagcagaacctatattcttgttaagtttcactgctagaaccaaacctattttttcataaaggttcaccagtctttagattctgctaaaactcagttggagaatttcttttcacagcttctactgtctaaggtttcacaatataagaaatataaagtttctcctcttctaaagttkgaaagttttatataagaattttcttgcgtctccattttcctcctctactgatcacaactccctcctgctacctcatgtcctttggttcccgggcaggggaattcttcagaaaataatccttccaatcactctctgtccttttcccctcaggtctagataagacaagccccctcaggaagccaggacaaagacgtgggagaaaggcaggtagagtggtcaagaaatgttcttttcaggcaggaattggggtcctcagcctatcttggcagagactccagcaagaaaaatatctaattcattcatccaattaagtggctcttaagcacctgcataggttaagagctggaacagaagtggaagggcaaagataaataccttccatccgatt

SEQ ID NO: 54238 - DNA, 496 bp, Homo sapiens
tttataaagaaatatgaatgtttacagagggggcaaatctgaaatacactatttaggtaggaaaagatgtgcctctttataaaagacatcactgaaatagtctcccaatttaaaaatctattctatggggaagttcagaattaatttgacaggttaagtatttcagttaaggacaaagtggaggaatgttactcgaaacccagtatcaactcagaggatgcattttctgcatagaactactgagaaacataactactatatataaatccagcagccaattacatttttgttaggagtatggtgtatctcatattttccaagggaaaatgttacgtacctgtattattttcctgaggctgctgtaacagattacacaaatttggtggcttaaaacaacagaaatggattttctcacaattgtggaggccagggattagaaatcastttgtgtttaaacggctcaaatctctgcatctactatcatattgcctttttc

SEQ ID NO: 54239 - DNA, 496 bp, Homo sapiens
tttataaagaaatatgaatgtttacagagggggcaaatctgaaatacactatttaggtaggaaaagatgtgcctctttataaaagacatcactgaaatagtctcccaatttaaaaatctattctatggggaagttcagaattaatttgacaggttaagtatttcagttaaggacaaagtggaggaatgttactcgaaacccagtatcaactcagaggatgcattttctgcatagaactactgagaaacataactactatatataaatccagcagccaattacatttttgttaggagtatggtgtatctcatattttccaagggaaaatgttacgtacctgtattattttcctgaggctgctgtaacagattacacaaatttggtggcttaaaacaacagaaatggattttctcacaattgtggaggccagggattagaaatcactttgtgtttaaackgctcaaatctctgcatctactatcatattgcctttttc

SEQ ID NO: 54240 - DNA, 669 bp, Homo sapiens
tgcttggagtaaaaagaaatagtgagcatgtgaatgtgacagaaggtaagaaaagcaagtgaggaaaaggggcagaatggggtgggaagggcgtgggtcacagaaaccagtgggcagagagagacggggacagagaaagcagggccaggtcctgaaacgccagtatgtccrtgaggttgaggggcacacagaatggagaggttccagaggctgcaggcaccaccctagccgccctcccaggcaggaagatgcggaggttatgcagactccgtctttctatcccctcaggacgtggagggagaccaagagaagtgggagggacagaatgggcacaggccctaatgatgctctggacgtacaaggctggaggagataaaattagataagataaagcttaagccagcaatttggaaggaaaagcaatcagttgaattacagaaaggaaaagccacacaggggagaggggcagggaggcgaggcctgccctcacactctacccaccacgccacttctggaaataactcaggcgtccctgggagccacaccaaagggctgagggccccagacactttctttgtgagctcaagtacctggaattactgtcgagaggtatccaaggaggccttcccactcaagaacacaacctacagatgggaatgctgctcccca

SEQ ID NO: 54241 - DNA, 669 bp, Homo sapiens
tgcttggagtaaaaagaaatagtgagcatgtgaatgtgacagaaggtaagaaaagcaagtgaggaaaaggggcagaatggggtgggaagggcgtgggtcacagaaaccagtgggcagagagagacggggacagagaaagcagggccaggtcctgaaacgccagtatgtccatgaggttgaggggcacacagaatggagaggttccagaggctgcaggcaccaccctagccgccctcccaggcaggaagatgcggaggttatgcagactccgtctttctatcccctcaggacgtggagggagaccaagagaagtgggagggacagaatgggcacaggccctaatgatgctctggacgtacaaggctggaggagataaaattagataagataaagcttaagccagcaatttggaaggaaaagcaatcagttgaattacagaaaggaaaagccacacaggggagaggggcrgggaggcgaggcctgccctcacactctacccaccacgccacttctggaaataactcaggcgtccctgggagccacaccaaagggctgagggccccagacactttctttgtgagctcaagtacctggaattactgtcgagaggtatccaaggaggccttcccactcaagaacacaacctacagatgggaatgctgctcccca

SEQ ID NO: 54242 - DNA, 669 bp, Homo sapiens
tgcttggagtaaaaagaaatagtgagcatgtgaatgtgacagaaggtaagaaaagcaagtgaggaaaaggggcagaatggggtgggaagggcgtgggtcacagaaaccagtgggcagagagagacggggacagagaaagcagggccaggtcctgaaacgccagtatgtccatgaggttgaggggcacacagaatggagaggttccagaggctgcaggcaccaccctagccgccctcccaggcaggaagatgcggaggttatgcagactccgtctttctatcccctcaggacgtggagggagaccaagagaagtgggagggacagaatgggcacaggccctaatgatgctctggacgtacaaggctggaggagataaaattagataagataaagcttaagccagcaatttggaaggaaaagcaatcagttgaattacagaaaggaaaagccacacaggggagaggggcagggaggcgaggcckgccctcacactctacccaccacgccacttctggaaataactcaggcgtccctgggagccacaccaaagggctgagggccccagacactttctttgtgagctcaagtacctggaattactgtcgagaggtatccaaggaggccttcccactcaagaacacaacctacagatgggaatgctgctcccca

SEQ ID NO: 54243 - DNA, 631 bp, Homo sapiens
tggtgggtgcactgggcatctcaaattgggacagtatggatctaaatcatttccatcaccatcaaaaattccactggacagtgctgatctagactgaccatccctgactccatgaaattactttttggttttgacttagagtacacaaccagcattgaaacattctttgtgtgttaataccttaagaggcagggtggggtggctcacactgtaatcccagcacttttggaggctaaagcaggtggatcaccctaggtcaggagttcaagaccagtctgaccatttggtgaaaccccgtctctactaaaaatacaaaaattagccgaatgtagtggtgcacacctgtagtcccagctactcaggtggttgaagcacaagarttgcttgaacctgggaggcagaggttgcagtgagctgaaatcatgccattgcactccagcctgtgtgacagaacaagactgtgtctcaaaaaaaaaaaaaaatcataagagagctactgtaggtcatttgggacctaggaagatgtgatctaacatggcataatttagcaatttctttaatttgtctttgggggaaccaccaagtgctctcacccaaaaaaagtcaactaaaattgaaaaatctcagctgg

SEQ ID NO: 54244 - DNA, 1782 bp, Homo sapiens
gcatgatggattagattctggaccatgaacaaaactgccatcaaggtcattattgggacaattgatgaaattggaaaacaaactgtggatgagaccagaggactataccagtgtgttaaatttcttaattttggaattgtattgtggttakgtccttgtttttaggaacacactgaagtattcaaagttaaccaggcaacatgtctggaactgacactaagataggtaagagtattaaaaatatatgtgtatttacgtacatagaaggtgtagaaaatgcgtgatagtgaaaaactttacatgaggtataggttggagggtaattaaaacttataaaggaaagatggtgggggaacatggtagtaacaagacacagatttttcctaccagccctcgaggacatggaaagatctcttcactcccaacaactttaggactaaagagaggaattcatatgaactagaactttcaccaaaattaaccattcttccctcaatgctaggaataatgagtggttgcactgttgggtagagatgctatgtctaagacaaacgttctcaaacaatgcctcctttctttttccttcacaatgtttttccattttttaaatcaatcctttcaatctttacactatccgacccagcaagttcagcagaatacatctaaggaataattcaatcccttaaaattaggtgaatttgaagtgagcatatcaattttgtttataaaaaattaaaatgagatatttaaggcacataagcagtatattacttaatacaagatgtatctgcttcctatgcccaagttagtaaatactaccaatagattaggaatcccttagttatccctgacaaacatatatacatatacacacatacatacatgtatatatacatatatccctaagaaatatactaatttgtttcacattattttccatagtttcaattttacacaagcatgttttcaattttacacaagtgaggataacacatcctattgttccttttttccaacactaaaattgtgagattcgtcctggtttatttttcactgctctgtagtattccactgcgttactttaccacaatccatctttactttctcattttgatgacaagactaggttgcttctgggtttttcttttaaccttcacaagccatgttactaccaacattgaaacagagggcatgggctcttcctctcttacctattgatgtgcctgtcatgtgtaaacatggactggtacatatgactaattgataaccatttgttcaatgaatggtgaatgaacctatgacatatgacaatgcccaaagtggtaaaatagataaacatatactcttctaggaatgtaagagctaaataataagggcatgagtggaagctcagatcatagagcagaagaattacaggcagggaagaaataaaggaggttccatgaattggaaggagatgtggatgcagaggtgcacacccagagaactggaaaggtctacattaggaaccagcacgatccgtgtaatcacaggacataaaacccaaatcaaagctgcagcattttttatgtgtggcagtggttagatcagagaactactacctgctagcatgccatttcattatctggttctgcccttgcagactgaagattcctggggtttggggcaggctgagcttccaggggtggtcccagcaccatttttctggaaagcctggattaagagagatccagctagctgtgagatattttcaatatttttcattcagggtatataatacaa

SEQ ID NO: 54245 - DNA, 1782 bp, Homo sapiens
gcatgatggattagattctggaccatgaacaaaactgccatcaaggtcattattgggacaattgatgaaattggaaaacaaactgtggatgagaccagaggactataccagtgtgttaaatttcttaattttggaattgtattgtggttaggtccttgtttttaggaacacactgaagtattcaaagttaaccaggcaacatgtctggaactgacactaagataggtaagagtattaaaaatatatgtgtatttacgtacatagaaggtgtagaaaatgcgtgatagtgaaaaactttacatgaggtataggttggagggtaattaaaacttataaaggaaagatggtgggggaacayggtagtaacaagacacagatttttcctaccagccctcgaggacatggaaagatctcttcactcccaacaactttaggactaaagagaggaattcatatgaactagaactttcaccaaaattaaccattcttccctcaatgctaggaataatgagtggttgcactgttgggtagagatgctatgtctaagacaaacgttctcaaacaatgcctcctttctttttccttcacaatgtttttccattttttaaatcaatcctttcaatctttacactatccgacccagcaagttcagcagaatacatctaaggaataattcaatcccttaaaattaggtgaatttgaagtgagcatatcaattttgtttataaaaaattaaaatgagatatttaaggcacataagcagtatattacttaatacaagatgtatctgcttcctatgcccaagttagtaaatactaccaatagattaggaatcccttagttatccctgacaaacatatatacatatacacacatacatacatgtatatatacatatatccctaagaaatatactaatttgtttcacattattttccatagtttcaattttacacaagcatgttttcaattttacacaagtgaggataacacatcctattgttccttttttccaacactaaaattgtgagattcgtcctggtttatttttcactgctctgtagtattccactgcgttactttaccacaatccatctttactttctcattttgatgacaagactaggttgcttctgggtttttcttttaaccttcacaagccatgttactaccaacattgaaacagagggcatgggctcttcctctcttacctattgatgtgcctgtcatgtgtaaacatggactggtacatatgactaattgataaccatttgttcaatgaatggtgaatgaacctatgacatatgacaatgcccaaagtggtaaaatagataaacatatactcttctaggaatgtaagagctaaataataagggcatgagtggaagctcagatcatagagcagaagaattacaggcagggaagaaataaaggaggttccatgaattggaaggagatgtggatgcagaggtgcacacccagagaactggaaaggtctacattaggaaccagcacgatccgtgtaatcacaggacataaaacccaaatcaaagctgcagcattttttatgtgtggcagtggttagatcagagaactactacctgctagcatgccatttcattatctggttctgcccttgcagactgaagattcctggggtttggggcaggctgagcttccaggggtggtcccagcaccatttttctggaaagcctggattaagagagatccagctagctgtgagatattttcaatatttttcattcagggtatataatacaa

SEQ ID NO: 54246 - DNA, 3022 bp, Homo sapiens
atgcatcaatcttacacagtattcaatagggaaccagtgtcagtttttaagcagacgtttttaaagtattaagatgaatcaagtatcacagcctcatgctaatcaatatatttgaaacttcttagaaaaataaatcttgatgttaaccaaagtagatatccatatctacttggcaatgccttttaaaacatggccgtaaatgatttaaacaaataaatattgactactaggtaaaatgtttctcacaggagcatctttggtgagatctaaatggaagaaagactttgcaataaaaaaagcgactcttttttggagaccttccttgtcctgctcaagtcataagtcctagagccccatgctcttcttggtcactcctgtcagtggtgagctgtgagacaggacactgtgaaaatcaattactctctaagcattggatcatgtgaccctccaatccaaaggaccgccagcctgactcaggccagtctgacccactagtggtcttatggaatggaatggagggaaaaaaatgctgtataaaataatcagtggaaactataaaatcaagtgtttcctctatccaacatttatgttgcttcctttcactccttccagataaacaaaatcaccgtgatgttcagtataatgacatgagataactggctggctctccactaacaattcagagtatgggtttagagtcaggctgcctgtgttggaatccctcctcagcttgcaaattgtgggaccacaaacaagttacttttcttacttaaaccccagtttcctcatatataaaatggtgagtaaatatatcctttgtagcaacatggatgcagctaggggccattatccgaagtgaattacacaggaacagaaaaccaaatactacatgttctgacttgtaagtgggagcaaaacactgggtacacatggacataaatataggaacaataggcattgaaaactactagaggggccagggagggaagaagggctgaaaaactcatagctgctatgctcactacctggataacaggatcatttgcaccccaaacctcagcatcatgaaatatacccagataacaaacctgcacatgtaccccttgaatctaaaataaaagttgaaagtatttttttaaataaaataaaaatagcaagtaaaagtgagaaaatgcataataaggttggtagaaggataaaatgggacaatgcataatgggtttcatatagggaatgaactcgacacattaaaacattcatgattacatcattagtgcacagtgtaacaatttgctactaaaagtatgataaatttcgttgaataaaaaattcagtagaatgaacacaattatgaatccttttctagcctgtgcttttcctacaagtatacatgtagctccagggaacatggccacagtataaatgaacaaggtgcttcttcctagagtattcactttatcccaagtgtcaggagagggaaaataaattaactcataagtacctttttagttacccttatattaaattcataagaaatgttttatgtggttggatatatattattttccaaataatactgagtaaaaatatctacaagtgtacttttaagtctacaatttagagcttatatgtatgactttaaaagttataatatatgcttcttatattaaatgtctggaggaatgattccattcaaaacaaagcttgaaatattgtgcacatgtttttctccgtattttaagtttataatattttaaaattatactcatctttttttaatccagtgataaaaatatagtgcaacttctctgtcaaataaatttttccacagatcataagcaatttttattatcattttgtcaaagaaataacataaaaagtaaggatccatgtgaatttttaagataaaacacaagatatcaaagcttcccctctaatacctgcacggaattccatcttgtcaggcattcagacaacttaactacaaattaaaaaacaaaaaaactgattgcatattagttgtatttgagtatatttaatagttaataaaatgccaccaaaaggtcatataagacaagccaccagtgtccgaactccactttttttttttttttttttttttttttttttgaggcagagtcttgctctgtcacccaagctggagtgttgcagcgcgatcttggctcactgcaacctccgcctcccaggttcaagggattctcgtgcctcagcctgccaagtagctgggactacaggcacgtgccaccaagccttgctaatttttgtatttttaatacaggcaggatttcaccatgttggccaggctggtctcgaactcctgacctcaagcaatccgcccacctcagcctcccaaagtgctggaattacaggcgtgagccactgcacctggcctccaaattctactcttaaccacccaatggaaaaattcaactttgaaaaaatgtaagtcagataatgtatgccaagtgatacataggaaaccctgtaaaattttagctgcatttcccagattcagtcttccctattccccaattcagtgattagctcttcctgcaaatgtcaatttgcagttctactctgagatttccacccaagaggaacaaagcatacgttcacagaaacacttgaacatgaatactcacagcagtttcatttgtaatagcccaaaactgaaaacagcccagatgtccatcaacaggaaatgggtaaacaaattatgatatayttgcacaatggaacactactcagcaataaataggaaccaattgcttatacaaacatcaatatggatgagtctcataatactatgctgcaaaaatacatttagatggaaggaataagttctaatattcattggtacagtaggagaattaaagttaactataatttatcatttatttccaaatagctagaagagaagaattgtaatattcccaacacaaaggaaagataaatgttttaggtgatagatatcccagttacctgatttgatcattatgca

SEQ ID NO: 54247 - DNA, 614 bp, Homo sapiens
aggaaatacttcagttcactaggaagcactaaaagatttgaatccaaggtacttcctaccactcaagctacagtcactaggactaagtcgttttgctttcaccctgttctactgaagcctttttgactcctccttattgaacatccaatacaggctatggcctgtatgaccgtttgctcagcctttctggaccttagtttttatctgtaaaaactcaagttttactttttgaacccagaaaaaaagatattttgcacagcactcctgatatgataatgatgaggcattttttatagtgacggattatcaagaatgcgtgtcctggcttttcttcgtagaacattaccagatgagtgtgttggaatcagctccaattagctccactgtcgggagagtgtttgccaaggacttggatgaaggcatcaatgcagagatgaaatatactattgtggatggagatggtgcagatgcctttgacattagcacagatcccaatttccaagttggtatcataactgtgaagaaggtaatccaactcctttttctaaamcactttcatgggtgctttgaatgtttatgaaatgctagtaaggactgttgtattattgatatgc

SEQ ID NO: 54248 - DNA, 622 bp, Homo sapiens
ataagtattcttaacgcttgtaaaaaaaaaaaaaattgtgttcttaaatgaacacctcattagtgcgaatcaattgtccccttcctataaaagagtgtggcactttaaatgctgaaacctcttttagcacttcaagctgaaaacttttatgtaatgatttttaaggaagaacttctcctaccaaccccaacaattgaaattgtgtggtggaaaagtaagatcttcatgtttcctatgctaatcataatgctttgggcacgagcttcttgcagtggtgggagtccagcaggtctattacatagccagtaagcctgggatatgctgcagaaatacataattttgtgtaccactttaaaagactttattttttgcattgctggattcctttttttacacrggaaaaggaagcacaccgtctccctcaagtcagcttcttgccaagatgagccttaaatagcacaaatcaccttaaccccaccttttgccttactattcagtgaatcaaagatctgagttaatgagaccaaaatgctttttgagaaattttggaaactgaaatggtcaagtggttacatgatatagctttatttgtgttgtaataataccaaaactcttagatgca

SEQ ID NO: 54249 - DNA, 1430 bp, Homo sapiens
attwaaaaaaatacttttctttacaaaaatgagattattctttttttattattatactttaagtcctagaatgtgcaggtttgttatgtaggtatacatgtgccatggtggtttccttacccatcaaactgtcatctaggttttaagcctggcatgcattacatatttgtcctaatgctctccctccccttgccctccactccccgacagccctggtgtgtgatgttcccctccctgtgtccatgtgttctctttgttcaactcaaaaatgggattattctttaggcattgttctctaccttgtttttgtcacataacaaaatgtctatgacattttgtgttgtctgtgctatcagactgcctgaattcaaattccagctctaccacttactccctgcgggatctggtaaattacttaattttgctacactctaaatttatatctgtaagttgtaattataataatgtctatgtcataggatttggagaaaataaaatgataaaagctttgcaaagcactgaactcagtgtgtagcatatatcaggtgttaataaatattggctaacattacccatcttatttctttagagactgcatgacgttgagtaataaaaatatactataaactgtttaataaatcacctatttgtgaatactctgtttcctctgtggttgttttgtttgttatgttgtattatgtttagtttgctattgtaagcaacatcacaataaaatgtctgtacatatattttgatatacaaatattactatttttaaaggatagcttttcataagtaaaattattggacaaagaagtgcagattttcagttctgatggagactaccaaagggtcaacactgatttactctcttactgctagtatacatgaggatctaattccctttgtataatgtcaaaaaaatttgcataaaactgatgagtgagaattgaatttcagtccacattttctgattatcaattatgctgatcatcttgtcatacattttatttggtaactgtgttgcaaatattttcattgagtcaatagtttctattttagctttgcctatgatctcttttggtataattttcaaatttttaagtgggttattttgtcattcttgttcttcatttcatttcttgcttggaatgacatttccatcctgagactgtaaaaatgtgctcctttagttttggctcaaacttactttgtagtttggatttttaacttttaggttgttcatttatctgggttttatttctatgtgtgggttagatagaaatctagccttatactttccaagtgttcaaccaattgtgacaaatatcattaatattccattctttctttgatgctattaagttttactatatattaagttgcagataaattactgtctctatatatctacctatatatatgtatgc

SEQ ID NO: 54250 - DNA, 1430 bp, Homo sapiens
attaaaaaaaatacttttctttacaaaaatgagattattctttttttattattatactttaagtcctagaatgtgcaggtttgttatgtaggtatacawgtgccatggtggtttccttacccatcaaactgtcatctaggttttaagcctggcatgcattacatatttgtcctaatgctctccctccccttgccctccactccccgacagccctggtgtgtgatgttcccctccctgtgtccatgtgttctctttgttcaactcaaaaatgggattattctttaggcattgttctctaccttgtttttgtcacataacaaaatgtctatgacattttgtgttgtctgtgctatcagactgcctgaattcaaattccagctctaccacttactccctgcgggatctggtaaattacttaattttgctacactctaaatttatatctgtaagttgtaattataataatgtctatgtcataggatttggagaaaataaaatgataaaagctttgcaaagcactgaactcagtgtgtagcatatatcaggtgttaataaatattggctaacattacccatcttatttctttagagactgcatgacgttgagtaataaaaatatactataaactgtttaataaatcacctatttgtgaatactctgtttcctctgtggttgttttgtttgttatgttgtattatgtttagtttgctattgtaagcaacatcacaataaaatgtctgtacatatattttgatatacaaatattactatttttaaaggatagcttttcataagtaaaattattggacaaagaagtgcagattttcagttctgatggagactaccaaagggtcaacactgatttactctcttactgctagtatacatgaggatctaattccctttgtataatgtcaaaaaaatttgcataaaactgatgagtgagaattgaatttcagtccacattttctgattatcaattatgctgatcatcttgtcatacattttatttggtaactgtgttgcaaatattttcattgagtcaatagtttctattttagctttgcctatgatctcttttggtataattttcaaatttttaagtgggttattttgtcattcttgttcttcatttcatttcttgcttggaatgacatttccatcctgagactgtaaaaatgtgctcctttagttttggctcaaacttactttgtagtttggatttttaacttttaggttgttcatttatctgggttttatttctatgtgtgggttagatagaaatctagccttatactttccaagtgttcaaccaattgtgacaaatatcattaatattccattctttctttgatgctattaagttttactatatattaagttgcagataaattactgtctctatatatctacctatatatatgtatgc

SEQ ID NO: 54251 - DNA, 629 bp, Homo sapiens
gacagagagggatgccaggcagaaaagacaggtttgtgcatcaggatctgtcccacacatgtacacacatgcacatgtgagtgtgagcttgcttctgctcatggtttaaaagtttaacacaggccttcctggttggttgatgtgactgtcactgcaggtgggggcctagctggggtggcctagatttggtgtcagtggggcatggctctgcttatggactctggagcccagggcaggagacagacccaggcagtggcttatggggagcagtgaaggtacacacgaaactcaatgctcttcgcatgctgggctgtragctgagccaactccccgctccctggtgctgtttcatccttgtcatggtctgcccttgtccttagagtgccttcatcttgggagtctgcctgatgcccaccactccgtgtccagcagccgggctgggtgttggtggacacagagaggagaggaagaaagggcctttgcccccctcctggctttgtagcagaggtgccaccggttatttctttgtggcaccatgccagcaccacggttagctatcttcccctaggtgagggccctgcctgggcggtggaggtctggcgtggattttggtgctcctgaggagtgga

SEQ ID NO: 54252 - DNA, 1600 bp, Homo sapiens
ttgctgaactgtggttaaattctagaccagtcttgctgactgataatcatgacaccaaatgacatctgccaccatttctttagggtttctgaacctcctctttctttctccttttaatttttattgctgtcatttcttccctttccttattcttctcatgttcttttactatctcctttgtcttttattttggaaccataagaatgatgctttaagcttttgaatcctgttccccacaagagtttagccagcaggcattttatgacaatatagaaataaacatggcaaagtggagcagattctctttaggtaacagttatgcttttgctttttatttgcatgctagagacaaaggatagaatttttgtagtttatcctcaagtcactaaactgccttctgtctatggaggccaaagacaatgagcatatctagtcaaatttagaaaatcctttagaagatagaatgccaccactgcattctttaatcttcctggtttttcagtgtgtttttcagaaaaatattcttcccacacacctgtaatctcagcactttgggaggccgatgtgggaggatcacatgagttcaggggtgtgagacctgcctgggcaaaaagatgaagccccatctttacaaaaaatacaaaaactagctgggcttggtggcacacacctgtagcccagctcctcaggacgttggggtgggaggatcgcttgagtccaggaggtcaaggctgcagtgagccgtgattgtaccaccgcactccagtccggggtctcatgagtcttttgagaccccgtctcaaaaaattaaactaaaaataaataaaaaagaaaaaggaagagaaaaatattcttctatagcatgagatagttggcatctcagccagatggcactgaaagagtattcagattctctgagcaataaaggatgaatataaacttttaatttctatcaacttttaagcaggtaactgtctccattttaacaattgcttctcttccttggcaaccatctaggtggtctgcatttagatgcagtggacttctgcttgaaagtgcagtgctataaaggaaaatcttgtgctgctttgtgccgtggtggaaaccaggaaatggccagatggaggctcaagaaatgtgtttattaggtcttctgactatgctgtattgataaaatgcaaaacagtgggtgatgggagtagcccaatcaggtcatctctgaagtttctgctttcccaagtaaatagttcaaattcctctagcaattcctcagagaagctatatgccaaatccattgctcaactrtaagtgattttaaagttcagtctttagaggtgaagttggcacaggatagcgctcggtcacagtgacccttaggcagtcaatgtccctctgcttctcaggctcccctttcctccacaggaatctttttcctaaaagggttcccttcaaaattacaccccattccccttatttactcagtgcatggaatttagccagctattggtagaaaaacaatgtgattaaattcactcatatcgtaaatgtctaatagccccaaccctcccaaagatattagcatcttaagagagcctggagg

SEQ ID NO: 54253 - DNA, 1600 bp, Homo sapiens
ttgctgaactgtggttaaattctagaccagtcttgctgactgataatcatgacaccaaatgacatctgccaccatttctttagggtttctgaacctcctctttctttctccttttaatttttattgctgtcatttcttccctttccttattcttctcatgttcttttactatctcctttgtcttttattttggaaccataagaatgatgctttaagcttttgaatcctgttccccacaagagtttagccagcaggcattttatgacaatatagaaataaacatggcaaagtggagcagattctctttaggtaacagttatgcttttgctttttatttgcatgctagagacaaaggatagaatttttgtagtttatcctcaagtcactaaactgccttctgtctatggaggccaaagacaatgagcatatctagtcaaatttagaaaatcctttagaagatagaatgccaccactgcattctttaatcttcctggtttttcagtgtgtttttcagaaaaatattcttcccacacacctgtaatctcagcactttgggaggccgatgtgggaggatcacatgagttcaggggtgtgagacctgcctgggcaaaaagatgaagccccatctttacaaaaaatacaaaaactagctgggcttggtggcacacacctgtagcccagctcctcaggacgttggggtgggaggatcgcttgagtccaggaggtcaaggctgcagtgagccgtgattgtaccaccgcactccagtccggggtctcatgagtcttttgagaccccgtctcaaaaaattaaactaaaaataaataaaaaagaaaaaggaagagaaaaatattcttctatagcatgagatagttggcatctcagccagatggcactgaaagagtattcagattctctgagcaataaaggatgaatataaacttttaatttctatcaacttttaagcaggtaactgtctccattttaacaattgcttctcttccttggcaaccatctaggtggtctgcatttagatgcagtggacttctgcttgaaagtgcagtgctataaaggaaaatcttgtgctgctttgtgccgtggtggaaaccaggaaatggccagatggaggctcaagaaatgtgtttattaggtcttctgactatgctgtattgataaaatgcaaaacagtgggtgatgggagtagcccaatcaggtcatctctgaagtttctgctttcccaagtaaatagttcaaattcctctagcaattcctcagagaagctatatgccaaatccattgctcaactataagtgattttaaagttcagtctttagaggtgaagttggcacaggatagcgctcggtcacagtgacccttaggcagtcaatgtccctctgcttctcaggctcccctttccyccacaggaatctttttcctaaaagggttcccttcaaaattacaccccattccccttatttactcagtgcatggaatttagccagctattggtagaaaaacaatgtgattaaattcactcatatcgtaaatgtctaatagccccaaccctcccaaagatattagcatcttaagagagcctggagg

SEQ ID NO: 54254 - DNA, 612 bp, Homo sapiens
tgagagtcaaggttaaattggccggaatttaaaaaccactaaasagaaacacacacacacacacacacacacacacacacacacatatatacaaacagataaatatttcagatagaacatccaaaattcattcaatggaatacaattctatagtctgaactcattattggctcaaaaatcagatattgaccataatgaaacatgcagaaggatcttttaggggagattatagttacatgcaattatctgctattccatttacactgacagagaagctatattctccagggagcaatttttacttagacagagagttgtcactattgattatagaaaactgatcatgttttctcagcataagctcacttggtctatcacagtttccctatctaacaaaaaacagctttcctatctaacaaaaatcattgacttccttgttgatttgccttatgtgttaacatttctaatatcttccgtgtaggtatgttactaatgacacttttcatagttatgaaaccagagaagtgatgagtataatttgcctttgtcaaccactgattatctctgctaaaggaagctcagctcaatatgactagataagtaaacctcttt

SEQ ID NO: 54255 - DNA, 612 bp, Homo sapiens
tgagagtcaaggttaaattggccggaatttaaaaaccactaaagasaaacacacacacacacacacacacacacacacacacacatatatacaaacagataaatatttcagatagaacatccaaaattcattcaatggaatacaattctatagtctgaactcattattggctcaaaaatcagatattgaccataatgaaacatgcagaaggatcttttaggggagattatagttacatgcaattatctgctattccatttacactgacagagaagctatattctccagggagcaatttttacttagacagagagttgtcactattgattatagaaaactgatcatgttttctcagcataagctcacttggtctatcacagtttccctatctaacaaaaaacagctttcctatctaacaaaaatcattgacttccttgttgatttgccttatgtgttaacatttctaatatcttccgtgtaggtatgttactaatgacacttttcatagttatgaaaccagagaagtgatgagtataatttgcctttgtcaaccactgattatctctgctaaaggaagctcagctcaatatgactagataagtaaacctcttt

SEQ ID NO: 54256 - DNA, 632 bp, Homo sapiens
agaagttgatgctgccatgcttcctgtacagcctgcagaactgtgagccaattaaacctcttttctttataaattacccagtcttgggtgtttctttataccagtttaatacttataatttctacaatcttaaatttttaamctaacaacttttaactatcctctactgtcttgatgtctctcttacttccttacccagcttaaattctaaggtcagtcatcataaacatttccttgcatacatcctcagcttccttgcaacatctctgactttataaaacttgtttggccaagtatatccaatgtattaatcccttcattcttgcagctgagtgtggctggagaaaaacacacaacctgttgattggttttgcttttaatacatgaccagaaacctcatatgggccctttatgcttccatacaattatactatatgcaattatagacattctttttcttaactagacactttttcccctagcctcaatctgagctaattattttatatcttacagagaaaatggaaacaattagaaaagaacttttggatatttccatcacgtatcttccaacctcccagcattagttttcacaccctctgccttataaatgtagcaccagagataaatca

SEQ ID NO: 54257 - DNA, 632 bp, Homo sapiens
agaagttgatgctgccatgcttcctgtacagcctgcagaactgtgagccaattaaacctcttttctttataaattacccagtcttgggtgtttctttataccagtttaatacttataatttctacaatcttaaatttttaacctaacaacttttaactatcctctactgtcttgatgtctctcttacttccttacccagcttaaattctaaggtcagtcatcataaacatttccttgcatacatcctcagcttccttgcaacatctctgactttataaaacttgtttggccaagtatatccaatgtattaatcccttcattcttgcagctgagtgtggctggagaaaaacacacaacctgttgattggttttgcttttaatacatgaccagaaacctcatatgggccctttatgcttccatacaattatactatatgcaattatagacattctttttcttaactagacactttttcccctagcctcaatctgagctaattattttatatcttacagagaaaatggaaacaattagaaaagaacttttggatatttccatcacgtaycttccaacctcccagcattagttttcacaccctctgccttataaatgtagcaccagagataaatca

SEQ ID NO: 54258 - DNA, 610 bp, Homo sapiens
tgcatagtttgccatttcacttggaagaaggaaaggccatttttggagggaatgtatgggagatacgtggaataaatgggaacttcgytgaggcctgaagatgggggcacgtgacacacgagaggacactggcactggtaagagaagaacaggattcgtgaagcatggagaataccttaaataagaatcagtctccttgagtctgattttattttttctctgaccactcttagcggagaaacagtgctgaaacatgacccagagcatgggatttcaaatcagaccaatggagcttcgcttttcacttctccatttcaaacctttgtgaacgtcgcttagctatagcgctgcacctcacctgcagatgggggtaatgatagcagccagttcattgagttattggaagattaattaatgcccttaaagcaccttcctagcattggctccacctaaagtaagtgattaatgtatattgaaatattattaatactgtaactccttaccttgtaatcagtgcatctgttttgagctaaaatcacagtgacttctttagctaaaatgaattattttgctgaatatacaattcagatagcacaattaagcatttttc

SEQ ID NO: 54259 - DNA, 420 bp, Homo sapiens
cagtgtctggcacatggaaggctacaaatacttatttaataaatgactgaattaatgttttcttttagattcccgtgcttgaaagattagacagtaactctatagcacaaaaaaaaagaaaaaaaaaaaacccagaatgtttctccccttgtatgtcaaattaacaaagtttattttactaacaagtttcaggtttatgcacttattaatattaatgagtcagagttaagacttctaaaaagttgatacaaacatattttcccttaacaaatgtgtaatagtggccaggcacggtggctcacgcctaaaatcccagcgctttgggaggccgaggtgggtggatcacctgaggtsaggagtttgagaccagcctggccaaaatggtgaaaccctgtctctaccaaaaaatacaaaaattag

SEQ ID NO: 54260 - DNA, 1571 bp, Homo sapiens
tgaggttggcatgctcaaaggctcctagcgtggagaagagaataggatgtctaggaaggtagtgttaatggactgaacatctctttccttggacttacggacagtgagataaacaaatgggttgctgctgcttgagaaaaaaaaaaacatgctttatgcttcataaccttgaactactaaaccataaccatttgtatgccaacaaccataatttctgagaaacgttttaaaacaaaaatrcatgattatctcctgtctttcttaaaaaaaatttttttggtagagggtctatgttgggcctctctatgttgtccaggctgatcttgaactcctgtgttcaagcaatcctccagcctcagcctcctgagtataggcacacacaaccatgcctaggttgggactgcaggcacatacccatgctccgctatgttttttgtttgtttgtttttgttttttaattttcttttttgtagagacagggtcttgctacattgcccagggtggtctcaaactcctggcctcaagtgatccttccacctttgcctcccaaagtgctgggacagactttcattagcaataataatctctctctggcttcagttccacatttgaggtgccctgctttccaaattgaacactgctgtgcttttaggaagggtcatgtcagtattggtgaatatgctccttgaatttgccaggggcactgtgcatcctgtctctaatacctactctggaggctgaggcagggggatcgcttcagcctcagaaggtcaagactgcagtgagctacaattgcaccactatactctagcctgggcaatagagtgagaacctgtctcaaaaaaagaataaatacataaataaatgaaagaaagttacacttttccatatcttattaatgaaaaaactttgaatccatgaacagacattaaaattctctcctacatgctagtttactggctggaatgatggaattgtgttcttcttggccatctcaggatttaaataattttatgtgacagagctgatgtgttgatcaataaaaagacaacaatcatttacattgagagtttagtgcaatttcaagaatctacatgaaccaagctgagtgtttgtagggaaatcaatacatgaccaccttacttagtgaagtgcataaacgaaattcgactgaattttcaacatcaatgaatacggatttaaaaaaaaatcaaatcaattgaaaaaaatgggttttggaaatcacacaatgacagtatttttgaacacacaatactgtgcaaaatccaggaaagcaaacagatgttcgcttccatttccctcctccttctagtatttatcttatcatttgggaaaagctttcttgtactgcagtttgattacatgtgcattttgcagatttccagatgtgttcaaatgttttaatttacattatggctttatatttaggtccatacgattccataatcagagttcttatttgtctaaacattacatgaaattgagaattttaatatgccctatttagttagagggtactatacacatttttttccccaacctagtctttc

SEQ ID NO: 54261 - DNA, 1571 bp, Homo sapiens
tgaggttggcatgctcaaaggctcctagcgtggagaagagaataggatgtctaggaaggtagtgttaatggactgaacatctctttccttggacttacggacagtgagataaacaaatgggttgctgctgcttgagaaaaaaaaaaacatgctttatgcttcataaccttgaactactaaaccataaccatttgtatgccaacaaccataatttctgagaaacgttttaaaacaaaaatacatgattatctcctgtctttcttaaaaaaaatttttttggtagagggtctatgttgggcctctctatgttgtccaggctgatcttgaactcctgtgttcaagcaatcctccagcctcagcctcctgagtataggcacacacaaccatgcctaggttgggactgcaggcacatacccatgctccgctatgttttttgtttgtttgtttttgttttttaattttcttttttgtagagacagggtcttgctacattgcccagggtggtctcaaactcctggcctcaagtgatccttccacctttgcctcccaaagtgctgggacagactttcattagcaataataatctctctctggcttcagttccacatttgaggtgccctgctttccaaattgaacactgctgtgcttttaggaagggtcatgtcagtattggtgaatatgctccttgaatttgccaggggcactgtgcatcctgtctctaatacctactctggaggctgaggcagggggatcgcttcagcctcagaaggtcaagactgcagtgagctacaattgcaccactatactctagcctgggcaatagagtgagaacctgtctcaaaaaaagaataaatacataaataaatgaaagaaagttacacttttccatatcttattaatgaaaaaactttgaatccatgaacagacattaaaattctctcctacatgctagtttactggctggaatgatggaattgtgttcttcttggccatctcaggatttaaataattttatgtgacagagctgatgtgttgatcaataaaaagacaacaatcatttacattgagagtttagtgcaatttcaagaatctacatgaaccaagctgagtgtttgtagggaaatcaatacatgaccaccttacttagtgaagtgcataaacgaaattcgactgaattttcaacatcaatgaatacggattwaaaaaaaaatcaaatcaattgaaaaaaatgggttttggaaatcacacaatgacagtatttttgaacacacaatactgtgcaaaatccaggaaagcaaacagatgttcgcttccatttccctcctccttctagtatttatcttatcatttgggaaaagctttcttgtactgcagtttgattacatgtgcattttgcagatttccagatgtgttcaaatgttttaatttacattatggctttatatttaggtccatacgattccataatcagagttcttatttgtctaaacattacatgaaattgagaattttaatatgccctatttagttagagggtactatacacatttttttccccaacctagtctttc

SEQ ID NO: 54262 - DNA, 1228 bp, Homo sapiens
atgatgccaagcattgtctgtaatgtgtatgtatgtgtatgtttttataaatctttaataacattctcaaaagtagaaatggaaagggaggttatctggcatcttttttcttccatctacaaatcctttacctttgattcaatagcaaataggaggttttctctaacttatttttttccattctcataaaaatttcagattcatatgcaagctggctcacatggggattgccttaacctctttctttctgccttctgtctctagctttttccttcagcattaatgccccagttcaagccatctgttttctctacatcattattgttcccaaaataactctacattcttttgtatctcccacaatgcccagaagtccagtaaataaattcttgtctattgatcaaattccagctacttgccctctaactgatgacacctacccacatggccccttttgtctttgctcatctcccatctgttcccttcagtcaacataggttgactttctctgtctctctgacttccttctcatcctcccccagctgtcccttccttccaggctattctgtagccgtttccactcttctagctttcatctatcattatgttttctttttctcctctatatttaaaattttgtcagataagatggtaagaaagacaactttctgttatttgttattacaaatatgcatgaccctcccaactaattgtgctcttaaatttttacccttatggaaagagacaagcatttgagaatcagtgtagctttagttttggratttggtagacccaattggaatcttgatattgttacctataatctgtgtgactttgggaatctcatttcaattctatgaattcatgtcatcattatcaaaagacacttatcaaaactctttttttctagaattgtgaagattaatcaacaaatgaaaggtacctattctgttttgtgcatagtatccactcaataaatagtagaaattatcaccttaagtctttttctcaaaatagagacaccaaagtatatcataacaatttaaatagttttattgcttgtcttaaataatgtcttgaaactaattttatgtactcaagtagagacttctgtgtgtttgtttatagtaacatatactaaaacagatataggaagtggaaacttcaaactattagagggaagggtggaataaagattaatctaaaataatttaaaaataaaaaaata

SEQ ID NO: 54263 - DNA, 1020 bp, Homo sapiens
cttcccgattcttgcagccagatgcttcctcctctgcctccatgacctgtcacagccccacacctctggactgtgaatgtccaggtccctgggtgcttctgccatttgcttccagctggggcttggcacccacggggcttcaggagactggctgaataaatgaattagtatgtaatacaaaaacaacaaataaatagaaaaaattaaccaggcatggtggtgcacacctgtagtcccagctactcaggaggctgaggtaggaggatcaactgagactgggaggcagaggttgcagtgagccgagattgtgccaccgcactccagcctgggtgaaagagcgagaccctgtctcgggaaaaaaaaaaaaaaaaaagaggtggaaggaaaatagacccagtgtgtttcccataacattatgacaactcagttgttcattcatatgttcactcattaattcaacaaatgtttgtggaacaaatygtcctgggcaccaaggagttagtgggcatgagataggcaaggtcctggccctcatggaactagtttgcctgggtgacaggccgtgtgtagggagcccttggtcatggccggatgctgttaacattcactcattttgacctcctggggctccaggcacctgttagccgatgaaagcgggcagcagagaccccggggaatgatactgggtagaacaaatgggagtaagttagaggacttgggaacaccaagtcagagcccacttgtgtcacctagggggcttttatttttattttgtgtctgccatatcaaggggtttatttggaatttatcataaacttgatattttagccatattttgcagccagccatagtgcttcttctgttcaagttttccacatttctttgacaaaatgtttattacatgtcgccctttgagcttgtagcacatgacttgtacttagtgttcaataagagaaacgcaagttttagcatctcaaactggttagtttatcacacttttcctcataagggttttgtttt

SEQ ID NO: 54264 - DNA, 595 bp, Homo sapiens
caaacttggctgcatgttggaatcacctgaacagctttctgttttgcttgtttaaggctaatatctggattcaaccctcaaggaatttaattgatttctggtgtgccctggatgctgcaatggtttttatacgttcagggtaattctcatatgcaamtaagtctggtaattactggtgcaatataacaaagtcttgtacattcctttttctcttcacattgttgccagaaatggaagcagtgtaacatagggcttttaaaacattggtttgggagtcattcagatctggaccccaccctcagctccatcatttgctagttttataactctggcaaaattaaactctctaaaccttagttttctcacctatacaatggaaacttgtagtgttcataataactaaatttaaaattatacaagtaaatttcaatataatttataaagagcttataataaaaattataaagagcttagtagggtgcctggattggcaataagtatcctgaaaatctctcccttatttttcctatcatatttgataggaatattttatgagcttatagtttaattaaatttatataagaaattatgcata

SEQ ID NO: 54265 - DNA, 595 bp, Homo sapiens
caaacttggctgcatgttggaatcacctgaacagctttctgttttgcttgtttaaggctaatatctggattcaaccctcaaggaatttaattgatttctggtgtgccctggatgctgcaatggtttttatacgttcagggtaattctcatatgcaaataagtctggtaattactggtgcaatataacaaagtcttgtacattcctttttctcttcacattgttgccagaaatggaagcagtgtaacatagggcttttaaaacattggtttgggagtcattcagatctggaccccaccctcagctccatcatttgctagttttataactctggcaaaattaaactctctaaaccttagttttctcacctatacaatggaaacttgtagtgttcataataactaaatttaaaattatacaagtaaatttcaatataatttataaagagcttataataaaaattataaagagcttagtagggtgcctggattggcaataagtatcctgaaaatctcwcccttatttttcctatcatatttgataggaatattttatgagcttatagtttaattaaatttatataagaaattatgcata

SEQ ID NO: 54266 - DNA, 517 bp, Homo sapiens
cttaagtttattacattaatgtgaaacgctgtgttagtgacttaagtcctattacataatataatttttaaaagaaatcggcctggtatttttatgtctttcaattccatatatttgtcattgtatgtgagtgtctctttggcaccttagactttttcttttcatgtttttatggcctgatccctctacttttttatatagccatttaggaaaacacagggtgtaaatctcattgattcctcttttcattaatataacttatttccataatgtgcagaaggaagccattcaagcctttatttggccttggattatgtatcttaccataaagaggaaggaaagttttcattgcctactcgctgtatttaagatgaaagactacatgaaaagacgatcgatttttctcccatattaaagggatcagaaatcaagtaggagttacaatatttracaagaaagagaacagtgagaggacagtagtcaccagttggctttaagttcttcaggtgactgaagg

SEQ ID NO: 54267 - DNA, 508 bp, Homo sapiens
tgccatgttggtcaggctgayctcgaactcctgacctcaggtgatctgctgacctcggcctcccaaagtgctgggattacaggcatgggccaccatgcccagccatgtgtgtgttcttacccaagcctttcaatgacacaggaaccagtttcaaagaatttttttaatgtatttcctgttaaggatggcttcttctcggaccttctctccagtatcaacctaaaatcaaaggttaccacgcagcctgcagggtaacctggacttttatgtaaacctgtcttgtgatgttgtgagatgcaaatggataaaaattactgagatggcaactgtttgaaaagcagcctgcccttggagcagaggcctccattactcagcctaaacagtcatcatggcctctatttgttaaaaacaaaataaaaccatgttaaatcaagttcagcctaaagctctctgcttacatattttaagttcagcctaaaggtttttctgtacattgtgaactataaca

SEQ ID NO: 54268 - DNA, 605 bp, Homo sapiens
tgcatataaaaatttgaagaagattttctccttatatgaaagtaataagtgcttatataattatcataaataaaaaaggaataataatctgtttacacagaaataaaatattcttttttttttttttttgaggcagggtctcactctgtctgccaggctggagtgcagggatgctagttccgctcactgcagccttgacctcctcaggctcaactaatcctcctgcctcagcctccaaagcagctgggaccacaggcccacaccatcacatccggctaagtttttattttttgtagagacggggttccgccatgttgcccaggctggtctctaactccygatgcacccgccttggcctcccaaagtgttgagattacaggcatgagccaccgcgcccagcctgaaaatattctgctacatgaaacaacatgatgtgagtagaaatgtaaggcacgcatctgtaaaactgaagaataaaaataccaacatacacaaaacgtgagcacatgttttagtacatgttttttctcttcggtcccttctgaaagtccactaaagttatggtaaaataataatatgataaataaataaataaaagcccacaa

SEQ ID NO: 54269 - DNA, 605 bp, Homo sapiens
tgcatataaaaatttgaagaagattttctccttatatgaaagtaataagtgcttatataattatcataaataaaaaaggaataataatctgtttacacagaaataaaatattcttttttttttttttttgaggcagggtctcactctgtctgccaggctggagtgcagggatgctagttccgctcactgcagccttgacctcctcaggctcaactaatcctcctgcctcagcctccaaagcagctgggaccacaggcccacaccatcacatccggctaagtttttattttttgtagagacggggttccgccatgttgcccaggctggtctctaactcctgatgcacccgccttggcctcccaaagtgttgagattacaggcrtgagccaccgcgcccagcctgaaaatattctgctacatgaaacaacatgatgtgagtagaaatgtaaggcacgcatctgtaaaactgaagaataaaaataccaacatacacaaaacgtgagcacatgttttagtacatgttttttctcttcggtcccttctgaaagtccactaaagttatggtaaaataataatatgataaataaataaataaaagcccacaa

SEQ ID NO: 54270 - DNA, 1764 bp, Homo sapiens
taaaacctgtaagtgtttctggaattttgcccaaaacatttgaaaaccacaaataaagaaaatgtgatgttgtttggtttgtgaaagattctcttttcctttatgtttcagaaagataaaaactttgagttaagtgataaaaatagtttaaatgtaagacttaaagtcagtttagtaaagtttagaactggcaggagacttggccattctatgttttcattttttgttgttcaagatttccttgtagtacctggaaaacgtgtgtatatgctaagaaacatgcagtttatagtactcatttcagaacagcctgcatttgaaaacaatgtttggcagaagaaatcagcaaagacataggaaaaatattaaaatcactgtgggaatgacagcaaaaaatggagggagacaggttcctccactctgatcctttatgattcttttctagttattgagtatataaatttcaatcccctagtacaactgaagggggaaaacatgattatcatatcactcaaagctgcccaactttgaattcagctctgagataaattcactctgtataaaacgacttttaatattttgttccttaacataagtattaaattttgtatgattaaaaatttatttattctctcttccttaatttaggttttcatttgctagtattgcctttcctaagccatcttggcaaaaaatatttttctgtacataaacaggggaagttttaaagtaaaaggtatctttagacttgcacatagactttcaaagtaatttttggtaaaataaatatgtgaagggaaagtgtggtgaccacttcagcatcttagctccacagataggcatcatgatgtttcacaagaaaaaagaattaggaagaaataaatagacattattggaattgtttcttttaaaattttacttaataggtattagctaggtagaagctataggaccaaaatgagggattccgggtacatcagcctcctacaaagaaaatatctttctccctgctggtataaacagattctgaaaattgtttctaaaacagaaaaacagaaggcagcactagcaagtttctcaatacaaaagagaacctgcagaactgagacagatccatgcacaagttggtggagagcaatgtggtactcacgttcatttatttttctagcgctataaagtcttcaatgactacaagtagttggcagtgtttgcagaagagctttgggtacaaccaaatgatagcattttcagaagagcttccctctttgtcattcaggagcaattgttctcactgctgggttagagaaaaggggtgccttccattgattgaattgctaacacctttcagtattctgcttatgatgatcttgaagaaagtgctatcaaagtctagacattttaaatatcttatctgtttaatatatttaatgtttcttagttcttaaagagtctattctgcctctgatacatgtgctcagctctcatcagtgctaatggaaattaataacaaaatggacccttaatcatttatcttacattatagaaaggcatgatttgcagacwtgattagggctgtaactgaacaagatattataaaaatttgattctcttcaaacatgtccattgcaataattcaactggaaatttagtataaaattttcttctcctaggtattttaccattgtgacccttatttaagcatatgaccgagatgcaaaaacattaaaggtgttagaatactatttacaaaaacaaagacatgca

SEQ ID NO: 54271 - DNA, 1764 bp, Homo sapiens
taaaacctgtaagtgtttctggaattttgcccaaaacatttgaaaaccacaaataaagaaaatgtgatgttgtttggtttgtgaaagattctcttttcctttatgtttcagaaagataaaaactttgagttaagtgataaaaatagtttaaatgtaagacttaaagtcagtttagtaaagtttagaactggcaggagacttggccattctatgttttcattttttgttgttcaagatttccttgtagtacctggaaaacgtgtgtatatgctaagaaacatgcagtttatagtactcatttcagaacagcctgcatttgaaaacaatgtttggcagaagaaatcagcaaagacataggaaaaatattaaaatcactgtgggaatgacagcaaaaaatggagggagacaggttcctccactctgatcctttatgattcttttctagttattgagtatataaatttcaatcccctagtacaactgaagggggaaaacatgattatcatatcactcaaagctgcccaactttgaattcagctctgagataaattcactctgtataaaacgacttttaatattttgttccttaacataagtattaaattttgtatgattaaaaatttatttattctctcttccttaatttaggttttcatttgctagtattgcctttcctaagccatcttggcaaaaaatatttttctgtacataaacaggggaagttttaaagtaaaaggtatctttagacttgcacatagactttcaaagtaatttttggtaaaataaatatgtgaagggaaagtgtggtgaccacttcagcatcttagctccacagataggcatcatgatgtttcacaagaaaaaagaattaggaagaaataaatagacattattggaattgtttcttttaaaattttacttaataggtattagctaggtagaagctataggaccaaaatgagggattccgggtacatcagcctcctacaaagaaaatatctttctccctgctggtataaacagattctgaaaattgtttctaaaacagaaaaacagaaggcagcactagcaagtttctcaatacaaaagagaacctgcagaactgagacagatccatgcacaagttggtggagagcaatgtggtactcacgttcatttatttttctagcgctataaagtcttcaatgactacaagtagttggcagtgtttgcagaagagctttgggtacaaccaaatgatagcattttcagaagagcttccctctttgtcattcaggagcaattgttctcactgctgggttagagaaaaggggtgccttccattgattgaattgctaacacctttcagtattctgcttatgatgatcttgaagaaagtgctatcaaagtctagacattttaaatatcttatctgtttaatatatttaatgtttcttagttcttaaagagtctattctgcctctgatacatgtgctcagctctcatcagtgctaatggaaattaataacaaaatggacccttaatcatttatcttacattatagaaaggcatgatttgcagacttgattagggctgtaactgaacaagatattataaaaatttgattctcttcaaacatgtccattgcaataattcaactggaaatttagtataaaattttcttctcctaggtattttaccattgtgacccttatttaagcatatgaycgagatgcaaaaacattaaaggtgttagaatactatttacaaaaacaaagacatgca

SEQ ID NO: 54272 - DNA, 915 bp, Homo sapiens
tcccataaagcttatggccaaaataattttggagacttgcgcttacaacaaattttctactctatttccttaagatttagaaaatgtgatatttttccactcccacccccacccccccaggatgaagccatgagctgcagataggtgtgtcttcagaccaaatagtactttgcacatgggttagatttgcccaacctaaaaccctacacacttaagcaaatggtctgagaagaatgaaaaggaggagatattctcttcaggggctcagattctcatttttccttctacatctctacttatcaagaacattcaaaagcatgtggagaagataaatagtatcttgagaaaagatactatatatatttattatatatattttatatatttattatatataatatatattatatataatatatattatatattttatatattatatataatatatattatatatataatatataatatatattatatattttatatatwatatataatatatattatatattttatattatatataatatatatttttatataatatatattatatattttatatattatatataatatatattttttatataatatatattatatattttatatatattttatatattatatatattttttatatatttattatatatattttttatatatatatatattttttttgagtgcatggtacctcctgttagatgtggttgggtggcctaaatgcacagggctgccagtgtggggtgttactagagggccgctgctgtgtacccacactgaggagatgggcacatcatggcccatggaaaatatatactccactgtgtttacccctttgtgttatctgtttctctgatttgtcttcctttttgctttattcttcttccttatttaaaaaaa

SEQ ID NO: 54273 - DNA, 1103 bp, Homo sapiens
gaaggattatttactcattaactactaatctgtgtgctttggagagatattggaaactcttgagaaataggcctggccttttcctttttatttgcaacgaggaattttgttcgtcaaataaatgaccttaaaggattgagaccgctgccaagccacagaatcggagtcgagaggcctgactcagagtcacggagaggttaggacacacatcttgcagggcttaggcaaaaaaggaaaatgggccaggctttgtgcgaacttgctgtgaaacaagagctgttttcagggctcagggacamgctctgtcccatgtttaatttcttccatctgtctggtatctgacctctgctgccctttaagccattgccacatattgtctgcacacgttcccatataaggtgatctctctctctctctttctcttccctctcctctcctctctctctctctctctctctctctcttttcctctccctctctccgggtagcaacactgacttcctccaccctgttcgccctctctctgccttccctggcagactctgctgtgaggatggatggctggagagcaggaaggggcagggggctgccaaggaatgtaacaggtttatttttgttcaggctgcattctttgcccagcctgcacgccccagccacttgggaatgtcacatgccgataagacagtgggggtgactgggatctgtggctcaaatctgcaacaccccaggtgtgagccattgtcacagagtcggggaactaagggtgggaggggcagggactctgaggtcatgggactcacctgttcccactgccctgtgtctgactcctagaaagacaagtttggtccttcagggaaacaattgcagaaattgagatccataaccacctaagcccatctctgggcaaaattcaacatctacaggagagtggagaagagccaggtgtcagggtgaaattaacagctgtgtgaccttgggcaagttgcctgacgtctctgactctcagtttccttctttgtcaaaatagtatcagtgaatctgttctctactatatggtgaaaatacactcactgagggcaggtattattgtctattttgtttcc

SEQ ID NO: 54274 - DNA, 605 bp, Homo sapiens
ttatttaaaaaaaaaaacaactttgttcatcagttttatagccttgcaagtgtcacttgacttcctgtaccttacagattcctaatctataaaagggcatgtcaatattcccttgaatttgtggaacattaacattgtcaattattttagattctttgttctcaagataactttcctctaataactatgctatttaatcatgaacttaacattagaatgtataattttcaaatattcaaaagttaaatataaaaatatttaaaccatacttaccttgattccctggtgtttgtatttcacracacttaaacgagattttgtgaatggtagaatatttctcttgtgtaatagttgtctctcagtatcagaggggattggttccaggacctcctgtggatgacaaaatcctcagatgcccaactccctgatatgaaatggtgtagtacttgcaaataacctatacatatcctctcttatacttcaaatcatctctaggttacttataatacctaatacaaggtaagtgctatgtaaatggctgttatactatattgcttaaggaataatgacaagaagaagtctgtacatgttcagtacagatgcaa

SEQ ID NO: 54275 - DNA, 609 bp, Homo sapiens
tgcatctytgtgtcatcccaacagccccaaaggattcttactcagaagttaaaattagatttcctactcagctgttcttacaaaacaaggacccttttagctttgctcagccctcgtgaagataccatccctgtcattatttgtactgaatgagtctctgtataacaaattagtagaggttcagcaccggggacagttccttgcacactgtagctgctgtgtgctgagaatttgagattaaaactctgaacttctaaaacttgacctctgatcaaactgccaggctagaccttccccaatgcaaaatccaaataaagcacatctgcctcattatgtggtattgtaggtagaaaactattgaaaaatctaacattctcaccctgcagttgacagttgctcttgcaataaagcaaatcagaaaatatctgtaaatatgaattatctgaaccagatctctataatcattaaatgtgataaatgtatggctcttttcatgttggagcatcagggcttatagggtcttggatgccttggatggaaggacttgggaagcaggcagagaggagcacaagtctgaggtatgtggcaatgacagctgttctcatgtcc

SEQ ID NO: 54276 - DNA, 609 bp, Homo sapiens
tgcatctttgtgtcatcccaacagccccaaaggattcttactcagaagttaaaattagatttcctactcagctgttcttacaaaacaaggacccttttagctttgctcagccctcgtgaagataccatccctgtcattatttgtactgaatgagtctctktataacaaattagtagaggttcagcaccggggacagttccttgcacactgtagctgctgtgtgctgagaatttgagattaaaactctgaacttctaaaacttgacctctgatcaaactgccaggctagaccttccccaatgcaaaatccaaataaagcacatctgcctcattatgtggtattgtaggtagaaaactattgaaaaatctaacattctcaccctgcagttgacagttgctcttgcaataaagcaaatcagaaaatatctgtaaatatgaattatctgaaccagatctctataatcattaaatgtgataaatgtatggctcttttcatgttggagcatcagggcttatagggtcttggatgccttggatggaaggacttgggaagcaggcagagaggagcacaagtctgaggtatgtggcaatgacagctgttctcatgtcc

SEQ ID NO: 54277 - DNA, 609 bp, Homo sapiens
tgcatctttgtgtcatcccaacagccccaaaggattcttactcagaagttaaaattagatttcctactcagctgttcttacaaaacaaggacccttttagctttgctcagccctcgtgaagataccatccctgtcattatttgtactgaatgagtctctgtataacaaattagtagaggttcagcaccggggacagttccttgcrcactgtagctgctgtgtgctgagaatttgagattaaaactctgaacttctaaaacttgacctctgatcaaactgccaggctagaccttccccaatgcaaaatccaaataaagcacatctgcctcattatgtggtattgtaggtagaaaactattgaaaaatctaacattctcaccctgcagttgacagttgctcttgcaataaagcaaatcagaaaatatctgtaaatatgaattatctgaaccagatctctataatcattaaatgtgataaatgtatggctcttttcatgttggagcatcagggcttatagggtcttggatgccttggatggaaggacttgggaagcaggcagagaggagcacaagtctgaggtatgtggcaatgacagctgttctcatgtcc

SEQ ID NO: 54278 - DNA, 536 bp, Homo sapiens
gaataaatatctgctgcagtgaattgaatctgacatatgatgtttcctgcaatctaactttgtctatctcttcatcaacttctatatccctctcccatgaaactacttgtaatttcctccacatctatgctgcctcaactcagagctcttgctcatgctgctgcctcttcctgaaatgctcatgaaactcccctctttgtcacctagccaatttctaatattccccaatctcttgccaatgcaccggtcactcatatcagctcatggtcagcctcggcacagtcattcaacawcatccacctactgggcgtctaggtgccttgcagtgcaccaggcaccaggaagtgtggtgatgtcataagataatcatgggaaaattataagacttgctggcatctccaccaaaaatctcttgtggaaaagatgctggagttgtacaaaaatcagaatgtgtagaatctgcaaattcctgtgtataaatcctatttgtttgcaaattaaattgaatttgcttggcggtgttttttgttgttgtt

SEQ ID NO: 54279 - DNA, 2346 bp, Homo sapiens
tgtagacgctggaaaattccaccatatactcatgagagaatgaaagggaagaaggcaaacaacatcttagttgttggaaaactagttttgaccttgtgttaagaaaatagttttgaccttgtggacccctgaaaaggtcctggggaccccaagggtccacagatcacactttgagaaccactggtctaggcattcctctaggttctaactgtaagaaaaaataataaaagcaaaatgaaaccaagttctctctctgtctcttatattctgctaagagaagaaaaaatcatgtttatgatctttaggtggtaagtgccaggaagaagaggtacaggaggtgatggagaggctatttcagctcagcgggcacggaagtccacagacaaggcaatacctagaggcgcaccggtatctgggaagagcggttcgtyggtgcccactcgggggtggttttacggattgttatgcttccctgcattgttcaaattttctttaaggaacaagtacaacttcaattttgaacaagttgggtttctttttttttttttcatgaaggcctcttgcaaggcagcattcatcaatgcaaccttgaagcaacggtcaacaacgttttgaagccgatttggagcccctgctgttgcccattgggtactccagaatcactttctgctggttccgctgtggtcatcctaatgatccttgagggaagggctctggggacacagccgtgcaggaggccaaggacagcccccaaaaatgggaaggacatgcatccagacaaaattaatacgtacctcattgttctctgtgggcactaacctgtttctgggcctcccctgatggactcagttctgcagggtgcagcatgtggcctgacctcctgtgggggtccattctctctgtggcctctcagctctgtctcctgcacatccttctgcttccattctaagacctgatcacatggccctcgccactgccctcctgaggcagtgagatcccagaaaaacaagccaggctttgcccaaatgaagaaacaacagttttactttgattttttacaaacaaacagttttcactttgttttttaagttttactttaggttggtgcaaaagtcattgcagtttttgccattgaaagtaacggtaaaaagctcaattactttcgcaccaatctaatataaataataaggttggatttcctagacatatcaatgaaaacgatgcctctgtgttccctatacttcagcacaaagagaagatgctcccaggcccagcggactgctcgggtcccttgtgtctcaggagctatagtggtttcttgtgactgccataacaaattagcataaaccaagtgacgtatgacaacagactctcattctctcagagttctggaggacaaaaacccaaagtcaggttgttgggagggctacgctgcatccaaagtctcttgggcaagaccattccctgtctctttggcttctgctggccccaggttttccttgactggtggcagcatctctcgagtctctgcctctgtcttcacatggccgtctttcctctgtgcttgtctgtgtcatgtcaccttcctttataaggacactgatcaaaccggatcagggaccacccttatcctatatgacttcatcttaacttgattatatctgcaaagaccctctttccaaaaaaggtctcattcatagatacgggggtgaggacttcgacatatttttggggggacacaattcaactcatattaggagccacacccaccaagggagagaccagaagagagtgcaggcaccaaggccaataggactgactaggaagaggactgtggacagggctttggacaagccaacctggaggtctttgctgaacccagcaagaggatcatcagggtaaggaggcagtgagggcagatccagctgcaaggaggctgtctgcagagggagcacaggacatgcagacagtgagtgtattctgtcaagaggctcgtggcagagggcaggtgtaaaattaagcactagctgaagggggacatgagaggcaggggataattgagttttgccgtgtttgtcttttgttcaactttggggaatgggcaagacgaccttatcggtagctttacatttgcggttcctcccagggccaacacattcaagtaattggctgatactgaaacttctgggcgttttcatttaaatatttattttattatttatataattaatacattgtctttgtagaaatactatacaatctagataagaaaaaagtgctaaaaggcaaccataattaacattttggtgactatatctctctagactttatgtccataaatgtatg

SEQ ID NO: 54280 - DNA, 609 bp, Homo sapiens
tgtggaggatggattttaaggggtgacaatctcaattctcaagagaaaaaccaattaagatcctttggaaatggtccatataggaggaattgataatatgacattggtaagtggagataggggtggaaaggaaaagaccaatttaagaaatatttagatgatacgttctgtagaacttggtgaccatgtaagtgtggggattgcagaaatggctccctgrtgtgaacagaaaggagcatcctgaactgagataggaaatctaaaaggagaaaggaaaggcccaggggccaaaataagctcggttcttgatagtccaatgggaatgcttggcagatcctacatctatcattgcttatgacaaaatatattgaatcaatgggtttacatggcttaccctcctgcctgactaaaagtcaaatggcaaggtcatgccttattcatcttgtatcctcagggctggctaccccacccgagctctgggagacgtctgcctgcagcacaggtgacaggaaagccatcgatggttgagatctcgcagggagagtagaggagactgagaaaagcagtgacatgcaagaaaaagacattcacacctggggtgagaatttg

SEQ ID NO: 54281 - DNA, 547 bp, Homo sapiens
ccccaatgtggataaaaacttcaaaaatttaaagatagtaaatgttcctagagaccattaggctgtaatctgtaatcaaaagcaatgtctacatatcggcatatttcatatcactgaagatttcatattttaattatcagtatctaatgtgttgggaattgccaccaaaatgggtaacatagctttaacaggaaatgttctgtacaaatattaatacatcaccttttcaaatgtccagtgcttagaacctctgattaaaccagctataatttctgcaacacatcgctgggtgctttcatgtgaatctgcaaccaaatgttctaaatggggcttcagaactggcaggaaggcatcatcaaaattcctgaatataccctataaaaacaaagactgttcttcagtactcaaatgactatcatctcgattataattatgcttgtaattattctgtacattactaacrtgcttaaaagctccaagcacactcccctttagaactgctttaacaattgcggtaagttaaaatagtaagaatactgtcatttta

SEQ ID NO: 54282 - DNA, 620 bp, Homo sapiens
tgcatgttgtttcattatgatttatttttcttttatgtctctcttacattagttttcaaatttgagagtttgagaatcccctggagaaaatacagattgctagaccccacctcccagagtttcgaattcacaaggtttgctgtagggctggaaaatttgcacgtctaacaaattcacaggcaatgctgatgcttctgtctggggacgacagtctgagaactactgcctatacaaatgcaatggcctcttcaccaagaaattcctacctagatctgatcctggtacccgtccrtggcccccaatcctaatccccctgctctggccggcctgcttttccactcaccccaacttttttggaggcagtctccaccccttctcacttcctcttagagctgagagcccttttcttccccacaactaactcttgctagaaatcacctccaaaaagctttccctgccccttaagcagtgtcatttccaggatctcgtagccctcaccctacccttaaacacacagcaagtgtcagtctgccttatcataatgggtccatctctctgtcttgtcccattaccgtagagccaggaacggtccctaagaaaagcctcaggaatcaggctgg

SEQ ID NO: 54283 - DNA, 645 bp, Homo sapiens
tttccaggataaaaatttgagatccagcatagcaatgtaaccaaacttttttttctttagcattctggaactttatgatattaagttacatatgtgagattttaatgttgtaaatttagcaaatctagttaatggttagaaaatattgaagtaaaatgggctgggcatggtggcttatgcctgtaatcccagcactttgggagtctgagatgggtggattgcttgagtccaggagttcaagaccagcctgggcaacatggtgaaaccccgtctctactaaaaatacaaaaaaattagctgtgcatggtgacaggygcctgtaatcccagctactcgggaggctaaggcaggagaactgcttgaacccaggaggtggaggttacaatgagctgaaactgtgccagtgcactgcagcctggacaacagagtgagactctgtctcaaaaaaaaagataaaaaagaaagaaaatactgaagtaagatatcatggagtatgggcccaactccattcctaggtatgtaccccaaactagagttcaaacaaaaacttatatgtaaatgttcatagcagcactgtttgcaatagccaaaaggtgaaaacaacccaaatagccagcaatgataaaagaatatgcaaatgtagta

SEQ ID NO: 54284 - DNA, 1752 bp, Homo sapiens
aatttccaggaatataaaatatgcctgaaacatagaaagcatattgatatctctaagtctaacaaaagactgttaggtcatatattatcctagaacaaatgttttcttatgtattgttaactgacccccatgaaaaagagtcatataacttaatgatctaaagaaactgtggaagttttatagtctttaaaaaaattacaaatgaataaaatgagacacaaagaaaccactaaaccgattaaaagcataggactaatacctgtgctcatgataacattccctcaacagatataatagagaaatagtaagagaaataaccaaattgttttgtagtagagtcagtctattgctagggttgctgccttagagacagacaatcattatttctggtagtagcaagctctttccctcctccataactttattctgcctagtataccctcccctcatgcctctaacagcttgactgaytctttttttctttcttttttctttttttgtagtggaatatcactctgtcacccaggctggagtgcagtggtgtgatcttggctcactggaacctccgcctcccaggtttaagcaattctcctgctgcagcctcccgagtaactgggattacaggtgtgcaccaccacgcctggctaatttttctatttttagtagagacagggtttcaccatgttggccaggctggtatcaatctcttggcctcaggtgatctgcccgcctcggcctcccaaagtgctggtattacaagtgtgagccaccaggcctggccaactgatgctttcttaaactcaactcaaaagttaaattttgatactgctaggtggattaggaaccttgatactgaacagtattttgtgcatttctcctcatttcatctataatgcggcaatctaattgccagtttatctgtttttcccattacactttgagagttccttgggtagggacaatattttattcatttagaatctccagtatgtagcagattacaaagatcacagcaagtattaaattaacatttcctgaatgaagaaatgaagaaattcagtacttgcagtcttcctggtatgcactgtgtacctagcaaacaacctgtgtggattatgatgtgcctcttagataaaccacagggaatgtgtctggccttctttcaagattaatctaattctcacagttgagaactaaagccactggagagtaacattttagtatctgagcaacaaactgcatgccatgggcaatggagaaccattgcaggctaataggaggcatacagtgaagttggcactctgcttgtctttatctctaagctcagatcatggttccttcacaaggtttttgtagttttttaatttggggttaatgaaaaccctgaagaggggttttcatctccctctctgtttcttcactatactttgcatctctattttctctcgtatgcaatagttatttgtcctgttatctgtgtctctgactagattttagtttttggaagggaatgactaaattctatttatctattacagcacctactaaagtaccttgcacttagcagacaatccagaaaacacaggctgaactgacttgttaacaagagagtttcaagtgtcgtttctgacaaaagcaggactatgaaagatttttaaagaaatagcacttgggtattaaaaacaaagagaaacactatatcctatattgagttaaaaaatgtaggttgggatcaaagttcccttaaaattc

SEQ ID NO: 54285 - DNA, 1752 bp, Homo sapiens
aatttccaggaatataaaatatgcctgaaacatagaaagcatattgatatctctaagtctaacaaaagactgttaggtcatatattatcctagaacaaatgttttcttatgtattgttaactgacccccatgaaaaagagtcatataacttaatgatctaaagaaactgtggaagttttatagtctttaaaaaaattacaaatgaataaaatgagacacaaagaaaccactaaaccgattaaaagcataggactaatacctgtgctcatgataacattccctcaacagatataatagagaaatagtaagagaaataaccaaattgttttgtagtagagtcagtctattgctagggttgctgccttagagacagacaatcattatttctggtagtagcaagctctttccctcctccataactttattctgcctagtataccctcccctcatgcctctaacagcttgactgattctytttttctttcttttttctttttttgtagtggaatatcactctgtcacccaggctggagtgcagtggtgtgatcttggctcactggaacctccgcctcccaggtttaagcaattctcctgctgcagcctcccgagtaactgggattacaggtgtgcaccaccacgcctggctaatttttctatttttagtagagacagggtttcaccatgttggccaggctggtatcaatctcttggcctcaggtgatctgcccgcctcggcctcccaaagtgctggtattacaagtgtgagccaccaggcctggccaactgatgctttcttaaactcaactcaaaagttaaattttgatactgctaggtggattaggaaccttgatactgaacagtattttgtgcatttctcctcatttcatctataatgcggcaatctaattgccagtttatctgtttttcccattacactttgagagttccttgggtagggacaatattttattcatttagaatctccagtatgtagcagattacaaagatcacagcaagtattaaattaacatttcctgaatgaagaaatgaagaaattcagtacttgcagtcttcctggtatgcactgtgtacctagcaaacaacctgtgtggattatgatgtgcctcttagataaaccacagggaatgtgtctggccttctttcaagattaatctaattctcacagttgagaactaaagccactggagagtaacattttagtatctgagcaacaaactgcatgccatgggcaatggagaaccattgcaggctaataggaggcatacagtgaagttggcactctgcttgtctttatctctaagctcagatcatggttccttcacaaggtttttgtagttttttaatttggggttaatgaaaaccctgaagaggggttttcatctccctctctgtttcttcactatactttgcatctctattttctctcgtatgcaatagttatttgtcctgttatctgtgtctctgactagattttagtttttggaagggaatgactaaattctatttatctattacagcacctactaaagtaccttgcacttagcagacaatccagaaaacacaggctgaactgacttgttaacaagagagtttcaagtgtcgtttctgacaaaagcaggactatgaaagatttttaaagaaatagcacttgggtattaaaaacaaagagaaacactatatcctatattgagttaaaaaatgtaggttgggatcaaagttcccttaaaattc

SEQ ID NO: 54286 - DNA, 562 bp, Homo sapiens
gactgcatccttcaccagtgtaccatgccagaatttacatttggaagtagcactcttaggccctgtgagcataccgacaagttcatggatcattcactcacttctcttaaacaagacagggaggaacctgctttccatatcgacctgcaacccttagtcaacaccatttccaaatacacatcccacracacatgcatcaaaaagtagcaggggcgattccactcctatctaagagaactgtgggaaaaaaataatagaagacacaagaatgttcccagtggcacaaacagaaatgacacaaatgcccatcaacagtagaatggatagattgtagtagagtcacatacacagatgtgagcaaaagaagccagtggcaaaagaacgtactgtgtgactccatttacatgtttaaaagaggcaaaatgaaccttagaagtcaggtgagcggtacccttgttgggggagcaactaggaggcggtatggggagggggacttccagggcactgatcgggacctgggtgctggatacgtgggtgtgttcattttgtaaaaatctatgca

SEQ ID NO: 54287 - DNA, 562 bp, Homo sapiens
gactgcatccttcaccagtgtaccatgccagaatttacatttggaagtagcactcttaggccctgtgagcataccgacaagttcatggatcattcactcacttctcttaaacaagacagggaggaacctgctttccatatcgacctgcaacccttagtcaacaccatttccaaatacacatcccacaacacatgcatcaaaaagtagcaggggcgattccactcctatctaagagaactgtgggaaaaaaataatagaagacacaagaatgttcccagtggcacaaacagaaatgacacaaatgcccatcaacagtagaatggatagattgtaktagagtcacatacacagatgtgagcaaaagaagccagtggcaaaagaacgtactgtgtgactccatttacatgtttaaaagaggcaaaatgaaccttagaagtcaggtgagcggtacccttgttgggggagcaactaggaggcggtatggggagggggacttccagggcactgatcgggacctgggtgctggatacgtgggtgtgttcattttgtaaaaatctatgca

SEQ ID NO: 54288 - DNA, 562 bp, Homo sapiens
gactgcatccttcaccagtgtaccatgccagaatttacatttggaagtagcactcttaggccctgtgagcataccgacaagttcatggatcattcactcacttctcttaaacaagacagggaggaacctgctttccatatcgacctgcaacccttagtcaacaccatttccaaatacacatcccacaacacatgcatcaaaaagtagcaggggcgattccactcctatctaagagaactgtgggaaaaaaataatagaagacacaagaatgttcccagtggcacaaacagaaatgacacaaatgcccatcaacagtagaatggatagattgtagtagagtcacatacacagawgtgagcaaaagaagccagtggcaaaagaacgtactgtgtgactccatttacatgtttaaaagaggcaaaatgaaccttagaagtcaggtgagcggtacccttgttgggggagcaactaggaggcggtatggggagggggacttccagggcactgatcgggacctgggtgctggatacgtgggtgtgttcattttgtaaaaatctatgca

SEQ ID NO: 54289 - DNA, 562 bp, Homo sapiens
gactgcatccttcaccagtgtaccatgccagaatttacatttggaagtagcactcttaggccctgtgagcataccgacaagttcatggatcattcactcacttctcttaaacaagacagggaggaacctgctttccatatcgacctgcaacccttagtcaacaccatttccaaatacacatcccacaacacatgcatcaaaaagtagcaggggcgattccactcctatctaagagaactgtgggaaaaaaataatagaagacacaagaatgttcccagtggcacaaacagaaatgacacaaatgcccatcaacagtagaatggatagattgtagtagagtcacatacacagatgtgagcaaaagaagccagtggcaaaagaacgtactgtgtgactccatttacatgtttaaaagaggcaaaatgaaccttagaagtcaggtgagcrgtacccttgttgggggagcaactaggaggcggtatggggagggggacttccagggcactgatcgggacctgggtgctggatacgtgggtgtgttcattttgtaaaaatctatgca

SEQ ID NO: 54290 - DNA, 629 bp, Homo sapiens
gggttatatctgggagtctgggttgagggtaggagctagaataacctcagacactttaggcagacaaggtcagcaaggctgagccaggacaatactgtcacacagaggagggctctgagtgcttgggcataatcccacaagtgcccacggtcattgagctctcaagagagtgacaggagggaagcagggatttaggagcttttgcctggccactgggaccctctccagggagggtttatgcctcataggatcacagttattattaaccctggaaaagctgcctgggcagatgcaccaaagagtattcaaagagcataatacaggagaagcaggaagaagaaaagtgcccgagggacacaacagtgctgcaaagggcccaggctcagaccagcaattctcaaaccataacagtcaccctagaaaccttaaaatgcagctttctgggctaccaccagaaaagtgcggcctcaggaggttcaaagtggggcagagactgtaccctcctcaaacaagatggctgtcctgyagggaaccctggaccaacctaaaaaaatagtgctttattatcaaaagactcatcgaattagactgagtggagtagaatcaagactctggtaattactattttc

SEQ ID NO: 54291 - DNA, 640 bp, Homo sapiens
cctgtacagcctgcaggaccatgagccaaacctcttttctttataaattaccgcggctccrgtagtctttttctttttctttctttctttttttttttttttttttttgagacagagtcttgctctgtcacccaggctgaaatgaagtggcatgatcttggcttgctgcaacctccgcccctcaggttcaggcgattctcctgcctcagcctcccaagtagctgggattacaggcacctgccaccacgctcagctaatctttgtatttttagtagagatggggtttcaccatgttgaccaggctgatctccaactcctgacctcaggtgatccacccaccacagtctcccaaaatgctgggattacaggtgtgagccactgtgtccagccgggtagttctttatagcagtgtgagaatggactaatacaaccctgctgcagccactggctgcccaagcggattctatgcagttcttgcttctcggtgtcactagcttctgatttaaagtctgggatgaatatgtctaattggtaacacttgaataatttgcccctgcctttgttgtatgggaggttggaaaaataaaaatttggtgttttcagctttcatggtgggagacagaactccactgaaacttat

SEQ ID NO: 54292 - DNA, 640 bp, Homo sapiens
cctgtacagcctgcaggaccatgagccaaacctcttttctttataaattaccgcggctccggtagtctttttctttttctttctttctttttttttttttttttttttgagacagagtcttgctctgtcacccaggctgaaatgaagtggcatgatcttggcttgctgcaacctccgcccctcaggttcaggcgattctcctgcctcagcctcccaagtagctgggattacaggcacctgccaccacrctcagctaatctttgtatttttagtagagatggggtttcaccatgttgaccaggctgatctccaactcctgacctcaggtgatccacccaccacagtctcccaaaatgctgggattacaggtgtgagccactgtgtccagccgggtagttctttatagcagtgtgagaatggactaatacaaccctgctgcagccactggctgcccaagcggattctatgcagttcttgcttctcggtgtcactagcttctgatttaaagtctgggatgaatatgtctaattggtaacacttgaataatttgcccctgcctttgttgtatgggaggttggaaaaataaaaatttggtgttttcagctttcatggtgggagacagaactccactgaaacttat

SEQ ID NO: 54293 - DNA, 2003 bp, Homo sapiens
cattgaaaatgaagcccatgttgttggaagcgtggatcaataaggattatttggtcttggctaaaggtttagtaaaatgtacttagataataataattaaatgaatgmcttaatttgtttttctttcaagctttattctttataagaattcagttttcttcacacacagcaaacatatgtgatcctgtgtttttatttatagaaagagcaaaagccaggaaaattaggtaatttgaattttagttagaatcctgtctttttgatctaagtgattatgtgaaagtggcttgctttgagtttatcttcatttctgtaatgatggtttggactggtaaacttcaatggcactttccaattctgaaatttcataatcctgtgaaaactcttcatttttaatctaaaatgatacagttgatatttctgctgtctaatgtgcctcatttatagaaatgtatagaaattattcctgagaatatatatgtcattgctcactatactagaaagcagcattccttatggtagatcacaaagttctcataattgagtaggtagtgacttaaaagcttgggcaattcagctagaaagctaaacagccgtcaataaccgaacataattacttctaaaaacagggaaggaagttgagcatgaaattctaactaaataagcattttatgatttcttccctcactgacaggccactgggtacattccctgttctgggtttaaaaaaaaatccattggtatttttcttagaaaatgaaatatcagatacaagcagcgattttctaaatacgtaacaaaagatatgttatgagctcccaccaatcagaatagaggccaaacacaaataatttctaccctgaacataagccttaagaaactaaaccaaagaaaacacaacttaaaagtactttccctccccctaccctcaaatgagaatgtatatttttaatcctttaaaatacaaatatgtttgtctccaatttattttatttttttttgagatgaggtcttgctttgtcgcccaggctggagtacggtggcacgatcttggctcactgccacctccaactcttgggttcaggagagtctcctgtcttagcctcccaagtagctgggactacaggccagtgccaccacatctgactaatttttgtatttttagtagagacagggtttcaccatgttggccaggctggtcttgaactcctgacctcaagtgatccacctagcttggcctcccaaagtgtcgggattacaggcatgagccaccgtgcctggccagtctccaattttgaaagaaataattaaatagggaagcatccacctgatccttgccctacttcttattccatcgtatcccaccaggccaccaggtccatccacacaggccttctttacatttattgtaaacaatacacacatgcccacctccatccagaatgcctcttcagatcatgaacaacagcttcctcttcagatcatgaacaacagcttccttttcatcattcagtatcaagagagtgtcatatcacctccttgaacaggttatctctggccattaatgttgccaacaccttgttaactcaaaaccttactctgttttattttctttttaacatttagtgacatttgaaactattttctatttacattcagtacttgtttattttctgtccaccctactaggatttccatagctcagggaacttggactatcttgtacatgcccaaccaatagtagtccatcaattaatattttcataataattttagtgctaataacaaacctagtaatttatggtcacctactacatgtcaggctctttatagattatctccctaattatcaaattagttctattaatcttttaacagatgaagaaaaaggggcttctgagagtttagagaagataacaggcccaagatctcaatgttcttaaggatgtagctgcaattataatttaaagttctgacttcattcctggctataatgactcctt

SEQ ID NO: 54294 - DNA, 2003 bp, Homo sapiens
cattgaaaatgaagcccatgttgttggaagcgtggatcaataaggattatttggtcttggctaaaggtttagtaaaatgtacttagataataataattaaatgaatgacttaatttgtttttctttcaagctttattctttataagaattcagttttcttcacacacagcaaacatatgkgatcctgtgtttttatttatagaaagagcaaaagccaggaaaattaggtaatttgaattttagttagaatcctgtctttttgatctaagtgattatgtgaaagtggcttgctttgagtttatcttcatttctgtaatgatggtttggactggtaaacttcaatggcactttccaattctgaaatttcataatcctgtgaaaactcttcatttttaatctaaaatgatacagttgatatttctgctgtctaatgtgcctcatttatagaaatgtatagaaattattcctgagaatatatatgtcattgctcactatactagaaagcagcattccttatggtagatcacaaagttctcataattgagtaggtagtgacttaaaagcttgggcaattcagctagaaagctaaacagccgtcaataaccgaacataattacttctaaaaacagggaaggaagttgagcatgaaattctaactaaataagcattttatgatttcttccctcactgacaggccactgggtacattccctgttctgggtttaaaaaaaaatccattggtatttttcttagaaaatgaaatatcagatacaagcagcgattttctaaatacgtaacaaaagatatgttatgagctcccaccaatcagaatagaggccaaacacaaataatttctaccctgaacataagccttaagaaactaaaccaaagaaaacacaacttaaaagtactttccctccccctaccctcaaatgagaatgtatatttttaatcctttaaaatacaaatatgtttgtctccaatttattttatttttttttgagatgaggtcttgctttgtcgcccaggctggagtacggtggcacgatcttggctcactgccacctccaactcttgggttcaggagagtctcctgtcttagcctcccaagtagctgggactacaggccagtgccaccacatctgactaatttttgtatttttagtagagacagggtttcaccatgttggccaggctggtcttgaactcctgacctcaagtgatccacctagcttggcctcccaaagtgtcgggattacaggcatgagccaccgtgcctggccagtctccaattttgaaagaaataattaaatagggaagcatccacctgatccttgccctacttcttattccatcgtatcccaccaggccaccaggtccatccacacaggccttctttacatttattgtaaacaatacacacatgcccacctccatccagaatgcctcttcagatcatgaacaacagcttcctcttcagatcatgaacaacagcttccttttcatcattcagtatcaagagagtgtcatatcacctccttgaacaggttatctctggccattaatgttgccaacaccttgttaactcaaaaccttactctgttttattttctttttaacatttagtgacatttgaaactattttctatttacattcagtacttgtttattttctgtccaccctactaggatttccatagctcagggaacttggactatcttgtacatgcccaaccaatagtagtccatcaattaatattttcataataattttagtgctaataacaaacctagtaatttatggtcacctactacatgtcaggctctttatagattatctccctaattatcaaattagttctattaatcttttaacagatgaagaaaaaggggcttctgagagtttagagaagataacaggcccaagatctcaatgttcttaaggatgtagctgcaattataatttaaagttctgacttcattcctggctataatgactcctt

SEQ ID NO: 54295 - DNA, 2003 bp, Homo sapiens
cattgaaaatgaagcccatgttgttggaagcgtggatcaataaggattatttggtcttggctaaaggtttagtaaaatgtacttagataataataattaaatgaatgacttaatttgtttttctttcaagctttattctttataagaattcagttttcttcacacacagcaaacatatgtgatcctgtgtttttatttatagaaagagcaaaagccaggaaaattaggtaatttgaattttagttagaatcctgtctttttgatctaagtgattatgtgaaagtggcttgctttgagtttatctwcatttctgtaatgatggtttggactggtaaacttcaatggcactttccaattctgaaatttcataatcctgtgaaaactcttcatttttaatctaaaatgatacagttgatatttctgctgtctaatgtgcctcatttatagaaatgtatagaaattattcctgagaatatatatgtcattgctcactatactagaaagcagcattccttatggtagatcacaaagttctcataattgagtaggtagtgacttaaaagcttgggcaattcagctagaaagctaaacagccgtcaataaccgaacataattacttctaaaaacagggaaggaagttgagcatgaaattctaactaaataagcattttatgatttcttccctcactgacaggccactgggtacattccctgttctgggtttaaaaaaaaatccattggtatttttcttagaaaatgaaatatcagatacaagcagcgattttctaaatacgtaacaaaagatatgttatgagctcccaccaatcagaatagaggccaaacacaaataatttctaccctgaacataagccttaagaaactaaaccaaagaaaacacaacttaaaagtactttccctccccctaccctcaaatgagaatgtatatttttaatcctttaaaatacaaatatgtttgtctccaatttattttatttttttttgagatgaggtcttgctttgtcgcccaggctggagtacggtggcacgatcttggctcactgccacctccaactcttgggttcaggagagtctcctgtcttagcctcccaagtagctgggactacaggccagtgccaccacatctgactaatttttgtatttttagtagagacagggtttcaccatgttggccaggctggtcttgaactcctgacctcaagtgatccacctagcttggcctcccaaagtgtcgggattacaggcatgagccaccgtgcctggccagtctccaattttgaaagaaataattaaatagggaagcatccacctgatccttgccctacttcttattccatcgtatcccaccaggccaccaggtccatccacacaggccttctttacatttattgtaaacaatacacacatgcccacctccatccagaatgcctcttcagatcatgaacaacagcttcctcttcagatcatgaacaacagcttccttttcatcattcagtatcaagagagtgtcatatcacctccttgaacaggttatctctggccattaatgttgccaacaccttgttaactcaaaaccttactctgttttattttctttttaacatttagtgacatttgaaactattttctatttacattcagtacttgtttattttctgtccaccctactaggatttccatagctcagggaacttggactatcttgtacatgcccaaccaatagtagtccatcaattaatattttcataataattttagtgctaataacaaacctagtaatttatggtcacctactacatgtcaggctctttatagattatctccctaattatcaaattagttctattaatcttttaacagatgaagaaaaaggggcttctgagagtttagagaagataacaggcccaagatctcaatgttcttaaggatgtagctgcaattataatttaaagttctgacttcattcctggctataatgactcctt

SEQ ID NO: 54296 - DNA, 671 bp, Homo sapiens
ctgttaattcatgaaccaggtgcctcccatccaaagtccatttccttccatttccattggtcaaactgatatactataatctggctcaaaattttcaccacttcatattaaagatgattcaacaagatccaagtatgaggttatcgtcttggggttttttccaaccctcctttttttctcttcccaatagtgccttaccctaatattatgaataataggtctgaaaaacaatcctcatagtatcaatctgtaawaacacacacgatcagattgttagcaaatcagaataaaatgattaaagctgtaactcaataccaagtttcattaatagtttcaaagacacaatcattcaagaggcacagacagagctgggagagatttggggcatttagcacgatgttatataatgtcttttctttctagatcaaacatggtctgggttagatggataaataagatttcaagttgtgaggtgtattagccatcaaatatcatctttgaatcagatagttgcaaaatttatgtgatattcttcagtgaactaaatcacaataatccatttattccaggcttacttgccatagcatgctagacaggtacattctgtgaaagcatttaatagataaggacttttctgctaccaaaaacaaattagtttgaatgtggagaga

SEQ ID NO: 54297 - DNA, 827 bp, Homo sapiens
acaacagggactattactcagcccttattatagatgctttgcatggattagcttatttaattctcaaaacaactctatggggtatctatcacctcaatttatagatagggtgtggtggttttaaaccatgtccataaattctttgatagtcctccctttaaaaggtggattctaatttgcttccttttgagtatgagcttggcttagtggttcagttctaaagaatagaataagtgactatgtttggtgtctaagatgagatattcaaaggcattgtgacttcctccttgctctctctctcggatcacccartgtgggtcttggtttttccatcttcaaagtgaggtgtgtggatcagataacatctccagttatccaacctgacatgtcgtaaatcatctgtgcatcaaatagtcttcttagcatggactataacatcagattcgttagctgctctgtgctagaaagagttgaagctttgacagttttgcttcattttgttggatttggggggccaagatcagaatgacatgagaacactcaagcaactttatggagagacccatgtggctaggagcttaggcctcctgccaacagccatatgagggtgccatcttggaggtggattctccagcccagccaacccttcaggtcaatgcagtcctagcaagcattttgactgcaatctcacaagagatcctgagccagaaccacccccagttaagttgctgtcaaatccacaacccacacaaactgtgaaattagaaaaaccttttgtttaaaaccattaagttttggggataattcatcatgcagtaataaataac

SEQ ID NO: 54298 - DNA, 548 bp, Homo sapiens
aatcctgaacctgatttgcagtccagcccatgttcacaatgctcgtatctgctgagcctctgacttctgcgaccaatataggccaagtgtgtctggagagataatacatatagccacactccccaccttttcctcaagactagtccagaccacaagctggatgaggtcaaaaactatgtctaatttctcaccattgtatgctcagtgcccaggctggtgcctgacacgcagtaggcagtcagtgaatacagcccaaagagaggtatggccacagtcatcctatttgtgcccccgggacctggtactcaaaaaagaagtaacatatctgatgatggtatacaggcatgcatcaatgccacacactgtgcactgaggggacactgggctggcttcacacccttcaaggactctaagcagtcatgctgggtacccacacatgagcaaggaagggggtgttctgtgtgttttcatagataatgcatttgtctatttgccatccattcatcacatggctaattagttcaactacackttcttattttttgtca

SEQ ID NO: 54299 - DNA, 633 bp, Homo sapiens
tagtaagttaccaatgttctgttctagtcatgagcctcaataatgaggaagatcgtctcttatctcttctgttttttgtcttgaatgtaatccacattgctatttacctttacaaagtagcctgagacacaaacccttcactaaaattgttgagataaatgaagttactttgccctaagtttccacacaattaaaaaaatcattacctttttccccctcagcagtaagactaaactttgaaaatcagtctccttctaatagcacctaagtcgacataacagtacatattgttgagatttagagtctagctgtatagaaattgaagttgcccttaatttggatctattattctayctccagtaatctcttataatgataactctgctctgagtgtgccaatatttatgaagccctttcagggatgggttgtttcactttgctcactgtttttctgtaaactaaatgacatggtgtggcaataaaccactccataagaatatcaatgtgtaaagttgatgaactagtaataatagtaaaaacaaagaattatatattaataagactatggtggacaatttttgaggtccaagaaatgtattttgtgtttgctaaacataatcccattgatgatgc

SEQ ID NO: 54300 - DNA, 633 bp, Homo sapiens
tagtaagttaccaatgttctgttctagtcatgagcctcaataatgaggaagatcgtctcttatctcttctgttttttgtcttgaatgtaatccacattgctatttacctttacaaagtagcctgagacacaaacccttcactaaaattgttgagataaatgaagttactttgccctaagtttccacacaattaaaaaaatcattacctttttccccctcagcagtaagactaaactttgaaaatcagtctccttctaatagcacctaagtcgacataacagtacatattgttgagatttagagtctagctgtatagaaattgaagttgcccttaatttggatctattattctatctccagtaatctcttataatgataactctgctctgagtgtgccaatatttatgaagccctttcagggatggsttgtttcactttgctcactgtttttctgtaaactaaatgacatggtgtggcaataaaccactccataagaatatcaatgtgtaaagttgatgaactagtaataatagtaaaaacaaagaattatatattaataagactatggtggacaatttttgaggtccaagaaatgtattttgtgtttgctaaacataatcccattgatgatgc

SEQ ID NO: 54301 - DNA, 588 bp, Homo sapiens
tgggattcaaggacaaaagaaaaaaccagaagaaatttttmtcaaaaatagaacgttagttcagagtgagaatagtagtgtctagtttattcatttgtgcattcaacaaacatccattaactcctgtgatggttaacattgagtgtcaacttgattggattgaagggtgcaaagtattgttcctggttatgtctgtgagggtgttgccaaaggagattaacatttgagtcagtggactgggcgaggcagacccatcctcaatatgagtgagcaccatttaaatcagctgccagcacagctagaataaagcaggcagaagaacgtggaaggactagactggctgactcttctggccttcatctttctcccatgctggatgcttcctgccctccaatgttggactccaagttcttcagcttttgtattcttggacttacaccagtggtttgccaggggctctcgggctttcagccacagattgaaggctgcactgtcagcttccctacttttgaggtttggggacttggactggcttagttgatccacagcttgcagacagcctattgtggaacttcaccgtgtgactgt

SEQ ID NO: 54302 - DNA, 561 bp, Homo sapiens
agcatatcaaaaagtgaattcaccatgataaagtcagctttaatcctgggatgcaaggatggttcaatatatgaaaattaataagcgtgatttaccacataaatagaattaaaaacaawaccatgtgatcatctcagtagatgcagaaaaagcattcaataaaatccaacatccgtttatgatataaaccctcaacaaattaggtatcaagaaaaatatctgaaaataataagagccctatatgacaaactcacagccaacatcatgctgaatgtgcaaaagttggaagcattccccctaataactggaacaagataagggtactatgttcactacttggatgacaggatcattagaagcccaaatctcagcatcacgcaatatacccatgtaacaaatctatacacgtgccccctgaatctaaaataatattttaaaaataaaaataaaaaaaatgtagtgcagctgtaaaaacatccgtttgtgggtttctgccttataaagtgaagaatgtatttgttttgttgttagatacaaactagccggtgttatggaaaggat

SEQ ID NO: 54303 - DNA, 561 bp, Homo sapiens
agcatatcaaaaagtgaattcaccatgataaagtcagctttaatcctgggatgcaaggatggttcaatatatgaaaattaataagcgtgatttaccacataaatagaattaaaaacaaaaccatgtgatcatctcagtagatgcagaaaaagcattcaataaaatccaacatccgtttatgatataaaccctcaacaaattaggtatcaagaaaaatatctgaaaataataagagccytatatgacaaactcacagccaacatcatgctgaatgtgcaaaagttggaagcattccccctaataactggaacaagataagggtactatgttcactacttggatgacaggatcattagaagcccaaatctcagcatcacgcaatatacccatgtaacaaatctatacacgtgccccctgaatctaaaataatattttaaaaataaaaataaaaaaaatgtagtgcagctgtaaaaacatccgtttgtgggtttctgccttataaagtgaagaatgtatttgttttgttgttagatacaaactagccggtgttatggaaaggat

SEQ ID NO: 54304 - DNA, 561 bp, Homo sapiens
agcatatcaaaaagtgaattcaccatgataaagtcagctttaatcctgggatgcaaggatggttcaatatatgaaaattaataagcgtgatttaccacataaatagaattaaaaacaaaaccatgtgatcatctcagtagatgcagaaaaagcattcaataaaatccaacatccgtttatgatataaaccctcaacaaattaggtatcaagaaaaatatctgaaaataataagagccctatatgacaaactcacagccaacatcatgctgaatgtgcaaaagttggaagcattccccctaataactggaacaagataagggtactatgttcactacttggatgacaggatcattagaagcccaaatctcagcatcacgcaatatacccatgtaacaaatctatacacgtgccccctgaatctaaaataatattttaaaaataaaaataaaaaaaatgtagtgcagctgtaaaaacatccgtttgtgggtttctgccttataaagtgaagaatgtatttgttttgttgttagatacaaastagccggtgttatggaaaggat

SEQ ID NO: 54305 - DNA, 662 bp, Homo sapiens
ctcttctaaagtaattttcattttctctcatttagttttcacatgaaagcttgatagaactataattccaaggatactgttatgtaaatgcaggctatttagaagtgaaattcctgagtcaattgtttcctttcatttctagacagtgtaaggatagtacttgagttggtgctattaaccccctccccaaaatgtgaatggtagtagggattctttgtgggcagtcctgccactggagacatttgaaactcaaattccatttctatagatcaaaggctaaatcacaccagtggtaaaactaatatgtttacaaaacaaattttgatttaaacaaaccaacaaaattccctttgatggctctcattgcacttaggtaaaatccaatcccctcctggtggtccccaaggtcctgatggggccagaccatccagttggcacctagttagtgctcctgctccaacccctcaggtgcaagctcctccctattcatggcyccctctctgttggaaacctttatcccgctccaggtctaaccctctttcatctcaagtcttacatgttgtatccctggagaaactttcattaacttcccactcaaaactgttactcctgttcctctttttcatcccacttttcaactcattattaaaggcacttatttc

SEQ ID NO: 54306 - DNA, 662 bp, Homo sapiens
ctcttctaaagtaattttcattttctctcatttagttttcacatgaaagcttgatagaactataattccaaggatactgttatgtaaatgcaggctatttagaagtgaaattcctgagtcaattgtttcctttcatttctagacagtgtaaggatagtacttgagttggtgctattaaccccctccccaaaatgtgaatggtagtagggattctttgtgggcagtcctgccactggagacatttgaaactcaaattccatttctatagatcaaaggctaaatcacaccagtggtaaaactaatatgtttacaaaacaaattttgatttaaacaaaccaacaaaattccctttgatggctctcattgcacttaggtaaaatccaatcccctcctggtggtccccaaggtcctgatggggccagaccatccagttggcacctagttagtgctcctgctccaacccctcaggtgcaagctcctccctattcatggccccctctctgttggaaacctttatcccgctccaggtctaaccctctttcatctcaagtcttacatgttgtatccctggagaaactttcattaacttcccactcaaaactgttactcctgttcctcttyttcatcccacttttcaactcattattaaaggcacttatttc

SEQ ID NO: 54307 - DNA, 1260 bp, Homo sapiens
ttttaatataatttagtcattttatattttgttatttcttctcactcagtaattagggttatgaaagtattttatcagcctccaacaaggactgtttttgcatctcatttcttcatttgagttcacttcctgccaaattatttcctttagcaaattttcatcaatgaacaggagttatgacattatgttgttttattttgaatcaaaatttggctgaatatggagttctagattgattataatttcatctagtgtatttaaatatgggtgtatacacacacgcacgtgtacatatatatactatatagtatatatatagtatatatactatatactatatatatgtatgaatgtatgcaatttccctgcaaggtttcttcttgttactggggaatcctccgctggcctaggtgcagagcatacacagatacttgtgtatcgttcctagcctcataaggtgttctcttcatccttattgcttcatagtttcactttgtgataactgggtgctgatttattttttggaggggtttcttgtgtttggttctttggtactttcaatttcttacccattatattgtctgttactccctccatttcctactactaccactgtcatgaaatgtgttagacttgtcaaattcttctgcatctcttaagttctgttccacatttttcatctcttcattattttgagctgcattctgggtgcttatctcagtaccattttccactcaatagtatccatgcctgtgtccagattaacactgagctgattgcttcaaaaacattcagccattttcctattgctgctataacaattactgcacattcagttacttaaaacaacacacatttatcattttaaagttctgggggccagaagtagaaaaagagtttaatgggataaagtcaaggtgtccwtagggttgatttcttccagagattctaggagaggatccatctccttcccttttccagcctctagagtctggctggagattcccctagactctggctccttaagagaccacaaaatgatacccctttccccctgaactttatttctataagtctgtaaaggaaatattcaaaatttcgaaagtcacttatcagttggaaacatttttaatagtttatttattttctatttaaaatcatattgtttatttatttatttattttctatttaaaatcatattaagatataatcagataaatccacactactttcatacttttggctagagaggtaagttt

SEQ ID NO: 54308 - DNA, 662 bp, Homo sapiens
taaaaccaaacttcagattcacatgcacaaaaatctccttagagtgaaaagtattttgggagcttatcaagggatgtactgggtaatgctgaagaacaaagaacactcttgatattaaactgagctccaagacttcatattctaagtttatagctgcattctggttaacctcattcttttttgagtacagctactctttttagaaattactttttcactaatcactgccaatcatattgaaattattgtgaaataaagaatcttttctttcaaaaagccacaattcacatcataacacagggccctacaaagagcttatgaaagctcccaaggcagctgcttctcttggagaactgccggaaagcagcctgcaaacacagacagattcctgcccatcctgggcaagcggaggtggaggctgctggtccygaccgggctgggttacaataagaagctggctgtgaagttgcaagaattcaatttccttgtccctacatgtaactctggttaggactggataaataaatgggcctcccccactttgtactattacaatatggggtgtatgtatgtgtggttatcaactcaccaaaatgtaaaaattcacatgaaaaatggggaatacataaacacatacatatatattaaatatcattatagac

SEQ ID NO: 54309 - DNA, 699 bp, Homo sapiens
aataactacttatattaaaactaaaactaaaattgatttaaaacgtggtatatggaaataattttattattgtgagataaataatattttattggaaaaaatactaattttattatatacaaaaactgaattcatgttagtaagcttaaaattgtaactgagtggttaaaacattttaagcattttacattttgtgtaaagtttgtcctcacagaagaaatatctgttacaaatatgtcattaaaaattacakaagaagaaattatatagccacaatgtttgtatatgagccttactttggactcaaggtatagagacctttcaaaaatcaaattactaatctacatattatacacatttgtcatatcttatccaaattatttttcttttgaaagcattttcttctatcatccatttaagagtggaacatagaataatagcaccaaaaacaataaaatcaacagtaatttattcagctctggctgtttggtgagatgaaatattttctgtaaacatttaagtaacactgtaacaataaatataactttcacattatttttctgcttaataatagagtcagagagaagttgaagacttaggccaaagcaacacaatgttttaagtgacaaacaagattctaatctatgtctttgtttttaatcatagcagtgcacttcccctaattaattttatcatttg

SEQ ID NO: 54310 - DNA, 699 bp, Homo sapiens
aataactacttatattaaaactaaaactaaaattgatttaaaacgtggtatatggaaataattttattattgtgagataaataatattttattggaaaaaatactaattttattatatacaaaaactgaattcatgttagtaagcttaaaattgtaactgagtggttaaaacattttaagcattttacattttgtgtaaagtttgtcctcacagaagaaatatctgttacaaatatgtcattaaaaattacagaagaagaaattatatagccacaatgtttgtatatgagccttactttggactcaaggtatagagaccwttcaaaaatcaaattactaatctacatattatacacatttgtcatatcttatccaaattatttttcttttgaaagcattttcttctatcatccatttaagagtggaacatagaataatagcaccaaaaacaataaaatcaacagtaatttattcagctctggctgtttggtgagatgaaatattttctgtaaacatttaagtaacactgtaacaataaatataactttcacattatttttctgcttaataatagagtcagagagaagttgaagacttaggccaaagcaacacaatgttttaagtgacaaacaagattctaatctatgtctttgtttttaatcatagcagtgcacttcccctaattaattttatcatttg

SEQ ID NO: 54311 - DNA, 2917 bp, Homo sapiens
aaagaatcttttgaggttgaaggatgaaggaaggaacagatataggatggaaaaagggaggcaggagggagctatgggcaaagggtgcactgtgagcttaatgaaaagtctgggttttttttccttgtccatatatcgcaagatgaaaccaccttatctctaatcgcatttagagtacacacacacacacacacacacacacagacacacacatggatttatcatgaggaatttgctcacatgaggctgagaagtcccataatctgccatctacaagctacaggatagtcagtgtagtcagtggtgtaatcccattctgagtctgaaggcctgagaactaggagggtctatcacatagatcccagtccatgggtacgagaagaccaataacccagcttaaacaggcagacaagaagtgaaaggggtgaatttgtttccttcctcctttttgtcctattcaagccttcaataaattggataaatgcacagccacactggggagggcaatattgagtctccgaattcatatgctaatctttgccagagacactctcacaaacacacccagaaaataatgcttaatctgggcaccctgtggcatagtctagttgacatgtaaaattaatcatcacagttatacaggagcttaagaaacactattttaaagagtgattctttactggctgaaaatttggaaaagttgacccataaaatcaagattgaggaatgggctagggattttgtctagttcacccaaataaaattttgctgagtgtctaatgtatcaggcactgggagtgtaaagatgaaaagagacacagtttcttctcttgaacagcttgttgtcgagtagaagattttaaaaagcccattctaaaatgtttcctgatgaagacatactaaatttccttaaagttttatgatcacttaaataatagctttctttgtgaagtaccttctaagtgctaggtataatgttggtctttttccagttcttatgacaaccattcaaggtagacattttattttttctgcttttcaaaaaggaaattgaagctcagaaaggacaggcatattacccaactattagtaagtggctaattgaaaattcaaagagtagctaaatgaatgagtaacatgttctaggcacttcacttgatgctggatgcatagtatcttacagagtcttcacaaccactggagaaaagagatactactgttatcttcattttatggctgagaaaacagagaccccctggaaaattaaacaaattgcccagggccacacagtcagtgtagagtgaggattcaggctcagccttcttggttccaaagctgatatttaaccgccatgctacccttcctcttgccttgtgccttacagttcacagcttcactctggctttgatttccatgtttgatgggttcttttgtactttcctctccctttaccaaaaaacaaactgaacaacaaaaccatcttgagcatcttcttgaaaggagtgaattcggctgaaggaaaatttccattagaattctgaggctcagcattaggccagggaggtaaaaatgccatgctaattaagtaattactgaaactcatgattaaaacatgcctttctaagagaatccccagaataaatggtattcttcattttgccttggagcttggttggcttggcttctaagaaattcaccttttttctggagatgtratggggaagcaaagacttcttattccttatctttttgaatccttagaacaactctttggagatacatgaggaaaattttaatttgggattttagtggttagttaatcagttagtctcttgcatttgaatcctggatcatttgagaaacatatatatatgtaatagtcagggattacaatttcaggattattgcttggattggatctcatgtcttgaatgtatacccaaatgctcttcctcatactcccttgaaacccttgctgaagctggatgttgggatctgcatttgggaagggtcacatctagggccagttgagtagagaaacatggctgcctcataccaggtgcatgcggggagccagggagaggaaggtcctcaaggcaagagagctgtagaattttacccctccagaataaagagaggtggatgactgaatgtttgcctcttactttttcacctgctggatgaatcattcttgctcctgtgaggagaaaccaatgaaactgtagagaacaacagattctgccaattacacccaagtggtgttttattggctgacaaaatcatagggagagagagcatatggctttcactacagtctctgatcttgcttttttaaaatttattgccctctcttgatttgacatgtggagaattacaatttgaggttcagagaagttaatgatttgaaagtcacacttcagtgactaacccaggcctagactccagcctgtcaaagggagtttagagctcaagaagtcagacccttcagattataaatgggccaagtgcttgacagagatagcatatgacttgtctaagaccaaattgccaaaactagaaactcaggtcttctgactccttctgatgctctttttaatatcttacagtattctcctttgtaaccctgagacatttgtgctgctggcttatgggactgatcttctggatttcagtcctgcttctgagcctctcttttctcaattataaaaggaggatcatagaagtagtgtctgcctctttgccttcttgtggaaaccaaatgaggctgggtctgtgcaaatgctctgtgactgtaacatactctataaatgttggaatattgtttttgaggttgtcactcttattgctgtcctctcagatgggccccatttttctccttttatttttagttgacatgtaataatatttatgggctaag

SEQ ID NO: 54312 - DNA, 527 bp, Homo sapiens
atggtctgggtttaatgggaaagattttttcctctaaaatcttggaaaaagttcacttgcactgaacctcatgaaagattagagttagagaagaaaaaaaagatgcattttaataatctgagtgaaagaatgtataggtttattgcgttctcaaatggggcatgttgcatgtttacaatgagttctgttattttgcctttcagagaggttgggcaagtgccttgataagtaggcagacaatggcattagtgaaattggttttgtggacactaagcccagctcttgatctaccagcctgtacatgcctgggcttttccacctgtattagtccgttttcacaytgctgataaatacccgagactgggaagaaaaagagttttaattggacttaaatttccacatggctgggcaggcctcagaatcatggcaggaagaaaaaggcacttcttacgtggtagcagcaagagaaaacgaggaagaagcaaaagtggaaacccctgataaacccatcagatctcatgagcctt

SEQ ID NO: 54313 - DNA, 527 bp, Homo sapiens
atggtctgggtttaatgggaaagattttttcctctaaaatcttggaaaaagttcacttgcactgaacctcatgaaagattagagttagagaagaaaaaaaagatgcattttaataatctgagtgaaagaatgtataggtttattgcgttctcaaatggggcatgttgcatgtttacaatgagttctgttattttgcctttcagagaggttgggcaagtgccttgataagtaggcagacaatggcattagtgaaattggttttgtggacactaagcccagctcttgatctaccagcctgtacatgcctgggcttttccacctgtattagtccgttttcacactgctgataaatamccgagactgggaagaaaaagagttttaattggacttaaatttccacatggctgggcaggcctcagaatcatggcaggaagaaaaaggcacttcttacgtggtagcagcaagagaaaacgaggaagaagcaaaagtggaaacccctgataaacccatcagatctcatgagcctt

SEQ ID NO: 54314 - DNA, 549 bp, Homo sapiens
tgcatcagctccatcctaaagtagtcttgataaagttttgggccctctggatgaaagtgcagtgcccaaagaaatagttgccttgcactttctgaagacaagcagtcttccatttcccatttggctgccataatccacaaagctggcttgttggaatgaatggccaacatggcagagaataccttgctaagttgagttttagtagcccatttcttacaaaaaactacataggaggccaggcrcggtggctcatgcctgtagtcccagcactttgggaggccgaggcgggtggatcacctgaggtcaggagttggagaccagcctgaccaacaaggtgaaaccccgtctctactaaaaatacaaaaattagccgggcctggtggcaggcgcctgtggtcccagccactcaggaggctgagacaggagaattgcttgaacccaggaggcagaggttgcagtgagccgaggtcatgccactgcactccagcctaggcgacagagcaagactccatctcaaaaaacaaacaaaaacctacataggagagccaa

SEQ ID NO: 54315 - DNA, 551 bp, Homo sapiens
tgcattcaactctccttctccatgctgtaaggtgttttaytttctttaaaatttaattttattttatcttacattctaggatacatgtgcaggatgtgcaggtttgttatgtaagtaaatgtgtgtcatggtggtttgctgcgcctatcaacccctcacctaggtattaagcccagcatacattagctatttatcctgatgctccccatccccctgcccctccaacaggtcccagcatgtgttgttcccctccctgtgtccatgtgttctcactgttcagctcccacttacaagtgagaacatgcagtgtttgattttctgttcctgtgttagtttgctgaggataatggcttccagctccatccatgtccctgcaaaggatatgatctccttcctttttatgagtgcatagtattccacggagtatacgctgtaagttttaaaggggcagacttctttgcagggaggctactcattgtctaatgctgcctatgatgggtcagataagtctgtgtcattctggggttcattatcagaatgtatatcctaat

SEQ ID NO: 54316 - DNA, 550 bp, Homo sapiens
cagttggctgtggaaagctatgagtcactgaaatgaacaatttgaacatatgcaattgatcatttttacaacaggaagaaaaaaccatgctatttcttgtttgcttttaaaratattgcgggtaacacgtgttccatatcatctgatattatacacaggaagaaggtaaacttattaattaaaaaagtcttgcaaaaggaacttgcagcctgcattatgttagtagttggttgctttttaaatacgaaagaaaaaagagtaaattatgtactcctgaaaatttgatccttgttcttatgggaaaatatggcaaaacatagaaactctgttaatggcaaaacttattaggataaggactcctcgcctggggttcagggaagtgtttgaaggtatataaaaatatatcttagtgaaaaaaagtaattatgttctttttcttaaaactgcaaataatcctatagtgctttggtattacatggtcagtattattttcattattcatattaggagttaaagaaaaagagccctttcattttgattgtattatttt

SEQ ID NO: 54317 - DNA, 550 bp, Homo sapiens
cagttggctgtggaaagctatgagtcactgaaatgaacaatttgaacatatgcaattgatcatttttacaacaggaagaaaaaaccatgctatttcttgtttgcttttaaaaatattgcrggtaacacgtgttccatatcatctgatattatacacaggaagaaggtaaacttattaattaaaaaagtcttgcaaaaggaacttgcagcctgcattatgttagtagttggttgctttttaaatacgaaagaaaaaagagtaaattatgtactcctgaaaatttgatccttgttcttatgggaaaatatggcaaaacatagaaactctgttaatggcaaaacttattaggataaggactcctcgcctggggttcagggaagtgtttgaaggtatataaaaatatatcttagtgaaaaaaagtaattatgttctttttcttaaaactgcaaataatcctatagtgctttggtattacatggtcagtattattttcattattcatattaggagttaaagaaaaagagccctttcattttgattgtattatttt

SEQ ID NO: 54318 - DNA, 627 bp, Homo sapiens
tcttattgatttcaaggagatatttatatatcctacatgcatgtcctttgatagttttagtacatttttaaggttctttagagagctattctagcattctgtcacctcaaccatttaaaatttaaaatggcaaaagagctttattagtagagcatctaatttcaaatccaccattttaagctttgctattattacagaaaagcaagtacaaagtgttgagaagagaaaacaaatgggattttgcttctgtaagttaatagttacatttcagctgttctgtttacacaccattaaatgtacrctccagaatgtggtagaacaagaaaaacaatagtacagttcttacaatttgtaataagctgcacttcacagcactttacaaataaacagcaatcatatctgatctggtggactcagagagtaagcagaggctaccccagtttattatagacataagcccaccatgcaacagactaagggaaggcttacagagaaatgtccaaactttctttggaatacaaccttatactctttgttatggaaggcaggcactgttctcaaatgctcttcccattgactgggcaggcacttacacagaataatcaaacagctgttgactttggaatt

SEQ ID NO: 54319 - DNA, 711 bp, Homo sapiens
tttcttcagaaacagagaaaattagagacagacacagtttacgctaggggagcaatttaaaaatccaaagtactcagtggaagtctgaatgggaccatgcatttggaacatttttggagcctaataaaaggagagaatgaaggactctgaaaatgtagacgatcactgtacattgaggtatgttccatgtaagtttttcattaatacatttctgaatccaaagcaatgctctgggaacctagaagtaagggggaaggggcgagtggggagaagatagaayagatagcacctgtatttgagaaccttatattgaattgctaaaatgtatcaaattctactgaaacataagttatatgggaactaatttattattataacttactggtgaatatttcctaaatatctgcataagtgtctggtacggagaaggcccttaattaatagttgttcaataaatgagtaagattcataggaaaagacagtatattaaagtatcatcatgcttgaagcaataactaatgccagatgaaaagatctgggaaagagtcatggaaagatgaggtttgaatcaggtcctaaatggtaaataaagagattcattcagagttaaaacttgtagcaaaatatataacaaatttcatgaataatgacaaaataaaacatattgaaatatttcttagaagaagaaggagaaaataaagttttaaaggt

SEQ ID NO: 54320 - DNA, 584 bp, Homo sapiens
gccttgcaatagaactttgtgtgatgatggaaatcttctatgtctgtgctgttctacgtagttttcaccagctgcatacggctattgagcacttgaaacacagttagtggaactgaggaactaattcttaagwtgtatttatcatgaattaatttaatttaaataatccagtgactagtggctataaattttgacagcacaagtctgagtattttctctaaccaaaaaaagcaaaactttggtaatatttacatggctggctatattagtaaaaataagctagggaatgctgcagttaaaaaaattaaaaagtaatgaaattttaaaattctagaatcccactggcttagagcagcaaatatttatgtctcccttcacactgaatttttcacttcagtttcaagccggggcctggtcacagagcactctctgtgtgaaacattggtaattgtttttgtagagcaaaaggaagctttaagaccacatgtgccactggttcttaagatttctgattattactgacacatactgcctctgctcatatatatatatatatatatatatatatatatatatatatatat

SEQ ID NO: 54321 - DNA, 367 bp, Homo sapiens
cacactcctgggcacacagatgacagaaggctgcctcacagcctactcaggctacagctattgttcatgcttctgtggatctcactcaagtcaggaaaggcttcttgttgtgmaacacaggaaggccaaaattgtgtattttaaagtatctttaggggttatgaatgcaaaatggacacacaaaccacgaggaaatttctagacctgagaaaactgaatatatagttccttgcaggaaccatgcaatatcatgttgccaaaacttccttcatgctcttccctttctctagaatattctacaaaattcaccctctgcttcatttcttttaagaattgtattgaattcctacctctgataattaagtgg

SEQ ID NO: 54322 - DNA, 947 bp, Homo sapiens
tggccaggtgggtctcgaactcctggcctcaagtgatctgcctgcctcagcctcccaaagtgctgggattataagagtgagcctccatgcccagccttgaatgtcttttcttgatttccaatgccactggtagggttaagaacttgtctttcctagtacctctccccttcttcaactctgggtagtctctgtgtagtaaaatatacatatttaactaagaaataaaacatgctattttgttgttctttttattctcatttccttgacgactactgtggctgacaagttctattcatgtcctttgctcatttttattcctacccgtcttagtggtccttttgctaattggcatactcgttattacataagggtaaaatatattaatccttgcctttgcccttgttgagtatatatttcccagtctatcttgtgtgtgtatgtgtgtgtgtgtgtgtgttttgtttgtttattttgagacagagtctcgctctgtcacctaggctcaactgtagtgccatcacagctcattgcagcctcaacctcctgggtttatgtgatcctcctacctcagcctcctgactaactaactgggagtacagggcatcatgtcccactgacttttgtattttttgtagagacggggtttctccatgttgtccaggctagtcttgaactcctgagctcaagcgacccttccacctcggcctccgaaagtgctgggattacaggcgtgagccaccatgcctgacctatcttttgtttggttatgtatttttatatgaaggtgttttaaattgtgtgcagtgaaatctcttaactcttacgacttcttcarttactcccaagtttgaaaagttacactgcccctagaaatttgacaaatatttattttattttctcttgttcttttagggtttgatttttaaatataaagtcttcatccactt

SEQ ID NO: 54323 - DNA, 630 bp, Homo sapiens
ttgctcccaccacaccacatcctccctggaagtcccctctacccttctgtgcctttgtccctcctggaatgcctctccctgccttccctgagctaactcatcctcaccctccaagatcaccttggccttacctcttctgggaaaccttctctcatctgatccaagcccctgacgcatctgggtcaatttcagcccacagccccaggcctgcctgaagcyggcagaatcgttactcatactctgtccccctgtgcatcccccactgcttcctaagacattggtaaaatcatgttgacctttcaacttgtctagctctaagagtcttggattcaagcctcagctctaccactaatttgctgggtaaccttgggcaagtccactgccctctctgagcttcctgtttcctatctgtgaggtagttcagcttgtgggcagaggcttcagaggagaggagggacagtcagccctcactaccagaggctcctgcaggcagcggagtgaggtgctgctctccttctcccccaggagcagccaggatagagtccgtgggcctgagcccagaccctcctccatttatttagggagcaacagctcacagggcagcacgggcagagaaggaaggggtgtggc

SEQ ID NO: 54324 - DNA, 3160 bp, Homo sapiens
gcttgttttttccatgtttggacagctatgtgatccaatatggcaggagctattaaaatgtaaattaatttacctatattatttaaataaattacttaaattaattggttgattatatttaacatgcaactaaaaagtcggttcttcagtcacactagccatgtttcaagggctcaaaatccacatgtggctagtggctaccacgttggacagcgtgaatacagaacattgccatcatggtggaaggttttattcactgagttatctctgagctcaggacagagtcatggatagtgaagggtgggaattgggagtgaagtggcacaaaaggaataagctggggagaagaggttgcagcagacttctgtgagcaaccaggaagcaattcaagtcaagaaataattgctagcccaggcatggtggttcatgcctgtaatcccagcattttgggagccgaggcaggccgatcactggagcccaggagtttgaatagcctggccaacatgatgaaaccctgtctctaccaaaaaatacaaaaaattagccaggcatggtagcacgtgcctgtagtcccagcagctactcaagagactgagtggtgaggatcacttgaacccaagaggtggaggctgcagtgagccaagattgtgccaaggcacaccagcctgggcaatacagtgagatcccatataaaaaaaaaaaaaaagaaagaattgctaattgccaatgcataaccacagaacctgagggaaacatagaagaataaaagagatgtagtccctgccctcaggaaattcagagtaggacaaaagaaacagaaatacccattacaaaaccactttaatacaagttccagtgacaaaaaggacatctcaggagacagtgatcgaggagctcatggagttataaacaggaattaaagatgagatcattaaatggctgaaggatgggtgaaaaaggggaccaasgggtaggagaggaggagaggactccacaagggagatgacagggattggagggaaatgcaggggtgtaagtgctggcaaacacaagcttgatgtggagccaggcaggcagagggtgtagactccccaggatcaccaaggacggctttttattcatctctcaccactacatttgaaagacatttattcttattaccgaaatgatggaataggcatgtgctttggactcagaaaatcttgggtttgcaccctagctctactactatgtaccagctatgtgaccttagacaacttacctaccctctctgagcctaccttttcttcctcatctacagaactgggaaatgatagctatttctaaatactgtcacgaggattaaatgatgtgtgtaaaagtgcttaacagaatgcctagcacatagtagatactcaacagggttagtttcccttcccttttctgaaggcactggctacatctgcagactttgggggcagaatgcttggttaaactccactctgcctctcatgccggctgtgtgataagtgggcatgttgcattccaacagaggcattcccaagtgacaggtgagtgtggacatgttacagcttaagcctgagcacaccactgtttgcagcaggaataggaactattggcaaaatcacttggtaggattccattcacacttcttatgttaaggagaaatgtttgccagttaatctcacagtaacaatttgagaacgatgagaagaaatcttgaagcaaccactcagaacaattggggagggagagggggcattcaatagggttttatttacacttgtatggtcagatctgctgcaatctgcgcccgtggtgacacctcacagcactccctattggtttacacttttagaacttaatcacatacatttgggcttacagtgttatctcttctataacagatcatctgcttccttttcatttatcttatctcccaagccaatatccaattttcttgaaggcaaaagctgagtatatgctctttctatcccaggtcatacctagcacattcctgaacttgctgtagaaaggagaaaaagagaaaggaaggaaagaaaggagaagcttgtattcgtgtttgaaatctgaaataaatagatatttgataatgaaatggccacactgagtaatactcacacggcccattacagtctaacatttggtgtcaagtgctgtgttgtggcacagtctgggccatcttcatgtcaatctcaaataatcaagactgtatcttggaaacatgctagaaaaaccctttaaggttctgcagccattacttgttctaaattattttaaagagatacaataaatctttttgctcatattttatatgttttttaaaatagtatatgaattcattttcttgcaaaagatttgaaaaatagggaaatataaaagtaaaccatagaagttgccttcacactttcatctcactcccacccccctgacaagccctgttaactatttattgtgtttccctgaagtaatctaactcactaggttcaagttagatccatgcatttgtttcctgtgggtgctgtaacaaatcatcataaattcaatggcttaaagcaacagaaaagtattccctcacagttctagagggcagaagtccaaaatcagtatcactgggccaaaatcaaggtgttagcagggccattctccctccagaggctccaaaggagaatccattcattgccccttcggccactggcagctgccaacaatccttggtttgtggccacatcactcccctctctgcctccatggtcacattgccttcccctctcctgcatgtgtcagatcttctgcttcctacttagaaggatcgcaatgtggtgacatgtagggcccactggataattcaggatcatttctccacctggagattcttcattacacctgcaatgacactttttcagtatgtcataacatttacaggttccagagatttgaatctggtatcttcaggggctattattcagcccactccagtaatttgttttgttttttgaaaaaacagtgaagccttccttcaaaaattaatgacaataataataacaaaactgctgtcgagatcatgttcatgttactacaactgggaaaagttaatattctgatgaatctctaacatccctcaccactttcctctact

SEQ ID NO: 54325 - DNA, 676 bp, Homo sapiens
tgcatggacacaygcctaccctggaattaaagtgaccccaagatggccagagtgagtaccattgctcatttctctggtgactgtcagagaatgaaacagcagagggacagagcctaaggagatttgaattgactggaaaagatgagtctaaaagcactgggttcaccaagatcaggggtggggacaggaggcagaatggaaggcaggggcttagacccaggctcctcctggcaggtagaaaactgacagaaaccacaaggcagagagaaaagaatgaagggtagccatgttccctgtcttcacacagcctctcacagtggtgtggcctggacaccacgtttccttctcctttctcaggctgccctattcttggtactctgatatatttggatattttctggctggtgagactgagagaaattcgtcctcttctcaattttgttttgttttgtttttcaacacagtactcagaaagttcccattggatctattctggtgcctgaaacttggaaaatttgacatgccatgcttattgatttggaaatagatattgtgaaggtaagtgacagtgataagctaatattttctaccttgcacatagcaggtgctaaggaaatatttacagtcctggtgggatgggagttagttcttgtatcatcagaacattctgacatca

SEQ ID NO: 54326 - DNA, 676 bp, Homo sapiens
tgcatggacacacgcctaccctggaattaaagtgaccccaagatggccagagtgagtaccattgctcatttctctggtgactgtcagagaatgaaacagcagagggacagagcctaaggagatttgaattgactggaaaagatgagtctaaaagcactgggttcaccaagatcaggggtggggacaggaggcagaatggaaggcaggggcttagacccaggctcctcctggcaggtagaaaactgacagaaaccacaaggcagagagaaaagaatgaagggtagccatgttccctgtcttcacacagcctctcacagtggtgtggcctggacaccacgtttccttctcctttctcaggctgccctattcttrgtactctgatatatttggatattttctggctggtgagactgagagaaattcgtcctcttctcaattttgttttgttttgtttttcaacacagtactcagaaagttcccattggatctattctggtgcctgaaacttggaaaatttgacatgccatgcttattgatttggaaatagatattgtgaaggtaagtgacagtgataagctaatattttctaccttgcacatagcaggtgctaaggaaatatttacagtcctggtgggatgggagttagttcttgtatcatcagaacattctgacatca

SEQ ID NO: 54327 - DNA, 1168 bp, Homo sapiens
caggaagctgaggtgggagtattgctcgaactcaggaggcagaggttgcagtgagctgagatcacaccactgcactccagccttggtgacagagtgagaccgtcacactgtctcaaaaaaaaaaaaattgctatatagcaacactaacataaaatgaaagcaaaaaataaacaacatttaaaataatgtaaaaaaaaaacctaggaataaatctaacaaaagatgcagaaaatatgtaaccagaaaactataaacattgaaagaaattaaagaagtctcaaataaatggaaagatatattgtgttcacgtactggaagactcaacattgtgtaaagaggttagtcctctctcaaattgatacattggttcagtgcaaatagaattaaaatgtgaccatatttttgtgtggggaactgacagctgattctaaaatttctacaaaaacgtgaagggccagggatggccatgacactcttttcaaaagaaaaatattaggataacttgacactaaaccttaagacttttttaatgcagtgcacaagtaaccataagtagaaacaatggaacagaatatacagtccagaaacagaataatgcatatacagatacttgacttctctagaagataacataggataatattttcattaccttgccatgagaagatgtctaaaacaagatgtacaacrtataagtcataaaggaagagactgtatactgggccatattaagttaagaatgtttattcattaaaaggcactattaggataatctgataaagatagctagaaaaatacctatagcaattttatatttaataatgaattattaaacatttttcaacactacctattcaacttctattcactatcttgcacttctattcaactcgaagtcctagctggtacagtaaggcgagaaaaagaaataaagccctaagtattagaaagaaagctgtcattattttcaggtaacatgactgtgcacatagaaaatccaaaataatctgtggatcaactatttgaactaataagtgaatttagcaagatctctggatatgaagataatatacaaaatcaattgcatttctataaagagcaacaaacagaaaatgaaagcttaaaagataccatttacaataatttcaaaacacacaaaaagaaatgt

SEQ ID NO: 54328 - DNA, 820 bp, Homo sapiens
gcaagagctcaatatttaactacttcaacttcatggtcttaacgcagggttgcatttaaaacaatccatataagcgatcacctccctcttccttgggacccctgggagagaatttcacagctccctctggtatccctcctagctcctcagagtcctcagaatgactcactttcaaatgccaacttactctcttcctgtcagagggtgacatttctggttagcaggccagcacagcgtgagaccaaccccatgagctaacgtacacagaggcactctgtaaaacacgagcacgtgctccagccgttatcagcctcactacagctttgaccaagcggaccatgttttgccaagtttcctrttccctgttttcaagaagagagtaaagagaaaactcgtatagaaattagagccagatgaacttccttggtgctaggccaagctgaaaggcggcaatcagagcatgggcggagaggagaccagctcaaatgctctttgtcttgtgctgagaagcagcctggagcaggcagcatccaggattaaagtgttccagggtggcagagtttcgggagttgaaggcatgactcccccaaccccatgcttctggaagaatgctcaccagtactcaagttccaacaagtatccaacatgacagcagtatgctctttgcttattaacctatgaattaaaatttccttaaagtgtacgaaagatgcctttgattgttagtgttgcaaactgaaagtgttaagctagagggaatacaattactagattattttcaccaacaatatgcttccctggatttgatcctgtagatgca

SEQ ID NO: 54329 - DNA, 580 bp, Homo sapiens
cattgaaattgaaagaaaaccaaggcatatgagctatacaaaaaaatagattaaaagtatagtggaatcctggaatttcttgtctaattatttttattttaattgtgaaattggaarcaaagtcaccaattgatataaaaacaatgcaagaaagtgtgaatagttggaagaaaacaattgcaagaaataattgtcaagaccacagaatggtgagtgactagggcaataaagcagttagcaccgaagaaagatttgtcaacacacctatgggtttttttcagccccatttgataatcatattttggactcaaagtagcaatttatttaataattttttattttggaaaaattgaaatgttttattaacaagggggttttactaacaggaaggtgtaccatctcttaaccagtgcatttcagcccagtgctagctattcatgaattactcactggaggggaccatagatgtagaaacttaaagataattatagatgcctaattttatcttattaaatcagtgagattatgatagagaagaaaagatgaactgatatagaatggaaacagatacacaactttt

SEQ ID NO: 54330 - DNA, 2701 bp, Homo sapiens
tgaattatcgtcaatgaataaatagataaaatgtgatttatacatacagtgggatattattcagttatgaaaaataaggaaattctgacacatggtaagtcatgcatgaaccttaaggacattgtgcaaagtgacatgagccagtcataaaaggacaaatactgtatcattccacttatgagatacttagagtagttaaattctggaaacccacgtagaagagtggttcctaggagctggagggggagtaacagggagctgttatttaatgtgtattgaattttggtttggaagttgaaaaaagatccttatgaatgggaataatagttgcaaaacaatgtgagtgtagttaatttctctgagctgaacacttaaaatagttaagatggttaattttatgtatactttgccaaaatgtaaaaaatattttttaaataaacaaactatagctatctgcaatagcatgaattaatatcataaatataaagttgcctagaagaaagtagatgtaaaagtatacatattatataatttcacttatataaaatccagaaagtgaacacaactgaggttctggtttccagtaataatgaagtagactagttcgttgaataactatttcacagataacaataataaagcttaataaaatactatattttgctatatagaaaggcacactgtttagaagactgaatgaagattttatctatgccactgtggaagagataaggattggggtttgaatctattcaaattaactccctcttaaaataataattttcaaagaaatacaacagaatccagagtccctgtagttcctatcacacaatttaaaaattcatgagatgtgtgaagaagcatgaaagtgtaatcgattcacaagataaaaagcagacaatagaacctattctcaagatgtgcaagatgctgtaatcagtagataagatttgaaagaagctatggtaagtacgttcatgggggtaaaagaaaacagtctcatgacaaatgaacagaagcgtaactgtacatttcatgcgcgtccgtgtgaagagaccaccaaacaggctgtgtgtgagcaacatggctgtttatttcacctgggtgcacgcgggctgcgtccgaaaagagagtcagcgaagggagataagggtggagccgttttataggatttgggtaggtaaaggaaaattacagtcaaagggggtttgttctctggcgggcaggagtgggggtcgcaagatgctcagtgggggtgctttttgagccaggatgagccaggaaaaggactctcacaagataatgtcatcagttaaggcaaggaccggccatttacacttcttttgtggtggaatgtcatcagttaaggtggggcagggcatattcacttattttgtgattcttcagttacttcaggccatctgggcgtatacgtgcaagtcacgggggatgcgatggcttggcttggtctcagaggcctgacatacactcccagtcttttggtcacagggctgtgggactgaggagggaaattaaagaaaaataaaattaaaaagaaagagaaataaattttcttgtattgggctgacttgtcccagaggcttcaacaggcacagcccagaaccaggaatagtcttgataatattatctaatgtgctctggaggctctcccaacgctcccccaacatcgggaaaagaaaaacaaatttcctttttttacggaatgagtttatagattcttgttctctgtaactagtgacttcaagtattctgttttatctaagaagtacaatgtaagtcatgagaagcctgagtaggctgaactacagctgtttgggcaccatagtgagggttataggataagcccatgcccagggaaacctagaaaatggacatgtgggttgcttggcaacggtcatgtgcaatcctgtctgtcctgcctctgtatccctgctttcacgccactgtaaacttgcttcaagctagcccaccaccttttgtgaaatgtgcataaaagtcaggttctgtctttgttccgggcccagtctttttgatgtgagttagcttgtcctcagtttcatgcgcgtccgtgtgaagagaccaccaaacaggcttcgtgtaagcaataaaagcttttaatcacctgggtgcaggcaggctgagtccgaaaagagagtcagcaaacgtagatagggatggggccattttataggatttgggtaggtaaaggaaaaagggggattgttctctggcgggcaggagtgggggggtcacaaggtactcagtcggggagcttttgagccaggatgagccaggagaaggaatttcacaagacaatgtcatcagttaaggcaggaacaggccattttcacttcttttgtggtggaatgtcatcagttaaaacaagaaccggccatctggatgtgtacgtgcaggtcacagaaggtacratggcttagcttaggctcagaggcctgacactgagtgcactcaataaaaattctcctgtttcaacccggggtctctctcatcctcctgaatcccgcaacgggagaattccagcatgcaccaggttcacgggacagtgcacggtcactgaaagaagagtggggcggggagggtggtgtgcggctatgagcacctcttgtgcttgctgggagatgtagtcttataaagactcccagccctttggtcacagggc

SEQ ID NO: 54331 - DNA, 2701 bp, Homo sapiens
tgaattatcgtcaatgaataaatagataaaatgtgatttatacatacagtgggatattattcagttatgaaaaataaggaaattctgacacatggtaagtcatgcatgaaccttaaggacattgtgcaaagtgacatgagccagtcataaaaggacaaatactgtatcattccacttatgagatacttagagtagttaaattctggaaacccacgtagaagagtggttcctaggagctggagggggagtaacagggagctgttatttaatgtgtattgaattttggtttggaagttgaaaaaagatccttatgaatgggaataatagttgcaaaacaatgtgagtgtagttaatttctctgagctgaacacttaaaatagttaagatggttaattttatgtatactttgccaaaatgtaaaaaatattttttaaataaacaaactatagctatctgcaatagcatgaattaatatcataaatataaagttgcctagaagaaagtagatgtaaaagtatacatattatataatttcacttatataaaatccagaaagtgaacacaactgaggttctggtttccagtaataatgaagtagactagttcgttgaataactatttcacagataacaataataaagcttaataaaatactatattttgctatatagaaaggcacactgtttagaagactgaatgaagattttatctatgccactgtggaagagataaggattggggtttgaatctattcaaattaactccctcttaaaataataattttcaaagaaatacaacagaatccagagtccctgtagttcctatcacacaatttaaaaattcatgagatgtgtgaagaagcatgaaagtgtaatcgattcacaagataaaaagcagacaatagaacctattctcaagatgtgcaagatgctgtaatcagtagataagatttgaaagaagctatggtaagtacgttcatgggggtaaaagaaaacagtctcatgacaaatgaacagaagcgtaactgtacatttcatgcgcgtccgtgtgaagagaccaccaaacaggctgtgtgtgagcaacatggctgtttatttcacctgggtgcacgcgggctgcgtccgaaaagagagtcagcgaagggagataagggtggagccgttttataggatttgggtaggtaaaggaaaattacagtcaaagggggtttgttctctggcgggcaggagtgggggtcgcaagatgctcagtgggggtgctttttgagccaggatgagccaggaaaaggactctcacaagataatgtcatcagttaaggcaaggaccggccatttacacttcttttgtggtggaatgtcatcagttaaggtggggcagggcatattcacttattttgtgattcttcagttacttcaggccatctgggcgtatacgtgcaagtcacgggggatgcgatggcttggcttggtctcagaggcctgacatacactcccagtcttttggtcacagggctgtgggactgaggagggaaattaaagaaaaataaaattaaaaagaaagagaaataaattttcttgtattgggctgacttgtcccagaggcttcaacaggcacagcccagaaccaggaatagtcttgataatattatctaatgtgctctggaggctctcccaacgctcccccaacatcgggaaaagaaaaacaaatttcctttttttacggaatgagtttatagattcttgttctctgtaactagtgacttcaagtattctgttttatctaagaagtacaatgtaagtcatgagaagcctgagtaggctgaactacagctgtttgggcaccatagtgagggttataggataagcccatgcccagggaaacctagaaaatggacatgtgggttgcttggcaacggtcatgtgcaatcctgtctgtcctgcctctgtatccctgctttcacgccactgtaaacttgcttcaagctagcccaccaccttttgtgaaatgtgcataaaagtcaggttctgtctttgttccgggcccagtctttttgatgtgagttagcttgtcctcagtttcatgcgcgtccgtgtgaagagaccaccaaacaggcttcgtgtaagcaataaaagcttttaatcacctgggtgcaggcaggctgagtccgaaaagagagtcagcaaacgtagatagggatggggccattttataggatttgggtaggtaaaggaaaaagggggattgttctctggcgggcaggagtgggggggtcacaaggtactcagtcggggagcttttgagccaggatgagccaggagaaggaatttcacaagacaatgtcatcagttaaggcaggaacaggccattttcacttcttttgtggtggaatgtcatcagttaaaacaagaaccggccatctggatgtgtacgtgcaggtcacagaaggtacgatggcttagcttaggctcagaggcctgacactgagtgcactcaataaaaattctcctgtttcaacccggggtctctctcatcctcctgaatcccgcaacgggagaattccagcatgcaccaggttcacgggacagtgcrcggtcactgaaagaagagtggggcggggagggtggtgtgcggctatgagcacctcttgtgcttgctgggagatgtagtcttataaagactcccagccctttggtcacagggc

SEQ ID NO: 54332 - DNA, 2701 bp, Homo sapiens
tgaattatcgtcaatgaataaatagataaaatgtgatttatacatacagtgggatattattcagttatgaaaaataaggaaattctgacacatggtaagtcatgcatgaaccttaaggacattgtgcaaagtgacatgagccagtcataaaaggacaaatactgtatcattccacttatgagatacttagagtagttaaattctggaaacccacgtagaagagtggttcctaggagctggagggggagtaacagggagctgttatttaatgtgtattgaattttggtttggaagttgaaaaaagatccttatgaatgggaataatagttgcaaaacaatgtgagtgtagttaatttctctgagctgaacacttaaaatagttaagatggttaattttatgtatactttgccaaaatgtaaaaaatattttttaaataaacaaactatagctatctgcaatagcatgaattaatatcataaatataaagttgcctagaagaaagtagatgtaaaagtatacatattatataatttcacttatataaaatccagaaagtgaacacaactgaggttctggtttccagtaataatgaagtagactagttcgttgaataactatttcacagataacaataataaagcttaataaaatactatattttgctatatagaaaggcacactgtttagaagactgaatgaagattttatctatgccactgtggaagagataaggattggggtttgaatctattcaaattaactccctcttaaaataataattttcaaagaaatacaacagaatccagagtccctgtagttcctatcacacaatttaaaaattcatgagatgtgtgaagaagcatgaaagtgtaatcgattcacaagataaaaagcagacaatagaacctattctcaagatgtgcaagatgctgtaatcagtagataagatttgaaagaagctatggtaagtacgttcatgggggtaaaagaaaacagtctcatgacaaatgaacagaagcgtaactgtacatttcatgcgcgtccgtgtgaagagaccaccaaacaggctgtgtgtgagcaacatggctgtttatttcacctgggtgcacgcgggctgcgtccgaaaagagagtcagcgaagggagataagggtggagccgttttataggatttgggtaggtaaaggaaaattacagtcaaagggggtttgttctctggcgggcaggagtgggggtcgcaagatgctcagtgggggtgctttttgagccaggatgagccaggaaaaggactctcacaagataatgtcatcagttaaggcaaggaccggccatttacacttcttttgtggtggaatgtcatcagttaaggtggggcagggcatattcacttattttgtgattcttcagttacttcaggccatctgggcgtatacgtgcaagtcacgggggatgcgatggcttggcttggtctcagaggcctgacatacactcccagtcttttggtcacagggctgtgggactgaggagggaaattaaagaaaaataaaattaaaaagaaagagaaataaattttcttgtattgggctgacttgtcccagaggcttcaacaggcacagcccagaaccaggaatagtcttgataatattatctaatgtgctctggaggctctcccaacgctcccccaacatcgggaaaagaaaaacaaatttcctttttttacggaatgagtttatagattcttgttctctgtaactagtgacttcaagtattctgttttatctaagaagtacaatgtaagtcatgagaagcctgagtaggctgaactacagctgtttgggcaccatagtgagggttataggataagcccatgcccagggaaacctagaaaatggacatgtgggttgcttggcaacggtcatgtgcaatcctgtctgtcctgcctctgtatccctgctttcacgccactgtaaacttgcttcaagctagcccaccaccttttgtgaaatgtgcataaaagtcaggttctgtctttgttccgggcccagtctttttgatgtgagttagcttgtcctcagtttcatgcgcgtccgtgtgaagagaccaccaaacaggcttcgtgtaagcaataaaagcttttaatcacctgggtgcaggcaggctgagtccgaaaagagagtcagcaaacgtagatagggatggggccattttataggatttgggtaggtaaaggaaaaagggggattgttctctggcgggcaggagtgggggggtcacaaggtactcagtcggggagcttttgagccaggatgagccaggagaaggaatttcacaagacaatgtcatcagttaaggcaggaacaggccattttcacttcttttgtggtggaatgtcatcagttaaaacaagaaccggccatctggatgtgtacgtgcaggtcacagaaggtacgatggcttagcttaggctcagaggcctgacactgagtgcactcaataaaaattctcctgtttcaacccggggtctctctcatcctcctgaatcccgcaacgggagaattccagcatgcaccaggttcacgggacagtgcacggtcactgaaagaagagtggggcggggagggtggtgtgcggctrtgagcacctcttgtgcttgctgggagatgtagtcttataaagactcccagccctttggtcacagggc

SEQ ID NO: 54333 - DNA, 530 bp, Homo sapiens
ttttgtttaaaagttacccaggagattttcaacctatagaccctgctgctagccctaactgccaatgtctccatgctccactttaatctttcctgatgagtgctgtcacattgataaccccagacctgcagagagcttcctgtccccttacttgcagaactttggctagttcaagagctcttaggtgtaaatgatgcaattcagctctagacacttcctatgcgtttcaaagctcaaggcttaaatggaaccaaggctgtttggatgattctgaaaagagttcagtaaatgggataataagtgtttttgtaaactggagcctctctactggtcttactccagaggccacatccacccgttcagaaggtgtctttaggtggcacttgatataaaatagagcaccagggcggtatcatatttccaaagcatagtgttctcttatatctttttatctgaacagtgaatacaagagaaatgggaattttaaatgagttagctaaaatactactttmagtaaaaagtaaaatgca

SEQ ID NO: 54334 - DNA, 1866 bp, Homo sapiens
tattaatttgctgataagaactttcaaagaatattaccatttattccatagaccaaatcaggatgatttttcttcctaaaatcaggatgaaaataagagtgaggaaactgaaagatattagaaagcagttgtacaatgaatatccaattcatttcaccttttgaattaagataataagagtctgataccaagttagtttaacaagaaaatatggtattatccacatctattcagtttttgaattttagatattaagggagagtttgaatagtaaggggcatctaaaatattaactgaatgtttggttcctatgttaggaaaactagttagcataatgaagaataggaaaggatactggaatgcagacaataggaaacttggaaggccagagaagaagaagatccactaattttatcacatattataactcattatatcttctgtgactataaaaatgaaaaaaaaaaagtgagacaaaactgtatagaaaaggtttctcaaaattctacttttatgaactaattatgagccctaatgcatgaagcatcatatagagagactgaaacactcaaattttcacaaaggtgttatgacactaaacttgttggcttacctccctgacaactccttattcagaaatggaataacttcttaacaataaaaactgactatgtctatataatgagctgccattaagatcagattttgagaaaaatgattaaataaaccacagcaacattagtagaccaagcattccacagaaataccattatttactatattactgaactatacatgtgatctaaatctgcttaaaagaatacttaccaaatttcactaaatttactaatttaccaaaagatctgatggtattccctttaaaaacataaaggtactaaattacatatcatttgaggcagaaggaatggcaaaaaaagataccagattaggagagagactgtctagattcaagttttagctgtaaatctcactagcaaggtaactaaggacttgggagtttcaggtttattatctctaaagtggaggaaaacctgcttcccacaactcacaggtacctgtgaatgatatgcgtaaaatgcaaatctaaccatgccttaaaatccactactttgaggacaaagtaaaaatgctaaacctgcctatgaggagagatatggcccctgcccattcctctcttttgctctttcctgcacttcttcaaataccagacatcatatgccttagggccttctccaacatgctttgaaatttttgttgtgtttcctttcaatgtgtgtgcatgggaaaacaggcaaaatttattttacattttgcctatttttctttgctaaaaaactttatgtctcattatgtgcctttatgtaaacctatttcagaaaactataaactatagaaatacttctcttttaaaaatatttttctcgtcaaaaaacatgtaattatttttaatagttaaatacaaaaaaagcatgagtaaaaaataaaaatcactgccagagcacatatcttactaatgttagcatttttcattaaattccctttatatataaatatacaatttgtacatacatgtatataaatatacatgtttgtacatacatgtatatatacacgtttgtacatatgtgtatataaatatacacgtttgtacatatgtgtatatacatgtttgtacatatgtgtatataaatatacacgtttgtacatatgtgtatataaatatacacgtttgtayatatgtgtatataaatatacacgtttgtatatatgtgtataaacacacacacacacacgaatttttaatgtagttgtaatcataccaaatgtgtgactttgtaagttgca

SEQ ID NO: 54335 - DNA, 597 bp, Homo sapiens
cttggctcagcatcagcattctggccaaagaatgtttatcagtgcctgagtgaaggggttagaaaaataaaaggaatgactgccaagraaaaaaataataattaaaacctcttagtacaattataccccccattccccaaatcagaatatttttacatctttctcattatttttggtatgtattggtgcccttccttatggccctcagcttttcatatttcagattaatttaactgaattccctgaggtaaaaagcaaaattctaagaagatttcacaaataaagttgttttcctgagtcaaatgaaaacaggacatagaaagaactaaagatgagatacagtaagaagtatatagcttagactttgggcaaataaactagaaaataaaagagatattgcaagccgaagttacatggttttccttccattcagaggaggatcctggccaaatttggatttttattgaaattgtcttttagattttctatgctatcttccctagataactactgctttgtgaagtgatgtgtgagtgaggactcaaaatgtttagccttagaattatgcagttcagtgtggaagtcacatgtatattc

SEQ ID NO: 54336 - DNA, 2232 bp, Homo sapiens
ggcatgagcgcagccttgatatggctgagtccatttatgggtctactggccacagccggggaggctggggagaggtagcctgggaacattcctgccatcccagagcacatctgaaggtcttgtgataaaatagtagacccgggttagagtcccaggcttgccatgccctgagttttttttgttttgttctgtttttgaaatggagtctagctttgtcacccaggctggagggcagtggtgctatcttggctcaatgcaacctccacctcccagattcaagtgattctcctgcctcagtctccccaagtagctaggactacaggcacacaccaccacacccagctgattttttttgtatttttagtaaagatggggtttcaccatgttggccaggctggtcttgaactcccaacctccagtgatccacctgcctcagcctcccaaagtactgagatttcaggcatgagccaccatgcctggctgccctgagtacttttgaacttctctggcccttattattctcatctgtgaaatgaaggtaagaacacagaattcctcatgaaaggaaatcagcgcatgccggcacctggagtggaggaggctgttaggacagtggctggccagggaggaccagttcatctgtgcctggcatctgtttatggcttgcgtcctcacagtgatccagtgagaaagggcacaggaagtgattggtggtttccacttaaagtatttacagatgacccttggggctggccaccaagccgaggatcacagggcaaggacagggccaggcctggggcccagacgggttctgcagttgtagctcccagcccagcacatggctgccctcaccaagcctgtcctctgtctctcgctcgctattcagcccctcctaccacctgccccatcacgtcctctgcccccacccaggctctcagcaggctcgtttaccctccaaagacatcatcatattctgtaatatgattggaatctgaatatatattttaaaggacaagattgaaattaaaatttaaataaagaattacttttctgtaagttgccccgaaagcagtaatttagcagcaagttgatagagaaaggtaagcactggtcctttaaaccatcatgcagtttccggcatgcgagccagaagtgtctcaatttaacacatcattggttagtattattagaaatttcatcaggcaccggagcgcattatggcagggctctgaaggggaggctgagggtgcaggcctggggccagggggccagagagggcagcctcgttaatgagggcaggtggggcttgggagaccctcccctggccccgcgtagggatttaactgcgattatcttctcatttgtagttcagtagcaatcaggaaatgagaactgagagacccttgaatgtcatttgcgcttcccggaggccacagatttccagctttggtggctctcaacgtgtccttctgaccccctgaaacctaggctcagaacagaagtcctcagaagtggcctcgtcaaggagctggtttccatgagccacataagcaagacccaaaactctcccaatcaggtcctgatgagcagcatcaacccctcagtccccacgcacaggcccaagaatttgaacgcaaagactttcattgatccccagagtgaggtccatggagtacctgccgagcatcccctgtaggtttattaaaggggcacatttttgrgtccctcgcccaacaccaactgaagcagaacctccagggtggggtccagaaacttccattcctctaacaagtcttccagatgctgcttttgtgcactcccattggagatccccgtggtggtggtcagaagccctccctgtgtgatcttggaatctgctctcagtgataacctgccaacactagaaagcctaacagcctagctataaacctatgagctgtcatctaaaagatcccagacaccaaaatatctccttcccaagcctgagtttctaccattagaaagtaattcctttcaagtaagaactgccttcctggggcttcacctttgcagtgcaagagcccctgaggggcccacatgctcagtccccaacaccctggtctgaatatgtttgccaaaagctggatgccatcattccccacaggtggacctggcaccgtgaagacctcaagtgccctgcaaagggagggaagctgaaaggaagtgaaatatccactctttgcaggcaatggc

SEQ ID NO: 54337 - DNA, 567 bp, Homo sapiens
aatgcttaatagaaatccgcattttcttattctatatgctgcttcaggaaatggcagatgaaggtaggtaagaagttatccaggtgattttggaaaatcttgatttaatatctagaggttctaaaattctgtaatatagatgaaaatatttctctttaccacgaattgccagagttaggtttgtgaccctagaatttagtgtttcaagggactttaaacagtcatccaattccttgccatgctcataaaaatttgactgtgtttcagtcatcttagtattttcttaaaaatctctggaaatagattcatttagtgtatgaaaagaaatagacaaaggtgatcaaaggaagcagcagtgtttgaacatttgctcaatacctactgttcgctgcatgtatgaaatatatagttttttttttttaaaaaaaggaccttccaaaataattctgctgtgattaggccattgagtcataagtctagtttgagtactgcaaactgagtaatatgtgcaaaatgtgaaaggggctcaraagacagcaatattacgcataatgatttggttgtttc

SEQ ID NO: 54338 - DNA, 2507 bp, Homo sapiens
tttccagttttctttctaattcaattatttgtagcaatagtccctcttccatatcaagttacactttaatgcaacacagtcttcaaaataactaaaagccaatactgcaattaaaaaatttaataattttaaccttatttaggaataataaatctgtaatgtcaaaaatgaataagagcttaaaaatgataactagcatttgaaaatttaggctgacatctccaatgtaatgcatagatatctcatatagtatgttgcatatttttaaaatgtaatcttataattcaatgtctttttcagatactaagcaaaataattttctagtcagtggaatttgctataaagagaattatatatatcaccaaatcctacaagacaactggctctaattcgctttactgaaggaagctgaggcacagaatgaataaaaagacagcaatactagggcaatattataggcgaggccaggcatgstggctcacacctgtaatagcactttgggaggccgaggtggtcggactgcctgagctcaggcgtttgagaccggcctgggcaacatggggaaaccctgtctctactaaaaatagaaaaaattagccaggcatggtggcacacatctgtaatcccggcaactcgggagtctgaggcacaagaattggttgaagccaggaggcggaggttgcagtgagctgagattgtgccattgcgctctagccagggcgacagagtgagactttgtctccaaaatatacatatatataatagggtgacctttccatgtcaagaatatgtagaagattagataagtagagaagtttgccagcagctaagaaaagtaaatttcaaaactcttttgaaccataaaaataacttacaggccacagtcaccaatgctatttcatactatcttgaaacagtgacatttccctggtacatttaaattatgatattgcaaagttcaatttattcatagctttttaaaaaaacatctattgcagctactcgggaggctgaggtaggaggactgcttgagcctaggaggtcaaggctctagtgagttgtgaacgtaccactgcactccagcctgggtgacagagtgagaccctgtctctaaaaaaattaaaattaaaattaaaaattaaaaaaatccacacatctgttatacaaactatatacttactcatatggaaatctttttgttctattgctagctgtctttgaactgcctttgaatcttaagactctagacatacaattaatgttctctcccatataaacacatacacgtgtatgtaaaatgtatgcatatgtacatgtatcatccacacacacatgcaatactgcccaatatatcctaaagacgctaatgcttgcctttaaaaaaaaatagtgatgcccagctaggcgcggtggctcatgcctgtaatcccagcactttgagaggctgaggcgggcagatcacgaagtcaggagatcgagaccatcctggctaagatgatgaaaccccatctctactaaaaatacaaaaaaaaaaattgatgcccataaacagcttatgtttttcaatacaactaaaataattttctaagaaatagtaaaaaagtttttaaggtgaaggtaactgaatgattcaaaggaaagaaatttataacctctttcaaaaacctttcagactcttccttagacacccaagtaaccaaaatcataaatttgcaacccaatttgccaatgttacatgtatagccagagaacaaaataatgcccttacaagttccagtatgtaacaacattggcctcattaacaatatattttaactgaacaaacttgctagtcaggcattagtttcttctttaggatataatgagaaaacagcattgtgcatctcactgaccaattgaagtttacttgttctgaagaaaatgttgtcttcaagtctgagatctcaggtttctataaatattttcaattatattttaataataccaaatatttacttgcttgaatataaataaaaacatttttcttgtgtttttagttacatggataaaaccaaagttaccaagattttccacataagaaaatatttacaaaggaaaataagtgctcacattgaaaatgatctagtagcaccataaatttctttgtagactcagacataaaagatacaaagtctgaattttttattccaagggattccaaaaatttacaaaggcaaaaaaaatttatgaaactcatcccattattatggctcagtgcaccatgtcaggagttaacatgataccaatctatccatccctgatgatgttaattttcatcacttatttaaggtgttatctgccatatttctccactgtcacatgactgtttttcactttatagataataagtatctcacagagagatactttgagatgacgtaaaatatcccattcttcaaactttcattcactagttttaacatctatagatttagaattcaaagattcttgctggagttaattacagt

SEQ ID NO: 54339 - DNA, 618 bp, Homo sapiens
aagagactcttaagaatgaaattacatccattactttagattaaaagcaattaatactatacaatatggattagtcaattaaactaggagtcacctgaaccatttttgaagcagttttgaagcattttgtttacaaatgtgatcacataaccaaaaaaaaatcctttrgggaaaaaggatacacagatgctagtgagttgcattcagactaacatagtgcttttccatgtccttcactgacatcaacattataagatttctgatataaatatatgaagattatttttaatcgtaaacttgtatactttaatatagattttcaaatggctaccatatcaaaaaccatgaatccataactaacttattttaattcaaaacaatcatgagtagcatacaaataagataatcaagatttgtagctaaacacaaataaagaatctttaccctcaaggagcttcaagtgagaatacatcttggactattacctataatataatgttgtgatatacaaacgatatgaccaacatcccacaggaatacaaagaataggtggtttctccagtataaaaattttgccaagatgaagagttggggaaaagggtgtcccagagcaaggct

SEQ ID NO: 54340 - DNA, 618 bp, Homo sapiens
aagagactcttaagaatgaaattacatccattactttagattaaaagcaattaatactatacaatatggattagtcaattaaactaggagtcacctgaaccatttttgaagcagttttgaagcattttgtttacaaatgtgatcacataaccaaaaaaaaatcctttggggaaaaaggatacacagatgctagtgagttgcattcagactaacatagtgcttttccatgtccttcactgacatcaacattataagatttctgatataaatatatgaagattatttttaatcgtaaacttgtatactttaatatagattttcaaatggctaccatatcaaaaaccatgaatccataactaacttattttaattcaaaacaatcatgagtagcatacaaataagataatcaagatttgtagctaaacacaaataaagaatctttaccctcaaggagcttcaagtgagaatacatcttggactattacctataatataatgttgtgatatacaaacgatatgaccaacatcccacaggaatacaaagaataggtggtttctccagtataraaattttgccaagatgaagagttggggaaaagggtgtcccagagcaaggct

SEQ ID NO: 54341 - DNA, 635 bp, Homo sapiens
tctctgaaaagaccagaatgtggcatagcccatgtgtatttggggttccaattatgaatttacttgtcaagactatttgttccaaaattttattttacataatcatcacattgtgcttgctaaaaatgcagattccagagcatctttagaaaatcattctgaatcaggagatctggaccagggcccaaggatcacagtacctgtggttggagtgggacagggtgggagggaaaagaataaaaggaaaaayattttgaaaacacctggcttattacaaccttgtgaaggaatgaaaacacaggccatagtgaaagtctcaatgatagtgtggcaactgtgtcaatggattgcctttaggcaggaaagattatgcagtgttattacaccaatgagatgtgttaactaatctgcagggcctggtggcttttgcttttaagtcacacatgacaaagattaatgttgactttgtttcccttgtctagacttagtcctcgccagatataaatatcaactgtggcctttcatgctgccaccttcttaattaagctctaaaacaatagaaactgttagtcttcaaacctataaatatactcatttttgttatttttacgaaagtaaccttcaggagcagggcc

SEQ ID NO: 54342 - DNA, 860 bp, Homo sapiens
ggtgtggtggcacgtccctgtaaatctagctatttgggaggctgaggcagaagaatctcttgaacctgggaggcagaggttgtaggagccaagattgtgctaccgcactccagcctgggcaacagagcgagactcatattcaaaaaaaaaaaaaaaaaggccgggcgcagtggctcacgcctgtaatcccagcactttaggaggctgaggcgggtggatcacgaggtaaagagttcgagaccagccgggaaacatggtgaaatcctgtctctactaagaatacaaaaattagctgggtgtggtagcacctgcctgtaataccagctattcgggaggctgaggcaagagaatcgcttgaacccaggaggcggaggttgcagtgagcagagattgcaccactgcactccagtctgggtgacagggtgagactctgccctgaaaaaaaaaaaaaaaagaaaagttcaggtgtgcagcatacaacmcaaacagccgtttagggcaatcctgtgaggggcgggtatagtagccttggggactttgaggtcctcattcagaatctcccccaccccccaaagtgctccaatgaggctgtattggtggccaccttccaccccacggaccccactgtgcttatcacctgcgggaaatctcacatctacttctggaccttggaggggggcagcttgagcaagcggcaaggcctctttgaggtgagtgccaggggtttgggggacaggctggccctgagagaggtagttagggacaggcagggaggtagcaagatcccccagagggtggcaggggtttgggattacagggacgctgagatgttgcctgctggggcctcagtttctttctcc

SEQ ID NO: 54343 - DNA, 860 bp, Homo sapiens
ggtgtggtggcacgtccctgtaaatctagctatttgggaggctgaggcagaagaatctcttgaacctgggaggcagaggttgtaggagccaagattgtgctaccgcactccagcctgggcaacagagcgagactcatattcaaaaaaaaaaaaaaaaaggccgggcgcagtggctcacgcctgtaatcccagcactttaggaggctgaggcgggtggatcacgaggtaaagagttcgagaccagccgggaaacatggtgaaatcctgtctctactaagaatacaaaaattagctgggtgtggtagcacctgcctgtaataccagctattcgggaggctgaggcaagagaatcgcttgaacccaggaggcggaggttgcagtgagcagagattgcaccactgcactccagtctgggtgacagggtgagactctgccctgaaaaaaaaaaaaaaaagaaaagttcaggtgtgcagcatacaacacaaacagccgtttagggcartcctgtgaggggcgggtatagtagccttggggactttgaggtcctcattcagaatctcccccaccccccaaagtgctccaatgaggctgtattggtggccaccttccaccccacggaccccactgtgcttatcacctgcgggaaatctcacatctacttctggaccttggaggggggcagcttgagcaagcggcaaggcctctttgaggtgagtgccaggggtttgggggacaggctggccctgagagaggtagttagggacaggcagggaggtagcaagatcccccagagggtggcaggggtttgggattacagggacgctgagatgttgcctgctggggcctcagtttctttctcc

SEQ ID NO: 54344 - DNA, 566 bp, Homo sapiens
tcccagcacttagggaggccaaggcaagcagatcacctgaggtcaagagtttgagaccagcctggccaacatggtgaaaccccgtctctacaaaaaatacaaaaattaggcaggcgtgatggcaggcacctgtaatcctagctatttgggaggctgaggcaggaggatcgcttggacctgagaggcggaggttgcagtaagccaagatcacaccactgcmctccagcctgggtgatagagtgagactcccactcaaaaaaaaagagaaagaaagaaagaaagaaacctaaaagattctgtaactcagctgctcaggccacttgtgctggccagtgagatgtagggaaagcccttggacaggatgtccctgatggagaagaaaagggaaaaccacactaggagaaaatttttcttgccttttgtcattccctattcttcctgcctggaatggggatataagatctggagccacagcagctatcttgggaccatgaggcaacacatgggagacaaagtactacacccttaatggtggtggagatgaaaggtggaaattgcctggtccc

SEQ ID NO: 54345 - DNA, 566 bp, Homo sapiens
tcccagcacttagggaggccaaggcaagcagatcacctgaggtcaagagtttgagaccagcctggccaacatggtgaaaccccgtctctacaaaaaatacaaaaattaggcaggcgtgatggcaggcacctgtaatcctagctatttgggaggctgaggcaggaggatcgcttggacctgagaggcggaggttgcagtaagccaagatcacaccactgcactccagcctgggtgatagagtgagactcccactcaaaaaaaaagagaaagaaagaaagaaagaaacctaaaagattctgtaactcagctgctcaggccacttgtgctggccagtgagatgtagggaaagcccttggacaggatgtccctgatggagaagaaaagggaaaaccacactaggagaaaatttttyttgccttttgtcattccctattcttcctgcctggaatggggatataagatctggagccacagcagctatcttgggaccatgaggcaacacatgggagacaaagtactacacccttaatggtggtggagatgaaaggtggaaattgcctggtccc

SEQ ID NO: 54346 - DNA, 566 bp, Homo sapiens
tcccagcacttagggaggccaaggcaagcagatcacctgaggtcaagagtttgagaccagcctggccaacatggtgaaaccccgtctctacaaaaaatacaaaaattaggcaggcgtgatggcaggcacctgtaatcctagctatttgggaggctgaggcaggaggatcgcttggacctgagaggcggaggttgcagtaagccaagatcacaccactgcactccagcctgggtgatagagtgagactcccactcaaaaaaaaagagaaagaaagaaagaaagaaacctaaaagattctgtaactcagctgctcaggccacttgtgctggccagtgagatgtagggaaagcccttggacaggatgtccctgatggagaagaaaagggaaaaccacactaggagaaaatttttcttgccttttgtcattccctattcttcctgcctggaatggggatataagatctggagccacagcagctatcttgggaccatgaggcaacacatgggmgacaaagtactacacccttaatggtggtggagatgaaaggtggaaattgcctggtccc

SEQ ID NO: 54347 - DNA, 608 bp, Homo sapiens
cacagttcactgcagcttcgcactcaactttaagtgatcctcctgccacagactcgcaagtagctggaactacaagcatgggccaccatacctggaaaaatctttgctcttcacccaacagtcttagagtttgtcaaataaaagaagttctctctagaaacagactgttaaagccgggcgagatggctccagtctgtaatcccagcactttggaaggccaaggggggtggattatctgaggtcaggagctcgacaccagccttgccaacatggtgaaaccctgtctctactaaatatacaaaaattagccaggcgtggtggtgggtgcctgtaatcccagctactggggaggctgaggcaggagaatcacttgaacccgggaggcggaggttgcaatgagccaagatcagaccactgcactccagcctgggtggcagagcaagactccatctcaaaaaaagaaaaaraaaagaaatagaaacagacggttaaatccattctaataagatatgtttgaccctggcacttcaaagccctgctaatggcagccatattggcaaattgatatcctttgctgatattatgaaagcattgggaaaaggaatgca

SEQ ID NO: 54348 - DNA, 757 bp, Homo sapiens
  misc_feature (1)...(757): n = A,T,C or G
cnnnnnnnnnnnnnnnnnnnnnnnnnnnnnnnnnnnnnnnnnnnnnnnnnnnnnnnnnnnnnnnnnnnnnnnnnnnnnnnnnnnnnnnnnnnnnnnnnnnnaattgcatagtatcttctctgtgcccacacagatccttgtgctttttaaggttacatattatttgtcactctgcagtggaattgcctccttctgtgtgtatttccctactaatccgtgatctccttgaggacagttaaaaaaaaaagtcttattcttatctrcatccacagtgcttgttacgcggtggaataaaatacaaaattaaattatnccttaaaaaaagatcactatgtaatgtcctaaacaatgtgcaaagtgcattgcttataacattgcaatcaatcctcaaaccctgtgaggtagcttagatcttcatacacacatgaggaaacagaatcttggagtggttaaataaatttcccaatttcatctaaagagaactgatggagttggtgtatggcagccaggagtgtctggcctccagctctttcctcgtaaccgtctatactgtcctgtagactgcctcaacaaatggtggttggacaaatgcataaatataagaatagcaaactgggacagggtgcatccttttatgctggttatacttagggtttatggcataaccaatgcatccagatgaatgccacctttccagatgaatgtctcttgaagaggctaggtgcctgctaaaaatgtttcctatttttcataattt

SEQ ID NO: 54349 - DNA, 548 bp, Homo sapiens
atgtttcctgcttatgtttataaggttgggcattatcaatgaggtggtaagatagggaagatgtgtccacagtgcaagagggcaggactattctgtgagcatgccagtgaagccacaccaacgatactgcagttgtgtagccagatattggtatgtgaatagcaaaaaacctaactgccacacaaataacctttaggtatctggaaaagccagtttcattttcaatgtttaaaataggagctccttaacttttccagaaagctgggggtataaaaagtcattagggtataatggaaaatacrctgcactgagatcaagaccaaatatcattacttactttttgtaagatcttggttaggagccttatgatttttttaatttttatttttggacaagttctcagtctgtcgcccagcctggagtgcaatggtgtgttcatggctcacagtggcttcgacctcctggtctcaagcaatcttcccacctcagccttgtgagtagctgggaccacaggaaggtgccactatacctagctaattaaaaaaaaa

SEQ ID NO: 54350 - DNA, 548 bp, Homo sapiens
atgtttcctgcttatgtttataaggttgggcattatcaatgaggtggtaagatagggaagatgtgtccacagtgcaagagggcaggactattctgtgagcatgccagtgaagccacaccaacgatactgcagttgtgtagccagatattggtatgtgaatagcaaaaaacctaactgccacacaaataacctttaggtatctggaaaagccagtttcattttcaatgtttaaaataggagctccttaacttttccagaaagctgggggtataaaaagtcattagggtataatggaaaatacgctgcactgagatcaagaccaaatatcattacttactttttgtaagatcttggttaggagccttatgatttttttaatttttatttttggacaagttctcagtctgtcgcccagcctggagtgcaatggygtgttcatggctcacagtggcttcgacctcctggtctcaagcaatcttcccacctcagccttgtgagtagctgggaccacaggaaggtgccactatacctagctaattaaaaaaaaa

SEQ ID NO: 54351 - DNA, 548 bp, Homo sapiens
atgtttcctgcttatgtttataaggttgggcattatcaatgaggtggtaagatagggaagatgtgtccacagtgcaagagggcaggactattctgtgagcatgccagtgaagccacaccaacgatactgcagttgtgtagccagatattggtatgtgaatagcaaaaaacctaactgccacacaaataacctttaggtatctggaaaagccagtttcattttcaatgtttaaaataggagctccttaacttttccagaaagctgggggtataaaaagtcattagggtataatggaaaatacgctgcactgagatcaagaccaaatatcattacttactttttgtaagatcttggttaggagccttatgatttttttaatttttatttttggacaagttctcagtctgtcgcccagcctggagtgcaatggtgtgttcatggctcacagtggcttcracctcctggtctcaagcaatcttcccacctcagccttgtgagtagctgggaccacaggaaggtgccactatacctagctaattaaaaaaaaa

SEQ ID NO: 54352 - DNA, 1853 bp, Homo sapiens
gcatggataagaaagactgttctttcaaaagcatgctagtgtgtatttagttttggggtttgtgctggtggggttgattggttggtacaggctactgagctgtgaatgggatcggaatttaagtggttgaagcacagaatactgaaaaatatttttcctaccttataattttccatcttttctctggtgacatcaaacagccatttgtctagactgtgacttaaggtctgtcacaatctacagaggacaatcttggtcttatgtatgttgagaattggggcagaattcctcccctgagccagagagtttcttttccaccagaggcattattgtgaagctgctaagggagcttcgactgctcatttcctctaaggttaaaaaaaaagaaaaaggaaaaaacagaaaaacaagaaaccagtagaggtgagttattacctaactacagatattatctgagggtaaaatctggagctgtagggaatacttgatcttaaatttttatctcaaacttttgaagaataaaaaagaaatctgaacagtataggtacttatttctgtaaaaaaatttttttttgtgagaagattacaatcaacacattttcccttttactgaacttggatgtctgcttgaggctattgtgtggtgtttagctagtgtcttctaaattgttcatgaattttccaccaactcattctttatatgggaagttgtcatttgaaaaagaaaaacttgagttacaaatgtatcctttgccgtcctggctggagtagactgggtagtagggtgaagtgtctgcctctaattatggagagagaaatactgacacagggagggagagcaccatagagagcttcctctctaagagtttaaatcactatcatgacttacattacagagttcacatagtaggaaattaacactagcatttgaatatatgaaatcagaaaaatgtattgatatatttttattcttgctattaaggaattattattaaattgataaaagcaagggaagaaggaagaagcagtactagagatgagttggtaacaacctgggccacaaaatgatgactagatgcatctaccagaatagaagcccagaaaatatgaaaggtgtcaatagaaggaaactgaggtgattaggtgtcaacatcagagagatatcatgcaagcaatgggaaaatagttcaacacctaggtaaagaaaataatttgaaaggattggtgggaggtggtaagtagatatttaaagagatacatggttggaaccagagagacctgatggtggaaaagagagaccagaacccagccatgtcccagtctacaggaaattatcaatgtcacttaggacacggggttcaaacccaaagttagtgtcaaacagggaaactactgagttattaaaattggacacacagtaggagttattatgagatataagacaaaaaatatcagttgctgaaaactaagcatgactaacatcctgctaattaaatgatgagcctccaggctgcagacacaccattttttatatttcatcttttttttgtattttttattttattttttatttttattgagacagtctagctctgtcgcccaggctggagtasagtggcacgatttctgctcactgcaacctccacctcctggattcaagagattctcgtgcctcagcctcctgagtatctgggattacaggcacgtgccaccacacccagctaatttttgtatttttagtacagacagggtttcatcatgttggtcaggctggtctcaaactcctgaccttgtgatccacctgcctcggccatatttcatctttttatgaaccaacaggccccactgtctgc

SEQ ID NO: 54353 - DNA, 779 bp, Homo sapiens
tgtgtgtgtcctatcaggtgtacatgtgtgttgtctggcacatgtcagcatctgggcattctccgtgtgccaggagcagccgggtggcctgtgaagccttctgatgggaaatgcccagataggaagagcacagccaggagccaagcccctgagtggccactccatgtgcctggatcaccttcaagtctgctcaacatcagagcctctgttccttggcaccatggacattggaattgactcrgaactgggaagagctgtaggcccagtatccaggcacccgctgcccttttgcccagcatcccaggggcccacacccttccaaatatcaccttgccctccattcagaggtgaatcatcccagcgtcaggttgcccaactccgactggttttgctggaggctgcctggaggatgtcgccagccacctccagagaacactcagtctacagatgctgagggggaactggaagcacacagtgctggccttcacccagcttacagtgacaccttgggaccgcttctgagtctgcttttcactgaaggtcggcgtgaggaaggcagcgttccctcccagatttagaaaatgtcaagtctcccgccgcacccttttgtgtttcttacaggacctggggcacttgctgccgccacactaagggctccaacatgttccctcacacactcaacagagaaggaacctgtggctcagatggcagactccctgtccaaggccacagagtctggccccagggaccactagaggcttcaagaaccaaactcacat

SEQ ID NO: 54354 - DNA, 779 bp, Homo sapiens
tgtgtgtgtcctatcaggtgtacatgtgtgttgtctggcacatgtcagcatctgggcattctccgtgtgccaggagcagccgggtggcctgtgaagccttctgatgggaaatgcccagataggaagagcacagccaggagccaagcccctgagtggccactccatgtgcctggatcaccttcaagtctgctcaacatcagagcctctgttccttggcaccatggacattggaattgactcggaactgggaagagctgtaggcccagtatccaggcacccgctgcccttttgcccagcatcccaggggcccacacccttccaaatatcaccttgccctccattcagaggtgaatcatccsagcgtcaggttgcccaactccgactggttttgctggaggctgcctggaggatgtcgccagccacctccagagaacactcagtctacagatgctgagggggaactggaagcacacagtgctggccttcacccagcttacagtgacaccttgggaccgcttctgagtctgcttttcactgaaggtcggcgtgaggaaggcagcgttccctcccagatttagaaaatgtcaagtctcccgccgcacccttttgtgtttcttacaggacctggggcacttgctgccgccacactaagggctccaacatgttccctcacacactcaacagagaaggaacctgtggctcagatggcagactccctgtccaaggccacagagtctggccccagggaccactagaggcttcaagaaccaaactcacat

SEQ ID NO: 54355 - DNA, 1705 bp, Homo sapiens
agtaaactgtttgcctgtggtaaacacctgcatgcaaaggattgaagacagtaccggctcctgtacagagacgcgtctctcacatctgagctgcatattgagcggcaagttggttgtaagttcagtaaaagccgctgatgatgcaaaaaaaaaaaaaaaagtattaagtttcacaagttgttagtaatcaagtatattttctcagtttcagatcctctgcgattttattgagtggaaagtcttgcgctgaaagggttcaagaaaaataatattgcatttccttatgtcacaggaaacacttttaatggtaacttgtcagactatgaacaaacccactttttaagatattgataaagtcttcttttcttcacgtgatattttatacaagtacacttcagatgtattggatgtggctgattttaacaaatcctattagatttgtatcaattagttacatgttctattcatagtcttttgtgaatcattgcctttttgtttaaaaagatggcctattttgagcctttgtataagtacattcctgtttttgtgacaaaagaaaaactttaaatttgtcccaaagagaaaaataatggctatcagaagtatgctttgttttagtgcgagttaccgttactgtatttgtgtattgtaaaggtggacattctaattacattaaaatgtaattagaaaaaagtgcttaatgaacaaaaacagaacatagacaacaaaagaatattagaagtgatgcatgaagaaaacgagatatcaataaaaagatttttaaaaaccaagaaaaattgtgactctgaagaacacagtaactatattaaaaatttaatcagcagtcacaaaagtggatttaataaagcagaaaaaattagacagttgataacattgcacttataaatactgattcatgaaaacaaattttttaaacagaatagagaaaaaatgaaaattgggacttacttacagcacaccaccaagtggaccactgtatttataaaaggagtcttagaaaaacagtataggagaaaaataataaagaggatatttttaaaaagtagctgagaactccctagatgacaaggtaattaaacaagaagaaatcatgctaaacaaaaaccttcaactggaataatttcacttcagaaaaaaaagttaagcatttccaaaacaaataaaagttgagtgtgttactraccactggaacactgctaaaggaaatgtaaaagaaagtctatcacgtccaaaaatgacaatatatgctgcacagcgtcataaaagcatatgaaaatagaaagctctctattaaatgtaaatacataaacagctatagaaacctctactgtcataatgatggtgcacaaaactttcacgttattgctatggaatttaaaaaatgaagcagaaagctgcataaatatgggttcatagatactcaataagaaaagataacaagtgatattaataacaaagtgggggtataaagaggtaaagctttgcattccattgaaatatagtcattatatattgtcataactttaagatgttttatgaagtctttatttctcaagatgattacaaaaaaacctgtagatggtatgcagaagcaaatgagaaagaaactgaatcatgtcactacaaaatcaatgaagaaaaataaagcagtaagagaaaaaaatgataaataacacatctacaa

SEQ ID NO: 54356 - DNA, 1705 bp, Homo sapiens
agtaaactgtttgcctgtggtaaacacctgcatgcaaaggattgaagacagtaccggctcctgtacagagacgcgtctctcacatctgagctgcatattgagcggcaagttggttgtaagttcagtaaaagccgctgatgatgcaaaaaaaaaaaaaaaagtattaagtttcacaagttgttagtaatcaagtatattttctcagtttcagatcctctgcgattttattgagtggaaagtcttgcgctgaaagggttcaagaaaaataatattgcatttccttatgtcacaggaaacacttttaatggtaacttgtcagactatgaacaaacccactttttaagatattgataaagtcttcttttcttcacgtgatattttatacaagtacacttcagatgtattggatgtggctgattttaacaaatcctattagatttgtatcaattagttacatgttctattcatagtcttttgtgaatcattgcctttttgtttaaaaagatggcctattttgagcctttgtataagtacattcctgtttttgtgacaaaagaaaaactttaaatttgtcccaaagagaaaaataatggctatcagaagtatgctttgttttagtgcgagttaccgttactgtatttgtgtattgtaaaggtggacattctaattacattaaaatgtaattagaaaaaagtgcttaatgaacaaaaacagaacatagacaacaaaagaatattagaagtgatgcatgaagaaaacgagatatcaataaaaagatttttaaaaaccaagaaaaattgtgactctgaagaacacagtaactatattaaaaatttaatcagcagtcacaaaagtggatttaataaagcagaaaaaattagacagttgataacattgcacttataaatactgattcatgaaaacaaattttttaaacagaatagagaaaaaatgaaaattgggacttacttacagcacaccaccaagtggaccactgtatttataaaaggagtcttagaaaaacagtataggagaaaaataataaagaggatatttttaaaaagtagctgagaactccctagatgacaaggtaattaaacaagaagaaatcatgctaaacaaaaaccttcaactggaataatttcacttcagaaaaaaaagttaagcatttccaaaacaaataaaagttgagtgtgttactgaccactggaacastgctaaaggaaatgtaaaagaaagtctatcacgtccaaaaatgacaatatatgctgcacagcgtcataaaagcatatgaaaatagaaagctctctattaaatgtaaatacataaacagctatagaaacctctactgtcataatgatggtgcacaaaactttcacgttattgctatggaatttaaaaaatgaagcagaaagctgcataaatatgggttcatagatactcaataagaaaagataacaagtgatattaataacaaagtgggggtataaagaggtaaagctttgcattccattgaaatatagtcattatatattgtcataactttaagatgttttatgaagtctttatttctcaagatgattacaaaaaaacctgtagatggtatgcagaagcaaatgagaaagaaactgaatcatgtcactacaaaatcaatgaagaaaaataaagcagtaagagaaaaaaatgataaataacacatctacaa

SEQ ID NO: 54357 - DNA, 1705 bp, Homo sapiens
agtaaactgtttgcctgtggtaaacacctgcatgcaaaggattgaagacagtaccggctcctgtacagagacgcgtctctcacatctgagctgcatattgagcggcaagttggttgtaagttcagtaaaagccgctgatgatgcaaaaaaaaaaaaaaaagtattaagtttcacaagttgttagtaatcaagtatattttctcagtttcagatcctctgcgattttattgagtggaaagtcttgcgctgaaagggttcaagaaaaataatattgcatttccttatgtcacaggaaacacttttaatggtaacttgtcagactatgaacaaacccactttttaagatattgataaagtcttcttttcttcacgtgatattttatacaagtacacttcagatgtattggatgtggctgattttaacaaatcctattagatttgtatcaattagttacatgttctattcatagtcttttgtgaatcattgcctttttgtttaaaaagatggcctattttgagcctttgtataagtacattcctgtttttgtgacaaaagaaaaactttaaatttgtcccaaagagaaaaataatggctatcagaagtatgctttgttttagtgcgagttaccgttactgtatttgtgtattgtaaaggtggacattctaattacattaaaatgtaattagaaaaaagtgcttaatgaacaaaaacagaacatagacaacaaaagaatattagaagtgatgcatgaagaaaacgagatatcaataaaaagatttttaaaaaccaagaaaaattgtgactctgaagaacacagtaactatattaaaaatttaatcagcagtcacaaaagtggatttaataaagcagaaaaaattagacagttgataacattgcacttataaatactgattcatgaaaacaaattttttaaacagaatagagaaaaaatgaaaattgggacttacttacagcacaccaccaagtggaccactgtatttataaaaggagtcttagaaaaacagtataggagaaaaataataaagaggatatttttaaaaagtagctgagaactccctagatgacaaggtaattaaacaagaagaaatcatgctaaacaaaaaccttcaactggaataatttcacttcagaaaaaaaagttaagcatttccaaaacaaataaaagttgagtgtgttactgaccactggaacactgctaaaggaaatgtaaaagaaagtctatcacgtccaaaaatgacaatatatgctgcacagcgtcataaaagcatatgaaaatagaaagctctctattaaakgtaaatacataaacagctatagaaacctctactgtcataatgatggtgcacaaaactttcacgttattgctatggaatttaaaaaatgaagcagaaagctgcataaatatgggttcatagatactcaataagaaaagataacaagtgatattaataacaaagtgggggtataaagaggtaaagctttgcattccattgaaatatagtcattatatattgtcataactttaagatgttttatgaagtctttatttctcaagatgattacaaaaaaacctgtagatggtatgcagaagcaaatgagaaagaaactgaatcatgtcactacaaaatcaatgaagaaaaataaagcagtaagagaaaaaaatgataaataacacatctacaa

SEQ ID NO: 54358 - DNA, 1705 bp, Homo sapiens
agtaaactgtttgcctgtggtaaacacctgcatgcaaaggattgaagacagtaccggctcctgtacagagacgcgtctctcacatctgagctgcatattgagcggcaagttggttgtaagttcagtaaaagccgctgatgatgcaaaaaaaaaaaaaaaagtattaagtttcacaagttgttagtaatcaagtatattttctcagtttcagatcctctgcgattttattgagtggaaagtcttgcgctgaaagggttcaagaaaaataatattgcatttccttatgtcacaggaaacacttttaatggtaacttgtcagactatgaacaaacccactttttaagatattgataaagtcttcttttcttcacgtgatattttatacaagtacacttcagatgtattggatgtggctgattttaacaaatcctattagatttgtatcaattagttacatgttctattcatagtcttttgtgaatcattgcctttttgtttaaaaagatggcctattttgagcctttgtataagtacattcctgtttttgtgacaaaagaaaaactttaaatttgtcccaaagagaaaaataatggctatcagaagtatgctttgttttagtgcgagttaccgttactgtatttgtgtattgtaaaggtggacattctaattacattaaaatgtaattagaaaaaagtgcttaatgaacaaaaacagaacatagacaacaaaagaatattagaagtgatgcatgaagaaaacgagatatcaataaaaagatttttaaaaaccaagaaaaattgtgactctgaagaacacagtaactatattaaaaatttaatcagcagtcacaaaagtggatttaataaagcagaaaaaattagacagttgataacattgcacttataaatactgattcatgaaaacaaattttttaaacagaatagagaaaaaatgaaaattgggacttacttacagcacaccaccaagtggaccactgtatttataaaaggagtcttagaaaaacagtataggagaaaaataataaagaggatatttttaaaaagtagctgagaactccctagatgacaaggtaattaaacaagaagaaatcatgctaaacaaaaaccttcaactggaataatttcacttcagaaaaaaaagttaagcatttccaaaacaaataaaagttgagtgtgttactgaccactggaacactgctaaaggaaatgtaaaagaaagtctatcacgtccaaaaatgacaatatatgctgcacagcgtcataaaagcatatgaaaatagaaagctctctattaaatgtaaatacataaacagctatagaaacctctactgtcataatgatggtgcacaaaactttcacgttattgctatggaatttaaaaaatgaagcagaaagctgcataaatatgggttcatagatacwcaataagaaaagataacaagtgatattaataacaaagtgggggtataaagaggtaaagctttgcattccattgaaatatagtcattatatattgtcataactttaagatgttttatgaagtctttatttctcaagatgattacaaaaaaacctgtagatggtatgcagaagcaaatgagaaagaaactgaatcatgtcactacaaaatcaatgaagaaaaataaagcagtaagagaaaaaaatgataaataacacatctacaa

SEQ ID NO: 54359 - DNA, 1705 bp, Homo sapiens
agtaaactgtttgcctgtggtaaacacctgcatgcaaaggattgaagacagtaccggctcctgtacagagacgcgtctctcacatctgagctgcatattgagcggcaagttggttgtaagttcagtaaaagccgctgatgatgcaaaaaaaaaaaaaaaagtattaagtttcacaagttgttagtaatcaagtatattttctcagtttcagatcctctgcgattttattgagtggaaagtcttgcgctgaaagggttcaagaaaaataatattgcatttccttatgtcacaggaaacacttttaatggtaacttgtcagactatgaacaaacccactttttaagatattgataaagtcttcttttcttcacgtgatattttatacaagtacacttcagatgtattggatgtggctgattttaacaaatcctattagatttgtatcaattagttacatgttctattcatagtcttttgtgaatcattgcctttttgtttaaaaagatggcctattttgagcctttgtataagtacattcctgtttttgtgacaaaagaaaaactttaaatttgtcccaaagagaaaaataatggctatcagaagtatgctttgttttagtgcgagttaccgttactgtatttgtgtattgtaaaggtggacattctaattacattaaaatgtaattagaaaaaagtgcttaatgaacaaaaacagaacatagacaacaaaagaatattagaagtgatgcatgaagaaaacgagatatcaataaaaagatttttaaaaaccaagaaaaattgtgactctgaagaacacagtaactatattaaaaatttaatcagcagtcacaaaagtggatttaataaagcagaaaaaattagacagttgataacattgcacttataaatactgattcatgaaaacaaattttttaaacagaatagagaaaaaatgaaaattgggacttacttacagcacaccaccaagtggaccactgtatttataaaaggagtcttagaaaaacagtataggagaaaaataataaagaggatatttttaaaaagtagctgagaactccctagatgacaaggtaattaaacaagaagaaatcatgctaaacaaaaaccttcaactggaataatttcacttcagaaaaaaaagttaagcatttccaaaacaaataaaagttgagtgtgttactgaccactggaacactgctaaaggaaatgtaaaagaaagtctatcacgtccaaaaatgacaatatatgctgcacagcgtcataaaagcatatgaaaatagaaagctctctattaaatgtaaatacataaacagctatagaaacctctactgtcataatgatggtgcacaaaactttcacgttattgctatggaatttaaaaaatgaagcagaaagctgcataaatatgggttcatagatactcaataagaaaagataacaagtgatattaataacaaagtgggggtataaagaggtaaagctttgcattccattgaaatatagtcattatatattgtcataactttaagatgttttatgaagtctttatttctcaagatgattacaaaaaaacctgtagatggtatgcagaagcaaatgagaaagaaaytgaatcatgtcactacaaaatcaatgaagaaaaataaagcagtaagagaaaaaaatgataaataacacatctacaa

SEQ ID NO: 54360 - DNA, 605 bp, Homo sapiens
tcctgcctcagcctccccagcagctgggactacagtcgcccgccgccacacctggctaatttttttgtatttttagtagagacagggtttcaccgtgttagccaggatggtctcaatctcctgaccttgtgatccacctgcctcggcctcccaaagggctgggattacaggtgtgagccactgccccggtctgtttagaagtatttttaaagaattattgcacttctgttcggatagaaaaacaaaaatacatttttagaatatatatttatatgtatgaaaatataaaattttgaaaagttgaatatttcaagccaattatgtagatgtccttgtccttccctgagctgctgactcacgttccatgaagcgggatgggtctcacrggcctgtcaggatgcaggctgtgatgtgaaggccgctcgacgctcacaggattggacgggtttgtgaaggaatttgcagcgagccttagttagctccttaacatttcctttgagcaacatcagtgcttttgacgttttgcactactgtataaaactgtaagtgtatgcagagatgtatgtttctgaataaatcacaaaattgacaagcaactgccatgc

SEQ ID NO: 54361 - DNA, 605 bp, Homo sapiens
tcctgcctcagcctccccagcagctgggactacagtcgcccgccgccacacctggctaatttttttgtatttttagtagagacagggtttcaccgtgttagccaggatggtctcaatctcctgaccttgtgatccacctgcctcggcctcccaaagggctgggattacaggtgtgagccactgccccggtctgtttagaagtatttttaaagaattattgcacttctgttcggatagaaaaacaaaaatacatttttagaatatatatttatatgtatgaaaatataaaattttgaaaagttgaatatttcaagccaattatgtagatgtccttgtccttccctgagctgctgactcacgttccatgaagcgggatgggtctcacaggcctgtcaggatgcaggctgtgatgtgaaggccgctcgacgctcacaggattggacgggtttgtgaaggaatttgcagcgagscttagttagctccttaacatttcctttgagcaacatcagtgcttttgacgttttgcactactgtataaaactgtaagtgtatgcagagatgtatgtttctgaataaatcacaaaattgacaagcaactgccatgc

SEQ ID NO: 54362 - DNA, 810 bp, Homo sapiens
atctttcccattaatagggaaaatttaaattgctaacatttttaaggtcatacatttctaacctttttaagatgttacctttggggggaaaaaaagctctctatttgccattctcatcagcatagcctctctccctgggcttctccttggcatttgaattgtccaccatttccacctataggcctgcttctaaactataaccctgctcagatctcaagttacatcacaagagtctgtgttctggaagaataatgcactgaattttaatcatgataattsaggcttagtatctttaaatacaacatagcagatgcaaggttaaatggcagtttcagtctttgactggaattcgccttaagataagaaaagcaagttttagaacatgatcctatgagcctaggaagacagacttagccaaaatattcctatactctgcttactgtaaatgcatgtgattttggttctttcttgaaattggtgttctggtatttgcttaagagattctgagtcgtaaagtgaggagttattttaggagaaaatttttattttgtttagctaaacaattgacagcattactgcccttttcctaactactgaaacttggcaattagcattccagtgttttatgatttataaataatagttttgttacagttctcttcattaaatatgccaagatacatgtttttgtacttatgaatttttgtgtagggaaaatcatttattttatttaaaagtataagctatccacaatctctctgtgtttcaggaggttacaacacataggattgtcccatattattataaaac

SEQ ID NO: 54363 - DNA, 879 bp, Homo sapiens
ctgatctcaggagatccacccaccttggtctcccaaagtattgggattacaggcatgagccactgcacccagccattattaccactttctaagctgaggatattctgcttcagaaaggagggagtgacttaaaccctgtgacctgaatgggacataggccatgttgctcagtgatctgccaccacattgatcatgccagttaaggcccattgcaaaagttaaactaatgacagttgaccaagcctgttccttggggcaattcaataatcctttcctatctccttgttattattttagtctaagactaaggagcaggcatcctcaaacccctgattgtgttctgagctcatagctctttgtgtccattttaggttgattatataatgcaaaaataaccagtccattctgtccttgattcayttgagacagcctggtcatgggttcagggaatctagaataaacttctgggataaacttctgggctccaccactctctcttcttcctatctagtagaccattcccagaggacccaaaggtcaaggtgatcttcaagcatttataaaagaaataacagaaaattaacaaaaatttagttctcaagcctagatgatcatcacagtttttagaacccacagattaccaagccaacattctgattcactaggtctgcatggcggctgaacaatagttttgctggtttttttttttgttttgttttgttttgtttttttttcacaaagcatcccaggtgactctgatgttcagtttggtttggggcaactaacctgagacattaatctccattttcccatccgtttgcttcacttctttctctgtctttggcatgtaaacatttttaagtttctctaacttaaaaa

SEQ ID NO: 54364 - DNA, 791 bp, Homo sapiens
aattaaatcccctgcgtcctgggtcacatgctgagtccccagccctggtctttggggtctgtaccctgctgaccttgtgaggtgggctcgccccagggagggagggggtgcaccctctctctcctcccgcctgtcctctcagggccaccagagtgactgtgatcctccttccaggacaaagctgagacagggctccggagttgttttaggaaatagtgaagcaagccgacagcactgattcctccggagttcatgtcatcttattccctatctttggcccaaagatccttctgcatcagcgggtgcgcatggattctgtctgccgacaccagagccgcagagccagacacagattggtgagcagtgcttatgcgttgaaggcactcaggttccatcatggaaccaggtcgcccgaggatgctgaccccatggaggcaatcaggctgcagagagctcgaggaacgcctgtccctgtgagctgctcagggmcctaagctctcagagtgtcactgccgttgattctggaacagagtttgcaggccaagtccacaagctaagaatagttttttacatttttaaatggttaaaaacaaatcaaaagaagaagaatattgcatgatgtgaaaatgatatgacattcaaactaaatgcctatacatacagttttattgggatgcagtgacctcattcatttatacgttagttaggacagggacccatatggcctgcaaggcctttagggactttggctgaccctttgcagaagaagtttgctggccactgatccagag

SEQ ID NO: 54365 - DNA, 642 bp, Homo sapiens
ataataattggagtactatttatgaaaaagatactattaaattcccttttttacagataagacagttttaactattaatacattgacataattattcagaacttgtgcatataattagagtatgggtctagagttaattattgaaatttaagaagttattagtaaagcctttgaacaagagagtattttttttytttttactggtcctggcccaaatctatgttgagttataaaaacaaggcaggtaaaaataatttagaattactgattctactgttactatttccattaaatttcaataaaatcaaattgtgaaactgtcatgtataaggtctagttctagagagcttatgtttgtaagcaatatcaagtttattcaccactttaaataataaaaacatttgtcaatttgatgaaaaagccatcttaatcagagttttgaaggaaaaaaaacaaaaaatactaggaaaaaagatcaattttaatgttatacctaccatttcctacctaccatttgtattataccaaccatttcatatctaccattataaatctatattgaattttactataacatgaaaatatgaggggataatagtaaattatatatttatcactataagaaagacaatattttcttaa

SEQ ID NO: 54366 - DNA, 623 bp, Homo sapiens
cattccaaagccaccgatatactaagaaacaattcgaacatgttgaaattttgcatttactttttcatgatttttgtctgtaagaaatactaggtgaacacagaaaactgtaactggctgaaatgagccatgtgggaagattcaaaatgtacaccctcaaacttctaccatctacctcagttcaccaccacgtgtattattaaccacacccaaacacatctgatgctacaatttttcattcaatttcagataacctccttccaccatctcatggtaactcacaagctgcaacccttcccataccctttattcagggctcttttcttatawcttattaaacattttactaatcttttataatccaaacaactggctgatgagaaatctcaccttcaagaacaacaacatcaacaacagctgctactgtgtactgtgtagaaaccacatgccaggcaccatgctacgggatttacatggattatctcattcaatcctgaccatctttctaacaaagtagatactattattaacctcactttccagatgaggaagccaaggcttttaaaggactcaagtcagttgtccaacatcacatggttacttaagaggcaaagatgggtgca

SEQ ID NO: 54367 - DNA, 676 bp, Homo sapiens
tctgtcttaccccgttcaggatgctgtaacaaaatatcatagactgatgttttgtaagcaatagaaatgtatctatcatggttctgaagcctggggagttcaagatcaaggcaccagcagatttaatgcctggtgaggacctgcttcctgactcatagatggctcttcagtgtgtcgtcacatggtggaagacataaggcagctctctagggcctcttttgtaaaggcactaattccattcataaggatccacctgttgtgaggtgacctaatcacctcccaaaggccccaccccttagtaacattacattggtgattaaatttcagcatataaattttgggtggtcacaaacattcagaatgtaatagtactcttggaacacacattgtacattatatatatctatatacattatatatatatatatacacacacacattttatatatatatataatatatttccatagtaatcttgctctaaaaatatagtgtaatgaataaaattaaatatctgagttccctttcattgagatgtccaamaaccttccttaatctttgatattcttattatttttaaatttgaatactttcatccaaagtccaatagcaattaagtaacaacacttgagtctagatcttttagaatactttttttttcctaattccttgctgc

SEQ ID NO: 54368 - DNA, 580 bp, Homo sapiens
acccatgtatgctccctttttgctacaattcccactcttctgccttacaaaaaagtatgttttagtaacttcagcttacagaatactttgtttctaaatagtattaaaatagtaagtcaaggggtatttttcttcaaatggtgtgaatgtaagaaaattacataaataatgaggacaatgaatagcacaagctatgagaacacttggtggaatgtggttgcctataggagagtgtatgactgatgtgtgagtgtgagtgacgtgtgtgatactttatcttgagccaacctctcctcatgcactagtctgaatcctggttctttgcccttctttatgttttctaatcaccttggaatttttattctccctttaatctatccaatcgcatcaacttttaagaaacaattacagtctaatttcttctagggcrcttttgccacatatttgaaccaaataatagcattttgtttatggtctctacccagatcttagctcttgataataaactgtatggtatttttatctatttacttatctaaactgtaaacagctttggtctctcgacagtaagctttcaatg

SEQ ID NO: 54369 - DNA, 2011 bp, Homo sapiens
taggagaaagaccacatttcccagctttccttgtagctaggagaggccaagagaatattatggttaataggatgtgagcagaaatagtgtgtgtaattttgacattatgctcttaaaaagaatcatcatacccttctctgctcccttttctcattctctgcagactgatatgccaaactattttatattttactatcacaaagccagatgcctgagccactaacactagcaaagcatgtactaactccactccagcctggtagccaactctgttgcttcacagaaacagcactcacttgggtcactgatggctccccatcactcttaggctaacagccaaaatccgtggcctggaccacaaggtcttacctcatcaggccatgtctgcctctccaaactcatcctgccctctactccttttggtctttctgccctggtctcagctggccttctcttggttccccaaatgagttttgctctcttccatcacaaggtcattagaggatctgttccctgtctctggaatgatcttgccccrcattttcaccggactgactctagctcatcctgctgtcctctcagctgagcaactctcagcttagctcaggtttccccctctttctgattaagcaaccccccatatttacatcttaaaactctgcctttatcaaagatgtttgccactgacttcccagtgcctggcagagtctagcacaaagtggatgctcaataaatatttgttgaatgaacagatgaataaatgagtaaacccaggaggataatcttttccttcaactgaagaccaggcagaggcaggggagatggaacgcatatggttaaaagattaagagaggaaggactttgtttcctaacagtcttccggagagcatcctccaaccatgatctggctggaggaaagttagccaagtgtgatctcactagcctaagccccaaattaagttgttcttggcactgtagccaccagatcacaaataggtggactggctctgctctgcgtagcagcctttcttctttgtgctatgatgaatgggagagcactaatactttttcctctcttgtttgcaggctcatctgcttaaaagcccctggcctgagctcccctgaaagagtcatgagttcttacccaacacgattcctcttgcctggaattgcttcctcctgcccgctttcaaagtatccacacctatactctcttcaaggcctgagcttgctctatctctttcaggaagatttgatgagcttccctaacttgcagtacccttcctccattccagaacttcaggagttttgtcgggagcattcactaggccctcatgataagtgtctaacaacattatttatttttatgtaacaacactatctcttcaaataggatgtgcattcattcaggacagaagtatgaatcttttattcttagatcccaacacaagcggtgctgcctagtaagctttggtgaagcatgaagtgtttaagatgatgacgacatgaggaagcatatactccctctcacaagactattgtcaagttgctcgtctgtaatcctgcaccccagaatgagggtaaaaatagagtgcacatgggtctaaagaaaatatttcactctaagatcaaaagtcaagttgcttccagcacatgataccatgaggttcctaatttactcccagccagattaaaacagctgagatctgtctgagtgtggtggctcatgcctataatcccagcacttttggaggctgaggtgggcagatcacctgacatcaggagttcaaggccagcttggctaacatggtgaaaccccgtctctacaaaaatacaaaaattagccaggcatgatggcaggtgcctgtaatcccagctactctggaggctgaggcgggagaatagcttgaacctgggaggcggaggttgcagtgagccgagattgtgccattgcactccagccttagcgacaagagcaagactccttctcaaaacaaatacaaaacaaaca

SEQ ID NO: 54370 - DNA, 2011 bp, Homo sapiens
taggagaaagaccacatttcccagctttccttgtagctaggagaggccaagagaatattatggttaataggatgtgagcagaaatagtgtgtgtaattttgacattatgctcttaaaaagaatcatcatacccttctctgctcccttttctcattctctgcagactgatatgccaaactattttatattttactatcacaaagccagatgcctgagccactaacactagcaaagcatgtactaactccactccagcctggtagccaactctgttgcttcacagaaacagcactcacttgggtcactgatggctccccatcactcttaggctaacagccaaaatccgtggcctggaccacaaggtcttacctcatcaggccatgtctgcctctccaaactcatcctgccctctactccttttggtctttctgccctggtctcagctggccttctcttggttccccaaatgagttttgctctcttccatcacaaggtcattagaggatctgttccctgtctctggaatgatcttgccccacattttcacckgactgactctagctcatcctgctgtcctctcagctgagcaactctcagcttagctcaggtttccccctctttctgattaagcaaccccccatatttacatcttaaaactctgcctttatcaaagatgtttgccactgacttcccagtgcctggcagagtctagcacaaagtggatgctcaataaatatttgttgaatgaacagatgaataaatgagtaaacccaggaggataatcttttccttcaactgaagaccaggcagaggcaggggagatggaacgcatatggttaaaagattaagagaggaaggactttgtttcctaacagtcttccggagagcatcctccaaccatgatctggctggaggaaagttagccaagtgtgatctcactagcctaagccccaaattaagttgttcttggcactgtagccaccagatcacaaataggtggactggctctgctctgcgtagcagcctttcttctttgtgctatgatgaatgggagagcactaatactttttcctctcttgtttgcaggctcatctgcttaaaagcccctggcctgagctcccctgaaagagtcatgagttcttacccaacacgattcctcttgcctggaattgcttcctcctgcccgctttcaaagtatccacacctatactctcttcaaggcctgagcttgctctatctctttcaggaagatttgatgagcttccctaacttgcagtacccttcctccattccagaacttcaggagttttgtcgggagcattcactaggccctcatgataagtgtctaacaacattatttatttttatgtaacaacactatctcttcaaataggatgtgcattcattcaggacagaagtatgaatcttttattcttagatcccaacacaagcggtgctgcctagtaagctttggtgaagcatgaagtgtttaagatgatgacgacatgaggaagcatatactccctctcacaagactattgtcaagttgctcgtctgtaatcctgcaccccagaatgagggtaaaaatagagtgcacatgggtctaaagaaaatatttcactctaagatcaaaagtcaagttgcttccagcacatgataccatgaggttcctaatttactcccagccagattaaaacagctgagatctgtctgagtgtggtggctcatgcctataatcccagcacttttggaggctgaggtgggcagatcacctgacatcaggagttcaaggccagcttggctaacatggtgaaaccccgtctctacaaaaatacaaaaattagccaggcatgatggcaggtgcctgtaatcccagctactctggaggctgaggcgggagaatagcttgaacctgggaggcggaggttgcagtgagccgagattgtgccattgcactccagccttagcgacaagagcaagactccttctcaaaacaaatacaaaacaaaca

SEQ ID NO: 54371 - DNA, 622 bp, Homo sapiens
taggctagagtcatctctccccagcctctccctctgaagaagacgatgagagaatttgagagtgggatatgatgatatagtctacggaattctgggaaacgagttagctcatcacctaagtctcccttcagggcaatatgctccttgcttacatcccacagcagaaaaaatcaacagttcttcaatcagtgtaaaaagaagtttacattcaagaaatctaggcggaaatgctactctcaacaattccagtgctacatgtaacagtccatcttttaaaaaaaaaagttttctggttgtcttttctgtgagaagtaaagatgtggaaaaaaagtcacggaggagttataacagttaagtaattagtaaagtagcaagacaatactaaaagcccgttgtttttgttttcaattatgtcctcttctaaatccttcagctaccttaggctgctttgtgcaccctgtgtaccaacctgtgacccatctgtagggrgagcaagtttgtttaccctcttagcaaaattcagcagagttgtcatatcccactggtgacatggtgggacatgagaggaattctgggacaaaacgtcaaacaacacacttggcaaaagcagattatgataaca

SEQ ID NO: 54372 - DNA, 622 bp, Homo sapiens
taggctagagtcatctctccccagcctctccctctgaagaagacgatgagagaatttgagagtgggatatgatgatatagtctacggaattctgggaaacgagttagctcatcacctaagtctcccttcagggcaatatgctccttgcttacatcccacagcagaaaaaatcaacagttcttcaatcagtgtaaaaagaagtttacattcaagaaatctaggcggaaatgctactctcaacaattccagtgctacatgtaacagtccatcttttaaaaaaaaaagttttctggttgtcttttctgtgagaagtaaagatgtggaaaaaaagtcacggaggagttataacagttaagtaattagtaaagtagcaagacaatactaaaagcccgttgtttttgttttcaattatgtcctcttctaaatccttcagctaccttaggctgctttgtgcaccctgtgtaccaacctgtgacccatctgtagggagagcaagtttgtttaccctcttagcaaaattcagcagagttgtcatatcccactggtgacatggtgggacatgagaggaattctgggacaaaamgtcaaacaacacacttggcaaaagcagattatgataaca

SEQ ID NO: 54373 - DNA, 368 bp, Homo sapiens
tctttccttccttccttcttttttttttttcctggatctttgttgcccaggctggagtgcagtggcacggtctcagctcactgcagcctggacctcctaggtgcaagtgatcctcccacctcagtctcctgagtagctgggactacaggcacatgccactacgcctggctaatttctgcattttttgtagagatagggtctcactatgttgcccagactggtcttgaactcctgagctcaagttatctgcctgccttggcctcccaaagtgctgggactgcagaggtgagccaccacacctggccttactttttcatgttatcagtgacattctggtgtgaacacmaagaatgtaaaatctctttgcc

SEQ ID NO: 54374 - DNA, 613 bp, Homo sapiens
cattctttgttgcaataattcattrtcatttaaatacgtttaattttctttctcttttttctagggataagtagtaaaaaaaaaaaaaaaagggggggggttttcctgtaataatatcaaaatttgtatctggcttaacacatctgaccttacactcttcagaggaagtgaacacatgttctatgagtaattccctagataaatgtgcagccaaagaatcattaagatcaaattccagtgtttattcttagctgaaataaaattaaaattcaaaaattaggttaacaggcttctaccctttttgatcagttatagtctggtggagaacatgtcgaggaggaagatgaaaaagagaacctgtcagtgatagtgctgatggagtttggagaaggagaaagttagtgaagttggagttggtgagaatgtatggattggtgctctgaatgttgttttttccaagagtagttttactctttttgtcaattctgccttatgagcaggaataatagtaggtggtgtagcctggtcacagatcattattcttcccagtgtacaaagctactcagaattaatagcagtcacagatgattactgttagctcctttccctccta

SEQ ID NO: 54375 - DNA, 613 bp, Homo sapiens
cattctttgttgcaataattcattatcatttaaatacgtttaattttctttctcttttttctagggataagtagtaaaaaaaaaaaaaaaagggggggkgttttcctgtaataatatcaaaatttgtatctggcttaacacatctgaccttacactcttcagaggaagtgaacacatgttctatgagtaattccctagataaatgtgcagccaaagaatcattaagatcaaattccagtgtttattcttagctgaaataaaattaaaattcaaaaattaggttaacaggcttctaccctttttgatcagttatagtctggtggagaacatgtcgaggaggaagatgaaaaagagaacctgtcagtgatagtgctgatggagtttggagaaggagaaagttagtgaagttggagttggtgagaatgtatggattggtgctctgaatgttgttttttccaagagtagttttactctttttgtcaattctgccttatgagcaggaataatagtaggtggtgtagcctggtcacagatcattattcttcccagtgtacaaagctactcagaattaatagcagtcacagatgattactgttagctcctttccctccta

SEQ ID NO: 54376 - DNA, 613 bp, Homo sapiens
cattctttgttgcaataattcattatcatttaaatacgtttaattttctttctcttttttctagggataagtagtaaaaaaaaaaaaaaaaggggggggkttttcctgtaataatatcaaaatttgtatctggcttaacacatctgaccttacactcttcagaggaagtgaacacatgttctatgagtaattccctagataaatgtgcagccaaagaatcattaagatcaaattccagtgtttattcttagctgaaataaaattaaaattcaaaaattaggttaacaggcttctaccctttttgatcagttatagtctggtggagaacatgtcgaggaggaagatgaaaaagagaacctgtcagtgatagtgctgatggagtttggagaaggagaaagttagtgaagttggagttggtgagaatgtatggattggtgctctgaatgttgttttttccaagagtagttttactctttttgtcaattctgccttatgagcaggaataatagtaggtggtgtagcctggtcacagatcattattcttcccagtgtacaaagctactcagaattaatagcagtcacagatgattactgttagctcctttccctccta

SEQ ID NO: 54377 - DNA, 1987 bp, Homo sapiens
ggatttcggtatccatagtagatggtggaactggtcccccacggatgctgcaggacgactgtactcactttgaaatgcaagtatgcatttgagatgtaacataaagtgaaacattaaaatgttatcagcaggttaaagtgaaataaagcaattactgattattataaaaactgttgatttaatgtccaaaaacaattattaagaattttcaaatgttgaagcacctaaggaaacagattgacagctcatgtgaatgtggagagcatayattagctttataactttataactttgggaagaatatgatatcctctttaagccaacaatgtatagaaaatatgtttttaaaatataaaatgtagtataaaatatgtaaacattttatatcatatgaattataaatttaaatgtataagtaataaatatatattaacacaataaagattatgttatatcacaatttttatcattttagaattgcttgatgagtaccatttattacactaaacaacatgcatgtgttttttataaaaatgtggtttataccaaatttattgttattatttaatatcattcaggccatgaatctttgaagaaaaagtcttctttggggattcttgccacctcaaatttcatgagaaggcaaatctccaaaattatgtgcagctacatctatgataaatcattttcagctcagacagaacaaagaacagacaaggtacaaagaaaaaacgatagtggtcggcaaaaattaggcacattatgttctcactaatccaacttcaaaagacagatttataataacacttttaaaagataatttcttatagctttgagtctgcagagactaaataaaaagcttctcaggataattgctatatgctggtatttttagtagttttttggctgccaaagaattgtttaaatctgcccaagttatgacttcgaggtacaaagctccttctacaaaacatgctactaaaatatgttttcctgaattatattttactgtgtatcaatcagtgatattattaaaatatccatgtcttgtatatcagatatttgggcatgcagaaacaaatagaagttgccttaaagttgggtacggtagattaagtttggtatggtagattaacgaaaactttaacaattcttctcctttattctttgccatgatttctgagtatagcacagcaacccaagaaatagttatgaaatgaaaaattaggatataaagttgccatgcaattatcattggcaaagaaagaacaaacatggctaaggccataagtggcttaggaattacagatgtgtaattgcttcattcacgacttttagctctgtatttagaaagaaatttcagcacagtataaggtagggcctcttcaaccaaaaacagagtacacgacataaaaaagattttgaaactctcttgtctctttactttatgcaagacgttcagaaaggttgaatagcaactaaaacatgctttttaaaaagcttcagcaaaaaagaaaaaaaaaggcttaatattacactttgcagagaataacagcaacacaggccttacaagcaactaatgatttatttgctggaatgtgctgaagaagtaaatccattgatatggccagagagaagttattcttccatgacacctgatgaaaaacactaccacctttctgtggaaatgaaagctgaaatgcacatacaatttaagagattactttttttttttttagacggggtctcgctctgtcgcccaggctggagtgcagtggtgccatctcggctcactgcaagctccgcctcccgggttcaagcgattctcctgcctcagcctcccaagtagctgggattacatgcacccaccaccaggccgactaattgtgtgtgtgtgtgtgtgtgtacgtgtgtgtgtgtgtgcgcacgcatgtgtgtgtgtttagtagagacggggtttcaccacgttggccaggctggtcacaaa

SEQ ID NO: 54378 - DNA, 1781 bp, Homo sapiens
atgcataccacctaacctcagtttagcaacctcattattcatttcttgttgattccagagcacagttcctaacacagcgattcccagcattttccattcttctaagtccctaatgcccacattctttcattccttttatttagcaaattctaactgagaatcaaaaatatgctgtatactgtgctgggcagagggtattatactagagacagaacagagccagtccctgccctaacagatcttgcagtctagtgagggraactgaggtaacccctccccctttcctgctttactgataccattcaataaaggggaaagcacttgacccccttatccacctttgtcccatgccatctctccctgccttcccttcaagtttctctatcttatttccttcccatgagctcttgaattcattcccttcttccctcttccaagaccttactccttatgggccttaatattttttattttgaaataagtgatacttatcttaaacactttaaacagtctgtatcaaacacaaaactgtatttgactctctttgatgaaagaagtgctgagcatatttgctaatagtttctaactcagaattggcaaggtttatttaagtgttatcttatacttcttttccttttgaaatttggttctgtcccaaaataatcagcagaggagccaatgggttgacatccttggatctggtctaaacgttctgattaacagttcctcagcagatgtgtcagcattacttctcttgaaatgattctatgtggattgttttccaggtactttttattttgctatgaaaaaagtcccacacatctttggtttggtttttctgtttttaattttagcctcgctaacaaatgtaaagaaaaattattctcatcttctggctaattttggattggtaaggaagagtgtttgagtatctaggaatttttataaaattcagcaattacttcttttttttttttttttttttttttgagacagagtctcactctgtcgcccaggctggggtgcagtggcatgatcttggctcactgcaacctctacctcgtgggttcaagtgattctcatgcctcagcctcccgagtagctggaattacaggcgtgtgccaccatgcccagctaatttttgtatttttagtagagatggggtttcaccatgttggctaggctggtctcaaactcccgactcaagtgatgttcccgcctcggcctcccaaactgctgggattacaggcgtgagccactgtgcctggccacaattacttcttatatgctacttactgcatcagttcttgaaaaactctctcctataggtgatgtcatccatgactttattgtggtcataacctgggaaatcctgagtggatggtccctcagttccagtgtcttatttttcagaaagaggatgctagaaatttccctttaggaaaacatccggttcctcttttgaaaataacacaaaaagggcatcacacaaaacaagtttggaaaggtgatgagagcaccatggatggttctgcttcaccattgttcttcaaggcaccatttcttctccagggactcagaatatgtgatcaagaagcacaaatatatcatttctttattactgttgacacaatctgacagctattgcagagatttgtgagaaaactggtaaataaatcctagaaaacaggtaggctcttcaagtgtttgaggtaagagtctcgcatcatgatgagtctgagaactcagttcttttataagaatggctgtctttgctcttg

SEQ ID NO: 54379 - DNA, 1781 bp, Homo sapiens
atgcataccacctaacctcagtttagcaacctcattattcatttcttgttgattccagagcacagttcctaacacagcgattcccagcattttccattcttctaagtccctaatgcccacattctttcattccttttatttagcaaattctaactgagaatcaaaaatatgctgtatactgtgctgggcagagggtattatactagagacagaacagagccagtccctgccctaacagatcttgcagtctagtgagggaaactgaggtaacccctccccctttcctgctttactgataccattcaataaaggggaaagcacttgacccccttatccacctttgtcccatgccatctctccctgccttcccttcaagtttctctatcttatttccttcccatgagctcttgaattcattcccttcttccctcttccaagaccttactccttatgggccttaatattttttattttgaaataagtgatacttatcttaaacactttaaacagtctgtatcaaacacaaaactgtatttgactctctttgatgaaagaagtgctgagcatatttgctaatagtttctaactcagaattggcaaggtttatttaagtgttatcttatacttcttttccttttgaaatttggttctgtcccaaaataatcagcagaggagccaatgggttgacatccttggatctggtctaaacgttctgattaacagttcctcagcagatgtgtcagcattacttctcttgaaatgattctatgtggattgttttccaggtactttttattttgctatgaaaaaagtcccacacatctttggtttggtttttctgtttttaattttagcctcgctaacaaatgtaaagaaaaattattctcatcttctggctaattttggattggtaaggaagagtgtttgagtatctaggaatttttataaaattcagcaattacttcttttttttttttttttttttttttgagacagagtctcactctgtcgcccaggctggggtgcagtggcatgatcttggctcactgcaacctctacctcgtgggttcaagtgattctcatgcctcagcctcccgagtagctggaattacaggcgtgtgccaccatgcccagctaatttttgtatttttagtagagatggggtttcaccatgttggctaggctggtctcaaactcccgactcaagtgatgttcccgcctcggcctcccaaactgctgggattacaggcgtgagccactgtgcctggccacaattacttcttatatgctacttactgcatcagttcttgaaaaactctctcctataggtgatgtcatccatgactttattgtggtcataacctgggaaatcctgagtggatggtccctcagttccagtgtcttatttttcagaaagaggatgctagaaatttccctttaggaaaacatccggttcctcttttgaaaataacacaaaaagggcatcacacaaaacaagtttggaaaggtgatgagagcaccatggatggttctgcttcaccattgttcttcaaggcaccatttcttctccagggactcagaatatgtgatcaagaagcacaaatatatcatttctttattactgttgacacaatctgacagctattgcagagatttgtgagaaaactggtaaataaatcctagmaaacaggtaggctcttcaagtgtttgaggtaagagtctcgcatcatgatgagtctgagaactcagttcttttataagaatggctgtctttgctcttg

SEQ ID NO: 54380 - DNA, 1889 bp, Homo sapiens
tgtcttacccaaggttagtaaaaataggtccagtaactattagcccatccaggcttatataaaacaaacagaaaagaaaattgaaggaagatatttaggagagtgactgaggtgaagtgttgtcagcttagcagggaatgttgcaatgtttcccctgaatttcccatcacctccaaaccaagtgaagggcacagatagaaactgacactgaaaaaaaggagggctggtatcccacagtcctgaggaactgcagaaattgtgggtccatcttgagagagttgttgggagaaagtgatgtttgtttcctggagtttggaggaatgtttcaacataaagactggtgcctcctaccagccttgtcccctgttaaatttggaaggcaaaagagtgactgaagttattcatgaaggcagggtagagagtgagcagaggtagaccactgtttatgtgaaaagcaagtatgatcttcctttgggataagtgtacactggggaagataactagactcaaaacatgctagggcactgccagagagggtgacagggaaaggtggcagggagtgttgctgaaggagttgccagatgttggccagaaagtgcaccccacttctgagaacccacagtggagccagcctttgagcacatgtggctcccagagggtgtcaatgctcaagagtaaagcacctttggacaggcaagaatgaagatgctctcctcccctgcccaccgtgaggagtcaatggcagggagtggggaagaagctcagaaacagggaaagagtgcagcacccctctcctctccactgcagatccccatgccccagggtaggcctgagctttgaggagggaaagtaggaaacactttgaattggatgtatgattgaatgttttaagctttaagtcagactgcaccgtttaaatccacaaaagtgcccaggaagccatgaagagaaggcagtgtggttgaaggcagtgatgagagaaaaatgaatgtgtttcccatttatacaactattgaattcagcccatttaataagctggtttacagaagttgatgacagatctgtgccatagttttgctttattactgcatgtgtgtctgtgggtgtgcatgtatttatatacattatacatagttcatcccctcgtgtgggtttatctcttagccaacaaattgttttgttatctttaatttatgatcctcaataaagaatccctctaggtatcactaaggagcaggacctcagccaggtgaacccaatcaatattaaaatccctatttgggggcctcaggtgggcagagcaggcgaagagcagttccaaatgaactactagcaggtgggtgggaaaattatgtctttttggtgcctatggaaggaatggcaaaggggcctgagttcttaactgggaacaaaaagcacatactttgctgtgacgtcttgattaatagactgaaagaactttgattctgcatgaatccaagtgaacttaccccccagccagcccctgcctcatccagtctccctatctgatttccattttgcccctggagaactgtcctttctgcctgtctagagctgtggttttcagactcggctgcatattagaatcacctggggaactggtatttttaaactggtatttcaaaagtaaaccaatgccaaggtcttacccccactgagtctctggaagtgtggtatgggcatcagtattttttaagaagctcctctggtgattcttatgtataggttaggtctaaaagattgaagagaatagtagcagaggctgactgtgtccaattatacagggaagcaaagttctgcggagcatggctccaggctgcmacttctgggtctggccatatgaaatgcagaaattcattcattcatgt

SEQ ID NO: 54381 - DNA, 642 bp, Homo sapiens
cccaaagctggcaaagagaaggtggtaatgaagctcaagaaactggagtccagtgtgagcactggtcgtaaatgtaagtaccctgtttcttgagggacagtgactcctggtttagaatcctcagcctcagaccctgtaattcacggagtaatttctaggtcattaatttctagtcaatcaagtttattggtgaaattgaccagtaaggctgtcctcatggcacaacaggtttgaatgtgttgctgcagaccattcataaacaccctcttatgttcacatctggtgctacaccttatctttctgctgaatcataaccagtgagacagacaacgtgttagttcacctttagttcttagaatcatagtatgttttagcagtctctgacatgagcttctgctcctgtgagcccctttrttctaaacaagagtggaatagttatatcctagaccacctgcctttttcctttattgaggagtgctagaggatatataggtggatacatttttgtagaccatgtttgaggtaggtttcatgccaaaggtaaaaagtgaaatcaatattttgtgtttattaaatttactttaataatatgtcatactgggaaatccagtacttttcatagcaattgcctttctgagtctt

SEQ ID NO: 54382 - DNA, 813 bp, Homo sapiens
tgaagtgagacgtactataaaattagaagaccaaaagagaaggaactaacattcttagattcaaatagctcagatgttcttaaggaagcttgagaaattgtttaattattatgcttatttctcttacaagttttcagaaatgaaaatgacaacaaaattagaaaacatctctaaaatcttgaattatgttggaatagtcaaaagcttcaaccagaattttaaagagtagtcatttgttatttatggaatatctkattttgggttcccctgaatgcagagcttgaggcaagggtttgagtacaagtatgttagtttggaggtgcggtggcagaattctaaagattatccttcaaaatttcccattctaatttctggaacagtgaatatggttgagatagcatgatggggattatgttaacattatattgccaaagggactttgcagatgtgattgagttgctaatcagctgtctttgagttaatcaaaaaggagattgtctaggtaggcctaatctaagaaatgagccctttaacagcagaaagttttctccagttgattgcaaaaggggaagacagattcaaaacccaggaaggaactgacatgccatgacaggctttggaaatggagggagacaggcagaaaggagctgagaatgaccccctggctgacagtcaggaagcaggcacctcagtcccaccactgcaagaaactggattctgctaacaaactgaacaatcttggacgcagattcttccccaaagcctccagagaagtgcccagcctggtggagacttgatctcagccttgcacta

SEQ ID NO: 54383 - DNA, 1693 bp, Homo sapiens
cttagacttcattttatcctacagcctatgggggaggttaagcatttttccacattttcttcctatttatagaatacaacagttgcaaagtttgttagatttcctctgtgactcaaggtgttattcacttgctgtgatgattaatgttatgtgtcagcttgattgggagacagtatgtccagatatctggttaaacattacttctgggtgtgtctgtgagatgtttccagaagaatttgagttggtggactgaatgaagcagatggcccttcccaatgtttttgggcatcatccaatccattgggggcctgaatagaagaaaaaggcagacgaaggagaatggatttgtcctccctctgcctgcctgcttgagccaggataccaatcctttcctgccctcagtactcctggttctcaggccttccaacccagactgcaatctacaccattgactctccagctctcaggccttcaaattgcatagctggcctttgtgggtctccagcttgcacacagcatattgtgggacttctcagtcactctacattaccgcatgagccaatatcctataataaatgtcttgattagataaatagatggctacatagatagcctattggctctgtttctctggaaagctctggttaatacacttgccctttttgtatttcatagaaggtgtttgttcgcttgttgttaaaaaaaaaaaaaaaaaaagcaagctctaaccagaatcattgtttcccagcagtcaatatatgtggattccttccgaagcatgccacaatccctttggtgtaatcaaaattcctccttagatactcaggttgatgtgcataattgtatcctatttcctagtgtttacagacattcatatatttcggctttgttgggctatggctggatttcttaatagtttcaaccaacaaagcacaagaccaacctcagattccagtgtgcactgctgtaagggttcctcctcatttccccattgtttgcagtcctttgcctgtgaagtcaacgttcttccctccaccccacctgctttatgccttgttattgtccacaaggatgatttttcaaagcagatgatagaggtaaaaacacagtaaggaagaggaaaagacgctttaattgtaacaataatcagcacgtgaaaataatagaaatgatcccctagtcttggtgctattgatctagcttctctaagactgatggtatatagtggacaaaggccaagtaacgacaatttgtggaagaaacacaaatggctgatagtaatatgtgtgaaactcaatcttggtaataaccagagaaatgcaccttaaaacaagggtacattatatttgtctctgatcttagcaaatattttaaagtgaaaatagtgattgtgtgaatgcacattgttagtgagagtgcaaatcagtgaagggtttttaaaattcttacatcctctgaatcagtaattctacttccaggaatctattgtaaagaaactataataataaaatgtgatacacaacattacttataaaaaaaaccaagacascaataacaggaaaatggttaaaatgaaatttggtgcagttcctttaggtaattttttaaaaaaaaaaattttaatatttaagaatgtttgttatatcacgttaatccaaaaaaagattcataactctgttatatactccatatc

SEQ ID NO: 54384 - DNA, 1693 bp, Homo sapiens
cttagacttcattttatcctacagcctatgggggaggttaagcatttttccacattttcttcctatttatagaatacaacagttgcaaagtttgttagatttcctctgtgactcaaggtgttattcacttgctgtgatgattaatgttatgtgtcagcttgattgggagacagtatgtccagatatctggttaaacattacttctgggtgtgtctgtgagatgtttccagaagaatttgagttggtggactgaatgaagcagatggcccttcccaatgtttttgggcatcatccaatccattgggggcctgaatagaagaaaaaggcagacgaaggagaatggatttgtcctccctctgcctgcctgcttgagccaggataccaatcctttcctgccctcagtactcctggttctcaggccttccaacccagactgcaatctacaccattgactctccagctctcaggccttcaaattgcatagctggcctttgtgggtctccagcttgcacacagcatattgtgggacttctcagtcactctacattaccgcatgagccaatatcctataataaatgtcttgattagataaatagatggctacatagatagcctattggctctgtttctctggaaagctctggttaatacacttgccctttttgtatttcatagaaggtgtttgttcgcttgttgttaaaaaaaaaaaaaaaaaaagcaagctctaaccagaatcattgtttcccagcagtcaatatatgtggattccttccgaagcatgccacaatccctttggtgtaatcaaaattcctccttagatactcaggttgatgtgcataattgtatcctatttcctagtgtttacagacattcatatatttcggctttgttgggctatggctggatttcttaatagtttcaaccaacaaagcacaagaccaacctcagattccagtgtgcactgctgtaagggttcctcctcatttccccattgtttgcagtcctttgcctgtgaagtcaacgttcttccctccaccccacctgctttatgccttgttattgtccacaaggatgatttttcaaagcagatgatagaggtaaaaacacagtaaggaagaggaaaagacgctttaattgtaacaataatcagcacgtgaaaataatagaaatgatcccctagtcttggtgctattgatctagcttctctaagactgatggtatatagtggacaaaggccaagtaacgacaatttgtggaagaaacacaaatggctgatagtaatatgtgtgaaactcaatcttggtaataaccagagaaatgcaccttaaaacaagggtacattatatttgtctctgatcttagcaaatattttaaagtgaaaatagtgattgtgtgaatgcacattgttagtgagagtgcaaatcagtgaagggtttttaaaattcttacatcctctgaatcagtaattctacttccaggaatctattgtaaagaaactataataataaaatgtgatacacaacattacttataaaaaaaaccaagacaccaataacaggaaaatggttaaaatgaaatttggtgcagttcctttaggtaatttttwaaaaaaaaaaattttaatatttaagaatgtttgttatatcacgttaatccaaaaaaagattcataactctgttatatactccatatc

SEQ ID NO: 54385 - DNA, 653 bp, Homo sapiens
ttcttctgcagtttaacattactaaaaagaagctgtgtaaatagagcaggaagtggtttggttttgtttttttaatcacagtctgctatctatacttccagcttcagactctacttgtgttattaatgaagcatttgctagtaaggaggagaaaagagaatgtacttgtgttattaatgaagcatttgctagaaggaggagaaaagagattgctcatgaagcattcctcaggatgaaaaaactgacaaccgtatcgatagctcaggtgctgattaaaatctcctatattctcyagggagaaaagtctggggaattgcaaccagttccttatttccaattttataagttatgaaagcaatgaaactcattgctgtaatatacggcattttgttgaacagagtgatacaggattgattaatgtttggctacaaaaagaaaagatatagagccctctccccctccccctccctctctgtctcgctgtccctctctccatggtctccctctgatgcccagccgaggctggactgtactgccgccatctcggctcactgcaacctccctgcctgattctcctgcctcagcctgcgagtgcctgggattgcgggcgcgcgccaccacgcctgactggtttttgctggagtgcagtggcg

SEQ ID NO: 54386 - DNA, 510 bp, Homo sapiens
tataacacacagcatacacacatttttttattttgggaaacctaatggcaaatatttttctaatctaaaagaaagttaagaagcaaggaaacatgatgcctatgcaaggggctttaaccagaggtttgccaatggatgttacatgttctcttattttagatttcagcccatccttgggcaaaggacacacatcttgcttaagaggaagagacaacagccactgcttgttaaacctcatctgcttcccatgtgaaggcgaaaatccctacatggctatgtctgaggggtggggcagggtctcagactgcatgtagagaattttccaaaggctcttaaaacactctagctctcaggcttggaaacgtgtctccagcatggagtgtgacttctagataatgagatgggctatttaataaatatattggaatccatccatccaaatgagtgtccctcccccrtctgagcagtcatcagagatgccagatatttatcccaaggttgctgccattg

SEQ ID NO: 54387 - DNA, 630 bp, Homo sapiens
tctaatcgataaagttgttttatacaagagtacattaacaatgctaaaccactgtacatgtgtactgggattaaacaagcaatgggtggtggatggtgggaggtggatttcccattgttcttctgagcagaaggttacagataagcaagggaaggggatcgaatgatccatgtgataataaatgatctatggaaacagaagcaggaactcacatttagcttaacatagatacrgatggttccatgtaaaaatatttacggatatatgtatatacatgtgttagtgaacacagatatatttccttggtctctcagcacttattgttcttctcaagttcacatggaacattctacagaatacaaccatatgctggaccataaaacaaatctcagtatgtttaaaataactgaaatcacactaagtatgttctaagagcacaatgggaagaaattagaaatcactaagaaaagaaatgtggcatatttctgtatgacccagaaattttactctcagggatatatctaagagaaatgaaaacatatgtacacacaaaaatttgtacatgaatgtttatagtggcatcattcattctagtcaaaaagtagaaacaattcacatgtccataatctg

SEQ ID NO: 54388 - DNA, 630 bp, Homo sapiens
tctaatcgataaagttgttttatacaagagtacattaacaatgctaaaccactgtacatgtgtactgggattaaacaagcaatgggtggtggatggtgggaggtggatttcccattgttcttctgagcagaaggttacagataagcaagggaaggggatcgaatgatccatgtgataataaatgatctatggaaacagaagcaggaactcacatttagcttaacatagatacggatggttccatgtaaaaatatttacggatatatgtatatacatgtgttagtgaacacagatatatttccttggtctctcagcacttattgttcttctcaagttcacatggaacattctacagaatacaaccatatgctggaccataaaacaaatctcagtatgtttaaaataactgaaatcacactaagtatgttctaagagcacaatgggaagaaattagaaatcactaagaaaagaaatgtggcatatttctgtatgacccagaaattttactctcagggatatatctaagagaaatgaaaacatatgtacacacaaaaayttgtacatgaatgtttatagtggcatcattcattctagtcaaaaagtagaaacaattcacatgtccataatctg

SEQ ID NO: 54389 - DNA, 597 bp, Homo sapiens
ctatatgggttgttttccatcccaaaatattaaaagaggatgaagtcaaaataagtcaatcctaggaagggcaactctagcatatataaaaaggcaatggagaaatgttgagtttagcaaaagacaacctctctgctgggatgcagagtggtttgggatggcagaaatgggaaaagtccagtagatggagccagggaggaaggacatttatcttgtcactagaagggtgtagtgggaaggtgagaatgaatgaggttttctgacaataccaagtggacccctctagggggcacagaaggaatttgtgtttgtagattggaggtagggggtggccaggggagggccartaacaagtccagttaaaaaggcaggttgagtccatactagagagaccttagataccaggttaggcgagatagactttatccttctggtactgaggatccactgaagcccttcgagctaagggggagacactgataaaagtggtattgtcggagggttgctctggaggtgtgtgttgggtggatggggttgggggaaagactggtggcagggagaccacctgggagtcataataatactggtgatagctac

SEQ ID NO: 54390 - DNA, 559 bp, Homo sapiens
ctctcatagtaataaaacaagaaatatgaatgtgggctcaccataaactaaacgagaaactcatcaaacttattcacaattaaaagcaaaaaaatatgagtaatggaatttaaaagaatctgagcaatcaataattgtcttacaaaattttcatctgtgtttctaataaaattgatctacctttggtgaacccgttgggctgccacagggagatctaactatgcctttctgaattagatccaggcgaggaggcacgggtggcaggcttagatgtgggatctggagtgggtcaggctgtggctttcttctctgggcaaggggagaggatcctggtgatgtgactggtgagttctgcctgtcagtgcactagaacagaaaaagagaaagatgccgctgtttattagctgtgcagagtgttctctgttcttaaagaatayatttggttggaagaaggtttctggcaccatacatttgttaaaatgaattcccttagtttaccctgattaatagaagcaaatagttcatactgtccctcaagggtagtattacgaaaagaaaa

SEQ ID NO: 54391 - DNA, 715 bp, Homo sapiens
tgatattaccatcacactcaggaatgctacgttttctaggatttgacattttcagtgattgagaattactatattttgtaaattgaaatgctgctactaaaaatagaatgctataaatagaatgatgtcttttgtttccaaagttgatatactagagtgatgtgaaaataataataaaagcaagatatttcatggagtggcaagatctaataagataaggttgtaggcctaggggaaacaggtccaggaagcaattcattttacttttcatgttgtacttagtaatatctgaagtggattgcgtaagccctggggagatttgcaagacagtccattgggatgtgggcagaacatttttcttttctatttgaattaatttttatyttaatatttgtttgtatataccttatatatggtattagtatagtagctctaatataatgtataaacaaatatattaacatattgaggatgtatgcccaaataccttttaaaaaactgattggggtacatgatcagaaaagtttgaatgtcactggtctaggctaaaggaatttctgggctggaccatatgcctagttcaaaagaagactacctctaccttgtagattgagttttttttgtttttgtttttgtttttgttttttaagatctcgatctgttgcccaggctggagtgcagtggtgtgatctcagctcactgcaacctccgcctc

SEQ ID NO: 54392 - DNA, 1775 bp, Homo sapiens
catacatatgtaacaaacctgcacattgtgcacatgtacccttgaacttaaagtataataataataataaaaaagaatgtcttcagtcattacaaattaatgtttctgaaaccttagagcacaagtcacaacactgaaaaatatactgaatactggacagagttattttattttatttatttatttttttgagatggagtctcactcttttgcccagtctgcagtgcagtggtgcaatctcggctcaccacaacctccgcctcccaggttcacgtgactctcctgccttagcctcctgagtagctgggatcacagatgcctgccaccatgcccggctaatttttgtatttttagtagagacagggtttcaccatgttggccaggctggtcttgaacccctgacctcaggtgatccatctgctttggcctcccaaagtgttgtgattacaggtgtaagccactgcacccggcctgaacagagttataaaatttcatatacttttcaaaaatctacagctttgctccttttctccacttattaatggtgagatcctaaacatcttccttttttatcaattcttattgcatatcctcctttcacctaagtgaatgtacttgcttctttcccttatttttttccaaaatatttatattggcctaaccctatttaccaatcatatttttcaaaaagtttcctaaagaagctgatttttcattgtttctattattgcttatacaacaccacttaacttagttatgaaatcattgcctactatctttactcctctagagtttgaaagataattaaatagtgaatagagctatagtccctacccacatggtgcttattgtttaattgaaaatatagatgatataaataatcacacgatatcagttaactattggccgaaaataatgctgcattgcaaataatcacaaaagtatagtggcacataaaactcaaggattgttactcgttcttctgaggtggtcagagaagtagctttgctgatttcattggactcattcacgtggtaaggaggtggttgggtgtaagatgattcaaggtggctttgtttaggacaactagggtaacttgactttttgttgtttagaacaacttcagggtggctttgtttaggacaagtagggtaatgactttttcccacgtgtcatagcctgggcatagtcttttcgtaatgctagagacacaagagagatcaagggaaaagtgagcattcctctgaagcttagactaaaaaatagctctttgtatcatcattcctcataactgcaagacattcttatactaagcattctgccactaaaataacaagagtcctttcccaagtttccaataacatattcctcaattctcatgaaacatttaacagcagtgtccctgtagttcagatttctatcaatagtgttcacagagatttaggtttttctaagatgattcacaatttctccataattttcctgacttctttctgatactcattgataaaatctttaatgtccaatttttgctatcaacaatcttttcaaggtactctttttctattttattcttccaaattcttccagactctactcattgatcaatttaaaagttacttcaaaattttaggtgttcatcaagtagtaccccaatttcaggcaccaaataaaatctgtgttagttttttttttttargttttatttttctattaattgacagataataattgcagatgtttatggagtacaatgtgatgttttaatatacaca

SEQ ID NO: 54393 - DNA, 620 bp, Homo sapiens
tgaactcgaatcaatattgttccttattgagttctcatttcctaaaaaaaagaggggccatcttatcttcaagacagtgtttcccagaatccataagaaagaaatatcaaatcttcacggcagtcgatgaaacacacataagattcttcagattacccacatgaaatgctagcatagcctctccttgatatcttgttttcctttataaaacatatattaatacagtaatttcatgttttctcagaagagagacacaaaattatgtatctaataagaagctgctattaaggaataaggcagaagaagccyataatagttggaataaaacacacacagtaatgtttcataggagacctaaagtactcataacttttttgtgtgatagaaaaaacaatgttttgttggtgggaggtgggaaggaaaatagaataggcttggggagagcttgttgttttctttactgcagaactgagtaggaaatagttccaatgacttagcatgtgacaggctcttagttattattcaaattaaagtgagtttctggagcatgtcatgtctgtaagcctgacatttttagaaatgacagtgtgtctgagaaaaagcttttagcatattctcag

SEQ ID NO: 54394 - DNA, 620 bp, Homo sapiens
tgaactcgaatcaatattgttccttattgagttctcatttcctaaaaaaaagaggggccatcttatcttcaagacagtgtttcccagaatccataagaaagaaatatcaaatcttcacggcagtcgatgaaacacacataagattcttcagattacccacatgaaatgctagcatagcctctccttgatatcttgttttcctttataaaacatatattaatacagtaatttcatgttttctcagaagagagacacaaaattatgtatctaataagaagctgctattaaggaataaggcagaagaagcctataatagttggaataaaacacacacagtaatgtttcataggagacctaaagtactcataacttttttgtgtgatagaaaaaacaatkttttgttggtgggaggtgggaaggaaaatagaataggcttggggagagcttgttgttttctttactgcagaactgagtaggaaatagttccaatgacttagcatgtgacaggctcttagttattattcaaattaaagtgagtttctggagcatgtcatgtctgtaagcctgacatttttagaaatgacagtgtgtctgagaaaaagcttttagcatattctcag

SEQ ID NO: 54395 - DNA, 1363 bp, Homo sapiens
gcatcagaactttgtagctttaactcaaaagcttatcactatagaaataaaaataatttaagtttccaatagtaaggggaagaagacttcttaaaagtctcttatgaagcagaataataagtgaaaagtaagagaaatgagactggttggatttttacactttacaaagtcagaagagggaattttctgaatgccttttgccaacagcaagtccttgaaactcagctcaagatttgagcaaagctagattggcttgtctctaatttaggatagaaaagagaaaaaatgaaaaagttaaaccccagggacccaagggaaatttctaaaagcttcttatattttgatactgtgttcctggttttaatcctcttttcgaatctagttagttcatggctgccagattaatcttcctgaaatatcattttgtatamgacactttccatgctcggaaatttacaagagtggtttattttccccaggaggggataaaagttagtagcctggcattcgaaggccatttgtgctggcctctgcccacctgccagactcttcctccacagctacagccataggattctccctggtctttttctgagcatcccatgcacattctcctttcttgttttttccttacatgtggttgtcaaactctggtatgcatgagaattactttaaatgcttgttaaaaataccaacatcaccatcatcctattctaccaaataggatagactgtttacactcagctctgcttgttaagtcttagtcttcttcttagccaagcctaggttcagagttgccagaagcccagcttagataagaactttgaaaagagaaaggcatcctaggcagggggagaaaccaggcaaaactggaaatgtttggaaaccatcagtcaaaatttggattagcagattgagtctaaatgacttagcattgcctaatgtgactgcacggaggaattctaatgccttttattgaaaaggtgcctgtttcaaggctggagagaattgagtctaagtcctcacttatttgctgatactgggctggcttggacaagtgccttgtttctctgacatctacttcattcacttggaaaatggactacatgttttctttattgtagaggtaagatgttataacgtgtgcaatgcatttggcacatagtgggtacttaataaatgttggctcccttcacttctgtctgggtggctgagacaggctgaagagccagctgctgtgacacagtggcgaattcccattttcagctaacgactcctgcatttctacgtgtaagaatttcctctctgagacatgcttttcatgtccgtgtgctaggctggacataccagagaattaatcctc

SEQ ID NO: 54396 - DNA, 806 bp, Homo sapiens
cacaaaattttaaatttgaagcatagttaatgacatgagaagattaagtattttaaaaattattcattatccaattatctaaacatgaccacatataatattttagttatgtatatttacatatgtgtgtatttctaaatacactgttttaatgtacatatcatttgctactgtgtttctttacatatcaatcagtatgcagcctccattgtagcgaggattaaagatgatgcatgcaaaacacttgtgtcgtctcttccagagagtagcctctctaaacttcaggagattcctattcttgctcataatgttctacatttttttcatattactggtatataatatgcttgcttaataattttggttgcttagacactgaaaactaagattggttcagtttaagttaactcattccaactacctagcccataatttctttcttattatttaatggcatatacaatcatctacattactttgggctgyttttaatagaaaactgaatacaatggcttaatgaagtaagggtgtatatttctcacctagaaaaaaaatcagaggcaagaaatccatggccagtgctccactatgtcacaaggacctggtcttcttttctgttctaacatctttagtttgtgaattacgttcccatctgacatgacggttgctgtatttaacattcacaattgaagaggaagtagaaagacaatagccgtttgctctagctgtatgatgttttttgtttttgtttttttaaacaacaggaagaggatagcactttcagctgtttcatagattttaaatga

SEQ ID NO: 54397 - DNA, 696 bp, Homo sapiens
aaatctacagttccagacagaaactgaagattgtaggaagagaaataagacaactattctcagtcactacagaagatcataataaactcctcaactctctgttggataaattctttacaaatggaaattaaaatagtaacacttaaaatgtatagtaattttaagctttaaagtgctttgcatgttattcattcagagcactaaatctaaaacaatttaggccaggtacagtggctcacgcctgtaatcccagcactttgggaggccaaggtgggcagatcacctgaggtcaggggtttgagatgagcctggtcaacatggtgaaaccccgtctctgtgaaaaatacaaaaattagccrggcgtggtggcacgtccctgtaagcccaactactcgggaggctgaggcaggagaatcgcttgaaccccggaggcagaggttgcagtgatccaagatcacaccactgcactccagcctgggcgacagagtgagactctgtctcaaaataaataaaaaataaaaggtaaacactcagtgaagtaaaaaataatttctatgggatataggaacaacaataatcatagtaaacatatgttgtatacttacactaaacagtttacaaatactgaagtcaggttttctggcagaacaaccagctcttctgtgaaaaaataaaatctccagttccagacagaaa

SEQ ID NO: 54398 - DNA, 510 bp, Homo sapiens
ataggactatgccttagaaagcatgacccctagcatcagctctacaggtagctaaccaaatatatggcagaaatttgagtgtgaatgccttaagaattgcctttcaaattaatggaggaaaagatagagaaaaaggaggaaaggaaggagagctggggaaatgaaggcaatatcgctgccctgtcaagccaccatttcaccattattatttaggttccaggttttctgaagaccctgctaacatacaggctcctgggatacatgatattttatcagctccttgcctactaagarcataaccctgtaaaaaatcagtcctaagatattcagggtataaataaataaataaatgctaacaagaaaggagacttatgcaaatagtgcagctggtgttctgagccctggctgtacattagtatcacctggaggacttcaaattagtgacacccaggccccagcccagactgaatgagcatctctaggggtgagacccaggcttggagtttttga

SEQ ID NO: 54399 - DNA, 484 bp, Homo sapiens
cactctgcrtggaaattattgtcgtgcgtcaggtccctcgggatctgtgttacatccacgtgtacccagtgaatgtttcctgagtactttgatgtgtcaagccctgtgccaggtcctggggtaagtacaaagtccctgctcagcccagtgtgagagatagagaatgcaaaaactcatttgcataaagcatttatttgtaggaagcactcatttgcataacacactcatttgcatacctgagatggcctctgcaccagcccaggctgcagagcctggtccaggttccaggataatgagaatgatggtgagaacttgacccaaggttgtctttacttttgtctccccctgaagcagccaacaagaagtagcaaatgggacatagacaaagatgcagcagggaaaagagggttcccagagccttggcccagtgctctgtggtcctggtagctggtgtggatttcacaccaccccggatgaggagggc

SEQ ID NO: 54400 - DNA, 484 bp, Homo sapiens
cactctgcatggaaattattgtcgtgcgtcaggtccctcgggatctgtgttacatccacgygtacccagtgaatgtttcctgagtactttgatgtgtcaagccctgtgccaggtcctggggtaagtacaaagtccctgctcagcccagtgtgagagatagagaatgcaaaaactcatttgcataaagcatttatttgtaggaagcactcatttgcataacacactcatttgcatacctgagatggcctctgcaccagcccaggctgcagagcctggtccaggttccaggataatgagaatgatggtgagaacttgacccaaggttgtctttacttttgtctccccctgaagcagccaacaagaagtagcaaatgggacatagacaaagatgcagcagggaaaagagggttcccagagccttggcccagtgctctgtggtcctggtagctggtgtggatttcacaccaccccggatgaggagggc

SEQ ID NO: 54401 - DNA, 440 bp, Homo sapiens
tcgatgtcctgggagaggaggaagatgaagacgaggtggaagacgaggaggaggargcgagacagcagttcctagagcagtcactccagccggggctgcaggtggcccggtggggcggggttgcgcttccccgagagcacatcgagggcggcggcggcccgagtgacccctcagagtttggcaccaagttcagggcaccgccaaggtctgcggcggcctctgaagatgcccggcagccggcaaagcccccctactcgtacatcgcgctcatcaccatggccatcctgcaaaacccgcacaagcgcctcacgctcagcggcatctgcgccttcattagtggccgcttcccatactaccgccgcaagttccccgcctggcagaacagcatccgccacaacctctcgctgaacgactgcttcgttaagatcccccgcgagccg

SEQ ID NO: 54402 - DNA, 440 bp, Homo sapiens
tcgatgtcctgggagaggaggaagatgaagacgaggtggaagacgaggaggaggaggcgagacagcagttcctagagcagtcrctccagccggggctgcaggtggcccggtggggcggggttgcgcttccccgagagcacatcgagggcggcggcggcccgagtgacccctcagagtttggcaccaagttcagggcaccgccaaggtctgcggcggcctctgaagatgcccggcagccggcaaagcccccctactcgtacatcgcgctcatcaccatggccatcctgcaaaacccgcacaagcgcctcacgctcagcggcatctgcgccttcattagtggccgcttcccatactaccgccgcaagttccccgcctggcagaacagcatccgccacaacctctcgctgaacgactgcttcgttaagatcccccgcgagccg

SEQ ID NO: 54403 - DNA, 1956 bp, Homo sapiens
agtctatctgatggtaataagtctatcctaatttccttgagcacrgtaaggagagtaaggagtgtctagggtaaaaatggtagttactgtattcgaaagagtggttaggaaaggctgatttgataaggtaacatttgagcaagatctgaagagagtgagttagtaagccttgtagatattgggaggaaaagcctcctgagtagattgggacagcaagtgcatggacaatgagtgttatgttctaggaacaatggaataggagcacggaggccaagttagctcgcatggaatgaatccaagaagacatttctgttgctctagatcattgtcatgctggacaagtttaaagaacttcattactaatctacgttggattccattgtgggtcttatccttccacacttgctctcctatagcaattcctttttcaaaacattaatatcgttatatttctgtaaaattatttacaaagtgtaaacaacccagatcatagccacaaatagaaataaaagctacaaagtaacttatccaccccacccctatgatgtttcagagccaatgagaattgaaaggtgaggctgagctcttccattctctgaatgaagataaccaggcttcttgacttgaagaattccccaaactgactttgcctctttttacatctcagagtggtaggaaatcctaataatcatgtatcatttcctttctaaatatttttcaactctgtactttcctgtttctcctccttcctctctgatttcttcttcatcttctctttgttgtcaggtgttctaataggtagtgtccactgaggctctcattttggcaagcagctcttctcttgatttacccatttagccatttcatccactcccgtgacagatgatttccaaacttacatctttacctgtgtcctctcacagggattctgatctcatatttcctattacatagaggatatcttttttggttgttttgttgccagattcaaatatgacattgaaggcccccttttagctctaaaatgcaaaaagaaaattcctattaccaataaattttgaccacttttccaagcagccatgccatcaatggaaccactgttccaggagctgagacaatatcttggattgacttttacttatacttccccaccctcatttgaatcaagtccattaaaatgattctaacactttcatgccttcactggctgagtcctataaatgaaataatatatacataccagttaacagagtaactgacacatagtaagtactcgagaaaaaaaaatagttgcttgctctcaacaccaaaatgattttaattcctaactgaatagctctgcttatgctgttcaccacatccggaatccctcattcatttttttcttccacccactgaaaactagtccattcatcaagaatcaactttaattctacttcctcctctacttcctctacttcatactcttttctgcattctttgaaaaagaacatggtttttagtactataggttttgttatctagtagcacagaaaagagctactgtatagtaagcaattagaaaataagccatgaagcactttaagaacagactcagttctaaatcctctcttttatttccaaaatattgatggtttctgtgagacctcagttcttgtctccttagtttaaaagaatttaaataagagcacctggcaaagaaggtgcagcatacagtgatttattgcaaaagaaaaagaatattttgaaaggtaggtacagaatagacaggacaccctgagagagagaggattcagggtgggctgccataaggatgagccagcaaagactggcactagggagactcctttatggggttttacataataattcataagaaggtgggaagaggcgttactagtagtatgttctgggtggtctctgggtgcacatgcacagtagctgcacatgcttgtt

SEQ ID NO: 54404 - DNA, 1956 bp, Homo sapiens
agtctatctgatggtaataagtctatcctaatttccttgagcacagtaaggagagtaaggagtgtctagggtaaaaatggtagttactgtattcgaaagagtggttaggaaaggctgatttgataaggtaacatttgagcaagatctgaagagagtgagttagtaagccttgtagatattgggaggaaaagcctcctgagtagattgggacagcaagtgcatggacaatgagtgttatgttctaggaacaatggaataggagcayggaggccaagttagctcgcatggaatgaatccaagaagacatttctgttgctctagatcattgtcatgctggacaagtttaaagaacttcattactaatctacgttggattccattgtgggtcttatccttccacacttgctctcctatagcaattcctttttcaaaacattaatatcgttatatttctgtaaaattatttacaaagtgtaaacaacccagatcatagccacaaatagaaataaaagctacaaagtaacttatccaccccacccctatgatgtttcagagccaatgagaattgaaaggtgaggctgagctcttccattctctgaatgaagataaccaggcttcttgacttgaagaattccccaaactgactttgcctctttttacatctcagagtggtaggaaatcctaataatcatgtatcatttcctttctaaatatttttcaactctgtactttcctgtttctcctccttcctctctgatttcttcttcatcttctctttgttgtcaggtgttctaataggtagtgtccactgaggctctcattttggcaagcagctcttctcttgatttacccatttagccatttcatccactcccgtgacagatgatttccaaacttacatctttacctgtgtcctctcacagggattctgatctcatatttcctattacatagaggatatcttttttggttgttttgttgccagattcaaatatgacattgaaggcccccttttagctctaaaatgcaaaaagaaaattcctattaccaataaattttgaccacttttccaagcagccatgccatcaatggaaccactgttccaggagctgagacaatatcttggattgacttttacttatacttccccaccctcatttgaatcaagtccattaaaatgattctaacactttcatgccttcactggctgagtcctataaatgaaataatatatacataccagttaacagagtaactgacacatagtaagtactcgagaaaaaaaaatagttgcttgctctcaacaccaaaatgattttaattcctaactgaatagctctgcttatgctgttcaccacatccggaatccctcattcatttttttcttccacccactgaaaactagtccattcatcaagaatcaactttaattctacttcctcctctacttcctctacttcatactcttttctgcattctttgaaaaagaacatggtttttagtactataggttttgttatctagtagcacagaaaagagctactgtatagtaagcaattagaaaataagccatgaagcactttaagaacagactcagttctaaatcctctcttttatttccaaaatattgatggtttctgtgagacctcagttcttgtctccttagtttaaaagaatttaaataagagcacctggcaaagaaggtgcagcatacagtgatttattgcaaaagaaaaagaatattttgaaaggtaggtacagaatagacaggacaccctgagagagagaggattcagggtgggctgccataaggatgagccagcaaagactggcactagggagactcctttatggggttttacataataattcataagaaggtgggaagaggcgttactagtagtatgttctgggtggtctctgggtgcacatgcacagtagctgcacatgcttgtt

SEQ ID NO: 54405 - DNA, 1956 bp, Homo sapiens
agtctatctgatggtaataagtctatcctaatttccttgagcacagtaaggagagtaaggagtgtctagggtaaaaatggtagttactgtattcgaaagagtggttaggaaaggctgatttgataaggtaacatttgagcaagatctgaagagagtgagttagtaagccttgtagatattgggaggaaaagcctcctgagtagattgggacagcaagtgcatggacaatgagtgttatgttctaggaacaatggaataggagcacggaggccaagttagctcgcatggaatgaatccaagaagacatttctgttgctctagatcattgtcatgctggacaagtttaaagaacttcattactaatcyacgttggattccattgtgggtcttatccttccacacttgctctcctatagcaattcctttttcaaaacattaatatcgttatatttctgtaaaattatttacaaagtgtaaacaacccagatcatagccacaaatagaaataaaagctacaaagtaacttatccaccccacccctatgatgtttcagagccaatgagaattgaaaggtgaggctgagctcttccattctctgaatgaagataaccaggcttcttgacttgaagaattccccaaactgactttgcctctttttacatctcagagtggtaggaaatcctaataatcatgtatcatttcctttctaaatatttttcaactctgtactttcctgtttctcctccttcctctctgatttcttcttcatcttctctttgttgtcaggtgttctaataggtagtgtccactgaggctctcattttggcaagcagctcttctcttgatttacccatttagccatttcatccactcccgtgacagatgatttccaaacttacatctttacctgtgtcctctcacagggattctgatctcatatttcctattacatagaggatatcttttttggttgttttgttgccagattcaaatatgacattgaaggcccccttttagctctaaaatgcaaaaagaaaattcctattaccaataaattttgaccacttttccaagcagccatgccatcaatggaaccactgttccaggagctgagacaatatcttggattgacttttacttatacttccccaccctcatttgaatcaagtccattaaaatgattctaacactttcatgccttcactggctgagtcctataaatgaaataatatatacataccagttaacagagtaactgacacatagtaagtactcgagaaaaaaaaatagttgcttgctctcaacaccaaaatgattttaattcctaactgaatagctctgcttatgctgttcaccacatccggaatccctcattcatttttttcttccacccactgaaaactagtccattcatcaagaatcaactttaattctacttcctcctctacttcctctacttcatactcttttctgcattctttgaaaaagaacatggtttttagtactataggttttgttatctagtagcacagaaaagagctactgtatagtaagcaattagaaaataagccatgaagcactttaagaacagactcagttctaaatcctctcttttatttccaaaatattgatggtttctgtgagacctcagttcttgtctccttagtttaaaagaatttaaataagagcacctggcaaagaaggtgcagcatacagtgatttattgcaaaagaaaaagaatattttgaaaggtaggtacagaatagacaggacaccctgagagagagaggattcagggtgggctgccataaggatgagccagcaaagactggcactagggagactcctttatggggttttacataataattcataagaaggtgggaagaggcgttactagtagtatgttctgggtggtctctgggtgcacatgcacagtagctgcacatgcttgtt

SEQ ID NO: 54406 - DNA, 1956 bp, Homo sapiens
agtctatctgatggtaataagtctatcctaatttccttgagcacagtaaggagagtaaggagtgtctagggtaaaaatggtagttactgtattcgaaagagtggttaggaaaggctgatttgataaggtaacatttgagcaagatctgaagagagtgagttagtaagccttgtagatattgggaggaaaagcctcctgagtagattgggacagcaagtgcatggacaatgagtgttatgttctaggaacaatggaataggagcacggaggccaagttagctcgcatggaatgaatccaagaagacatttctgttgctctagatcattgtcatgctggacaagtttaaagaacttcattactaatctacgttggattccattgtgggtcttatccttccacacttgctctcctatagcaattcctttttcaaaacattaatatcgttatatttctgtaaaattatttacaaagtgtaaacaacccagatcatagccacaaatagaaataaaagctacaragtaacttatccaccccacccctatgatgtttcagagccaatgagaattgaaaggtgaggctgagctcttccattctctgaatgaagataaccaggcttcttgacttgaagaattccccaaactgactttgcctctttttacatctcagagtggtaggaaatcctaataatcatgtatcatttcctttctaaatatttttcaactctgtactttcctgtttctcctccttcctctctgatttcttcttcatcttctctttgttgtcaggtgttctaataggtagtgtccactgaggctctcattttggcaagcagctcttctcttgatttacccatttagccatttcatccactcccgtgacagatgatttccaaacttacatctttacctgtgtcctctcacagggattctgatctcatatttcctattacatagaggatatcttttttggttgttttgttgccagattcaaatatgacattgaaggcccccttttagctctaaaatgcaaaaagaaaattcctattaccaataaattttgaccacttttccaagcagccatgccatcaatggaaccactgttccaggagctgagacaatatcttggattgacttttacttatacttccccaccctcatttgaatcaagtccattaaaatgattctaacactttcatgccttcactggctgagtcctataaatgaaataatatatacataccagttaacagagtaactgacacatagtaagtactcgagaaaaaaaaatagttgcttgctctcaacaccaaaatgattttaattcctaactgaatagctctgcttatgctgttcaccacatccggaatccctcattcatttttttcttccacccactgaaaactagtccattcatcaagaatcaactttaattctacttcctcctctacttcctctacttcatactcttttctgcattctttgaaaaagaacatggtttttagtactataggttttgttatctagtagcacagaaaagagctactgtatagtaagcaattagaaaataagccatgaagcactttaagaacagactcagttctaaatcctctcttttatttccaaaatattgatggtttctgtgagacctcagttcttgtctccttagtttaaaagaatttaaataagagcacctggcaaagaaggtgcagcatacagtgatttattgcaaaagaaaaagaatattttgaaaggtaggtacagaatagacaggacaccctgagagagagaggattcagggtgggctgccataaggatgagccagcaaagactggcactagggagactcctttatggggttttacataataattcataagaaggtgggaagaggcgttactagtagtatgttctgggtggtctctgggtgcacatgcacagtagctgcacatgcttgtt

SEQ ID NO: 54407 - DNA, 631 bp, Homo sapiens
gacctaagtgtacaagaccatcagcgcagcacactgcggacttctggcttgagaggggctgccctttcctgggtcccagactcacctgtgccatgggagcgggcgtgctctgcagaacggtctgaggcaggagctgctgtgtgaggtcgcaggacgatggggaaggcagaggggcctgtgggagagaaaggggctttgttaccactgcttctgccattycaggggacagggatgtggtctcttggtccggtgggttctctgcgttccgcactggggtgaacagctccaagtcaagagttctagaaagtataggtgtctgttccctggctgcactgcttcctacgcagggcacaagggcagagcccctgcacaactggtgcaggcttccaccccaccacagtgtgctctgccaggctgctgctacctgcccaagcctggtagctcagctctacttcccttcccttgcctgctgtcctggactccgccctgggtggatttggttgctctcctcccaaatggattaattcttagcggtgtcatcaagcaggacgacgtgcgtggactgctaccatgagctgctgtgcgtccgtatcttttctgctcagcgctaatgcagatggacagacacgcc

SEQ ID NO: 54408 - DNA, 631 bp, Homo sapiens
gacctaagtgtacaagaccatcagcgcagcacactgcggacttctggcttgagaggggctgccctttcctgggtcccagactcacctgtgccatgggagcgggcgtgctctgcagaacggtctgaggcaggagctgctgtgtgaggtcgcaggacgatggggaaggcagaggggcctgtgggagagaaaggggctttgttaccactgcttctgccattccaggggacagggatgtggtctcttggtccggtgggttctctgygttccgcactggggtgaacagctccaagtcaagagttctagaaagtataggtgtctgttccctggctgcactgcttcctacgcagggcacaagggcagagcccctgcacaactggtgcaggcttccaccccaccacagtgtgctctgccaggctgctgctacctgcccaagcctggtagctcagctctacttcccttcccttgcctgctgtcctggactccgccctgggtggatttggttgctctcctcccaaatggattaattcttagcggtgtcatcaagcaggacgacgtgcgtggactgctaccatgagctgctgtgcgtccgtatcttttctgctcagcgctaatgcagatggacagacacgcc

SEQ ID NO: 54409 - DNA, 610 bp, Homo sapiens
attggagttactgctctcttaatacaaatgctttgaattgtgtctctgcttgtcacccctggcctcttttacaccctggggcaatgtgccattgttagacaaggaggakatgtataccttccttttggaaaaaggatgactgtaaaagcagaaataagaaaagagaagctgtgcccacaacactaacatgcttttaggcaagtcaattttaggaaagagtttatatgaaactgaagatctgggaattgatcccttaagaacaaagtctgagtaccctttgaagtccactggtatacccgtgcctttttgcctactcctttttattcttacaacctactccaattgcacctctgtctccacaactcaattgaacatactttacaaaggccatcaatgacatgcacattgctaaacatacacaaaaaatcatgagcaagtagttacaagctttaggacagatataaaaagaaattctaacgcagaaattttatccaaagtttcatccattttataatcaatattagtaaaaaagaccaagacacatgggctgggtgcggtggctcatgcctgtaattacagcactttgggaggccgaggtgggtggatcacc

SEQ ID NO: 54410 - DNA, 1040 bp, Homo sapiens
taatgtatgtaaagcactttataaactgtaaaatgctttacaaatgtaagggattattataaaccacaatacactgatgttttatgcttttataaaactactggctggaactgctgtaaggggaatccctctggtgatttttattttggaaacaggaggacttgggtttgcctccttgccaggaattggattcctggcagcagctgtttattccatttcactccgcaacacacatatggccacagcacgcctcctgcagagctgacaatatgtactactgtgtttgagcacatccacggaaagcatcctttctccaccctcactatttctaacttgccaagtctaacacctaggaaatacagactttcaaatcgcatttcaccacagcaacatttgttttcttagatgaggtttttcctccttagcaaccagaattttgcagtcaaactttcaccacgaaaacagttttctcttgagcagattgaaaaaattggatgctgctttattcaacctttgccatggttaaaatgaaaatgatattaatatttgtcctgagaccgggcttggaycagctgaaaaggattaaagtactaacacgttcttttttccttgtacctgcagtgcacagatagactggaccagcgctgggtgacggtgctcaatctttctgctgcaatggaatggagtgcactgacgctctgcacaaatatctgcacagggcagtgttatagataaccactcactgctccctgaggggcttgagatcattcgatgtctaagaactactactggcttgtaaatgtcaagagaaattatgaacatttgtagaaaagtaactgtttgactaatttcctgttccatggagcaaacacactgccccatgtatttagaatctggtgctgacagccaggccatggcaagcttcaaggttataggatcataaatgggattagataagccagacagtgcggctcagactccagcactttaaaaatattattaaaaccccaggaaaggcaaacaattttgaagggaaagta

SEQ ID NO: 54411 - DNA, 828 bp, Homo sapiens
gggagtcaattttccaactttccaccaccttcagatgtgatattcagaacctgagcacattcagaacctgagcacctataaacacagttcataaaagatgacaatctttacaattggctgggtatgtatacaagtaacacaatctgacctgtgtgctgggccctgttaaaaacacactcagtaccacccaagggctttagaatgtggcaatttgttggccaggcgtggtgactcacacctgtaatcccagcactttgggaggccgaggtgggtagatcacgaggtcaagagttcaagaccagcctggccaagatggtgaaaccccatctctactaaaccccatctctactaaaaatacaaaaattagccaggtgtggtggcgcaccgcctgtagtcccagctactcaggaggctgaggcagaagaattgcttgaaccggaaggcggtggtttcagtgagccgagattacgccactacactccagcctgggtaacagagactctgtctcaagaaaataataataaaaaaacaaaaaaataaatttggtatgagaccttcatgctggtatggacccatgattgtacctgtggacctaagagcaagtacaagagttaacatcccttcaattggctgggtccagatatragagttctcacctacctatgagctgggtttataaatgagtcaccgtctcaactgtagcaggatgttgatatttgacaatcacaatttcaactgtagacctcatacatgtgtgtagtttagaacctcaccagtgggctctttcaatgtgtgagggtgacaatcctaacagttggcagggtatgc

SEQ ID NO: 54412 - DNA, 742 bp, Homo sapiens
gtagtatttggttcctgctatttactctaaaaagtccctgagcacctttgtccattgtggtttctcttgttatgtcatactgataccctttacagaaagtattcttcattttttttttctttttttttgagatggagtctcactctgccacccaggctggagtgcagtggctcgatctcggatcactgccacttccgcctcccgrgttgaagcgattctcctgcctcagactcccgagtagctgggattacaggtgcccgccattgcgcccggctaatttttgtatttttagtagagacagggtttcaccttgttggccaggctggtctcgaactcctgaactcaggtgatctgcccccctcggcctcccaaaatggtgggattacaggtgtgagccactgtgccctgcctaatattcttcaattttaaatagaccttttcttcctctcatacttcagtttaaagaactacttaaaggtcagtcaattcctaccaaacgtatttttcaaggtctcatgaaatgtactatatctctggccaggaatatttcataacagcatcataatccagtgcttgtttaacaaaacaatcacttgttagaagaagactttaaaacttacacttgctagctggtcatggtggctcatgcttgtaatcccagtattttgggaggctgaggcaggaggactgcttgagcccaggagtttgagaccagctggggcaccatagcaagatcctgcct

SEQ ID NO: 54413 - DNA, 741 bp, Homo sapiens
tatttattttatgtttttgaaacagtcttactctattgcccaggctggagtgcagtggcgcgatcttggctcactgcaacctccacctcccgggttcaagcgattctcttgcctcagtctcccgagtagctgggactagaggcacacaccactacacctggctaattttttgtatttttagtaaagacggggttttaccatgttagccaggatggtcttgatctcctgacctcatgattcgcccgcctcagcctcccaartagctgggattacaggcatgagccactgtacccagctaatattttttgagtgtaagttcgtgaattaaaaaaaacccagcataatccattcaaaatgatttttttcccataaaattgtaatttccctcccaaaacttttttaaacatccaaaaaaatactaactgcataaaaatattaaaagtactactaaaaaaaattagagtttagaaaaaggtgctgcatttggagaataaacttgacaacaccacacctttgaatacttatgctcagcttaaaaacagcttcatttatgtacgtaatatatttcatttattttatacttcaggttctttttagaacagtggctatgatggttccaaactatgcgcttatagcagaaatctccctctactcttacggatttttgaatgcaagacctctgtctgtgaaaatagtaatgacctataggctttgctcagagcagctctcatcgcaatttca

SEQ ID NO: 54414 - DNA, 741 bp, Homo sapiens
tatttattttatgtttttgaaacagtcttactctattgcccaggctggagtgcagtggcgcgatcttggctcactgcaacctccacctcccgggttcaagcgattctcttgcctcagtctcccgagtagctgggactagaggcacacaccactacacctggctaattttttgtatttttagtaaagacggggttttaccatgttagccaggatggtcttgatctcctgacctcatgattcgcccgcctcagcctcccaagkagctgggattacaggcatgagccactgtacccagctaatattttttgagtgtaagttcgtgaattaaaaaaaacccagcataatccattcaaaatgatttttttcccataaaattgtaatttccctcccaaaacttttttaaacatccaaaaaaatactaactgcataaaaatattaaaagtactactaaaaaaaattagagtttagaaaaaggtgctgcatttggagaataaacttgacaacaccacacctttgaatacttatgctcagcttaaaaacagcttcatttatgtacgtaatatatttcatttattttatacttcaggttctttttagaacagtggctatgatggttccaaactatgcgcttatagcagaaatctccctctactcttacggatttttgaatgcaagacctctgtctgtgaaaatagtaatgacctataggctttgctcagagcagctctcatcgcaatttca

SEQ ID NO: 54415 - DNA, 741 bp, Homo sapiens
tatttattttatgtttttgaaacagtcttactctattgcccaggctggagtgcagtggcgcgatcttggctcactgcaacctccacctcccgggttcaagcgattctcttgcctcagtctcccgagtagctgggactagaggcacacaccactacacctggctaattttttgtatttttagtaaagacggggttttaccatgttagccaggatggtcttgatctcctgacctcatgattcgcccgcctcagcctcccaagtwgctgggattacaggcatgagccactgtacccagctaatattttttgagtgtaagttcgtgaattaaaaaaaacccagcataatccattcaaaatgatttttttcccataaaattgtaatttccctcccaaaacttttttaaacatccaaaaaaatactaactgcataaaaatattaaaagtactactaaaaaaaattagagtttagaaaaaggtgctgcatttggagaataaacttgacaacaccacacctttgaatacttatgctcagcttaaaaacagcttcatttatgtacgtaatatatttcatttattttatacttcaggttctttttagaacagtggctatgatggttccaaactatgcgcttatagcagaaatctccctctactcttacggatttttgaatgcaagacctctgtctgtgaaaatagtaatgacctataggctttgctcagagcagctctcatcgcaatttca

SEQ ID NO: 54416 - DNA, 741 bp, Homo sapiens
tatttattttatgtttttgaaacagtcttactctattgcccaggctggagtgcagtggcgcgatcttggctcactgcaacctccacctcccgggttcaagcgattctcttgcctcagtctcccgagtagctgggactagaggcacacaccactacacctggctaattttttgtatttttagtaaagacggggttttaccatgttagccaggatggtcttgatctcctgacctcatgattcgcccgcctcagcctcccaagtagctgggattacaggcrtgagccactgtacccagctaatattttttgagtgtaagttcgtgaattaaaaaaaacccagcataatccattcaaaatgatttttttcccataaaattgtaatttccctcccaaaacttttttaaacatccaaaaaaatactaactgcataaaaatattaaaagtactactaaaaaaaattagagtttagaaaaaggtgctgcatttggagaataaacttgacaacaccacacctttgaatacttatgctcagcttaaaaacagcttcatttatgtacgtaatatatttcatttattttatacttcaggttctttttagaacagtggctatgatggttccaaactatgcgcttatagcagaaatctccctctactcttacggatttttgaatgcaagacctctgtctgtgaaaatagtaatgacctataggctttgctcagagcagctctcatcgcaatttca

SEQ ID NO: 54417 - DNA, 609 bp, Homo sapiens
acacatcaacttctgaggaacacatttaaactacagcaaataccttgtcctgaacttttgaaactttaaagcaagaaggagactctttagttctgtgcattcttccctgttatttcttgcctgaggcaatcgctgtagccttggggtttttgctccagttgggcacccctgagcttaccacggtggctagaaaaaacatgccctyactgacataggcctgggagcccatctaggagccattcacagtggcaaggggtggcccttattttgcatagccaatgagaagactcccctggctatgagggtggagtccatcttaaccaaatgtcaaggttgctgccaatggaggaggaatggaatgaatgtgggggaacccattgggtctactccacagggtcaaaggcagggatagtgttactgggatgaaagagacttgagcctgtgtttaggtctacagacaggaagcgattaaagacgttggaggaaagagcctaaatttggttaggagcaaaatcctagagaacaaatgaggtgtacgggggagggtctagatttgaaatgagggcatgaaacttctcctggatggaggatgatgaagagacctgctat

SEQ ID NO: 54418 - DNA, 734 bp, Homo sapiens
ggtggattccatgtatttgctattgtgaatagggctgcagaatacatatgtatgcatatatctttatataattatttatattcctttggggatatactccataatgagactgctgggttgattgataattctgttttaagttcttttaggaatcatcacactgctttccacaatggctgaacaaatttacatkcaactgggggagatttttaccaccaggaaatgtttgtctatggctggagacatttgttgtcacaactatggactgctacctgcatttagtgggtagagtccagggatgttgctatatatcttacaatgcacagaacagcccctcccacagcaaagaattctcctgctcaaaatgtccatagtgccaaggttaaatcttgatattataacctaaggttcccatcccaacttgaccaattaatcattttataactttctccgttctcctatttaacctactgggctttaaagccagtggccctttttcttagcttcctcattcatgaaacagttttctggggaggccctagaattttacctctgtattaaaatgatctctattttcttttcattaagggaaaaatatacaaggggggtggatgcagggggcaaggagtgggtaagcagaccagaaagagactccacattaaaacacacaggaaaacagatcttctctctggaagacacctgcaatctctttgtttcctttcttatattaggtc

SEQ ID NO: 54419 - DNA, 937 bp, Homo sapiens
atgaagtttaaaatatgagatgctctttaacttaaaatggggttatgccttataaacccataagtcaaaagtatcattaagtcaaaaatgcattagtgctggcaatacagctatttaaatgattttttaactttacaatggtgtgaaagccatacatatttagtaaaaaccatagctccatgggaagtccttaggagctccttgatttatgatggggttatatcctgataaacccatcataaaatagaaaaaccatgtcagaacatcctaagtcagaaacttttggcatttaaatgctgaatttagtggtgcatagatgtgccatctagattttttaaatggtaattacataccagtcacattaactaaattctaatgtatttaaattataaatctcatgtttcaatgttaaaaaattgtaaatattaaacttttaataccacaggtattcaatgaaatcattacattcccaataaattgttttctcraattgtcttacagttttctcctttgtcagcactatgaaagaattcctgatttcataatgttcattgaaaatagaaatgattttgactatgttacttctccttccagaattttttacaaagtcatatttgtcttttgtcaggtatattgatatataattgtttgtatacatcaggtgaggggcaacattaccataaaagcagaaataaatcacaagctgccttcttcaaagatgcttttgtcaaactaattttgctacagtagaaagcaaattcatgcacgcatatgtgttaagggatttttcacagtatgatagcataatatagttagtattcacttctcccagcataatacaaaagccaaacatggttattatagtttcagtaaagaatgaatgctgtatcaataggatgctatactgaggaaactacagatcatttccagataagtt

SEQ ID NO: 54420 - DNA, 551 bp, Homo sapiens
tccaatcaaacagaagactggaacctcagcacctccaaagctcacggacccgctggtgagggctgcccggactgctgattccactcagccactcaccacccgccctgtctgccaggtgccatgtgcaaggatgctgcattttctgctaatgggggtgggggatggcaggagacataatggggtggggaggggtcattgctattgtcgtcatcactctttgtcaccccaatggcattctataccttcttttgcatctgatctcaaggcatcaagaatatgaaaaacagctcttctgtccccaaaagggagatcttaccttaagcaatgggattaccattaagtacaagacatttgacattaaaccattaagcacaagacatttgacattaatcccaggacaggatgggaggaagggccctgaccaggaggggggcactccagagtcggccacccgctgcccttgccctgacctgtcccgtagctctcctcgtcacaggctcagactccaygtccctacccgagaccctctgactgtggccaagctccagccc

SEQ ID NO: 54421 - DNA, 875 bp, Homo sapiens
ttagtctttttgtcatccccaaataaaaatcacccaatcacccaaagtataatttctgaatgcaatgagcagaaatagatgaacttcatttttagctcttatgtttcttggattgtgagttggctaaggtatttgttagtctgccgctcatttactagattactgatcgcatgatacgactattatgtcattcaggtaatacaagaaatacaattatgctcccttcattctgtttggtagacagcacatcagggggcaggaaaaggtctatttcagaaaagcagttctttctgaacaaggaggattcttgcaaagaattttctttttctttttcttttctttctttctttttgggttttttttttttttttttttttttttgagacagagttttgctcttgttgcccaggataaagtgcaatggcacaggtttggctcactgcaacctccacctcccagtttcaagcaactctcctgcctcagcctcccaagtagctgggattacaggcacccaccaccatgcctggctaattttcrtatttttagtagagacggggtttcaccatgttggccaggctggtctcaaactcctgacctcaggtaatcctcccactttggcctcccaaagtgctgcgattataggtgtgagccactgtgcctggccagacattctatttcctgaaaataaaattgataagctttctatcttctagaagtttgttttattgaaaaggttttttttaatttttcaaacaaataactttttttcttttttttggtttagaggtatatgtgctacaattccttctgggaaatgagtgactggattgaaacaaatttaaagttaaaatgtctttatgcgcaagtcaggtagc

SEQ ID NO: 54422 - DNA, 1105 bp, Homo sapiens
tcgggactaagctggttcaaagcaggttttaggttttctgatggctggtctatgttttattcatttggactcccaggggtggcccttccagggtccccaccaaggtcccatctccctcctgggacccaaattctcattaggtcatttcagccctgtgagagtgccaaacattcagctaggctctccagcctcttaactaccacttcatactcagtttcttagcctcttagccctctactgttgaccaatcaccaaatgtgggaaagcactacagactgtcaggatcacctcctaggcctggtcactcaagtcctgactgaggtctccaattaccttccaacaattgtttttgattgggggcggggcacatttttatccagtttttctaactgctcttgyggggaggcgaatctgtaacaagctcctctgcctttattgaaagttgaaaaccttcatctgtcctttttttgttgttgttgagatggagtcttgcgctgttgcccaggctctagtgcaatggcacgatctctgctcactgtaacctctgcctcctgggttcaagcaattctcctgcctcagcttcccgagtagcgtgtgccaccatgcctggctaatttttttttatacctttaatagaggcaggatttcaccatgttttccaggctggtctcgagctcctgactcaggtgatctacctgcctcagcctcccaaagtgctgggattacaagtatgagccactgcatccggcccatctgtcttttaaaacatgtttttaattggaggtataatttctattagtgaaatgcacaggtctggtttacattttgatgagttttaactcatttaacattactatggaacccacctcctttgaagatacagagtatttctatcatccagaaagttctcctgtgctttcatgctgtcccgcactcccccagcagctgatgaacatgctgaggacattggtactggattctggccgccccaaaagagccgctttgaccaggcttacccagcactaaatccctgcctgctctctcaaaatttccatctttaaactggttgtacctataaccctccctcatcaagtcaatagataaa

SEQ ID NO: 54423 - DNA, 600 bp, Homo sapiens
tatgcataaaaattcttttattcctttttcacctgaaaaaaaatatctgctgatcctttaatactctgacacctcatttgaaaaagcttgctttactcctccaggcagagttgattgttcctgtctgagatgttacctatctgtatcatagtgcttttcactttgacttacaagtattcatttacatacatgtctgctctcaggctaaattttcagctcctcacagccgggactatttcttgttcatttctgtattccaaccatcttttattatgcctttcacagttggcattctatgaaaggctggttaatctttctaagcattaaaccagccttttggaaaaataatgtaatatatttacagagaaatgatatatgayggcgaacagtagtttatgctctctgttgccttgtatttctccacaaaagtaaataacaatgacaaaaacacaatatcaaatttagaaatgaaacaagatttgtttgaaagcatttatttgaataacttaaatgaaatagtcagagcagtataaatagcatactacaagaaaataaagtcataaagaaattttcaaaactctctgccagcttttcatagac

SEQ ID NO: 54424 - DNA, 599 bp, Homo sapiens
taattaacacatggaaaaatttttacttacattggtgatttttgcctccctctgttctctgtagataatttctttagtcagtgggtaaaatgcagttatatacatgcagaatagctaaatgtttaaatatagttatacygcttggacagatggagagacacagaaaatatttttcagtataacacagataacttctaaagcaggtgttttgtttaccaactgtctcttggaaactcttcagttcaaaatggtgaggttattttttgtatacgaaatccagtctacttcctaaaattcaacccggcatgcagtttcttgggatatactatctgactccacagagacaaacaactattcagactgcactgcgtactgagtttcattattgaaatccttacactggattttaatgattttttcttcctatttgtcatcccatcctgttacataatgtcagagctgtatctttcatttcttggaatccccagagcttctcaatgagcttgacacacagcagacatttaataaaattatataaagttaaattatgaccatctcttgagtatgtgacttatacataataggaagtaataattaaa

SEQ ID NO: 54425 - DNA, 626 bp, Homo sapiens
aaactgtaagtcttatagaaagaatttttttaaaaaaaattatgcccatgaagagtttattgtttctgtcacatatactaatcttaacttctggttaccacagtagtttcaagcacgagtagaactttttcaaaatataaatgtgttcccaaccttgaaaattcttgattcatttggtcagaagtgtgccctgtggagtggagagyggagaaccactgtactacctgccagttgtaagctctgttcacttttagttttctgtgagtcttttgttattttaagccacacagacatttctgcattagtagtccataaacaagaaataaaaaggcagtgtagttgagggagaagaaggtaaaagaggtaagatgttatgacaggacaggttttcaagtgctttgctttgcattggaaggagggtatcgggttttacatttctctttgtcatcttatctgttttctggtgacaaagcattctttggaggaaatatttggggtttagtgaatgcagagaaaaatagtttaattgacattactcaaagcaaacttgtgggatgacaataggtttaactttgggaaaagaggattccttggacaaataagcttggtaaatgctggcttaaagt

SEQ ID NO: 54426 - DNA, 626 bp, Homo sapiens
ttaggttatttagcctttattgtgactcagtttctttgtctgtgtaataagcataatagtactgacttcatagagcttttgtgcaaattgatgagctaatatttgtaaagtcctagaggttctgttaaactttcatgcatgtatatgtgtgtgaatatgattgacaggtttacctgaattctcgtcatcagagaaccccacactgtattcaaaggcaagggtagtaaatgtyccattgttaaccgggattacccaataaaaatggctgtcagatgccaagtgcattggatcgctgggatcacaggaccattttgatactcttcttgctcttgagagtctagattcttggtgttaaggaacaaggtgcctttagcaaacatgaactctcaaaattactccaaagcacgtacatggccccagtttgcaaataggcaaccggcagtggcaagatgaatagctgcatccattcaagtagcaattaagacccattgctgtgttttgtcatgctaatgatagtagcggatgcttacctggcaattactgagcccccagcacaggtgaagcagcttatgtatgttatctcctggaatcatcacagaagcccattgaggcagggactgttatta

SEQ ID NO: 54427 - DNA, 736 bp, Homo sapiens
ctctcagctgaactcctgggttcccataaaggtattctggcccatgggtggttgttaaaattggtgcttttgtggggatttgaggaatagaacctcctattccaccgtcttgctccaacatatctcattttaattcaatgacttaaycccctacataaaccagacagttcttggtggactatatttaaactcaaacaggtaataactccaattgaagctactgtgccaaatgcaattttagttagagcagattaatattgcttcaggcactaatatatggccattgatttggtgaattctttttctagtcctataaaggagaattggaaatattttacattcattttggatggataacagtacacatttatgattttttccccaaagcagcccaccctctgtcacaattgaatctaaagggacccagacctctggagagtccacagaactttaccttgggccaccttcttgatgacatgatgttaatcagactgggtaagcaagaattttggagaccttggtaatgcatgtactccagagcttgggggataacgcttaccaagattcagagtattgccacagcagattttagggcttcagtgatctggggcatttccttcaaagtaaaggactagatagtgcatctggcatctctcatcactaagaaagaagcacaacacctgttgcactatagcttaattcaaatttagctgtgagggcaaatcctcctagcggg

SEQ ID NO: 54428 - DNA, 552 bp, Homo sapiens
agcctcccgagtagctgggactacaagcatgtgccaccacgcctggctaatgtttttttgtattttagtagagacgaggtttcactctgttggccaggatggtctcaatctcctgacctcgtgatctgcccacctcggcctaccaaagtgctggaattacaggcatgagccaccrcgcccggccgacaatatattatcttcttttctaatgcctataccaccttttgtttttcttttcttctaactttgcctaggccttccagtgctgtggcaggcagtagcagtgagagtgggcatcttcatcttgttccccttctggaagggaatacatctacagtttctccactgagcataatacctgctgttatgactttggcttataccttttactaaatctggaaagttccttcttttcctatttttctaaaagtatttatcaaataccttttcttgcataaatttaaaaaaccaacctgaagacatataccaccatattgctagaaacagaaattcaaaacatgctttctttcagagcactgtgccatcattcaa

SEQ ID NO: 54429 - DNA, 552 bp, Homo sapiens
agcctcccgagtagctgggactacaagcatgtgccaccacgcctggctaatgtttttttgtattttagtagagacgaggtttcactctgttggccaggatggtctcaatctcctgacctcgtgatctgcccacctcggcctaccaaagtgctggaattacaggcatgagccaccgcgcccggccgacaatatattatcttcttttctaatgcctataccaccttttgtttttcttttcttctaactttgcctaggccttccagtgcygtggcaggcagtagcagtgagagtgggcatcttcatcttgttccccttctggaagggaatacatctacagtttctccactgagcataatacctgctgttatgactttggcttataccttttactaaatctggaaagttccttcttttcctatttttctaaaagtatttatcaaataccttttcttgcataaatttaaaaaaccaacctgaagacatataccaccatattgctagaaacagaaattcaaaacatgctttctttcagagcactgtgccatcattcaa

SEQ ID NO: 54430 - DNA, 552 bp, Homo sapiens
agcctcccgagtagctgggactacaagcatgtgccaccacgcctggctaatgtttttttgtattttagtagagacgaggtttcactctgttggccaggatggtctcaatctcctgacctcgtgatctgcccacctcggcctaccaaagtgctggaattacaggcatgagccaccgcgcccggccgacaatatattatcttcttttctaatgcctataccaccttttgtttttcttttcttctaactttgcctaggccttccagtgctrtggcaggcagtagcagtgagagtgggcatcttcatcttgttccccttctggaagggaatacatctacagtttctccactgagcataatacctgctgttatgactttggcttataccttttactaaatctggaaagttccttcttttcctatttttctaaaagtatttatcaaataccttttcttgcataaatttaaaaaaccaacctgaagacatataccaccatattgctagaaacagaaattcaaaacatgctttctttcagagcactgtgccatcattcaa

SEQ ID NO: 54431 - DNA, 613 bp, Homo sapiens
agtacccaggaaaccctctgtgtcactactaccccatctcctgcaaattaaccactatttgaactaatagcatagattacttttaaccagtttttttctttatataaacacaatgccataatatatcctcttttgtgtctaacttcttttgttcgactttacatttatgaggctcatccatattgttgtaattgtagtttgtattcttattgttgtatagtgttccattgcatgaatttactacaatttaaattcattatattattgatgggtattagggcaatttccagtttggggctattacaaatagygcagctaggtacatcttaatacttttgtcagggaaacacatgccacatttctgtgggaattaggagtgagattgctgggtcatagcgtgtgtctatgtttagctttagtgatactgtcaagcagttttccaaactgtaagccccattcttaatgtaaaagtgaatgctcctgcccctgttctatcccttcctaagagttgtgacaaatctcaaacaggacattactttcacataggtttatgaatttctgccaaaacattggtgctcacatttcaaaataaataaatgcatccatgaaatcc

SEQ ID NO: 54432 - DNA, 620 bp, Homo sapiens
attttccactgcattcctttgtgcatttatgccatatttgagaatcttttggagaaggagggacagaggcaagacagggttccagatggaggaattaataatttatcctagaggtgcatgttggagcaactgattcaggcaatgtacattgtcacattataatagcagcaaaggggtggttatgtaaagatgaaatcattcactccatttggtattttgtatttatcttttgaaggttacacccactttggaggttttatttaaataaagttaaggctgggcrcggtggctcacgcctgtaatcccagtacttagggaggccgaggcgggtagatcatgaggtcaggagattgagaccatcctggctaacacggtggaaccccgtctctactaaaaatacaaaaaaaaaaattagctgggcgtggtggcgggcgcctgtagtcctagctactcgggaggctgaggcaggagaatggcgtgaacccaggaggtggagcttgcagtgagctgagatcgtgccactactctccagcctgggcgacagagcgagaatcggtctcaaaaaaataaaataaaataaaaacacataaaataaataaataaataaataaagttaacat

SEQ ID NO: 54433 - DNA, 598 bp, Homo sapiens
tcatgcatctatgagcagaacatcaaattamccaccaacactgatgtccccggatcccacagctgaaagccccactgaacagacagaccccactgacccgagcctgggggtttcctccctccctgccctggacaaggctggggtctggggcttgttccccacaagtgagacatccctgggccaccctggtctcctgccgagacctctaagccctgctggggtcccagcccacattcctgcctttttggctaattggacttgattgggttgcagggagttctggaagcccccgctcagtgatggcagagacccccgatgtgctcaggaggattagctcagcgacctactgaccccaggcaattaggagcattggctgggactatgagctctccctaggagtacctcataatcatcccgggtgcccctgctgcagacccatgtgggatttggctgtgcctgatgtgtcctggcatccagctggttcctagcacaagggacccgggccagcactcttctctcctcatcctctgtggttctttttcctcctctctgtgctgatgtggaaggttctggttcacatttgtgtgaaagacccatt

SEQ ID NO: 54434 - DNA, 601 bp, Homo sapiens
tgcatcttaaaacatattttaaaaagtcatcagtcacaatctttgattatcacaatttagtgtacataatttcatgtatcctttttatgtatcattaatttaactgttgccagataaaaaaattagataatgttctcatactccatttcttggttcaaaaatgatacaaaatgatagcaaagtgttgtacactgtctcgagcatgacataatagaaataactaaatattgattttaacacagcaggttttaccaatattcaattattctaaaatttgatcaatttcaaggcaatcaaaacaatgccacagtgatttgctgatctttattttaattttcagttataaatttttwaaaaaatttagacctcaaatttattctatatttgcaacttgctgcccattgctacagagtgcattataacaatgaagtgatactaaattttcctaattttaacttgatatcatgctcccacattgtgtatcacatagatatcccacatggtatatcaccatgcctttcaaatcctttcaaaaatgtcatgaacttttgtttcacctctatctggaatgcccttttctgccagctatattttccttatt

SEQ ID NO: 54435 - DNA, 575 bp, Homo sapiens
ggcaaggatcagaagactccacaaaacacctcttcgtttgcttttctcttccatgccacctgctgaagtacttgtttagtctctaccttctttgtggacgaggttggctaaacttatacagacaagatctgaggcataaaatattccctaagtacttaaaggcagtataccacagtgggttaggatcttagattctgtggttaccataacttgggctcaaatcctaacttcactgagttgccactaggatttaacaacttaatatatacaacattcttggtataatgaaacttgactatgtgccagtgtgytaggtcctaccctatgtctagggatacaaagtcaaacaaacaaacaaacaaaagtatttagggttcttgttctctagaagtcaacctagaccctactaatctatttccagctaggatggaaagagatcaatggaaaacagacgggtggtgaacaattcattttgataaatcttagcaaatccttagtgtacacttaaaggtgtgctggactgagcaaggtaatttcattattatccctaccaaaggattatgtatccttgacca

SEQ ID NO: 54436 - DNA, 575 bp, Homo sapiens
ggcaaggatcagaagactccacaaaacacctcttcgtttgcttttctcttccatgccacctgctgaagtacttgtttagtctctaccttctttgtggacgaggttggctaaacttatacagacaagatctgaggcataaaatattccctaagtacttaaaggcagtataccacagtgggttaggatcttagattctgtggttaccataacttgggctcaaatcctaacttcactgagttgccactaggatttaacaacttaatatatacaacattcttggtataatgaaacttgactatgtgccagtgtgctaggtcctaccctatgtctagggatacaaagtcaaacaaacaaacaaacaaaagtakttagggttcttgttctctagaagtcaacctagaccctactaatctatttccagctaggatggaaagagatcaatggaaaacagacgggtggtgaacaattcattttgataaatcttagcaaatccttagtgtacacttaaaggtgtgctggactgagcaaggtaatttcattattatccctaccaaaggattatgtatccttgacca

SEQ ID NO: 54437 - DNA, 1348 bp, Homo sapiens
ctgtggaatgaagctgcagatttagagaacattggcttctgaaaaaaaaaaagagtgaagatagtactagcaagtatacttattttttaaaacaggctagaatctcatgttttatatgaaagatgtacaattcagtgtttaaaaataaaaatatttattgtgtactctgttckttgattagttgctacaggctgtacctataagatgtacaggataatagttaaatgttgagtattgtacatatgtatttaagtggattgaataactgagtctacatggaggaggaaatgctagagaacagcaggtctaatattttttaagtttactgagagacctttattattattttcaaattaagtatagctttatgtaacttttagccagttgctctgccacagacatagacaaagagagataagatttcacattatccatcactgcataacaaaccacaccaaaactcagtggtttaaaacaaggacttttattatttttcacgattcagtgagttggctgtctctgctgtacagggcctctcagcctccagtagactagacgaatcttctttccatagtagagaaaacatcttaagagagcaagctccaatatgcaagagcttatcgatcctgtacatctatcatatttactaatgttccattggacaaagcaaatcacatggccaagtctagagtcagaatgaggggactacacaagctgacagcggatggtatgactcattgggggccattgatggaacaatcttaccacacaaggacaaattataatttatccttgtggctctctttatttttctaacaacttcaacaaaataatcctgtttatatgttatagtttcttgccacaaattttgttttttcaaacttacctttccaggtttgttttagtatgtatgtacctggaaatttttattactttttataccatttcaagatatgtatcttatataaacctcaagttggattttatattttaataaggaagttaagaccttcatttaagaggcagaagattaagataagaaatataagatagaaaagctttgttcctaacatatcttttgcctgtctgggcaagtatttgactcaactaaattttaatgaacgaatgaatgacagagaggaggaaaaaagatgaggattgcatacatgttctaaaccctttgtcagattgcagtttcctagagagtattgaggtgctaggtagaaagttaggaaaggtcctgaggactggtattgacaattggagtcctaatagtactctattcgtattaggaaagagagactagataccaaacatcacgagatcatagagatggaaaactgtatag

SEQ ID NO: 54438 - DNA, 1348 bp, Homo sapiens
ctgtggaatgaagctgcagatttagagaacattggcttctgaaaaaaaaaaagagtgaagatagtactagcaagtatacttattttttaaaacaggctagaatctcatgttttatatgaaagatgtacaattcagtgtttaaaaataaaaatatttattgtgtactctgttcgttgattagttgctacaggctgtacctataagatgtacaggataatagttaaatgttgagtattgtacatatgtatttaagtggattgaataactgagtctacatggaggaggaaatgctagagaacagcaggtctaatattttttaagtttactgagagacctttattattattttcaaattaagtatagctttatgtaacttttagccagttgctctgccacagacatagacaaagagagataagatttcacattatccatcactgcataacaaaccacaccaaaactcagtggtttaaaacaaggacttttattatttttcacgattcagtgagttggctgtctctgctgtacagggcctctcagcctccagtagactagacgaatcttctttccatagtagagaaaacatcttaagagagcaagctccaatatgcaagagcttatcgatcctgtacatctatcatatttactaatgttccattggacaaagcaaatcacatggccaagtctagagtcagaatgaggggactacacaagctgacagcggatggtatgactcattgggggccattgatggaacaatcttaccacacaaggacaaattataatttatccttgtggctctctttatttttctaacaacttcaacaaaataatcctgtttatatgttatagtttcttgccacaaattttgttttttcaaacttacctttccaggtttgttttagtatgtatgtacctggaaatttttattactttttataccatttcaagatatgtatcttatataaacctcaagttggattttatattttaataaggaagttaagaccttcatttaagaggcagaagattaagataagaaatataagatagaaaagctttgttcctaacatatcttttgcctgtctgggcaagtatttgactcaactaaattttaatgaacgaatgaatgacagagaggaggaaaaaagatgaggattgcatacatgttctaaaccctttgtcagawtgcagtttcctagagagtattgaggtgctaggtagaaagttaggaaaggtcctgaggactggtattgacaattggagtcctaatagtactctattcgtattaggaaagagagactagataccaaacatcacgagatcatagagatggaaaactgtatag

SEQ ID NO: 54439 - DNA, 1798 bp, Homo sapiens
tgcatgttgttacctaaatactgtcagatacagtgattaagaatgggggcttttgaattgcaaagacctgggtcttgagtgctatctgctactatttatctgtgtagatctaaatatttttctaaaccctttaagccttaatttcctcatctgtaaaaagtatataatgggatttatacaacagggatgatggaagtaattatcaatataatatataaaatatgtttaaatggtgtctaacatatagtatgtatttaaatattaataattatttagttagtaaaaggaaaaagtgacagaaacacctgttagaaagtccagttcttaagaggttctatttaattaaaggaatcagacaactattactataaccttaatcaaacatagagaacaactgagcagttattcactaggagaaggcacagcagtatttaggtatattctaaagtcaacctctggagaaytgattgtgaacttcgctcttgacatgatggctaaataaacaattacttattaactgctgcctggaggttcactttttaatcttctgaactagtgataaagtgaagatttaaaaatcaggctatagtcaatttgcagctaaggtgagaaagtaacaggaaacggggaggcttgtgtcaaatggcaaaaacacaatttagttgttgaccaagaagatgggctaaggagacattttttaaggctaaatatacttggaacaatttaccttccatggatgggtgactaggacactcctcaataccatttaatgactttcacctgaagggcaccagagcatcgccttaccctaatttgctcttttatttccattgtgagagcagcacctcaattacctgtgtatttaatgttgacaatgtgttatttatatgatggatacttctctgagggttgtagaaaattggatgtttaaatgatcacaatcactagacattctgataaagagaaatcctgagagtcaaaaaagtctcaagaatcacgacagacctggtcagctctcataggtaaagtcgtacagtcaaaggtctgaattctggcttgccaccaacaaacagtgtgactgtggacaagagcatgcacatctatgactcccaatttctttatttgtaaaatgaaaataaaagtatcaatctcactagggtataagtaggcaggtcagagccagagaatgagttttttccccttgcatctgtgtttactccatatttagaattcatagccctctaatctcaaagaactgacaatataatcaatctttagcaagcaacagttttaatatggacttttaaggttgtctaatgctttaaagaacgacttctcaccaagtcttctttgtgatactctcccaatgtccttcagaatacaattgtattacttaagttaaattgtgttcctgtctttccaaggagttcataccccaactatccttcctgttaagaactggtagagatctcagagatacaataaagcactttctcactctttgccttatcttccccagctatgagcttctgatgatttactttcattaaatctaaatctgacaatgtaattaattttgtacattactgccagtaggggccagctaccctagggggattagtgataactgttaaataaaatttcttgcatttaaaacaaaagaaagttttagaacatattactgaaaatcaatttcttcctgtcagatagtccagaacattttaaatcttttctcatttgctcaatgtctgataagcctcacacatcctagatatcttgtgtaatgctatactaagtg

SEQ ID NO: 54440 - DNA, 575 bp, Homo sapiens
agttccatccaaaatcttaactagattctccagacctggatgcttctggaagagatcattggattgaccaacaccggggtaaagtgttctccccttgtgggaaatcaacagtagctgaaggaatggggtcacagaatgcaaacagggatccaagagagcatacgtaaggatttgggaaagggtttatttcatagattttgagatattttccagattcacatttataccctttcactaatatatagagatactcacagcaaataagacaggtttagaaagaagatggctttctctactctggccttgtataaatgaatagaatcctctgacaaagagggttctataagaaaaaaaatcagatttcagtgggtggagccaagatggcagaataggaaaagctctggtctacagctccaagcrtgagcgatgcagaagatgggtgattgctgcatttccatctgaggtactgggttcacctcactagggagtgctagacagtgggtgcaggacagtgggtgcagcgcaccgtgtgcaagccgaagcagggcaaggcattgcctcacttgggaagcgca

SEQ ID NO: 54441 - DNA, 577 bp, Homo sapiens
cagccttgttgttatctgagcagttggctccattttggtgacatagggagagtaaaagatgttctcagagatcagaagctgtccattggacatttcccttggttattgctcaaattcaatgagattgagagacattaaatmatgcatcccaggtcacaccagtgacaaaactgggacgagaatctgggtcttcctgagcctgtggctcgtgtttttatccattatggcaaactgcctcttgggtttgcagggtgactgtcatgaagcccagccctgttttcagggtgacaaatttcccacccctccagctccctaacacgtctagtggccatctatagaaactggcacataagactgcttggagtgctgacctcctcactgctcagtcagtctccccaacgcagagtcccttttcatctgccctcattcccacctgacatgacgatactgcatctcctttctcagtgctgtctacccaaggaagctcatctgttttctcgccttggttattgggatgacttcaggtttacccatgttctctctcccctaaccatatagctaaccctttagtgcctca

SEQ ID NO: 54442 - DNA, 1276 bp, Homo sapiens
tacaaatgtatatattgattgtatccccaaatattcaactgcacataatggaaaatcccaaaggttcaattgcacataatggaaaatcccaaagtagcagtaatttaaacaaggtagaggttcatttgtctctcatataaaaaagtctgaagatatctctacactgccttcagagatccggagacttctatttgtactctgcaatgctaacacatagcttccatcctcaaggtcacctcatagtcctaggacactgagtcagattctttcagcatctacttctgaagcctcagataaaagttatgttcagctcttattggctcatcacctggccacgtgtagcagatagggaggatgggaaattagttatttattcaaccagtaatgtacctagataaaaatttgggattctgatacttaagggaaggagagaatggattagcaggtaggcagccagcattctctgccaaacttttcagtaaatctcagaaatctttctcaaggttgcattatgaaaattctggagctttccatggacgaaataatacattttgtccaaattgtgtttttaaatgtaaaaaaaaaccagagtttgcatcatcctagaaacaggttacatgaaacagggttttaaactgctgacacttagcaaagaacttgttaaatgtgaaccgaaatagtattaaacggagtacaatagagaatagaggctgaaattaattttgtgaggyagtaacttattaagttgactttctggataaaaataaatggaatcttggaggtgaataagatactaacaaagcaatggatgaagtaaaacgaaaagatttcttttagtttttcctttgtttatacaaaaaaaagggaaaagtaaaaaaattattgatttttgaagagacaagttccataatggtattttgggaacatcatctcttagctatgctcaaactacatcgtgagggaaagcgcagaaggagagcccggttaggatgcgcctgtggccatcttgtcaatggaagttttctgtacttatgtgtagttttggggtcccaaaaggattatccaaagcaaacttcattttaaaaatttaatattcaatttattaaatttgtatgtaacaaacatagctcttctttaagctttgaaatttaacttaattattttagtatacttagacatctaagtagatttaacttaattattttattgtacttagacatctcacaaattttgaaaattacttttgaagcggtgtttaattaatgtttgattccat

SEQ ID NO: 54443 - DNA, 1276 bp, Homo sapiens
tacaaatgtatatattgattgtatccccaaatattcaactgcacataatggaaaatcccaaaggttcaattgcacataatggaaaatcccaaagtagcagtaatttaaacaaggtagaggttcatttgtctctcatataaaaaagtctgaagatatctctacactgccttcagagatccggagacttctatttgtactctgcaatgctaacacatagcttccatcctcaaggtcacctcatagtcctaggacactgagtcagattctttcagcatctacttctgaagcctcagataaaagttatgttcagctcttattggctcatcacctggccacgtgtagcagatagggaggatgggaaattagttatttattcaaccagtaatgtacctagataaaaatttgggattctgatacttaagggaaggagagaatggattagcaggtaggcagccagcattctctgccaaacttttcagtaaatctcagaaatctttctcaaggttgcattatgaaaattctggagctttccatggacgaaataatacattttgtccaaattgtgtttttaaatgtaaaaaaaaaccagagtttgcatcatcctagaaacaggttacatgaaacagggttttaaactgctgacacttagcaaagaacttgttaaatgtgaaccgaaatagtattaaacggagtacaatagagaatagaggctgaaattaattttgtgaggcagtaacttattaagktgactttctggataaaaataaatggaatcttggaggtgaataagatactaacaaagcaatggatgaagtaaaacgaaaagatttcttttagtttttcctttgtttatacaaaaaaaagggaaaagtaaaaaaattattgatttttgaagagacaagttccataatggtattttgggaacatcatctcttagctatgctcaaactacatcgtgagggaaagcgcagaaggagagcccggttaggatgcgcctgtggccatcttgtcaatggaagttttctgtacttatgtgtagttttggggtcccaaaaggattatccaaagcaaacttcattttaaaaatttaatattcaatttattaaatttgtatgtaacaaacatagctcttctttaagctttgaaatttaacttaattattttagtatacttagacatctaagtagatttaacttaattattttattgtacttagacatctcacaaattttgaaaattacttttgaagcggtgtttaattaatgtttgattccat

SEQ ID NO: 54444 - DNA, 1276 bp, Homo sapiens
tacaaatgtatatattgattgtatccccaaatattcaactgcacataatggaaaatcccaaaggttcaattgcacataatggaaaatcccaaagtagcagtaatttaaacaaggtagaggttcatttgtctctcatataaaaaagtctgaagatatctctacactgccttcagagatccggagacttctatttgtactctgcaatgctaacacatagcttccatcctcaaggtcacctcatagtcctaggacactgagtcagattctttcagcatctacttctgaagcctcagataaaagttatgttcagctcttattggctcatcacctggccacgtgtagcagatagggaggatgggaaattagttatttattcaaccagtaatgtacctagataaaaatttgggattctgatacttaagggaaggagagaatggattagcaggtaggcagccagcattctctgccaaacttttcagtaaatctcagaaatctttctcaaggttgcattatgaaaattctggagctttccatggacgaaataatacattttgtccaaattgtgtttttaaatgtaaaaaaaaaccagagtttgcatcatcctagaaacaggttacatgaaacagggttttaaactgctgacacttagcaaagaacttgttaaatgtgaaccgaaatagtattaaacggagtacaatagagaatagaggctgaaattaattttgtgaggcagtaacttattaagttgactttctggataaaaataaatggaatcttggaggtgaataagatactaacaaagcaatggatgaagtaaaacgaaaagatttcttttagtttttcctttgtttatacaaaaaaaagggaaaagtaaaaaaattattgatttttgaagagacaagttccataatggtattttgggaacatcatctcttagctatgctcaaactacaycgtgagggaaagcgcagaaggagagcccggttaggatgcgcctgtggccatcttgtcaatggaagttttctgtacttatgtgtagttttggggtcccaaaaggattatccaaagcaaacttcattttaaaaatttaatattcaatttattaaatttgtatgtaacaaacatagctcttctttaagctttgaaatttaacttaattattttagtatacttagacatctaagtagatttaacttaattattttattgtacttagacatctcacaaattttgaaaattacttttgaagcggtgtttaattaatgtttgattccat

SEQ ID NO: 54445 - DNA, 692 bp, Homo sapiens
acatacttggttttacctttttggatgtcttgggcaaaggttcaaggtatttcttttcaggtaaataatttgtaactgctgttaattaaaatatagttctctaaaatagaacccatttagaaataataatagttggaaataaacaacatggaaaactagatgatttgtggttcaaatttactgatagataagttaaacattagagccataaagtgtaaatttgcgtagcatttaacaagctttagaagagcattaaaagtaacctatatgtaatatgcaatacgaatagagcttcacagagccccagaggaagctgaaaatgtagttcaggatgcttcaggctgtctgagatgttgagattatgttccacaaagaccaaaataaggtttcagcaaggttttcttgcaacatgtaagttttccagatgaagagaaatggacatatattaaatttccagcagcttaaaaatgcagycatttgtaagtgattaaaatggacgttgtttttagtttttctgtagtagttggcattccttaactggtttttatattaaaccagttatgttaaaaaacaaacatgtatacagtgtgcctatcttgtcactatgttaatagaaaatcattcaaaaattaaaggaaagaaaagtaaaaccattataataaaagattgtgagagctgcttgagagttgtgg

SEQ ID NO: 54446 - DNA, 597 bp, Homo sapiens
tagcctctcttgcacctcagataacctccagtgaaatacagctttaggcatattactctttttccactgccagtttgtaaaagcctcaaaaagaagcaaccgaatgtactagctaaaaattagtttttgaggctggaacagttgtaagtctaaaactcaaccgtggtacttagaattgatgcaatgttttaaagactcatcttattcatctctaacatagggataataggacgttttcataaaattgttgtcatcagcaatgaaagccttgacccatccagacattgtttaaaaaaaggcacacttgaggtgcctacttttccacttaaagttcagtgtaatttgcttcataggttgaagtccagtgtaatcatgcttcatatgttgcatgatatgaagcatgtaaagtagttaccagggaatccagcctgtggtgagcagtcaataaatgttataattgtcagctattatttttatcagccaatgtcacaatgtcacatattcatgtcaatgatctgcataagttgaactgcattagttaaaataatcagtaagtttttattgattactatggctacrttactagctctcagacca

SEQ ID NO: 54447 - DNA, 806 bp, Homo sapiens
aaagaagatacttgaaatattatgtttttaatatattaaattactgatttctaagacctgtagaggaatacattctctctgcctctttctgtttctctcctgaccccttttctttcttcttttcttctttccttttatggctctcttcatctctttagtctgaacataaacttccttatccttatctcctattcatatccactcagtaatatgcacagtttatgcaccccaatgcttttttttctagtggcaaacttcctcaggaagagacccagaaaaataatagaaaaccattccagactaagtgaaagtagagtgtagaaggaggcagcccaacaacacttaccctcatccttccttcaggagctgattttttggcctctaacagttgtgatgtagtggataggagcaggagaggtggcactgatacactcaggactcygaatgtctggtcttaatttcctatctgatcaggatgagccaattctttgctaggctctctggtcacagctcaaaagaaggcctacaggacttctatttcttaagaacaaaatggcagtaacaataggcgcagcattggaccctcatcaagtattgttcttaatttgcttaacttttatttaaaagttacactaggaaaatcttatctcatatataaaagcagtaaggcaaactgccttttcatgcctaaatttctgttgggtgatttcatatatttttttctaactaaaaccctaaaccatagccaagatttactttctttttacaagttacacatgatgttggttgcattgctttccagagtg

SEQ ID NO: 54448 - DNA, 639 bp, Homo sapiens
tgttggtcaggctggtcatgaactcctgccttcaggtgatccacccacctcagcctcccaaagtgctgggattacaggcgtgagccaccacstccagccttggtttccctttttatctagttatgtcaccttgggcaagtcctcttagtgcctctatttttctcatttttttattttttagtttatgtttttaatattttttctcatttttaaatgggaaataacaggtagagttgtgataattctgttaatccatataaagcatttagtatagtgcctggtacatattacgataagtattcaagaaacattcatttgcattgcttttcattgcatgtaaatcattcactctgtgtctaggcagttcctccatcattgacctctgatccctttggccagtcaccctctctctcttccactgggctggagacaaaggaagacagagccccctccttccctccctcctttactcttctctcttggggctacaatgaacaaatgataacagcacaggtttcactcaattaggataaaaccccaaagcagatgatgcttgtgtgcagaagatggagtaaaagaattggctccagaaggcttgggacctgcttgtagaggatgctaattggtttcttgccggta

SEQ ID NO: 54449 - DNA, 586 bp, Homo sapiens
atttagtcagtaaacattaatataaatactgaagctttagcagattgcctgaaggtgaatataaataaggtgggagaataatatcaagaaagaagctrattaaacttgagttatttttattcaactttattttttgaaaacagagtagttctctctaatgtgctaatttctctgtctttttaattttagagttttctttacagagaaatttggattttcttcccaggcagcaagtgcaattaacaggtattttaaaattaattttgtaagtgcctattgcatgtgaagtatgggtctttataatcaaatgttaaaagaagcaaaaaagatgtatgtgacctaatattttttaagtgcgaaactgggactacattgggacttgaatcctgagtggctgtgtttaaattagtggaaaaccaaagaagtcttgaactgctttttatattttttgatgagcattttataagaatgttaaatgagttaggatttgctttgcctgatattttcaagactttcttgaaactgatgtttgactgtgttgcatttcatgaaatgtcttatgtgttctctgggcagtgttgtatat

SEQ ID NO: 54450 - DNA, 586 bp, Homo sapiens
atttagtcagtaaacattaatataaatactgaagctttagcagattgcctgaaggtgaatataaataaggtgggagaataatatcaagaaagaagctgattaaacttgagttatttttattcaactttattttttgaaaacagagtagttctctctaatgtgctaatttctctgtctttttaattttagagttttctttacagagaaatttggattttcttcccaggcagcaagtgcaattaacaggtattttaaaattaattttgtaagtgcctattgcatgtgaagtrtgggtctttataatcaaatgttaaaagaagcaaaaaagatgtatgtgacctaatattttttaagtgcgaaactgggactacattgggacttgaatcctgagtggctgtgtttaaattagtggaaaaccaaagaagtcttgaactgctttttatattttttgatgagcattttataagaatgttaaatgagttaggatttgctttgcctgatattttcaagactttcttgaaactgatgtttgactgtgttgcatttcatgaaatgtcttatgtgttctctgggcagtgttgtatat

SEQ ID NO: 54451 - DNA, 1213 bp, Homo sapiens
ctgcactccagcctgggtgggaatctctggttatgcttctaggggtcatatcattcaaacattgtcttgtttaaatatcaccctttattctttcattttcggattctctttttcattcaggactcaacagtcactagtggctgagaaaagagttttgtctargttggagccatgatgcgcttatctgttgatagacatgtcacataagcatttctccagtacagaaacatgcagtaaattgaaatctgtacaccaggattagatacacccaggattgtatgccaacttccaatagctttcccacaccaggaaaatgaaatttatgataaagtagcttctaagttcaatacagtctagtggttacagagtggtttctggagccagactgcctggatttgaattccagcccctccacttactagccagtgggagagtcacttaattcctttgtgtctgagtttctctacctttaaaaaataaataaatgagatggaaagatttttttaaatgaaggcaataataaggtctacctcatagtgttgttgtgagcattaaatgcattaatatatgtaaaatgcttagaccatccaattaatccagtcaacaagggatgtaaattacgtcaagagactctgaacaagctatagtaatcttccctgtacagttatacctatgagctatatacatttatttagatacaggaagaacggtgaaatagggatcaaaaaaaaagaagagcccctgacactgccactagctagcaaattatttatcatttctgtgctccaatttattcatctgcaaaaatgagatagtaatattacctggtagttactgagaagactatgggacaatttacatggagcaccacgtaaatggcagagcactgtacaaatgtaaaaggtcattaatatcattgatcatcattcttctcacaattaattggcatccagagacatgtataagatcaggatattggccaggcatggtggctcatgtctgtaatcccagcactttgggaggctgacaggggcagatcacctgaggctaggagttcgagaccagcctgggcaacatggcaaagccctgtctctattaaaaatacaaaaattagccaggcgtggtagtgtgcgcccataatcccagctacttgggagttgaggcacgagaactgcttgaacctgggaggcagaggttgtagtcagctgagatc

SEQ ID NO: 54452 - DNA, 1725 bp, Homo sapiens
ttttcctaattattcaggacagcagctagtgagagtgcaaactaattgaaaatacgtgatgatttatttgcgtggccgaggctcagcccatgtactgggttaagtgcagagcgcccctcagcctctcagtccgtcgctgaggcctcttaggcctgatgacacagaggatggtgagaatatttctgtattagccatctaagcttacgagagctggcagttatgaaggacttttcaaaagacatgtgggcaatctattgtttcacttttacccctcaagtaaataaaattactgagagttggtatttggtccacgctattttgcccaactcacagaatttctttcactaaatggcctttgatcttttgacctcatccttcccttaggacagggcaacactcagtgctacctgcaccrtgaggatactgttaaggacactatacttgtccctttatgaaatcctgtgtgatgataatttactctagactgttaggcagacaagagtttgcctgaaaaactttactccttttgggccataaacatgctaaacatcttgccctttttgacctagctaccaggaagatcaaggcaaaattttaaatttagcttgattaggtaggagcttataccctgcacttctatagtaaaggcaatttcaaaaggttactgctctcattctgatgtaaatatcaattccccaattcagagactgaagggactttagcagttagtgtcacaactaactccagagtccaagctcatgccagtttacaacatattcttcctagatcgccaaaggtattgtttacctgggcatgctctaatgcagaagccagtaaactttctctgtaaagaaacaatcaggtctgggcacgatgggtcacacctgtaatcccagcactttgggaggctgaggcaggcggatcacgaggtcaagagatcaagaccatcctggccaagatggtgaaaccctgtctgtactaaaaatacaaaatattagctggccgtggtggcatgcgcctgtagtcccagctactcagagggctgagggaagagaattgcttgaacccagaaggtggaggttgcagtgagccaggattgcaccactccactccagcctagtggcagagggagattatgtctaaaaaaaaaaaaaaaagcaccagtcagtaaatatgtaaatatttcagactttgtggtgatctcaactccactaaattctatagctatagcataaaaacagccacagacagaaattcagaataattcaatgcatgaatgtgactacgctccaaaaaatacatatggacaccaaaatttgaattttataggatttctgtatgtcacaaaatattatttctctttgatttttgcataaactcttaaaaagagtaaatacccattcttagtttgtgaggcatccaaaaatagacagtgggctggatgtggttcatagaccatcattgcccatccctggtatacagaaatatgtggagaaggaagaagaagagataaacgttcttggggataatgtattcttctgtagatggatacaaaagatgattaatataacattgttaagctaaatgaacttataattaaatcaaaatcttttctccttagaacatgtgatttttgtaagcacaagcaagactgaggccaatcgcatttactaggctagagtaaggatttgcacacagactgacccttgtgaatcttgtttagca

SEQ ID NO: 54453 - DNA, 783 bp, Homo sapiens
gaattacaggcttgagtcaccaagcctggccaaaagtgacattcttaggaacacctttcaatctgaattatataataaaaggattataaaataatcattttgatttttttttttttttgagtcttgctctgtcgcccaggctggagtgcagtggcgcgatctcggctcactgcaagctctgcctccctggttcacgcccttctcctgcctcagcctcccgagtagctgggcctacaggtgcccgccaccacgccctgctaattttgtttttgtattttcagtagagacggggtttcactgtgttagccaggatggtgttgatctcctgacctcatgatgcgcccacctcagcctcccaaagtgctggcattacaggcgtgagccaccgtgcccggccatcattttgattttataaaaacccagaccttaaactttgttactcatgcctgtgattaaaagtttgccatgcctcaggttttttttttttkttttaattatagcacagcaggagggtgttgggaggtgcctggaaaccctggctgacttgtcaggccatcagcctgctgccttgactgcgatactggatggaatgggtccaaggtctccatgtttcttggtgtttctactttctttatcttcgacgctggttctttatctctaaggacacagataataggcagccaagtttgcctgaacagacttttttggcagttttcaaccttgttttctggacgggaagaagagggtggtaaaaagcctaccatacttgccgactgaaaggga

SEQ ID NO: 54454 - DNA, 617 bp, Homo sapiens
attaacccttttaatggacattttaatatgtttcccaaccaaaaccactaatgcttggagctacagttttgattaaaataagaactgagaatattttacaagtttagatattaaaagaactcacaagaatgcacaaatcatactcttgcaaagcttttggctgggtgcggtggctcacgcctgtaatcccagaactttgggaggctgaggcaggtggatcatgaggtcaggagttcgagaccagccaggccaacagagtgaaaccytatctctactaaaaatacacaaattagccaggcatggtggcgcatgcctgtagtcccagctacttgggaggctgaggtggcagaattgattgaacctgggaggcgaaggttgcggtgagctgagatcaggccactgcactccagcctgggcaacagagcgagactccatctcaaataaataaataaataagtaaagcttttatttaaaggctaatatttggtgcagccaaagatacagaataggcaagcccaaggattctgagagtctttcaggagtaaaacttccacagtcattttgtgtacatatagacatgttttgtttctaatgtaaatcaccatctgtgtcatgca

SEQ ID NO: 54455 - DNA, 617 bp, Homo sapiens
attaacccttttaatggacattttaatatgtttcccaaccaaaaccactaatgcttggagctacagttttgattaaaataagaactgagaatattttacaagtttagatattaaaagaactcacaagaatgcacaaatcatactcttgcaaagcttttggctgggtgcggtggctcacgcctgtaatcccagaactttgggaggctgaggcaggtggatcatgaggtcaggagttcgagaccagccaggccaacagagtgaaaccttatctctactaaaaatacacaaattagcyaggcatggtggcgcatgcctgtagtcccagctacttgggaggctgaggtggcagaattgattgaacctgggaggcgaaggttgcggtgagctgagatcaggccactgcactccagcctgggcaacagagcgagactccatctcaaataaataaataaataagtaaagcttttatttaaaggctaatatttggtgcagccaaagatacagaataggcaagcccaaggattctgagagtctttcaggagtaaaacttccacagtcattttgtgtacatatagacatgttttgtttctaatgtaaatcaccatctgtgtcatgca

SEQ ID NO: 54456 - DNA, 617 bp, Homo sapiens
attaacccttttaatggacattttaatatgtttcccaaccaaaaccactaatgcttggagctacagttttgattaaaataagaactgagaatattttacaagtttagatattaaaagaactcacaagaatgcacaaatcatactcttgcaaagcttttggctgggtgcggtggctcacgcctgtaatcccagaactttgggaggctgaggcaggtggatcatgaggtcaggagttcgagaccagccaggccaacagagtgaaaccttatctctactaaaaatacacaaattagccrggcatggtggcgcatgcctgtagtcccagctacttgggaggctgaggtggcagaattgattgaacctgggaggcgaaggttgcggtgagctgagatcaggccactgcactccagcctgggcaacagagcgagactccatctcaaataaataaataaataagtaaagcttttatttaaaggctaatatttggtgcagccaaagatacagaataggcaagcccaaggattctgagagtctttcaggagtaaaacttccacagtcattttgtgtacatatagacatgttttgtttctaatgtaaatcaccatctgtgtcatgca

SEQ ID NO: 54457 - DNA, 617 bp, Homo sapiens
attaacccttttaatggacattttaatatgtttcccaaccaaaaccactaatgcttggagctacagttttgattaaaataagaactgagaatattttacaagtttagatattaaaagaactcacaagaatgcacaaatcatactcttgcaaagcttttggctgggtgcggtggctcacgcctgtaatcccagaactttgggaggctgaggcaggtggatcatgaggtcaggagttcgagaccagccaggccaacagagtgaaaccttatctctactaaaaatacacaaattagccaggcatggtggcgcaygcctgtagtcccagctacttgggaggctgaggtggcagaattgattgaacctgggaggcgaaggttgcggtgagctgagatcaggccactgcactccagcctgggcaacagagcgagactccatctcaaataaataaataaataagtaaagcttttatttaaaggctaatatttggtgcagccaaagatacagaataggcaagcccaaggattctgagagtctttcaggagtaaaacttccacagtcattttgtgtacatatagacatgttttgtttctaatgtaaatcaccatctgtgtcatgca

SEQ ID NO: 54458 - DNA, 621 bp, Homo sapiens
gatttgtcaacaagccattctcttttttttttgagatggattctcactctttcgcccaggctggagtacagtggcagcaatctcggctcactgcagcttctgcctcctaggttcaagcaattctcctgcctcagcctcccaagtagctggcaytcgccaccacacctggttagcttttgtatttttagcagagacgaggtttcccatgttggccaggctggtctcaaacccctgacctcaagtgatccgcccgcctcagcctcccaaagtgctgggattacagacgtgagccactgtgcccagccttgccattctcttcaattctttctgtcccttctttctatttctatgttcccccttttttttttttttttgttttgagacagttttgctcttgtcgcccaggctggagtgcaatggtgatctccactcactgcaacctccatctcccgtgttccagtgattctcctgcctcagcatcttcagtagctgggactacaagcacacaccaccatgcccggttaattttttattttttagtagagacagggtttcaccatgttggctgggctagtctcaaactcctgacctcaggtgatcagcctgcctcggcttcccaaa

SEQ ID NO: 54459 - DNA, 621 bp, Homo sapiens
gatttgtcaacaagccattctcttttttttttgagatggattctcactctttcgcccaggctggagtacagtggcagcaatctcggctcactgcagcttctgcctcctaggttcaagcaattctcctgcctcagcctcccaagtagctggcactcgccaccacacctggttagcttttgtatttttagcagagacgaggtttcccatgttggccaggctggtctcaaacccctgacctcaagtgatccgcccgcctcagcctcccaaagtgctgggattacagacgtgagccactgtgcccagccttgccattctcttcaattctttctgtcccttctttctatttctatgttcccccytttttttttttttttgttttgagacagttttgctcttgtcgcccaggctggagtgcaatggtgatctccactcactgcaacctccatctcccgtgttccagtgattctcctgcctcagcatcttcagtagctgggactacaagcacacaccaccatgcccggttaattttttattttttagtagagacagggtttcaccatgttggctgggctagtctcaaactcctgacctcaggtgatcagcctgcctcggcttcccaaa

SEQ ID NO: 54460 - DNA, 554 bp, Homo sapiens
ggagaggggctatatattttgattttttgaaatccctttgagaccttgaagtaaagggtactcaaatgtcacatttttcagtggctgaatttggagttataactactagaggacaaatcttttagatttaatacttgtagcagccctcagtagtaagtgctttctgctatcactttttaattttttttttaatttattactgctccttgcagagcagggctactctatatgtagtgtgtccagagtagcctgctatcasttttgagatgagctgcagcaccataatgtctagtttaaagaaactggctctttactgctactgttcaaggcatatggtaggtttcaattgttcccagattccaaggtgaaaaatgtaagaagcccatatggaatcagaaaacatttgttggtcttacaatcattcccatatgcacccacaactaaaaaccctgcaaagatgaagacaacacttcaggctttcaaagattagcctctccgctactggtgtaactacacccagttgacagacattaagtgaacatcaacacacgcca

SEQ ID NO: 54461 - DNA, 607 bp, Homo sapiens
ttagtgtttgagagactgttaaagatttttttgtaatttgtaatgattatgaggtttggatactcgtagaaaatgttcaagttccctttcttagttttactaatgggtagtttgtcactagcagtaatgaaaaaataactgagtataaatacagttactccttttgcctttttctgtatgattttctttagtaaaagagtaagctgagaggacggaaaaatggggagtcattttttaatgggtatggagtttcagatttgcaagatgaaaaagttctgtagatctgattaacaataatgtgaatatacttaacactacaaactacacttaaacagtgaatatgttatgtgtcttttaccacaataaaagataatgaataacaaaaaaaataggctagacattgaaatttgaaaaaagaaacattaattttatagtttcttttttgagtaagacttagggattcttttcttttcttttcttttyttttttttttgtagagatgggagtctcgctctgtcacctaggctggagtgcagtggcacaatgtcagctaactgcaacctccacctcccaggttcaagtgattctcttgcctcaggttcccgag

SEQ ID NO: 54462 - DNA, 973 bp, Homo sapiens
ccagcataataggaatggagcagcctgaacaggaactgagagccaaaagcctcaggcaggtgtgtaagcttgagtgttcctggcagggagtcatgtctgatcagcacagtgtctgagccctggatagcgtcagcctgaggtcaccctccaagaccccttggtcccctagtctggcatggctggtacaggtaaggtgggggtgcacaggtggtgatgacatctgtgctcgcccctctggtaggggttcgggggcagcccaatggaggagtcaggttgcatcagaattccagctagctcccgtgtaacatgttacagaaaggtgcagctccagcatcccacccctctgccctgtgggagaaagaaaagggcactgcaaatgcattgcaggagggacgtttaacccgcttgcaagatccaattatcttcaagggcttagcatatctatgttacttaccaatgtgctaattgtgtgctgttcttatctattcataagagtgggtccctatcatgatggtctactggataactgttgctgagctatsataaagctattctcccagtatcagactagacaggataccctggcttcctcccccacagttaaagaggatggagtggctctgagtggggctctggggactcaaaagtcccttgcagaaggtgctcttatcttttccattttgcaccaatgtgcacctctactttaacaagggctctctccaccatctcctatatggttcccccagccacctttgtgaagttccaccagtatctcatgtccttcattcccacttctaggtgacccagctctattccatttcaagtgaaattccatgtgaaatcctccctccttccagaagccttttccttttttttttttttttttttaaatggagttttgctctgtcgccaggctggagtgcagtggtgcaatctcagctcactgcaacctccacctcctgggttcaagtga

SEQ ID NO: 54463 - DNA, 553 bp, Homo sapiens
tgggcaaaataattgaaggagaattggaagaagtttttatgtggcttttctattgataaaagccaagggcaccatttcaataactcaataaaggttaaactaagtgtgattcaacttcctgatgacttaacactttagataaagactagaggtgtggtgacaccaaccttcacttaacttggataaagagttccttctcagtctgcttttgacatgagctaaagagaagataagtttttgttaccctagtaagagcatatttgtccrtataatctggaaataaggttagatagggctatcttgataatgcaagtgtaataatctcttgaatatctccatatatattttttgtattttactgtatttgtcttctaatcaatcaggatcatccatttgcctttgaaaaactgggatacttgaagcagaagtacaatgagaaacaaagaaagggtaataagagttgggtatacaaaacaggattcgtgagtcacaagaatatctagttttcaaatccataatttagagaaagggaacataagggaacatgatattc

SEQ ID NO: 54464 - DNA, 582 bp, Homo sapiens
tgagaactcactgtcatgagaatagcatgggaaatctcgccccaatgattcaatcacctccctccctggacacatggggattataatccgagatgagatttgggtggggacacagaatcaaaccatattacactcctatgatttcatttcaaaagcagctattccagcttcaccacctacttctgtatttttccctatcgcaaactcccaaatgtttttttagacttatagccatatgatttcaggttctagaaaaggggaaaatacagactcaaggtctattgaaagattaacattaactaaaacttgttagrgaagaattcattgttactatttctgttcttatttcaccaaatactcaactacacaggtatttatctaaaacagaccactttatgaacttgaaaggaaatgaatctcttaatgaaatgcaagttccatgttattacagagtgttattttctcatcaaaatttcttccaattcattatccagtgtcagaggagttgtagctattttggggtttgggcatgtcaatatgtcaaaccctgtatgctgattttaagctccactataatgtata

SEQ ID NO: 54465 - DNA, 536 bp, Homo sapiens
tttttcttttttttttgggacggtgtctcgctctgtcgcccaggctggagtgcagtggcaygattttggctcactgtaagctccgcctcctgggttcacgccattctcctgcctcagcttcccaagtagctgggactacaggcgcccgccaccgtgcccagctagttttttgtatttttagtagagctggggtttcaccgtgttagccaggatggtctgggtctcctgacctcgtgatctgcctgcctcggcctcccaaagtgctgggattacaggtgtgagccaccacacccagccagaacatcaattttcactgcaagtagattaatttcttacaatattatttaggcttttgaagttgtaagaataatagtcaacatttaccctggataaaaatttaatatgtttttcacattgcttctattaattttatattttttcttttcaaattaattagaggtatatcttgaatatattgcaagtttgattccaggctaccacaataaaacaactatcacagtaaagtaagtcacaca

SEQ ID NO: 54466 - DNA, 536 bp, Homo sapiens
tttttcttttttttttgggacggtgtctcgctctgtcgcccaggctggagtgcagtggcatgattttggctcactgtaagctccgcctcctgggttcacgccattctcctgcctcagcttcccaagtagctgggactacaggcgcccgccaccktgcccagctagttttttgtatttttagtagagctggggtttcaccgtgttagccaggatggtctgggtctcctgacctcgtgatctgcctgcctcggcctcccaaagtgctgggattacaggtgtgagccaccacacccagccagaacatcaattttcactgcaagtagattaatttcttacaatattatttaggcttttgaagttgtaagaataatagtcaacatttaccctggataaaaatttaatatgtttttcacattgcttctattaattttatattttttcttttcaaattaattagaggtatatcttgaatatattgcaagtttgattccaggctaccacaataaaacaactatcacagtaaagtaagtcacaca

SEQ ID NO: 54467 - DNA, 536 bp, Homo sapiens
tttttcttttttttttgggacggtgtctcgctctgtcgcccaggctggagtgcagtggcatgattttggctcactgtaagctccgcctcctgggttcacgccattctcctgcctcagcttcccaagtagctgggactacaggcgcccgccaccgtgcccagctagttttttgtatttttagtagagctggggtttcaccgtgttagccaggatggtctgggtctcctgacctcgtgatctgcctgcctcggcctcccaaagtgctgggattacaggtgtgagccaccacacccagccagaacatcaattttcactgcaagtagattaatttcttacaatattatttaggyttttgaagttgtaagaataatagtcaacatttaccctggataaaaatttaatatgtttttcacattgcttctattaattttatattttttcttttcaaattaattagaggtatatcttgaatatattgcaagtttgattccaggctaccacaataaaacaactatcacagtaaagtaagtcacaca

SEQ ID NO: 54468 - DNA, 569 bp, Homo sapiens
tccgggcacccctggcctgctccaggacrtgctcctgccaccagagaaagcccctaggcagcgtcccaggtgctggtggtgtcagaatcgagtttgagtctgaggagtgacctggggctggctgggctaggcagcatcacggggttctgcagcccaactgcacatcaggctggtgacagtcacgcagcctattacctcatgtgtcatcagaggatcgctagaacacagcacttcaagtgtgcagatttagtgagccatagtctaaagacaaatagagccactgaatcctaaatttcaatcaatcatctccattactcgtcttattggtattaatcctttgaaattatgtggggtgggagttaaagctaataactaattatgttaatgctaaaactaagatttttctggcaagggaaaatcctcccaagtcccagcactttgggaggccgaggtgggcagatggctgaggtcaggagtttgagaacagcctggccaacatgggggaaacgcccctttctacttaaaatggaaaaaattaacttgggcctgggggggcaggtggccctgta

SEQ ID NO: 54469 - DNA, 569 bp, Homo sapiens
tccgggcacccctggcctgctccaggacgtgctsctgccaccagagaaagcccctaggcagcgtcccaggtgctggtggtgtcagaatcgagtttgagtctgaggagtgacctggggctggctgggctaggcagcatcacggggttctgcagcccaactgcacatcaggctggtgacagtcacgcagcctattacctcatgtgtcatcagaggatcgctagaacacagcacttcaagtgtgcagatttagtgagccatagtctaaagacaaatagagccactgaatcctaaatttcaatcaatcatctccattactcgtcttattggtattaatcctttgaaattatgtggggtgggagttaaagctaataactaattatgttaatgctaaaactaagatttttctggcaagggaaaatcctcccaagtcccagcactttgggaggccgaggtgggcagatggctgaggtcaggagtttgagaacagcctggccaacatgggggaaacgcccctttctacttaaaatggaaaaaattaacttgggcctgggggggcaggtggccctgta

SEQ ID NO: 54470 - DNA, 569 bp, Homo sapiens
tccgggcacccctggcctgctccaggacgtgctcctgccaccagagaaagcccctaggcagcgtcccrggtgctggtggtgtcagaatcgagtttgagtctgaggagtgacctggggctggctgggctaggcagcatcacggggttctgcagcccaactgcacatcaggctggtgacagtcacgcagcctattacctcatgtgtcatcagaggatcgctagaacacagcacttcaagtgtgcagatttagtgagccatagtctaaagacaaatagagccactgaatcctaaatttcaatcaatcatctccattactcgtcttattggtattaatcctttgaaattatgtggggtgggagttaaagctaataactaattatgttaatgctaaaactaagatttttctggcaagggaaaatcctcccaagtcccagcactttgggaggccgaggtgggcagatggctgaggtcaggagtttgagaacagcctggccaacatgggggaaacgcccctttctacttaaaatggaaaaaattaacttgggcctgggggggcaggtggccctgta

SEQ ID NO: 54471 - DNA, 622 bp, Homo sapiens
gaagaagggaaggaagaaaaaatatggaagaaaggaagaatttcttttagagtagtggaaagctgtcaaaatctgcttaagaaaaccgtttgtataaaatgttttgtcttgccctccaaagctcaaagtctctggtcctgctgatggctttcctatctagaatatacagatcttccacaaattgaaaaactaaaatatagaaatatattttgtacaggtggyggatttgaaatgttttatcaaggctaaaacaggatgtatatcattataatacttttccttcacattctgctctgaatttgctcagtcagcaccattccacttaataaggcttagatcaaatcaaatcaaactttgatttgaatattacagaagagaacacatggtaggagcttgtatattctctgtctctcttactctctctcatgtctgagagagaataccttggggttgaccagctagacagtttatgagaaggtagtatctccctgttttcattctccaggaatactgaacagtgtattattgaattatatttgattaaaatatactgatggaaaagagcacttcagagtgtccaaaatggaagtaaatgtaaatctttttataatttataaatacc

SEQ ID NO: 54472 - DNA, 622 bp, Homo sapiens
gaagaagggaaggaagaaaaaatatggaagaaaggaagaatttcttttagagtagtggaaagctgtcaaaatctgcttaagaaaaccgtttgtataaaatgttttgtcttgccctccaaagctcaaagtctctggtcctgctgatggctttcctatctagaatatacagatcttccacaaattgaaaaactaaaatatagaaatatattttgtacaggtggcggatttgaaatgttttatcaaggctaaaacaggatgtatatcattataatacttttccttcacattctgctctgaatttgctcagtcagcaccattccacttaataaggcttagatcaaatcaaatcaaactttgatttgaatattacagaagagaacacatggtaggagcttgtatattctctgtctctcttactcyctctcatgtctgagagagaataccttggggttgaccagctagacagtttatgagaaggtagtatctccctgttttcattctccaggaatactgaacagtgtattattgaattatatttgattaaaatatactgatggaaaagagcacttcagagtgtccaaaatggaagtaaatgtaaatctttttataatttataaatacc

SEQ ID NO: 54473 - DNA, 622 bp, Homo sapiens
gaagaagggaaggaagaaaaaatatggaagaaaggaagaatttcttttagagtagtggaaagctgtcaaaatctgcttaagaaaaccgtttgtataaaatgttttgtcttgccctccaaagctcaaagtctctggtcctgctgatggctttcctatctagaatatacagatcttccacaaattgaaaaactaaaatatagaaatatattttgtacaggtggcggatttgaaatgttttatcaaggctaaaacaggatgtatatcattataatacttttccttcacattctgctctgaatttgctcagtcagcaccattccacttaataaggcttagatcaaatcaaatcaaactttgatttgaatattacagaagagaacacatggtaggagcttgtatattctctgtctctcttactctytctcatgtctgagagagaataccttggggttgaccagctagacagtttatgagaaggtagtatctccctgttttcattctccaggaatactgaacagtgtattattgaattatatttgattaaaatatactgatggaaaagagcacttcagagtgtccaaaatggaagtaaatgtaaatctttttataatttataaatacc

SEQ ID NO: 54474 - DNA, 639 bp, Homo sapiens
tggggattattcttttcctgaatttgggtaaagaaaaaaaaagtcaatggaattatcacaaactcaaaggttaagaaggaaatgcataacactgtcttcaggaatcaccttattccagattcaaagagaaacaggaacgaaaagtattctcagttatgaagcagattaggaaacacttcagtaagagaaaaatgaaggaccgcactgctcaagctggaagatgagaggaatctccayaggacaaaagttgcaattttaatggccaggctaaaagagggccaggccaactccagaggacccgagatgcagagacactacttacctacaggcaggcagttaatggtgagagcaattgtgggagcctccctccttgtacctagggcagctgccttggggagttacacagatgtagacagacgtgagaatggagaatcagccccgcatacacccatccttactataacagtttctcagtaacacagataacttagggaagctggtgaggaccactccctgagggaactccatgcccttaagattccacaggaaggtacaggagaggtgagacacaggatactgaagacagtcctgccacaacagcccaggccggattagatgctgcactaacctctgcacaca

SEQ ID NO: 54475 - DNA, 1538 bp, Homo sapiens
tctccaccataccacctttttcttgaagaataaatcaaaatgtggtgccgacaagggaatcaatcctctaggtccaaaataacaaaggatgtaatagagattgttttagctctgatacaaattccaggagcctaaatatgtttatgggaagcaattggatttcttaaagtagctggaagggcttaggactttcacctgtggttttcccactgcctggacatcatggttaacttctatttatccttcaggtcttctacaaaggcttccctggtgccaccaccaccccgctctgaaagttccccttgcatgataccatcctggacatgacccttatcacatgtagaccttgtttttattacttctcagtgttctacaccacaatagactccctggaacccaycagatgaactagaatatagtgaatgctcaaataattgttaaataaatggcaaactgatgaataagtgaatgaatgcttcaatccatctttgtgtttcagtcagtctttggggtctacattaaaattgacaccaaagccctcaaagatcctgagtactgtacaaaaatcataaaacatttgccgttgttactagacacaaatgcaaggacatcatgaccaattctctcttttaaacctaacccaaatttagtggcttaaagctaaactgaacttcaaaaatgattgaaccaagtggattgccatttgtctcactggatgctactcttaatcatgatttgagttaaaaataaacatttcttcttgaaaatgaaaagtataaccatgaaaagaacaatgggaattaaatgaagcacaacagccacgaatataaagtcaaaaatagtcaccagaagggcatacctgggggaacttacgtacagttattttcatgaagaaacactacaaaatcctgttgcttgattaaattgttcaaaacatcacagaatagacaatagcaaaaaatgatgtgtatattgggatggatcaggaacatcaatctccatattatattttaagcttcaacgtttccgtattcatttgctaagaaatcaaaatgacttactgaaatgaaccataaaaaaggaaatttctcctaagaatttagcttttgttgtctacttaatgcctcatacattgtagagagaatcttttccctcttaagatggctttaattcaactagagagaaaattatatatattaattttaatatatgtataatactttaatatatacttagaactgcccttcaccaccacagtgatatctgaaggacaaataaaaaagacaaccactggaattccccatgctgataacctgagtagaaacaaaaatcaaatcaaaacatatactttaccattgattgggattaagaaagaactgctgcttgtgaagcccaaggcagacattattaattaatcacctgtgttcacccccagatgccatctcaatccagtactctaggcagtcacaaccaaccaatcatatatggaaaggtaagaaagactctttgctaattcaattctgtagacaaactaagaa

SEQ ID NO: 54476 - DNA, 1538 bp, Homo sapiens
tctccaccataccacctttttcttgaagaataaatcaaaatgtggtgccgacaagggaatcaatcctctaggtccaaaataacaaaggatgtaatagagattgttttagctctgatacaaattccaggagcctaaatatgtttatgggaagcaattggatttcttaaagtagctggaagggcttaggactttcacctgtggttttcccactgcctggacatcatggttaacttctatttatccttcaggtcttctacaaaggcttccctggtgccaccaccaccccgctctgaaagttccccttgcatgataccatcctggacatgacccttatcacatgtagaccttgtttttattacttctcagtgttctacaccacaatagactccctggaacccatcagatgaactagaatatagtgaatgctcaaataattgttaaataaatggcaaactgatgaataagtgaatgaatgcttcaatccatctttgtgtttcagtcagtctttggggtctacattaaaattgacaccaaagccctcaaagatcctgagtactgtacaaaaatcataaaacatttgccgttgttactagacacaaatgcaaggacatcatgaccaattctctcttttaaacctaacccaaatttagtggcttaaagctaaactgaacttcaaaaatgattgaaccaagtggattgccatttgtctcactggatgctactcttaatcatgatttgagttaaaaataaacatttcttcttgaaaatgaaaagtataaccatgaaaagaacaatgggaattaaatgaagcacaacagccacgaatataaagtcaaaaatagtcaccagaagggcatacctgggggaacttacgtacagttattttcatgaagaaacactacaaaatcctgttgcttgattaaattgttcaaaacatcacagaatagacaatagcaaaaaatgatgtgtatattgggatggatcaggaacatcaatctccatattatattttaagcttcaaygtttccgtattcatttgctaagaaatcaaaatgacttactgaaatgaaccataaaaaaggaaatttctcctaagaatttagcttttgttgtctacttaatgcctcatacattgtagagagaatcttttccctcttaagatggctttaattcaactagagagaaaattatatatattaattttaatatatgtataatactttaatatatacttagaactgcccttcaccaccacagtgatatctgaaggacaaataaaaaagacaaccactggaattccccatgctgataacctgagtagaaacaaaaatcaaatcaaaacatatactttaccattgattgggattaagaaagaactgctgcttgtgaagcccaaggcagacattattaattaatcacctgtgttcacccccagatgccatctcaatccagtactctaggcagtcacaaccaaccaatcatatatggaaaggtaagaaagactctttgctaattcaattctgtagacaaactaagaa

SEQ ID NO: 54477 - DNA, 1538 bp, Homo sapiens
tctccaccataccacctttttcttgaagaataaatcaaaatgtggtgccgacaagggaatcaatcctctaggtccaaaataacaaaggatgtaatagagattgttttagctctgatacaaattccaggagcctaaatatgtttatgggaagcaattggatttcttaaagtagctggaagggcttaggactttcacctgtggttttcccactgcctggacatcatggttaacttctatttatccttcaggtcttctacaaaggcttccctggtgccaccaccaccccgctctgaaagttccccttgcatgataccatcctggacatgacccttatcacatgtagaccttgtttttattacttctcagtgttctacaccacaatagactccctggaacccatcagatgaactagaatatagtgaatgctcaaataattgttaaataaatggcaaactgatgaataagtgaatgaatgcttcaatccatctttgtgtttcagtcagtctttggggtctacattaaaattgacaccaaagccctcaaagatcctgagtactgtacaaaaatcataaaacatttgccgttgttactagacacaaatgcaaggacatcatgaccaattctctcttttaaacctaacccaaatttagtggcttaaagctaaactgaacttcaaaaatgattgaaccaagtggattgccatttgtctcactggatgctactcttaatcatgatttgagttaaaaataaacatttcttcttgaaaatgaaaagtataaccatgaaaagaacaatgggaattaaatgaagcacaacagccacgaatataaagtcaaaaatagtcaccagaagggcatacctgggggaacttacgtacagttattttcatgaagaaacactacaaaatcctgttgcttgattaaattgttcaaaacatcacagaatagacaatagcaaaaaatgatgtgtatattgggatggatcaggaacatcaatctccatattatattttaagcttcaacgtttccgtattcatttgctaagaaatcaaaatgacttactgaaatgaaccataaaaaaggaaatttctcctaagaatttagcttttgttgtctacttaatgcctcatacattgtagagagaatcttttccctcttaagatggctttaattcaactagagagaaaattatatatattaattttaatatatgtataatactttaatatatacttagaactgcccttcaccaccacagtgatatctgaaggacaaataaaaaagacaaccactggaattccccatgctgataacctgagtagaaacaaaaatcaaatcaaaacatatactttaccattgattgggattaagaaagaactgctgcttgtgaagcccaaggsagacattattaattaatcacctgtgttcacccccagatgccatctcaatccagtactctaggcagtcacaaccaaccaatcatatatggaaaggtaagaaagactctttgctaattcaattctgtagacaaactaagaa

SEQ ID NO: 54478 - DNA, 1538 bp, Homo sapiens
tctccaccataccacctttttcttgaagaataaatcaaaatgtggtgccgacaagggaatcaatcctctaggtccaaaataacaaaggatgtaatagagattgttttagctctgatacaaattccaggagcctaaatatgtttatgggaagcaattggatttcttaaagtagctggaagggcttaggactttcacctgtggttttcccactgcctggacatcatggttaacttctatttatccttcaggtcttctacaaaggcttccctggtgccaccaccaccccgctctgaaagttccccttgcatgataccatcctggacatgacccttatcacatgtagaccttgtttttattacttctcagtgttctacaccacaatagactccctggaacccatcagatgaactagaatatagtgaatgctcaaataattgttaaataaatggcaaactgatgaataagtgaatgaatgcttcaatccatctttgtgtttcagtcagtctttggggtctacattaaaattgacaccaaagccctcaaagatcctgagtactgtacaaaaatcataaaacatttgccgttgttactagacacaaatgcaaggacatcatgaccaattctctcttttaaacctaacccaaatttagtggcttaaagctaaactgaacttcaaaaatgattgaaccaagtggattgccatttgtctcactggatgctactcttaatcatgatttgagttaaaaataaacatttcttcttgaaaatgaaaagtataaccatgaaaagaacaatgggaattaaatgaagcacaacagccacgaatataaagtcaaaaatagtcaccagaagggcatacctgggggaacttacgtacagttattttcatgaagaaacactacaaaatcctgttgcttgattaaattgttcaaaacatcacagaatagacaatagcaaaaaatgatgtgtatattgggatggatcaggaacatcaatctccatattatattttaagcttcaacgtttccgtattcatttgctaagaaatcaaaatgacttactgaaatgaaccataaaaaaggaaatttctcctaagaatttagcttttgttgtctacttaatgcctcatacattgtagagagaatcttttccctcttaagatggctttaattcaactagagagaaaattatatatattaattttaatatatgtataatactttaatatatacttagaactgcccttcaccaccacagtgatatctgaaggacaaataaaaaagacaaccactggaattccccatgctgataacctgagtagaaacaaaaatcaaatcaaaacatatactttaccattgattgggattaagaaagaactgctgcttgtgaagcccaaggcagacattattaattaatcacctgtgttcacccccagatgccatctcaatccagtactctaggcagtcacaaccaaycaatcatatatggaaaggtaagaaagactctttgctaattcaattctgtagacaaactaagaa

SEQ ID NO: 54479 - DNA, 582 bp, Homo sapiens
aggggccccacaccatcacagcacacacagcatgggctttgggttcagactacagctgcattccagctccttcactgattaactgcaaggccttggacaagtcactaaatctcactgagtctcgatttttcatgtacaaggtgggtaacaatagacaggactgttctggggaataattgagatsctttctttgagagccaactatctaacaaaatgcctggcactctaacaatcggttctcactctcctacagtccaagttgtggcgtccaataaagtggccactagacacatgtggctatggagcacttgaatgagactaccgcggctgaggaattacaattttaattgtatttaattttaattaaatttaaacactgaagaatcgtaaaatttttttccctcttcaataccattttatcttattttgataagacagcatttcagcttacccattgcattgcataaggcatcgttatgatgctgtagtgcatgtatgggacaccagcattttttctaatattattcacaaacacatcactgattgaatcagtggacagattgactccattcaaatgattat

SEQ ID NO: 54480 - DNA, 793 bp, Homo sapiens
tctatttttagtagagaaaagttttcactactgtgttggtcaggctggtctcgaactcctggcctcaagtgatctgcccacctaggcctcccaaagtgctgagattattggcatgagacaccacacctggccttcaaagactcaaatttttaaaaatggtagttggataaagaagggggatgagatcaatacttcacatcaaaacttctactcctttgagaatcattctaccctatcctttctgtattttctttttttgtgagacagagtctcactctgtcgcccaggctggagtgcagtggtgcgatcatggctcactgcaagctccacctcccaggttcacgccattctcctaactcagcctcccgagtagtcrggactacaggcacctgccaccacgcccggctaattttttgtatttttagtagagacaggatttcaacgcgttagccaggatggtctcgatctcctgacctcgtgatctgccctcctcggcctcccaaaatgctgggattacaggcgtgagccactgtgcctggcccctaactgtattttctatagcttcctttgtagaaagggattttttgactgaatatgaaatgtgatacaagaagatgagaataaaaatgacaaataaggatgcatgattagtaaaaaatcaaatgaaaatgtacagaaacgaaccatatttggggatagagaaataaagtgagctcactttccccatgttaatttttgtggaacaagtagaataaccatatggagatacacagtaccttagtctatgtctaca

SEQ ID NO: 54481 - DNA, 608 bp, Homo sapiens
gcctcccaagtagctgggactacaggcgtgcactaccacacccggctaatttttgtatttttagtagagacagggtttcaccatgttgggcagtatggtctcgatctcttgacctcatgatccgcctgcctcagcctcccaaagcgctgggattacaggtatgagccaccgcgcccgacaaataatttctgtattcctttttaaactcaccattttgtctccctgctttgttaggaaacaaaagccaggtatcataggtactaattcartgcctcttttttatcacttatttgggcaacgtttagaaaaataggcctacatcactgagttttggcctataaaccctccaggtcacactatgttgtgcctttgtccattgttattttgttaaatatcttcggtttatttgctgtgttttagcaattatactaagaatgccaggtcatttcatagcatccagactcttatccccaaatggctctttatatctctgaatctgaccctcctcaactgtcaaaactttcccactgtacttgtagaacttactacccttggcaaaatctcttacaatcttagcctattccagaatgttgccttcaccttttgac

SEQ ID NO: 54482 - DNA, 608 bp, Homo sapiens
gcctcccaagtagctgggactacaggcgtgcactaccacacccggctaatttttgtatttttagtagagacagggtttcaccatgttgggcagtatggtctcgatctcttgacctcatgatccgcctgcctcagcctcccaaagcgctgggattacaggtatgagccaccgcgcccgacaaataatttctgtattcctttttaaactcaccattttgtctccctgctttgttaggaaacaaaagccaggtatcataggtactaattcagtgcctcttttttatcacttatttgggcaacgtttagaaaaataggcctacatcactgagttttggcctataaaccctccaggtcacactatgttgtgcctttgtccattgttattttgttaaatatcttcggtttatttgcygtgttttagcaattatactaagaatgccaggtcatttcatagcatccagactcttatccccaaatggctctttatatctctgaatctgaccctcctcaactgtcaaaactttcccactgtacttgtagaacttactacccttggcaaaatctcttacaatcttagcctattccagaatgttgccttcaccttttgac

SEQ ID NO: 54483 - DNA, 779 bp, Homo sapiens
tgtgactgtgggcagctccccagttttcttctctgaataatgaggcccctccaagggcccttctcaatctgattttctggggcagcatagcccccatgtgcatggtgggcagagaagtctcttggaaacagctctgcccaccagtctgtctcttccagaccacgccactgaagggcgtggtgttcccgtgacagggaggaggcaggcatcactgggaatctcagaacctcatctgatacttgccctggccccatayagacctctcaggaccagccccactccaatgcagggtgcagccccagagccacgtcacataggtgctgggtctcagaaggaagagacctgtaccaaggtcaactgtgtgcccctaggtccatctccttgcctctatgaacctcagtttcctcacccacaaaatgtggatgaatcttgctggccccaagggctccggcacactcagcagcaacccagatgtgaaagtcctttgtgaattgctcccatcaggcataatcatgataattactatctgtaaaacaagggggttggaccagctgatctctgtgggctccttcccagctctgaagctggggatttcttgggtttccaagctgggaatttacacagacgtagggggccaggagaagtcagggtctgtgggactgtgtgtccacaggaacccctgaaaagttgtccccattcatccttttcccccaagccagcctggggcactgggccccagggataggccatggggagggggagctggaagctttagggcc

SEQ ID NO: 54484 - DNA, 779 bp, Homo sapiens
tgtgactgtgggcagctccccagttttcttctctgaataatgaggcccctccaagggcccttctcaatctgattttctggggcagcatagcccccatgtgcatggtgggcagagaagtctcttggaaacagctctgcccaccagtctgtctcttccagaccacgccactgaagggcgtggtgttcccgtgacagggaggaggcaggcatcactgggaatctcagaacctcatctgatacttgccctggccccatatagacctctcaggaccagccccactccaatgcagggtgcagccccagagccacgtcacataggtgctgggtctcagaaggaagagacctgtaccaaggtcaactgtgtgcccctaggtccatctccttgcctctatgaacctcagtttcctcacccacaaaatgtggatgaatcttgctggccccaagggctccggcacactcagcagcaacccagatgtgaaagtcctttgtgaattgctcccatcaggcataatcatgataattactatctgtaaaacragggggttggaccagctgatctctgtgggctccttcccagctctgaagctggggatttcttgggtttccaagctgggaatttacacagacgtagggggccaggagaagtcagggtctgtgggactgtgtgtccacaggaacccctgaaaagttgtccccattcatccttttcccccaagccagcctggggcactgggccccagggataggccatggggagggggagctggaagctttagggcc

SEQ ID NO: 54485 - DNA, 607 bp, Homo sapiens
catgtaatctccatgtaacatttaaaaatgtaaacatcatggggaggtaagcattataaaatatgcactaaattagaccagctaagcaagcaaaccatagttgagaaacatatttttatctggaaaaaaaagtgagtaaactcttaaaggagctagttggcttatctactgaaataattaaattgatggaaaaactaaatgaattatgaaaaagctaaagaaaaaccctaactgtaatagtggaatgagaaagaaaaaagtagagtgaaaaaagagtgagtcacattgagartgttttttactgatacaaacttatgaagcacagtctgttctcaaaaaggttattatctttaagtgttaatgtaaatctattctcaaattataatttattattaataatttatgatgataacactactgacaatttattgaatatttactatgtcaggcattgtgttaatctttttctagacattacttcattgaattctctcaaggattttgtgagactagtatatttatctcaagacatgtcctgacacaggcaccaaggcttaaaaagtttccatgtttgcagtttatgttgagctaagaaattaagattcag

SEQ ID NO: 54486 - DNA, 635 bp, Homo sapiens
atcatcttgctatttcttcttatttatcccatttgcttgttctttttttcttttttgctagctcctctcttttttattgaagtactactccacaatgctgccttctttgagactaagtacccgatgccattttacctccacagtggagataataatattagaccatgtcacatatagtgtaagagtcttacctagtaacttctatttccctccatcatttttatgttttatgaaaatgttattactttcatatatttaattctgcatgtgctaagaactccacactgtactgttatatttgcttgaaccagttatcatttaaagagattaaaaaggtaaaaatgggccgggcgtggtggctcacacctgtaatccccagcactttggaaggccaaggcgggtggatcacctgaggtcaggagttcgagaccagcctggccaacatggtgaaaccccgtctctactaaaaatacaaaaattagccrggcgtggtggcgggcacctgtagtcgtagctacttgggaggctgaggcaggagaatcgcttgaacctgggaggcggaggttgcagtgagctgggatcgcgtcattgcactccagcctgggtgacggaatgacacattgtctcaaaaaaac

SEQ ID NO: 54487 - DNA, 635 bp, Homo sapiens
atcatcttgctatttcttcttatttatcccatttgcttgttctttttttcttttttgctagctcctctcttttttattgaagtactactccacaatgctgccttctttgagactaagtacccgatgccattttacctccacagtggagataataatattagaccatgtcacatatagtgtaagagtcttacctagtaacttctatttccctccatcatttttatgttttatgaaaatgttattactttcatatatttaattctgcatgtgctaagaactccacactgtactgttatatttgcttgaaccagttatcatttaaagagattaaaaaggtaaaaatgggccgggcgtggtggctcacacctgtaatccccagcactttggaaggccaaggcgggtggatcacctgaggtcaggagttcgagaccagcctggccaacatggtgaaaccccgtctctactaaaaatacaaaaattagccaggcgtggtggcgggcacctgtagtcgtagctacttgggaggctgaggcaggagaatcgcttgaacctgggaggcggaggttgcagtgagctgggatcgcgycattgcactccagcctgggtgacggaatgacacattgtctcaaaaaaac

SEQ ID NO: 54488 - DNA, 616 bp, Homo sapiens
atcattcactgtatttgataagctgtccagatgatctcgcctatgactctgaacttttaaacraaattgtattatttttctggtggtcgctgtaataaatttctaaaaagttggtggtttaaaacaacagattattctctcaaagttctgaagtccagaagtcaaaaatacagatagcagcagggctgcactttctccagagacacctaagaaaaatcaagttctacaaaatctacgcactaaaaataacagagtgtatgggacaatagagttggagcagataaattaaagcctgtgcaatgttctaagccatgcactgacaaaaacaataatccacacttgtgagatcacttagaccagacaaacatctcagatgcacaaatgaaatggaatgaaaacaatggaaagctttagctagagcaaggctggtgggtgctgtgacaacaagacccagtggatctacttttaaagtgtgtatgagaggtgatgaaataaagtgaggtctatacagaactggtagtgctctcagggtgcagaagttcattttttaatacaggcaaaagaactcctgctgctaatgtaatcttccctgctgaacattataattccatttcag

SEQ ID NO: 54489 - DNA, 616 bp, Homo sapiens
atcattcactgtatttgataagctgtccagatgatctcgcctatgactctgaacttttaaacaaaattgtattatttttctggtggtcgctgtaataaatttctaaaaagttggtggtttaaaacaacagattattctctcaaagttctgaagtccagaagtcaaaaatacagatagcagcagggctgcactttctccagagacacctaagaaaaatcaagttctacaaaatctacgcactaaaaataacagagtgtatgggacaatagagttggagcagataaattaaagcctgtgcaatgttctaagccatgcactgacaaaamcaataatccacacttgtgagatcacttagaccagacaaacatctcagatgcacaaatgaaatggaatgaaaacaatggaaagctttagctagagcaaggctggtgggtgctgtgacaacaagacccagtggatctacttttaaagtgtgtatgagaggtgatgaaataaagtgaggtctatacagaactggtagtgctctcagggtgcagaagttcattttttaatacaggcaaaagaactcctgctgctaatgtaatcttccctgctgaacattataattccatttcag

SEQ ID NO: 54490 - DNA, 616 bp, Homo sapiens
atcattcactgtatttgataagctgtccagatgatctcgcctatgactctgaacttttaaacaaaattgtattatttttctggtggtcgctgtaataaatttctaaaaagttggtggtttaaaacaacagattattctctcaaagttctgaagtccagaagtcaaaaatacagatagcagcagggctgcactttctccagagacacctaagaaaaatcaagttctacaaaatctacgcactaaaaataacagagtgtatgggacaatagagttggagcagataaattaaagcctgtgcaatgttctaagccatgcactgacaaaaacaataatccacacttgtgagatcacttagaccagacaarcatctcagatgcacaaatgaaatggaatgaaaacaatggaaagctttagctagagcaaggctggtgggtgctgtgacaacaagacccagtggatctacttttaaagtgtgtatgagaggtgatgaaataaagtgaggtctatacagaactggtagtgctctcagggtgcagaagttcattttttaatacaggcaaaagaactcctgctgctaatgtaatcttccctgctgaacattataattccatttcag

SEQ ID NO: 54491 - DNA, 615 bp, Homo sapiens
tgcatttttggtatagagtttatctttggacttggtattacatttttctgatttcttatcacttttaaaaaatgaaaatagcttattaatttttaagttatatcagtaatagccatcaccataatcaagatatgggatattttcataaccctcaaaatgtactctttgtccctctttgcaatccaactgcttctcccctgttccaggcaactaattatctgttctctgtcactatggaattcttttgcctttgataaaattttacataaatatgatacactgtattagcaaaatgaagaacaaaaaccatatgatcatctcagatgtagaaaaagcattgacaaattcaacatccttcacattaaacactctcaacaaattacatatagaaggtacatatatgtacctcaaaataataaaacccatatatacaagcctacagctaacattacagtcaactagcttttccctaagatcaggarcaagacaataatgcccactctcaccattgctatcaacataacactgttaattttaaccagagcaactaggcaagaaaaagaaatacaaggcctccaaatcaaaatgaaagaagttagattgccaatgtttgta

SEQ ID NO: 54492 - DNA, 595 bp, Homo sapiens
atgctgtcctcaagaagggcatattcaccagtgccacttcagatatggccaaagaggatcacaaacaagaaatggctttccagaaggcaagccaaatatcgagatgacagcaaaggtgagattgcctcccagaaagcagaattagtacttgccaagtgagctgagaacccaaacactgccaggatgtatgctttcaccattcctgcccagcaggatttgacaactgggtattgctgggcccaagtcagctgggtaatgctcatttttctctttccagtcttggagttttccatgcaattttatggttcccacttcagacctaaaragtgggttgtttggagagtagagataacttatgttttagtttctagtttgccatatggcagggaccccatccctgttggttgaagagaactgagcaataccctccatcttgaattttgagttagatgtagcaattctgtgagacttagaggttatgcttcttggagaatattctataaatgggaaaactgttccatgttgtgttcatggatagtcaatgaatagactgtgatggaaaatgctagttgtctctcagtattcatgcccacat

SEQ ID NO: 54493 - DNA, 990 bp, Homo sapiens
cttattttgtttttgttttagagacaaagtcttgctctgttgcccaggttggagtgcagtggtgtgatcatagcccactgtagccttgaactcatcatgggctcaagtgatcctcccacctcagcctcccaagtagctggggctacggtacacaccaccacacctggctaatttttaaattttttgtagagacggggtctcactatgttgcccagtctggtctcgaactcctgaactcaagcgatcctcccacctcagcctctcaaactgctgggattacaggtgtgagccactgtacctggcatcctattttgaataaaacattctgtggcaaaaaccagattggcagtgctgatcagatcatccctgagggatttttccagttttagcatttttttgggttatattttgtgaaacttgtcaagggaaaaactctacatgaagcttaattatttcactgatgtacatacaagtattaaggcgtgtttccatccttggactcatgctgcccccgtggaggcatytgagcacagtagctggaggatggatttggacccggatagctgaagctctccataccagctctgccacctgctctgtttctcagctatggaaccctgaattaggtatgcacatccagtcctctttttcctcatctctgaaatgggatgttgggagtgcctcttggtaggctgtcctgactaaattcatgacgtcatctgaataagtcagctcatggcgccctcctcaaaactctcccatgccttctgcagcccacaagccaagcccttgccatggtccacaaggttctaatcatctcctgttgtctccatgaactctctaacctcagaagcctctgctctgctccctccactccagtcacactggcctccttgctgctcttcaaacatgccaggcagcctcctgcctcaggacctctgctccctctgctccctctgcctagaacgttctaccccagatagcccatgg

SEQ ID NO: 54494 - DNA, 586 bp, Homo sapiens
aaatctccagcctgtgctcactcatcatagccaacttcctcaggagyattatggagtgcgagggtggccagctctgacctggggcagcacagggaagggtgcccacatgtgatcaaagctcagtaccctgcccctgcttattccccatgtttggggtccaagtttggaagggacaggttggccagcttgagggggcagcaactcttccctggtgccctcttccagtcccaaggcctgacccatggcctgctgcttgagccatcctgcccatgttccccacctcccctgctgcacaggtgggctctgcctctgacagtccagccccaacaggtgttcagatgaggtgacccgccagctccaggccacagcttcccacaaggtggggcgagatgggattgtggccacgaggctctgcacccaccaggatgatgtggccctcaccaacgagaggcggcttcaggagctgccaggtgagcagggagcctgggctgggcaagaccagctgggaagagttataagcagatgtagcccccaggcaacctgggcctctgggtcctaggcccccaacctctgaagccataaaggc

SEQ ID NO: 54495 - DNA, 546 bp, Homo sapiens
ggcacccagcccctttattattaatagtaattaaaatgttagcaatgatgggttgagctcattgtgacaaatacgtatattttatctacctacttcacattatctgattaacacctcacaatccataggtgatatagttattgttattctaatttacggagatgaaaacagaggtatgaagaggttaatccaaggtcaaactatcactaagtgacagaaaaggaattcaaacccaaggctctcaagcctccaaggtcttaattcagctatcattaatgtttgctcagtaggccagtggtagttgtaaaatagacacaaacattatttcgataatcctccattcaaaaaatagagcttcattttctttctcttgcaggtgggcagcayttagtgatcagtcccagataatactgtatggtagaagtgttggttgtttccaagccaggaagagaggcctggaacagatggttccctcacgtccctcaggaggaaccagccctgccgacaccttgatcttgcacttctggcctccagacctgtgaaact

SEQ ID NO: 54496 - DNA, 546 bp, Homo sapiens
ggcacccagcccctttattattaatagtaattaaaatgttagcaatgatgggttgagctcattgtgacaaatacgtatattttatctacctacttcacattatctgattaacacctcacaatccataggtgatatagttattgttattctaatttacggagatgaaaacagaggtatgaagaggttaatccaaggtcaaactatcactaagtgacagaaaaggaattcaaacccaaggctctcaagcctccaaggtcttaattcagctatcattaatgtttgctcagtaggccagtggtagttgtaaaatagacacaaacattatttcgataatcctccattcaaaaaatagagcttcattttctttctcttgcaggtgggcagcacttagtgatcagtcccagataatactgtatggtagaagtgttggttgtttccaagccaggaagasaggcctggaacagatggttccctcacgtccctcaggaggaaccagccctgccgacaccttgatcttgcacttctggcctccagacctgtgaaact

SEQ ID NO: 54497 - DNA, 602 bp, Homo sapiens
atgcatgaggggaactaaagcaccataatgaactgggagcagaggggaaagatgtgtatcaattatgtgtgaatggaaataaggcagattcaagttgggatgggagaacaggctttctctttctccctcccatctcaaagaagggaatgattgtgcagtggtcataaagttacctgactacagaactcttatctaatgctgtatctcagagagctaatgttcctcttcacacagtttgacaactactgatctggaaatagtggtggtataagtgggagtggttaagagtagaggggtttgtggawagagacattcattaaccaattttatattaccctgtgtgttttttataccctcacctaagtagtgctacccccatttttatctttctctaattttcctgagactagcccaaaatgaaatacatgtgttttctaaaatatgattttaacagagtagatgatataatgcaaagttggaaacaatagatctgaatggttatgataaggtattatcctctctgatagaccaatgctccctaatccagaaccccagcaaggtagggttggctgctaaccaacctcctaggtggctcctaacag

SEQ ID NO: 54498 - DNA, 602 bp, Homo sapiens
atgcatgaggggaactaaagcaccataatgaactgggagcagaggggaaagatgtgtatcaattatgtgtgaatggaaataaggcagattcaagttgggatgggagaacaggctttctctttctccctcccatctcaaagaagggaatgattgtgcagtggtcataaagttacctgactacagaactcttatctaatgctgtatctcagagagctaatgttcctcttcacacagtttgacaactactgatctggaaatagtggtggtataagtgggagtggttaagagtagaggggtttgtggaaagagacattcattaaccaattttatattaccctgtgtgttttttataccctcacctaagtagtgctacccccatttttatctttctctaattttcctgagactagcccaaaatgaaatayatgtgttttctaaaatatgattttaacagagtagatgatataatgcaaagttggaaacaatagatctgaatggttatgataaggtattatcctctctgatagaccaatgctccctaatccagaaccccagcaaggtagggttggctgctaaccaacctcctaggtggctcctaacag

SEQ ID NO: 54499 - DNA, 577 bp, Homo sapiens
cccattgaatcacctaggccatctggagggtagctcccaggagtaacagaattgctgaaagactcaggttactccaggaactttagaaaataaaattaatctctcaaataccatcagatcaccttaatttttcctayctgccctcaggtttttgcaaataaagaagttcagagcttctggattcatatgctcatagttttgccactaaagagaaaaggcttcctaccctcaacctcagttagagaaatcttgaggaaggactctgatgactttagtttcaggcacatgttcatactcaagactagaacaattccaagtcccagagacagtggtaccacaagtggactcacttggatcatgtggacactattggccagttacagtgacttgagagacacagtatgtaggagtggcaacttctactgggacaacttgcagcaggagaggaagaggaatggttgggaggaggagctcaaacctggcatggctcaatgattttgaatctggaaaccctcagttgtatttactatatcactatatggacagttgtatatctataccaatgtagatgtatgca

SEQ ID NO: 54500 - DNA, 592 bp, Homo sapiens
ttttttcatgaggaattaatttggtgtatgctaggagatgcctcactaccgtttattgaaaaatctgggttttattcctcctttctrtagtgccaccaaagtcatgtattatacccgtatgtgaatacagatttcatcaacatctgttgatgaaaagagtcaaactctgtaaatattttcagagattattctgagccaaatatgagtgaccatggcctgtgacccagccctcaggaggtccagagaacatgtgccccaggtggtcagagtacatcttggttttatatagaaggcatgagacatcaaatacgtttaagaaatgcattggtttggttcagaaaggcaggacaactcaaagcgggggcttccagggtataggttaatttaaaacattttctggttgacaattggtcgagtttatctgaagacctgggatcaataggaaggaaatattcaggttaaataagagattgtggagaacaagttttattgtgcagaggaaactctcagcagacttcaaagagagcaggttgtaaagtgtttcttattggacctaaaaggatgcctgggtcttagttgattatctcctgga

SEQ ID NO: 54501 - DNA, 603 bp, Homo sapiens
aaagattggaaagaataaatagaagtgtcttatatgtgcagtggtraaatactaattctagtataagcacaagttcaggacacatattacaattgctagagcaactgtttacaaaattttaaagaaaagaagatattactcaatataatatgcatctgtaaaatatactgatattactcagtagaaacaaggttgttttatgctaggtaatatcacttgaagatcaaaactgaaccttggcttcaaaatatctctaagaaagcatactcagagagattgaactgaaaaccgctacgtttaaataaattcttcaaaaagctgtcaattacaagaaaaaaaaaaggggaagggcaagaatgcacatgctgccttttctggcaggctctctcactacctttactgtctgttacttgctcacagctggtctgtctaatgacatcttcttgcagatgggttaccatcatctgcactgggagttgcagtttccttatggttggtgtgtattaggtcgtcaaacaatgtagggcacttgagagatgcccagggaattcatgcccaattgatgttcagcatgttctggactgtgggcttatatgctgactg

SEQ ID NO: 54502 - DNA, 568 bp, Homo sapiens
gaagattgggaaaaaacacaatcactaatttttttaatttaaattttttaaatttcatccactcaataattcattgggtctatattgaacatgacaatgtgttaatcattacaatgattaatcacacactgtgtttttgagaagttcaaatttttaaccacaagacagataaaaacagataaaataaactgtgccattgcctattttaataaattaaatacattttaagaggtgctattacagagatgtggccaaagtttgttgcagarcagttcactcttgttaaggaagttgaagattttattggaggggtggtatttgagctgaaagttgagagatgagtagatatttttaaggccacgagcagcttaaagagtagaatgagttattccagtcaaaagggacagcatctgcaaaggtatggagttgcaaatgatctgcaacatcttggaagtgtcacgcaagaagagagagacacttaaaatgaggctgtaataatagattaagaatcacattaaagaaatatgtaggctaagatacgaagtttttattttaatcaatagtctga

SEQ ID NO: 54503 - DNA, 568 bp, Homo sapiens
gaagattgggaaaaaacacaatcactaatttttttaatttaaattttttaaatttcatccactcaataattcattgggtctatattgaacatgacaatgtgttaatcattacaatgattaatcacacactgtgtttttgagaagttcaaatttttaaccacaagacagataaaaacagataaaataaactgtgccattgcctattttaataaattaaatacattttaagaggtgctattacagagatgtggccaaagtttgttgcagagcagttcactcttgttaaggaagttgaagattttattggaggggtggtatttgagctgaaagttgagagatgagtagatatttttaaggccacgagcagcttaaagagtagaatgagttattccagtcaaaagggacagcatctgcaaaggtatggagttgcaaaygatctgcaacatcttggaagtgtcacgcaagaagagagagacacttaaaatgaggctgtaataatagattaagaatcacattaaagaaatatgtaggctaagatacgaagtttttattttaatcaatagtctga

SEQ ID NO: 54504 - DNA, 568 bp, Homo sapiens
gaagattgggaaaaaacacaatcactaatttttttaatttaaattttttaaatttcatccactcaataattcattgggtctatattgaacatgacaatgtgttaatcattacaatgattaatcacacactgtgtttttgagaagttcaaatttttaaccacaagacagataaaaacagataaaataaactgtgccattgcctattttaataaattaaatacattttaagaggtgctattacagagatgtggccaaagtttgttgcagagcagttcactcttgttaaggaagttgaagattttattggaggggtggtatttgagctgaaagttgagagatgagtagatatttttaaggccacgagcagcttaaagagtagaatgagttattccagtcaaaagggacagcatctgcaaaggtatggagttgcaaatgatctgcaacatcttggaagtgtcacgcaagaagagagagacacttaaaatgaggctgtaataatagattaagaatcacattaaagaaatatgtakgctaagatacgaagtttttattttaatcaatagtctga

SEQ ID NO: 54505 - DNA, 633 bp, Homo sapiens
caggatccccacgagcactggagtcttagtaaattcttattattggcatttaggcattaccagtaagttatctcatctaaactttatattaccctaaaaagcatgatgctatatttattttgcagatgagaaaactggaactgagaacagttaaattgcccaaagcccacagccaggattccaacgctggcttcatcccacaattgctgtccctgcacactccacctctgagctgtgaaaaaggaggaggtcatctggcttgtggaggggcttatttgaactgtatttgattgaaaactgcatgggctactaaaattgttttcttgggcacagttgtcagaaatgcgtttctgtggaacccagctgtaggcaggggggacattcttgtgtgggatgacagggcatttctcagtcaccccaaagtcccagttctccctttggggttgctactgctcttccctctgtaacctgggcagtatggatgctgttgtatcartgccgtgtaacagtacccaaagctggacagattcagaacagctttcctgctttttgtaattgagtatgcctcaacacagaggagctctttgtagccaagaatgcttttagctttagactgatccaagcgggtccttc

SEQ ID NO: 54506 - DNA, 632 bp, Homo sapiens
cattgtggcacatgcctctagtcccagctacttgcgaggctgaggcaggaagattatttgagcccagaagttcaagtttccagtgagttatgactgggcccctacactctagcctagttgacgaagcaagaccctgcctcttcaggaaaaaaaaaaaaaaaaaaaagaaaaagaaataaataaatatggtatggttttattcatacaagaaaatgtcaactttaggacaagaaattttttgagaaaaagaaaatattttcataakgataaatggttaaatttagtaagaaggcctaacaatgtgaaatgcacatgcaattcaaaacggaaattctaaaggtgttacgcaaactggcagaactagagggaaacataatgaacaaatccataattacacatagggattttcacactcctattttttactgataaaacaagaagacatgaacataagaaagaatagaaaacatttaaacaatattttcaaccagtgaccaaattggtatttatattactcatagacaaggaatgacatttgaaggtcttgggtgtgagactttacaaggtctataatgaagatagggtaataaaaatacagtgagtagaactgaaaagttacggaagtgtgaata

SEQ ID NO: 54507 - DNA, 789 bp, Homo sapiens
tgatctccgtaggaaattattgcaggtcctatgtctgagaattccttctcaagtagaatgaatggaataatggaatgagtttagaactaagaatgaggatttatgggttctaggcttagctctgatgttgacaaattttcaaaaatcaagtataaccttggacaaggagctttctcagtttcagtttccttaactctaagataaaggttctgagctcattgttcaccaaagccctttgtatgtcaagattccttatgtctacctactacytgcactccactacagaccagacaggtggtcttatgctgctatgcatttgaactgtgaggtctggcacaaatggagtttgactgcagctctatgctttccctctccctgtaattttccttttccctttctttaaacctaaagttcttcagcagccagtatattggtaagagtgtgacctcaaaagtcagacatacctgagtgcaaaccccagccatatgattagaaaatttgctgagttttaggcttcttatttctacagttagattattagacaaatactggatactactaaggatgaaatctattaatatatgtgaaataattggtacataggaaaaacttagtaaacaccagcttccttgctttccttccaccttctccaaacacaaaagctgtaaaacatatttgctgtagagccaccacacttcttttaccaggagaacacagagatgcaaatggttaagaaaaaaataattaaaatggattaagatatcgctttcaagcaatgcttacttaaaa

SEQ ID NO: 54508 - DNA, 666 bp, Homo sapiens
ttcctaatagttccatacaatcactattagaccaagcctcgctgaggaatgtcaggaaaagtaaaacagacagccatctctttaaggcacttggaacaatttagtttgacttaatagggtctttctctgggagtcagaatagacgtataagcagctccaccaacattttcggatcttatttgtgttagaaatggcagctgcttttgatcrtgttggtcacagagtcctttcatttgccttgcacataaggttgggctcctacctgatagtatcttgtttctctactctcttaaatgtttctctgcctttgtttcagtttaaacaaatgagaatctggcaataatccatcgaattttgtacttcctgcagtcagcattctgtgcacgtgtcttcagccctggcacttcagttcctgtgtgtgtctcccactgtgcctgtttttaggtgtcatgtatgttatctctgttatatccagctttatcactctatttttgaacagctactaaggaggtcttgcctctataaaaatcacaaatgaagacaacttctttttcatgttaatagaagagaaatcctagacattttatgatcaaaccctacctctttttaaaatgtgtagaaaaacaaagaacttcacttttattgcattgtctgtttcatttttga

SEQ ID NO: 54509 - DNA, 839 bp, Homo sapiens
tacttttaaaatataattttggacatgtagcattatgaataagaaaaattaagtctccatttctgctctaatactcttttaatagatcaaaacaaaacaaaacatgacctatctcaaccaacaatgactttcattaacttcttttcaagagctcttaggaaaggaaagctataaagaggttgctttctattgatagaattttggacatttatgtaagtacaaatgttggttttgacattaaaatattaatgtaattaaaatctaaaatgctcaatgtatataaaaaataaaacttttaaggttctgaggcatttttcccatcttatactttaacagacttttttttwaaaaaaattatatttcaaatatgtttatttgagaactaacattaaagttgagaataattgtaattaaccttttccaccaaaatatttgtggaaatggtttgggaccagtaagtccaaataattgtcctcatctaacccactactttagaaatgagtaaactgaagactttttagtgacaaacacaagaatgtaatgtcagagtcttgccctccacctagtattctttcctttctcatctcccgcattgtctccatctacacaataaatactaagaaaaatgctagttacattgactcaatttttggaagtaaatgctttaaaacttcaaaagcccaagcttttgctttgtttctttaacattgtcccccaccccttgaccaaaaggaaggagctgaaaaacagatttcataatgcatgttcattacagagacagtctataaacccaaattgagtaaaatatgcattatttcatttcaggatttgggtttaat

SEQ ID NO: 54510 - DNA, 351 bp, Homo sapiens
tgtgcctgtaactttgcaggcaccatttggcagctgcagtgcgctaaggtcatctgtggcttggtctctgacatcctaggctcgaattttagcatggccatttactatctttggctctggcaaaatcatttaacttttccaagctcccatttccccttttataacatgggaccaaaaagctgggttggggtgacaaataaatggcaaaacacactgagtatcagtttccctccatctccctgtcctgaccggctcttacttgatattagccagagccttaaaaggtagcttagtcagggccacattgtcatyttcatgggtcccttttgccttcctggttgctctctccaa

SEQ ID NO: 54511 - DNA, 918 bp, Homo sapiens
agagaagcagatgcataatggcaacggcttcccacattaacatcaaatttagtcacggaagccaggcaggggaacacattagagattttccaggttgctgaaccttctcaacaggaagccagggagagacaagggaaaaacacaagtgccctcagagccgctgccggtatcacacatctgtgcagcactcattcattcattcactccttcattcattagacaaagcaaatgcctaaaaagagcccatcacaccattcgagatactcacaatacaaaataaatacaatagagaaaacagcaccattcctagcctgaagtagcccacaaattaatacatattgcaatgtgatgcatgctatgaaataackggggctttcgtcacaaaacttttgtggtcacaaaacttttaaaaagcaggaagactgctactattacacttaaatttgcattttacagatgaggaaattgggtctacaataatttaagagattttccaaaagttataaaaacttttagacaattggtaaaaaccaaatggaagggaggctgggcgcgacagctcacatgtgtaatcccagcactttgggaggcacaaaccatactatttacccatttttataaactttgtattctgaaatgtatgaagacaaaccaagtaacaataaatttcatttaatatggttgaatcaataatagaactgctatcagcttatatacaatcttaaaataccacttcacctggtaactactaaaaggtcaatgatattaatagttaccaaaatgaaatacaaagtggtcaaaagaatttaactaccctcccgagaagctgtctgtacaaactgaaccctaggtaactaacatgaaccgtcaagagttaaaagtcataagcttattttgaaaacattaagacactgaaat

SEQ ID NO: 54512 - DNA, 638 bp, Homo sapiens
aaagtttgtgttggggatgaggaattagccgagcgacgcagatggcgttcataaacccctgctgccaccttgtggtggtgttgagaagcgacagaggtaagcctttctgaactgtgagtctatagtggttagtttcatgtcgtttacttctaacttttaaaaaagcacactagcatcttgagtcttgacacaacagctcattttaatggtgtggcatgcaaaaatgttgccacagaaattttcagttcttactggaagaatctcaagaagagctgtcccatccctatggcatcagccatataggtagaagaacacatagaaaatggtatcatgctaccagaggaggaattcggagaaaaaggaagtgaccactagagtcaatggttacaatagcagtccccggctgggcgaagtggctcacacctgtaatcccagcacttygggaggccaaggcaggaggatcacttgagcccgggagttcaaggcaggagtgagctatgattgcactccagcctgggcaacggagagagactctgtctctaaaaatcaacaaaaacaacaaaaagcacacaatgccatcattttctatctattccctctactcactttattcccttccatggcactttatctacctg

SEQ ID NO: 54513 - DNA, 1504 bp, Homo sapiens
tgagctgagatcgcacaactgcactccagcttagtgccagaacgagatccgtctccaaaaaaaaaaaagagttagatagaatatataacccatatatatatacatacaactagtgtgtatccacagaagttaaaaaaaaaaaaaagatgggcaaacatctgtctcttttaattaaaaatggcttttgttttgccagacaagggagcttctgtcacatacgcagttttcagaatggatgccttcccccagtgtctgaaatgctcccttttcctgttctgggaagccttttctgactcacaaatgttgacaagcaaaggcgtttttgattttgatgctcacagttattataattattataaatttggccaggagtccctatcatctttgaacagctgctttttttttttttttttttttttttttttgagataaagtcttgctctgtcacccaggctggagtgcagtggcacagtcttggcccactgtaacctccgcctcctgggttcaggctattctcctgcctcagcctcccaagtagctgggattatgggcgcctgccaccatgcccagctaatttttgtatttttagaagagatggggtttcggcatgttggctaggctggtctcgaactcctgacctcaagtgatctgcccgcctcagcctcccaaaatgctaggattataggcgtgagccaccgcacctggccatgtttgaggaaacagctttttctttgaggaaacaggctcatctttgtctgccctggcccttgaatctacttattttcccaagagccctagcgtcttttatcgggaaatggttctaagagaccaaaatctgggtgccgctgtcagattgcctttgattctagtcctttaaaaaacagagtaagcaaatatattcaaaaataaagttcatagatttccaatttaagttgtttttcaaaatttctttgattttttttcctcttttccactgaaaaccttaatttttttttttttttttttttttttttttttttttgagatggagtctcgttctgtttacccaggctggagcacagtgacataatctcggctcactgaaacctctgcctcctgggttcatgctagtcttctgcttcagcctcccgagtgactgggattacaggcatgcaccagcacacccggctaatttttcatatttttagtagagatggggtttcaccatgttggccaggctggtcatgaactcctgatctcaagtgatttacctgccttggcctgccaaatgctgggattacgggtgtgagccaccatggccggcctaaaaccttaatttctragaacatttaatactttatcataaacatgttttattgtatttacactgctttattgtgcaacatgaagtagttctaaaattgtgagagtgttatcaataccgataaatattttatttttcattatagtatattctattaatgatatgtagttcaaaagtcccttgacatacttttctttgtat

SEQ ID NO: 54514 - DNA, 1504 bp, Homo sapiens
tgagctgagatcgcacaactgcactccagcttagtgccagaacgagatccgtctccaaaaaaaaaaaagagttagatagaatatataacccatatatatatacatacaactagtgtgtatccacagaagttaaaaaaaaaaaaaagatgggcaaacatctgtctcttttaattaaaaatggcttttgttttgccagacaagggagcttctgtcacatacgcagttttcagaatggatgccttcccccagtgtctgaaatgctcccttttcctgttctgggaagccttttctgactcacaaatgttgacaagcaaaggcgtttttgattttgatgctcacagttattataattattataaatttggccaggagtccctatcatctttgaacagctgctttttttttttttttttttttttttttttgagataaagtcttgctctgtcacccaggctggagtgcagtggcacagtcttggcccactgtaacctccgcctcctgggttcaggctattctcctgcctcagcctcccaagtagctgggattatgggcgcctgccaccatgcccagctaatttttgtatttttagaagagatggggtttcggcatgttggctaggctggtctcgaactcctgacctcaagtgatctgcccgcctcagcctcccaaaatgctaggattataggcgtgagccaccgcacctggccatgtttgaggaaacagctttttctttgaggaaacaggctcatctttgtctgccctggcccttgaatctacttattttcccaagagccctagcgtcttttatcgggaaatggttctaagagaccaaaatctgggtgccgctgtcagattgcctttgattctagtcctttaaaaaacagagtaagcaaatatattcaaaaataaagttcatagatttccaatttaagttgtttttcaaaatttctttgattttttttcctcttttccactgaaaaccttaatttttttttttttttttttttttttttttttttttgagatggagtctcgttctgtttacccaggctggagcacagtgacataatctcggctcactgaaacctctgcctcctgggttcatgctagtcttctgcttcagcctcccgagtgactgggattacaggcatgcaccagcacacccggctaatttttcatatttttagtagagatggggtttcaccatgttggccaggctggtcatgaactcctgatctcaagtgatttacctgccttggcctgccaaatgctgggattacgggtgtgagccaccatggccggcctaaaaccttaatttctgagaacatttaatactttatcataaacatgttttattgtatttacaytgctttattgtgcaacatgaagtagttctaaaattgtgagagtgttatcaataccgataaatattttatttttcattatagtatattctattaatgatatgtagttcaaaagtcccttgacatacttttctttgtat

SEQ ID NO: 54515 - DNA, 1889 bp, Homo sapiens
cttcctaagtatttgataattacttatggtcttgagccaccagaaccgccaaccctctgagacagcaactcccagaaaagagtgcagaatggggtggaaatgtgagggaaatattaaatggtgtgctgccctgcatctccccagtcagggacatcacaatggcttgaaataggtcctggtagaagtatttacaccacctgaataagcaaatcagagctggggttgggggcaggaagatgagcccttgtacacagctacctgcctggcagggatgtggagatcaggttctggggctgcagttacaagaggaagaggctgtcttccagcaaacagtagaaaaatcgggccaggcttcctccatgaaattatctcatttgacccttgaccaaaccctggactggggactggcataggaggccgagtgagtatcagstggagaagatgcaatcgcaccttatgttcccatctagtttggagaacagcccaaggagtttttcaggctctagacctcaagatccttcttacctctccgcagaatcaacttctttctctgacaagggagaaaggcaaggagaggagggaggctttgctactctctcctgatacctagaaaatctttctggagccaaagggctctgagttgagtttgcaagaggggaggacaaagaagggagtgtgtgatgattttaagcataaaggggatgatgtgggagaattttggaattttttttagggaagtggctgttcaagggaagaactctattgtccaaggagagaaaaggctgggactggtccatcagtgaagagcactttttgcccattatcttctccccataaaggatccactcttggaagcgccccctggggccttggaacatgaagatggctcagatgcccataattccagtgaggcctctccttgattgggacacaaggagctgaaattcattatgtgaatgagtgagagatgggtgtttatactctgcaaatgaaagagagtgtatgggtatgggaggactgtgtgtgagacagggagttcaagcttacaaaggccctgtgtgtttgagcgttcaaagagggcctataattaaagagaaacgcagacaaccaacagcaatgataagtcatttatttggggcaagcaattgttttactacacccggcagttttaaaggtggattgcaaggttttcaacggcactttactttcattctgacccatggggggtggcaagggctgcagcatgtcagtcaagatggcagggacctgacacaggaagtccctcccacttagtgctccccctgccccaatcacagcccagctattctcacccctgagcacagaaactggccatgtggatttgctcaaagggattagcatgtattgcaggcttagtatgtgctaaacattgcaccaagagttatatgtgcattctcgtatttaatgcttgactgtcccctcttggaagcctgtggttccatccaatcacttttgccagggaattgaggatctagggatatgttgagcacttgagtagaggtgatactcaggattggcactccacttctatcactgatctgattctctgactcgtctgtcaaaagagaaggggttatcctagctcagaggtcttcagccagagaactgcatccaaaatctgtggtctagataatacctaagataacgaccaggtcaaatattacatgactgattgaggcctatggaagggaacatagtacagtgatttagagcccatggtcagagggccctgtgtgcatgcctccaccagatcttagctgtgcaatcttgggtaaattactgtacctctctaagcctcacttttctcattattaaaatggggatacaaattctacccactgcctggacta

SEQ ID NO: 54516 - DNA, 1889 bp, Homo sapiens
cttcctaagtatttgataattacttatggtcttgagccaccagaaccgccaaccctctgagacagcaactcccagaaaagagtgcagaatggggtggaaatgtgagggaaatattaaatggtgtgctgccctgcatctccccagtcagggacatcacaatggcttgaaataggtcctggtagaagtatttacaccacctgaataagcaaatcagagctggggttgggggcaggaagatgagcccttgtacacagctacctgcctggcagggatgtggagatcaggttctggggctgcagttacaagaggaagaggctgtcttccagcaaacagtagaaaaatcgggccaggcttcctccatgaaattatctcatttgacccttgaccaaaccctggactggggactggcataggaggccgagtgagtatcagctggagaagatgcaatcgcaccttatgttcccatctagtttggagaacagcccaaggagtttttcaggctctagacctcaagatccttcttacctctccrcagaatcaacttctttctctgacaagggagaaaggcaaggagaggagggaggctttgctactctctcctgatacctagaaaatctttctggagccaaagggctctgagttgagtttgcaagaggggaggacaaagaagggagtgtgtgatgattttaagcataaaggggatgatgtgggagaattttggaattttttttagggaagtggctgttcaagggaagaactctattgtccaaggagagaaaaggctgggactggtccatcagtgaagagcactttttgcccattatcttctccccataaaggatccactcttggaagcgccccctggggccttggaacatgaagatggctcagatgcccataattccagtgaggcctctccttgattgggacacaaggagctgaaattcattatgtgaatgagtgagagatgggtgtttatactctgcaaatgaaagagagtgtatgggtatgggaggactgtgtgtgagacagggagttcaagcttacaaaggccctgtgtgtttgagcgttcaaagagggcctataattaaagagaaacgcagacaaccaacagcaatgataagtcatttatttggggcaagcaattgttttactacacccggcagttttaaaggtggattgcaaggttttcaacggcactttactttcattctgacccatggggggtggcaagggctgcagcatgtcagtcaagatggcagggacctgacacaggaagtccctcccacttagtgctccccctgccccaatcacagcccagctattctcacccctgagcacagaaactggccatgtggatttgctcaaagggattagcatgtattgcaggcttagtatgtgctaaacattgcaccaagagttatatgtgcattctcgtatttaatgcttgactgtcccctcttggaagcctgtggttccatccaatcacttttgccagggaattgaggatctagggatatgttgagcacttgagtagaggtgatactcaggattggcactccacttctatcactgatctgattctctgactcgtctgtcaaaagagaaggggttatcctagctcagaggtcttcagccagagaactgcatccaaaatctgtggtctagataatacctaagataacgaccaggtcaaatattacatgactgattgaggcctatggaagggaacatagtacagtgatttagagcccatggtcagagggccctgtgtgcatgcctccaccagatcttagctgtgcaatcttgggtaaattactgtacctctctaagcctcacttttctcattattaaaatggggatacaaattctacccactgcctggacta

SEQ ID NO: 54517 - DNA, 637 bp, Homo sapiens
ccacattcactgcactgatagggtttctctccagtatggattttctggtgtgtagcaaggtgtgacctctggctgaaggctttcccacattcactacattcatagggtttctctccagtatgaatacgatggtgtttaataagatctgagctacccctaaaagatttcccacatttgttgcatacataaggtttttctccactgtgaattctatgatgtctcagaaggtctgagctctgattgaaagttttcccacattctttgcattcatatggtttctctcttgtatgagttacctgatgtctgatgaggtctgagctgccctggaaagccctaccacactgattacaccaataagctttygcttcctggtgaattttctgctctcccctaagctcctcatcctggctgaaggttttctcacattcaagtttctctccagtatgcaggctctgatgtttgaggaaagctgtgcgccaaatgaagagcttcccacattccttacattcatagggtttctcaccactatgaattctccgatgttgaataaggagtgaacgccgcctgaaggctttcccacattcagtgcactgatagggcttctctccagtatggattttctggtgtgtaacaaggt

SEQ ID NO: 54518 - DNA, 506 bp, Homo sapiens
  misc_feature (1)...(506): n = A,T,C or G
tcgtgtcctcataagggaggccccagagcactcatttaccctctgtcattcgaggacacagagagaaggcaccgtctgtgaatggggcagtggtccctcactgacatgggatgtgcttacaccttgatcttggatattccagccttcagaactgggtgaaataagtttttgctgtttataaaccacccagactatggtrtttttgttacagcagcccaaacagaccaagtccaatctcacatttggaaataaaagatgtttaagacttggggtttttttttttttttgagggtgggaggttaatgcatttactctaggtaactaatatgttcatcaaaatatgtctatatcattatacaggttctctaccactttagtggttgtattttagaaatttttcttttccnaggctttaaaaagaagccatcattgttagttgaacagaaatgatgtaaaatacaaatgattctcgttttctcaagttaacaagattcctcangatattg

SEQ ID NO: 54519 - DNA, 1372 bp, Homo sapiens
ccaccctgctaattgtgaggagtacgaggaatgttgctactggctctaccttttttctctacctaacttatgcccttcttgaaaaaaaaaagttcttaaattagtaagttatggttaaaaactaagatatgcatgttcacattctggcaccaaagatattcttgatccagtagtacccctcaaatcttttgtgtggtccaattcctacccacaactctgaaaaataagtgcggggaagggctagagccactgataacacctcatcttcccagtcgctcaaatcctaaaatttggaaaaggtcaatgataggttaaaaggaaaaactcccaactgaggagaagtctccatctaccttgtttagatacttcaaagaagttttcttagtgcagaaataattttatgtcagggaagcccgtaactgttatgtggactgaacaccatataactattatccttaacaattgggattatgtatgcatcctcctacacagtgattttaaggcaaattgagtaaaaatgatcattttttctcctatataaaagggtctccaaatgaaccatgtttaacctaatgaggctttaataataagtattgattgaaacatgaagtcattttgatggctacactcatctggatacaaatctgaagaacttgggcacttttttaaaatagtttcccctaattcctgaccatggagaagcagtgcatctggggtaccgtctgaaaaatctatgtttgttttactaagtacttgggtgatgctgaagtagttttttggagaaacccctaaaatagggaataaaagctttctcagtgtgtttgtaaaattaatgtaaatattggtcaatatgaaataacactgaaacacttcctattttagaattatgtatcagaattgcagctcatgcacctaacagcccaataactactgttctgtataataacttcatttctagtttctggcccccattctgcttagatcttgaaaacttaactcagctcttcctggaatttttccagagtgatggcatagttctaggatcttacacaggatcaaggatgagggaaaggggtccatctggctttggccatcagtacaggtctttctgcctgtttcggcctcatggttcagaacattccagatccttttgctactccttttgaggtattattgagataagagaactctttgtggcttcgtatgatccctgatgcctggacagagaagacagccatttccacccttagatctagccaccctagcccctcttcatccccagcatactatcaagaagcaggacttaactccctctctgctctctagtcttacaagtctctctcttcttcacttygtgatacttatatgtctc

SEQ ID NO: 54520 - DNA, 434 bp, Homo sapiens
caccatctgcatttactacacatatttcttctacgacagcagcaatgaccctgaggtaaatatgcactaaaggatgccccattgatcagggtggtaraggcaatgggaggggaaagaggaactcttctgccagttttaaggacactcttcattacctcttttcttcactccattacgtaaacctcagggcttgagaaaacaaatcagcatagctcacaatcagccagcatgtttataaatgagcaaatggggaaggactcattgtcctccagaatttgtaagggtgaaaagcacagacaagaatggaaaagcagagctctgcctgtgtcaaaggctcacattctattaacgactatgaaaggaaaagatcaaagaaaaatccaacagaacttaatttgagtttgcctcttgccgttctgacaaaccaatatttc

SEQ ID NO: 54521 - DNA, 434 bp, Homo sapiens
caccatctgcatttactacacatatttcttctacgacagcagcaatgaccctgaggtaaatatgcactaaaggatgccccattgatcagggtggtaaaggcaatgggaggggaaagaggaactcttctgccagttttaaggacactcttcattacctcttttcttcactccattacgtaaacctcagggcttgagaaaacaaatcagcatagctcacaatcagccagcatgtttataaatgagcaaatggggaaggactcattgtcctccagaatttgtaagggtgaaaagcacagacaagaatggaaaagcagagctctgcctgtgtcaaaggctcacattctattaacgactatraaaggaaaagatcaaagaaaaatccaacagaacttaatttgagtttgcctcttgccgttctgacaaaccaatatttc

SEQ ID NO: 54522 - DNA, 434 bp, Homo sapiens
caccatctgcatttactacacatatttcttctacgacagcagcaatgaccctgaggtaaatatgcactaaaggatgccccattgatcagggtggtaaaggcaatgggaggggaaagaggaactcttctgccagttttaaggacactcttcattacctcttttcttcactccattacgtaaacctcagggcttgagaaaacaaatcagcatagctcacaatcagccagcatgtttataaatgagcaaatggggaaggactcattgtcctccagaatttgtaagggtgaaaagcacagacaagaatggaaaagcagagctctgcctgtgtcaaaggctcacattctattaacgactatgaaaggaaaagatcaaagaaaaatccaacagaacttaatttgagtttgcctcttgccrttctgacaaaccaatatttc

SEQ ID NO: 54523 - DNA, 444 bp, Homo sapiens
tgcagagctgcttgcagagacaccacagcaagactgcagtaccacgggctcagtcgggtgggtgcaactgactagaaaacagagcggaagagcccaaacattcaacacagyacaagagggatccgaggacccaagaaagggccgagcgcggtggctcacgcctgtaatcccagcactttgggaggccgaggcaggcggatcacctgaggtcaggagttcgagaccagcctggccaacacagtgaaaccccatctctactaaaaatacaaaaattagccagatgtggtggcaggcgcctgtaatcccaactactcgggaggctgaggcaggagaatcgcttgaacccgggaggcagaggttgcagtgagcagagatggcgtcactgcactccagcctgggaaacaagagtgaaactctgtctcaaaaaaaaaaaaaaaaaaaaaa

SEQ ID NO: 54524 - DNA, 444 bp, Homo sapiens
tgcagagctgcttgcagagacaccacagcaagactgcagtaccacgggctcagtcgggtgggtgcaactgactagaaaacagagcggaagagcccaaacattcaacacagtacaagagggatccgaggacccaagaaagggccgagcgcggtggctcacgcctgtaatyccagcactttgggaggccgaggcaggcggatcacctgaggtcaggagttcgagaccagcctggccaacacagtgaaaccccatctctactaaaaatacaaaaattagccagatgtggtggcaggcgcctgtaatcccaactactcgggaggctgaggcaggagaatcgcttgaacccgggaggcagaggttgcagtgagcagagatggcgtcactgcactccagcctgggaaacaagagtgaaactctgtctcaaaaaaaaaaaaaaaaaaaaaa

SEQ ID NO: 54525 - DNA, 580 bp, Homo sapiens
ttttagctaaggacacttaaaaatattctgttacttataaacaaacctattcctatcggatgcagagtttggttcctataaatttgtgctacacataaccttaaaagaaatgtggtttttagtggaagcatttgggcagtgggtggtaaagactcagatactgcaagatggaaaactggtgacctttgttctccagttgccagacatttggtaaacctgttgccagctttagaagacagatcacaygccaatcaaaattgtggcacgaagggaaatggctggaaatatctataaacttggtatttgctggctttttcttgacactttaaaccaagttctatgagatatgaattcaggccagaagtaaccaatttgcatgtagaaatggaaaagaatacagttttgctaaaggagaaattctgctgtaatccaagtggattaaaagtctcataatttgggcgggacgtggtggttcatgcctgtaatctcagcactttgggaggccgaggcggatcacgaggtcaggagttcgagactagcctggccaacactgtgaaaccccgtctctattaaaaataca

SEQ ID NO: 54526 - DNA, 649 bp, Homo sapiens
taatagtttgtgatacgttccgggtgatggatatctacccccaaggcatacagcgacagctgcattctctctcagggaaaacaacagcatcaagcccgagcagagagctccaagggaaaaaagaacaaaaaacttcagatgccaattatagtccatgttgccttgcttgrattactagaaggatctctcccacctcccactccatcaacatcataaatcttttgccttgaattcacagcacttctgtttagaagttcttgctggcatagacactacactgacaagagttgcaaaatatccccttctttctggttgctttatgataaagtttagagactcacagtacatcactacctactatcttttctgtgcaatgtgacaaaatatttgtcctgagtaaagattggttgtctctgcagcagctcagtcggtggtgatttcagaacacaaaaacatggagttatgctgtagaattaacaactttttaaagtgactggagggattagagattgaagagattgttgatccccactcttcctgtcttacaggtgggaagtggtgaagggttgtgccaaaggttgcattggaaattagaggctagagaaaggataagagctttgggttcaataccatgtatgcactcatattt

SEQ ID NO: 54527 - DNA, 600 bp, Homo sapiens
tttatgccctttgtgatgtgcttttatagctgctttcattgagaggcagaatctgtttcccaaaccttgaatctcactggccttatttgctctggcagtagaaagctgtgaatatgaccatgtgccagtttggggccgaggcacaaaagctcttgaatgcttctgctttttatttcacaaccctgtcatctccataataacaagtccatgttagcctgctagaggatgagatactatagggaggaaaaccaaagtgccacagttgacaggcagctcaccctcagaagcagcattgcctagtcaaccagcagctgaccacacgtgcctgaaagggcccagcagagaccagaagaatggctcacytgagcccagcctagaaggtggaccagctcaatctaatacgttttggggaattttactgtgaagcaataggtaatacgtacacctagtgcagacaggatgccaggattcaatgacatgttgattgcaatttaccaggcaaacacaaggcaccctgtatgtactgatttccttttccctttatgtaaagttggatttctggttagacggtgttgagccatacagaagtgcacgtagaca

SEQ ID NO: 54528 - DNA, 543 bp, Homo sapiens
tccaaagttggaacgccagatgtcatgggttatggggtccatagtccaccacagtttcttatgacaggccgagttagaaataatctggaactcattggcccctawaactactttttttctttttgagctggagtctcactctgttgcccaagctggagtacagtggtgtgatcttggtttactgcaacctctgcctcccaggttcaagcaattctcctgcctcagcctcttgagtagctaggattacaagcatgtgccaccacgcccagctactttttgtatttttagtagagatggggtttcaccacgttggccaggctggtctcgaactcctgacctcaggtgatctgcccacctcagcctcccaaagtgctgagattaacggtgtaaaccaccacacccaaccccctataaccatttttaatatttgctttgtataaacagctgtcttcatgctttatatgcttttaattattaaatcttgcttctgtgtgttacattcgtcttccctttaccccctctatagtgataacaccagtctgt

SEQ ID NO: 54529 - DNA, 543 bp, Homo sapiens
tccaaagttggaacgccagatgtcatgggttatggggtccatagtccaccacagtttcttatgacaggccgagttagaaataatctggaactcattggcccctaaaactactttttttctttttgagctggagtctcactctgttgcccaagctggagtacagtggtgtgatcttggtttactgcaacctctgcctcccaggttcaagcaattctcctgcctcagcctcttgagtagytaggattacaagcatgtgccaccacgcccagctactttttgtatttttagtagagatggggtttcaccacgttggccaggctggtctcgaactcctgacctcaggtgatctgcccacctcagcctcccaaagtgctgagattaacggtgtaaaccaccacacccaaccccctataaccatttttaatatttgctttgtataaacagctgtcttcatgctttatatgcttttaattattaaatcttgcttctgtgtgttacattcgtcttccctttaccccctctatagtgataacaccagtctgt

SEQ ID NO: 54530 - DNA, 605 bp, Homo sapiens
tgaacaatgaataagaacccaatgaagacagacgaaaaccagtatcaggtcttgtcgcctctgattttggtgatgtgggtgtcctgcagaagctggagcccttagtcatggagttaaagacacacgcctggtctaggagacagagacgctgaaggaggttccttggaaggtgtagcagtggcaggccggaaagctgccactgaaaccaacgtgtaagcaaccagtgtgttttacaaaaatgactgttgtttgttttccacccttcaattctcccaagaatctcctttttgactcagccaaattggaaataaacacaaaagggaactctaggaaaggtggttcagtttagccaagttgacacattgcaaatttgctatattgggtgagtatggatggagaacagatgaagtcataggtytaaatcctgtggcactcaaaaatttagaggtcaggaacacgggggcttctatgaagtgtctttaaaagcagaaggcaaaactctcttagtccttttttcgctgctataatagcaaaccacagactggttaattaattaataatagcttatttggctcatggttctggaggcaggaaagttgagtttg

SEQ ID NO: 54531 - DNA, 605 bp, Homo sapiens
tgaacaatgaataagaacccaatgaagacagacgaaaaccagtatcaggtcttgtcgcctctgattttggtgatgtgggtgtcctgcagaagctggagcccttagtcatggagttaaagacacacgcctggtctaggagacagagacgctgaaggaggttccttggaaggtgtagcagtggcaggccggaaagctgccactgaaaccaacgtgtaagcaaccagtgtgttttacaaaaatgactgttgtttgttttccacccttcaattctcccaagaatctcctttttgactcagccaaattggaaataaacacaaaagggaactctaggaaaggtggttcagtttagccaagttgacacattgcaaatttgctatattgggtgagtatggatggagaacagatgaagtcataggtttaaatcctgtggcactcaaaaatttagaggtcaggaacacgggggcttctatgaagtgtctttaaaagcagaaggcaaaactctcttagtccttttttygctgctataatagcaaaccacagactggttaattaattaataatagcttatttggctcatggttctggaggcaggaaagttgagtttg

SEQ ID NO: 54532 - DNA, 557 bp, Homo sapiens
ctawaagtctgtaaataattttataatatttataaagaaaactggcagtgacatttattggtctacatcatccagggaagccagaaaagcatatattttatatactttaattaaaatttacttcaactgtatgttaaactccttccaaatactgacattttagataaagcccatgaaatgtgtattttaaatttaaaaagaaaaacaaaacgactttataagaatttcgacaatgaatgcaacttttaccattttaactagccagtttcctgaagacattaaatgtggaaaatgatgctaagcaaattaagcaaagacacaatagcagaaccatatagtctttgaatataggaatgtctcactccaaagtgcatgtctttttcagggcaccacacactgttactacacatatgatctacattctagactggagagagaagagggttttccttaacttcagcaaacaaaccacgtgcatgaaataaaggaaaaagttggttcaacagagtctatgagaaaatccttagaagggctgacagcaatcaaataaaatggca

SEQ ID NO: 54533 - DNA, 557 bp, Homo sapiens
ctataagtctgtaaataattttataatatttataaagaaaactggcagtgacatttattggtctacatcatccagggaagccagaaaagcatayattttatatactttaattaaaatttacttcaactgtatgttaaactccttccaaatactgacattttagataaagcccatgaaatgtgtattttaaatttaaaaagaaaaacaaaacgactttataagaatttcgacaatgaatgcaacttttaccattttaactagccagtttcctgaagacattaaatgtggaaaatgatgctaagcaaattaagcaaagacacaatagcagaaccatatagtctttgaatataggaatgtctcactccaaagtgcatgtctttttcagggcaccacacactgttactacacatatgatctacattctagactggagagagaagagggttttccttaacttcagcaaacaaaccacgtgcatgaaataaaggaaaaagttggttcaacagagtctatgagaaaatccttagaagggctgacagcaatcaaataaaatggca

SEQ ID NO: 54534 - DNA, 2063 bp, Homo sapiens
gtcatttctaggtggcctttttcatgctttaatccatgaaggttttttattcagactaaccttctgtaactccaacatgatacaacatttttactgtgacattatcccattgttaaagatttcatgtactgattcttgtattaattttctaatgttttttattttctcaggttcaattcaagttttaaccattgggattgtttttgtatcttatatgtttgttctctttacaatcttaaaaaagaagtctaacaaaggcataagggaagccttttccacctgtggagcccattacatacctctctctttatgttatggcctccttctcttcatgtatgtgggccctgcagctccacaagcagataatcaagatatgatggagtatctattttaccctatcattgtgcgtttgttaaaccatattactacagcctgagaaataagcaataataggttcactcacaaaaatgttaaaataaaatatttgcattgcatacttatctctcttctctattcaataaaatagttacaaaattatgctagtttgaggtacctaagtttttgccaactttcaaatttttttgtaattataactgtcctagcactataatgacttaacatgttagaacctaattaactaattaaaatattcctatatgttatgcaaaagcattcaagaaattttaatcatgtcataatgacagcagaaagcaaataaaaatattttatagattgtatgttaatcaatatgtctttatcaatgtattaaacgctaaaattatctagttcatctgataaggacttgagtgtgatgcttttgatactattacaactatattgcctgagacgcccatcacatttaactcatagtggaggcaaatttgtgtttgtgtgaagagaggtaaatcccaataattctgctagtcctcaaaaggactttcatttcacttttgggaaagggtgaattccacttcttgtatgaaatcaactcacatttccagtaaagaaataaactgaaattgaaacacaattagaaataaaatgagaaaggtgttaacaggtgtaagagaatgctgttaactcattgtgcttatatgagcaggaaaagaaaagctgcccctaactttctatatttgcttctaacttcctttctagcatgtttatgttttagacaatctgaaactcttccctaattcagaaaattaaaaggttaaatagaagaactaatatgaagtaggcatagagaagaaaagataagtggcgtaatgggaagaaaatggtcttaatcttcctagaaaaaaaatgaagctactaagattttttaaagaaaaagtcataatacaaagttactggaatgtgttcttgacaaccmggggctttaaattcacatcaccaaagttcaaataatgttaagatgatatgacatcacagtgcccagtgagtagagggaaaaagatggacatgagaaagagtttggatattttctgcctcaaaaagtctttgattgttagccttcttcacacttcatactcttgaatatatgagtcattcatcgaccattccactctgtcaaaagatgaagatgtttagacgccaaaattcctttcacattcttactgataccactgaggcccttactctaacaactattcacatattgttttggaaacctctagttacttatttcctccatcctctagcactcacttacttccccaacattgctgtcagattgttttttgcaaacaaaactctaatgagttatatctcttttcagtgcctcttgttggattgtcgttgatacctgattatatgcatgtatgtttcaggtatcaatatctatgcacatgtttattttttatgtgtatgtagagtcatgtaatatatatacatagatacatatatagttaaaatatgaatgtagtggcactagaatttagtggttatttgaggagatggtgatgtattttgcaacatgagactgcatgtggtttggggctttttgaaggggcaagagaggagatgaaggttcttttttttaattatactttaagttctagggt

SEQ ID NO: 54535 - DNA, 2063 bp, Homo sapiens
gtcatttctaggtggcctttttcatgctttaatccatgaaggttttttattcagactaaccttctgtaactccaacatgatacaacatttttactgtgacattatcccattgttaaagatttcatgtactgattcttgtattaattttctaatgttttttattttctcaggttcaattcaagttttaaccattgggattgtttttgtatcttatatgtttgttctctttacaatcttaaaaaagaagtctaacaaaggcataagggaagccttttccacctgtggagcccattacatacctctctctttatgttatggcctccttctcttcatgtatgtgggccctgcagctccacaagcagataatcaagatatgatggagtatctattttaccctatcattgtgcgtttgttaaaccatattactacagcctgagaaataagcaataataggttcactcacaaaaatgttaaaataaaatatttgcattgcatacttatctctcttctctattcaataaaatagttacaaaattatgctagtttgaggtacctaagtttttgccaactttcaaatttttttgtaattataactgtcctagcactataatgacttaacatgttagaacctaattaactaattaaaatattcctatatgttatgcaaaagcattcaagaaattttaatcatgtcataatgacagcagaaagcaaataaaaatattttatagattgtatgttaatcaatatgtctttatcaatgtattaaacgctaaaattatctagttcatctgataaggacttgagtgtgatgcttttgatactattacaactatattgcctgagacgcccatcacatttaactcatagtggaggcaaatttgtgtttgtgtgaagagaggtaaatcccaataattctgctagtcctcaaaaggactttcatttcacttttgggaaagggtgaattccacttcttgtatgaaatcaactcacatttccagtaaagaaataaactgaaattgaaacacaattagaaataaaatgagaaaggtgttaacaggtgtaagagaatgctgttaactcattgtgcttatatgagcaggaaaagaaaagctgcccctaactttctatatttgcttctaacttcctttctagcatgtttatgttttagacaatctgaaactcttccctaattcagaaaattaaaaggttaaatagaagaactaatatgaagtaggcatagagaagaaaagataagtggcgtaatgggaagaaaatggtcttaatcttcctagaaaaaaaatgaagctactaagattttttaaagaaaaagtcataatacaaagttactggaatgtgttcttgacaacccggggctttaaattcacatcaccaaagttcaaataatgttaagatgatatgacatcacagtgcccagtgagtagagggaaaaagatgracatgagaaagagtttggatattttctgcctcaaaaagtctttgattgttagccttcttcacacttcatactcttgaatatatgagtcattcatcgaccattccactctgtcaaaagatgaagatgtttagacgccaaaattcctttcacattcttactgataccactgaggcccttactctaacaactattcacatattgttttggaaacctctagttacttatttcctccatcctctagcactcacttacttccccaacattgctgtcagattgttttttgcaaacaaaactctaatgagttatatctcttttcagtgcctcttgttggattgtcgttgatacctgattatatgcatgtatgtttcaggtatcaatatctatgcacatgtttattttttatgtgtatgtagagtcatgtaatatatatacatagatacatatatagttaaaatatgaatgtagtggcactagaatttagtggttatttgaggagatggtgatgtattttgcaacatgagactgcatgtggtttggggctttttgaaggggcaagagaggagatgaaggttcttttttttaattatactttaagttctagggt

SEQ ID NO: 54536 - DNA, 1781 bp, Homo sapiens
tcaagcatgcatggattgacaaaggaggagttttttttcttctctgaaggcactgccctcggtgtgagggttggggaggaaagtgagatttcctagctatcttagagtttagaaccacagagcacagaggaagtgaaagcagaaggggagcctttgctcctcctcacacagcaacagagcaggagagctgcatgctgaaaagagctgcacacaaaaatgcttgtgcatgccactcaatttcttctgcttccaaacacttcagtttacttagttgcactgaagcacattttacacgggactaaaggaaaaggaatatgtcacggtaaagtgggggcatggtgtatccttatgttttgcaagaagaaaatctgagcttcctttaaataaacaatcatttatttatgaaggcatctttttgggacaaaatgacaagatccttatttcctcattgtctgtgagtcagagcaataatttccctttaatgctgggggtcaaaagatgacatatctgatcaccattcaccagatacatatttgagaaacaggaggacagacttcagtgacagaatagagcttagtgtgtgagaatgtgtttggctgcaagtaagaaacctgacttggccaggcacggtggctcacacctgtaatcccagaactttgggaggcccaggtggacagatcacgaggtcaggagtttgagaccagcctggccaacatggtgcaacctcatctctactaaaaatacaaaaattagcatggtggtgggtgcctgtaatcccagctcgggaggctgaggcaggagaattgtttgaacccgggaggcagaagttgcagcgagccaagattgtgccattgcactccagcctgggcaacagggtaagactcagtctcaaaaaaagaaagaaagaaagaaagaaagaaaagaaaccctgacttatagtagcatacttttctgatgtaaaaattaagtggtttctggtattggttcagcagttcaatcatgttgaggcatgtatctctccaattcccttgactttttctctcactgttccaagatagcttctttagacccaaccatatgtcaacatctaagtcaggataaagtgaactaggaaaaaggatgcataccagccacatctgtctatttttatagggaaaacaaagtatttcccccaaattttccccagcagagttctgagtgcatcacacagccacctctgtctgcaagaaaggctgggaagcccagcatcagggttgtcaggactggctgtgatccatcacctggagctctgttaccctgagcaaaactggatcctgttattaaggacaaaggttggaagcgttctgggaaggcaaataaaagtgtctatctaacacagtaacttggaaagagtaaggaatttattctagacaggactgagttccaagtcccaacactattattgataagaaataattatagagaagtagaaraacttgggaccagccatctggaaacctgagtccttcgtctctcttgtgtctccaagaatgaacccagttgactagaagactctgagagtttcttccagcccaacagtggctcgttccaggctctgatgtgtcatgactagggtttggaaggggcatggtttctgcccttacgaccaatgagcagtaggtgctgctgggtctctccccttccccaagtcatcttatcaccttggaaagtgttgtatgaggcacagaggagaggcacttttgagcacattaagatcaaacagacttgagtttgagtttttg

SEQ ID NO: 54537 - DNA, 555 bp, Homo sapiens
taatagttactaaaagaaaacctgccaacttcaaatgcagttatagcatttggaagatcaagaaatttgtcttttgttaaaatatatttattttgctaatcttggcacaaaattgtttcatgctgattcctataaaaaatattttttgttttaattattcacatgaaatttgcttttagtaaatctataatatttagggtcattttaataataaagaatcactggatgaacagagtaaaatatgagtgtctagatacttacctgatactggagacctaagtgatcagagtgggaggttctattaatagcattgagtgacaaattggaagccagtcaaactcaaggaagtgagaccagttaaggggatattacagtgacacaaatgtaaaagcatgaagcctatggtaaggcaggaatgagaggggaggaaatgaaatctattaaggggtagaygttgcaggaactagtaggatatggtaggaaagggatgggagtaaaacagttctcaagtgtttcacttcaaatctggtagtgatactgtttagagtaaagaag

SEQ ID NO: 54538 - DNA, 652 bp, Homo sapiens
agtattacgtatcaattttttacgtaaaatgtttagaaaatgaagctatgtttgaatgtgaccatgaggagaaaaactacaaataaaagtaatgagtgttttatctgtaataacatctttaattataaaactgcagagtttcttaatgaagtatgtgtacgtgttttaaaatgaaatgctaatgccagtggttgttaacatgttgtgaagctattatccwttctaaactacatttcaaacactttaagccctcatgtcttcctcctacttatctttctttcttaaagccaagtatattaaatctctagcttaaactcctgcccataagcaccctgtattcctaaccagagatccatttcatcacttgctgcaggcacaaggagaaagagtcaatgatgggtcactgttgcctccttgtactcctccttatcatcattctcacattcactgagccctcattatgtgaatgggccactctaggaccttatattcctactgaaaatcaggaagaaatcaagggagcatgtacagtatgtgtacttttgaatgttctagtcgactttgcagtaatatcgaaaaggtgccctaattaagtcctcagaaaaaatgagaaaaagaagactgggtaatataaccaataatttttttaaaa

SEQ ID NO: 54539 - DNA, 652 bp, Homo sapiens
agtattacgtatcaattttttacgtaaaatgtttagaaaatgaagctatgtttgaatgtgaccatgaggagaaaaactacaaataaaagtaatgagtgttttatctgtaataacatctttaattataaaactgcagagtttcttaatgaagtatgtgtacgtgttttaaaatgaaatgctaatgccagtggttgttaacatgttgtgaagctattatccattctaaactacatttcaaamactttaagccctcatgtcttcctcctacttatctttctttcttaaagccaagtatattaaatctctagcttaaactcctgcccataagcaccctgtattcctaaccagagatccatttcatcacttgctgcaggcacaaggagaaagagtcaatgatgggtcactgttgcctccttgtactcctccttatcatcattctcacattcactgagccctcattatgtgaatgggccactctaggaccttatattcctactgaaaatcaggaagaaatcaagggagcatgtacagtatgtgtacttttgaatgttctagtcgactttgcagtaatatcgaaaaggtgccctaattaagtcctcagaaaaaatgagaaaaagaagactgggtaatataaccaataatttttttaaaa

SEQ ID NO: 54540 - DNA, 2651 bp, Homo sapiens
tttctttatcttttttaagaggcagggtctttctctgtcaccctggagtatggtggcacgatcatagttcactacagctttgaactcctgggctcaagtgatcctcctgacacagcctccggagtagccagaactacaggtgcatgctactacacaaacaactttttaaatttttcatacagacacgatctcattatgttttccaagctgttcttgaactcatggcctcaagcgatcctaaagagatgactctgatgttgtcaccacgtgtcttccatatctaggcaggtctcatgctgagtcaggaggagggagaacagaggcctaggccagggaggtgagggcacacattcattttttttttttttcccagaaagatgagtctcacttctcttcatgttcctttggctataactttgccaaatggacacaatcagttgcaagggaagctgagaactgtaacttttagctggttagacatgtctgtagctaaaactttggagttctattatgaaagaaggggaatggatggtagagagcaataagcaattattgtcatatgagttttcataattttttcttgtaagactgttctccaagaagagtcattgtcaatttattttgttctttttccaactaaagtctgaagtttttgaaggcagtaaatatgtttcattcatcattctattactaatactgatcatactccctgacacagaacaggtattcagttaataattgttaaatgcatgaaatcccagaatccatgtggatcacttggagaaatgtggcaaaataagattyttttgaatagcataaccgtattctggtttacagtatttttctattatttttcttctattccgatctagtcgaggatcccacaggtaacagaaatagctaagaagatgcaagcatccctcatgggaaatctctctgggaaaaaataacagcaaggcaagtgttgattccagccactttgcctcacccaggccattgggtaacttcataatatatgaaatgaatcctgtcaaaagcacttgctttccagggttaaaaataaaaattttcaattagctttctcagaatactaaaaggtttttttgggtatctgaagccaagacttaaataaatgatactgagaattttttttactacaaactagtaaattaaaagtcttttcataagatccccaatgcccatcagtattaagtgttgatgtgattcctccttagacccttttctcttatccatgtaccccacaggcttggatgatatggatccagattggagaaaagtcgatatgatttcgtagtgtcttcacccaaatctcatcttgaattgtagttcccataattcccacatgttgtgtgagtgacttggctgtcattctctcttgtctgctgtcatgtaagatgtgcctttcactttctgccatgattgtgagtcctccacagccatgcggaactgtgagtccattaaacctctttttctttataaattactcatgaaggttcaggtatatctttatcagcagcatgaaaatggactaatacaaaaggaaatggataaagatgtctccagaaatatccagaaactgaaggacaaaaagaataatgtctaaaaaatatgactagaaacgactcccctccttccctgccttcagacctcaccctccctcatagaagaaatcgtgtacatcagtgtcagggttggtactttaatatgtttggtgcaagataaattaaaaatcagaattcatgtttcctcttccattcctcaggcagcagtgtggtaatgtgcctgaactgtggtagaagatgatttagaactacttaaaagtttctgaaattcaggattcagtaaattaatctatgcttacatttcctcaagtcttgaatttgattttaggagcctgatttgttggttatctgtatatgttgctaacttgaacaagtgcaaaagttcccagtaaaacactattttcagtattttttctttgtacagagactattgaatgttcagtggaatctactgtaggtcactgcccaggctatatattctaagacagtgtaactcaaattctgtagtaaaggaccattttaaaaaaacatagattgcagaccacaatagagtgacgtagaagaaaagtgttgtagccgtggcagattgctatggaagcttctgaaaactggctcaaattctgaagttagctggccatggacaactgtagcaggcagtttgcagacagactacacttagaaagcactaacctaggagacgtaaaaagtaaaatatttcacctctcaaataccttatagcttggtgagagacttaggcataattaatttataaccaaaatagataataattgtaatagatggtttacaaaacttaggataaaagaagcatgaggatgaaaaaaggcaacaaaatggaggttggttaatctagatgttattaatagttatagctaataattcttgattgtttataatgtgctagggccaatactgagtgctttctgcaagtataaagtaatttaattctgagcaatgcacaatgatgtacgttctgtgaataagcactttgctcagtctcttttctgtttctgtctctctgacaccccctttctcctcctctatggacat

SEQ ID NO: 54541 - DNA, 2651 bp, Homo sapiens
tttctttatcttttttaagaggcagggtctttctctgtcaccctggagtatggtggcacgatcatagttcactacagctttgaactcctgggctcaagtgatcctcctgacacagcctccggagtagccagaactacaggtgcatgctactacacaaacaactttttaaatttttcatacagacacgatctcattatgttttccaagctgttcttgaactcatggcctcaagcgatcctaaagagatgactctgatgttgtcaccacgtgtcttccatatctaggcaggtctcatgctgagtcaggaggagggagaacagaggcctaggccagggaggtgagggcacacattcattttttttttttttcccagaaagatgagtctcacttctcttcatgttcctttggctataactttgccaaatggacacaatcagttgcaagggaagctgagaactgtaacttttagctggttagacatgtctgtagctaaaactttggagttctattatgaaagaaggggaatggatggtagagagcaataagcaattattgtcatatgagttttcataattttttcttgtaagactgttctccaagaagagtcattgtcaatttattttgttctttttccaactaaagtctgaagtttttgaaggcagtaaatatgtttcattcatcattctattactaatactgatcatactccctgacacagaacaggtattcagttaataattgttaaatgcatgaaatcccagaatccatgtggatcacttggagaaatgtggcaaaataagattcttttgaatagcataaccgtattctggtttacagtatttttctattatttttcttctattccgatctagtcgaggatcccacaggtaacagaaatagctaagaagatgcaagcatccctcatgggaaatctctctgggaaaaaataacagcaaggcaagtgttgattccagccactttgcctcacccaggccattgggtaacttcataatatatgaaatgaatcctgtcaaaagcacttgctttccagggttaaaaataaaaattttcaattagctttctcagaatactaaaaggtttttttgggtatctgaagccaagacttaaataaatgatactgagaattttttttactacaaactagtaaattaaaagtcttttcataagatccccaatgcccatcagtattaagtgttgatgtgattcctccttagacccttttctcttatccatgtaccccacaggcttggatgatatggatccagattggagaaaagtcgatatgatttcgtagtgtcttcacccaaatctcatcttgaattgtagttcccataattcccacatgttgtgtgagtgacttggctgtcattctctcttgtctgctgtcatgtaagatgtgcctttcactttctgccatgattgtgagtcctccacagccatgcggaactgtgagtccattaaacctctttttctttataaattactcatgaaggttcaggtatatctttatcagcagcatgaaaatggactaatacaaaaggaaatggataaagatgtctccagaaatatccagaaactgaaggacaaaaagaataatgtctaaaaaatatgactagaaacgactcccctccttccctgccttcagacctcaccctccctcatagaagaaatcgtgtacatcagtgtcagggttggtactttaatatgtttggtgcaagataaattaaaaatcagaattcatgtttcctcttccattcctcaggcagcagtgtggtaatgtgcctgaactgtggtagaagatgatttagaactacttaaaagtttctgaaattcaggattcagtaaattaatctatgcttacatttcctcaagtcttgaatttgattttaggagcctgatttgttggttatctgtatatgttgctaacttgaacaagtgcaaaagttcccagtaaaacactattttcagtattttttctttgtacagagactattgaatgttcagtggaatctactgtaggtcactgcccaggctatatattctaagacagtgtaactcaaattctgtagtaaaggaccattttaaaaaaacatagattgcagaccacaatagagtgacgtagaagaaaagtgttgtagccgtggcagattgctatggaagcttctgaaaactggctcaaattctgaagttagctggccatggacaactgtagcaggcagtttgcagacagactacacttagaaagcactaacctaggagacgtaaaaagtaaaatatttcacctctcaaataccttatagcttggtgagagacttaggcataattaatttataaccaaaatagataataattgtaatagatggtttacaaaacttaggataaaagaagcatgaggatgaaaaaaggcaacaaaatggaggttggttaatctagatgttattaatagttatagctaataattcttgattgtttataatgtgctagggccaatactgagtgctttctgcaagtataaagtaatttaattctgagcaatgcacartgatgtacgttctgtgaataagcactttgctcagtctcttttctgtttctgtctctctgacaccccctttctcctcctctatggacat

SEQ ID NO: 54542 - DNA, 2651 bp, Homo sapiens
tttctttatcttttttaagaggcagggtctttctctgtcaccctggagtatggtggcacgatcatagttcactacagctttgaactcctgggctcaagtgatcctcctgacacagcctccggagtagccagaactacaggtgcatgctactacacaaacaactttttaaatttttcatacagacacgatctcattatgttttccaagctgttcttgaactcatggcctcaagcgatcctaaagagatgactctgatgttgtcaccacgtgtcttccatatctaggcaggtctcatgctgagtcaggaggagggagaacagaggcctaggccagggaggtgagggcacacattcattttttttttttttcccagaaagatgagtctcacttctcttcatgttcctttggctataactttgccaaatggacacaatcagttgcaagggaagctgagaactgtaacttttagctggttagacatgtctgtagctaaaactttggagttctattatgaaagaaggggaatggatggtagagagcaataagcaattattgtcatatgagttttcataattttttcttgtaagactgttctccaagaagagtcattgtcaatttattttgttctttttccaactaaagtctgaagtttttgaaggcagtaaatatgtttcattcatcattctattactaatactgatcatactccctgacacagaacaggtattcagttaataattgttaaatgcatgaaatcccagaatccatgtggatcacttggagaaatgtggcaaaataagattcttttgaatagcataaccgtattctggtttacagtatttttctattatttttcttctattccgatctagtcgaggatcccacaggtaacagaaatagctaagaagatgcaagcatccctcatgggaaatctctctgggaaaaaataacagcaaggcaagtgttgattccagccactttgcctcacccaggccattgggtaacttcataatatatgaaatgaatcctgtcaaaagcacttgctttccagggttaaaaataaaaattttcaattagctttctcagaatactaaaaggtttttttgggtatctgaagccaagacttaaataaatgatactgagaattttttttactacaaactagtaaattaaaagtcttttcataagatccccaatgcccatcagtattaagtgttgatgtgattcctccttagacccttttctcttatccatgtaccccacaggcttggatgatatggatccagattggagaaaagtcgatatgatttcgtagtgtcttcacccaaatctcatcttgaattgtagttcccataattcccacatgttgtgtgagtgacttggctgtcattctctcttgtctgctgtcatgtaagatgtgcctttcactttctgccatgattgtgagtcctccacagccatgcggaactgtgagtccattaaacctctttttctttataaattactcatgaaggttcaggtatatctttatcagcagcatgaaaatggactaatacaaaaggaaatggataaagatgtctccagaaatatccagaaactgaaggacaaaaagaataatgtctaaaaaatatgactagaaacgactcccctccttccctgccttcagacctcaccctccctcatagaagaaatcgtgtacatcagtgtcagggttggtactttaatatgtttggtgcaagataaattaaaaatcagaattcatgtttcctcttccattcctcaggcagcagtgtggtaatgtgcctgaactgtggtagaagatgatttagaactacttaaaagtttctgaaattcaggattcagtaaattaatctatgcttacatttcctcaagtcttgaatttgattttaggagcctgatttgttggttatctgtatatgttgctaacttgaacaagtgcaaaagttcccagtaaaacactattttcagtattttttctttgtacagagactattgaatgttcagtggaatctactgtaggtcactgcccaggctatatattctaagacagtgtaactcaaattctgtagtaaaggaccattttaaaaaaacatagattgcagaccacaatagagtgacgtagaagaaaagtgttgtagccgtggcagattgctatggaagcttctgaaaactggctcaaattctgaagttagctggccatggacaactgtagcaggcagtttgcagacagactacacttagaaagcactaacctaggagacgtaaaaagtaaaatatttcacctctcaaataccttatagcttggtgagagacttaggcataattaatttataaccaaaatagataataattgtaatagatggtttacaaaacttaggataaaagaagcatgaggatgaaaaaaggcaacaaaatggaggttggttaatctagatgttattaatagttatagctaataattcttgattgtttataatgtgctagggccaatactgagtgctttctgcaagtataaagtaatttaattctgagcaatgcacaatgatgtacgttctgtgaataagcactttgctcagtctcttttctgtttctgtctctctgacacccyctttctcctcctctatggacat

SEQ ID NO: 54543 - DNA, 561 bp, Homo sapiens
atcttctaatttcttgagcaaagagattttgactattacattagctgctaattcttggtttatgtgaaataaaagcactgtgtgaccactattttcttggagtggccaaggaccaattagtaamctccaaatactatttattgttacatctgctttagagaagtaggtgtttattagtttttatgtatgtttatgattctctctccctcctaaggtatatcttcccagaacatagtttactgctgagcagataatagttccttttcttctctcctttttttggtttcccctcagagaattgaagctcagtctcctgcaaagacagtagtttaaaaaaaaatttaaaaaaaaaggctcagagaattgaatgaaagttatatgcactatgacttgcacaatctattgtctgttgggattacagctagagacatatagatgatgtatgaacaagtatgtttatagtaaaattctagaattatcaatactatgttgacttagttgaaaacagataaacacggaacctaaaatggaacatttgaatatcatcattttgctatttaa

SEQ ID NO: 54544 - DNA, 630 bp, Homo sapiens
ttatatagttttcttcagtcacattgcttctgcagaagtaaagaataatagaatacttcaggcaatcwaaccgtggactggcagtaatttcacagtgtgtattttaaatatcatagaagagtactgagaattagcaattgctaagataagcatcatggcagagagaccggcaaatttatttgcagtttacaaacctagcatggatgttttctttcagtttgtagaattggcaacttggaagatatgagagccttcctacagccatgtcatgcagttgctgaaacaccaagttctgccagtgttccctatcagagattaatcttagagaacaggaaaggtgccaactgtgagattttattagaatggaaatttgaattagctgaagacaaagaattataccattccatacaatgttatgtcttaaacaataatgtcacttctgctaaagccctgtttgagcagtgaaagcaaagaatacaacgtttaattatctgtttctaaagcattacgcagttttgctgaggaagactggagcgtctgtctctttcagtgaaactcctgaaagctctgggttttatgtaaagcagctaaagaaatcaaataaatagcctttgtgaaatgatccaggat

SEQ ID NO: 54545 - DNA, 630 bp, Homo sapiens
ttatatagttttcttcagtcacattgcttctgcagaagtaaagaataatagaatacttcaggcaatctaaccgtggactggcagtaatttcacagtgtgtattttaaatatcatagaagagtactgagaattagcaattgctaagataagcatcatggcagagagaccggcaaatttatttgcagtttacaaacctagcatggatgttttctttcagtttgtagaattggcaacttggaagatatgagagccttcctacagccatgtcatgcagttgctgaaacaccaagttctgccagtgttccctatcagagattaatcttagagaacaggaaaggtgccaactgtgagattttattagaatggaaatttgaattagctgaagacaaagaattataccattccatacaatgttatgtcttaaacaataatgtcacttctgctaaagccctrtttgagcagtgaaagcaaagaatacaacgtttaattatctgtttctaaagcattacgcagttttgctgaggaagactggagcgtctgtctctttcagtgaaactcctgaaagctctgggttttatgtaaagcagctaaagaaatcaaataaatagcctttgtgaaatgatccaggat

SEQ ID NO: 54546 - DNA, 674 bp, Homo sapiens
gctgtcagctgcagccccaaacatagctgatcatacgggtctcctgatcaaaaaactttcagtggctcagcacagcctacagagtaaaatagttgtcccaaaatctcagggacttagacatccaacagaaatttctgttcattctgcctctaaaacactctagactctraccacgtcttatcgtaacctaaggtgccattcaagtactcaaaaccccacataccactgtaccattctctctctctctctctctctctctctctctctctttctctctctttatcctctcccctcattcacataccatagagacagagatgagggtgagagacacatacttttttctctctctgtttttattatggaacatattaaacagataccaaattagacacaataaaaaacttgatgtatccatcactcaactttaacaatgaatattttatgggcaacattatttatttatatccacactcaccctcttcctcatactttcatttggattaaacccagatattatattgtcccacctagaaaagaatatcagtatatttctctaaaagataaggactcttaaaaagcataattacaaaggcattttgacatctaaaaacccaccattttaatattgccatacattgaggcagtgctcgcatttttataaatggcacatg

SEQ ID NO: 54547 - DNA, 674 bp, Homo sapiens
gctgtcagctgcagccccaaacatagctgatcatacgggtctcctgatcaaaaaactttcagtggctcagcacagcctacagagtaaaatagttgtcccaaaatctcagggacttagacatccaacagaaatttctgttcattctgcctctaaaacactctagactctgaccacgtcttatcgtaacctaaggtgccattcaagtactcaaaaccccacataccactgtaccattctctctctctctctctctctctctctctctctctttctctctctttatcctctcccctcattcacataccatagagacagagatgagggtgagagacacatacttttttctctctctgtttttattatggaacatattaaacagataccaaattagacacaataaaaaacttgatgtatccatcactcaactttaacaatgaatattttatgggcaacattatttatttatatccacactcacccycttcctcatactttcatttggattaaacccagatattatattgtcccacctagaaaagaatatcagtatatttctctaaaagataaggactcttaaaaagcataattacaaaggcattttgacatctaaaaacccaccattttaatattgccatacattgaggcagtgctcgcatttttataaatggcacatg

SEQ ID NO: 54548 - DNA, 668 bp, Homo sapiens
gataatcaacaaaaatcaatcaaacaatatggagactatatttaagtgctaaattaaagagatagttgattttccttttctacatgtagaaaacatctacactgatgataataaatacttttacttatatgtttaattttttattctttcagtctcatttccaaaccttctaaaacaatagtaaaattgatctatacaaggagaacagaaagcaatttaatcctatcaatcagagacaagattcggtcctttttgaattctttgtattgccygtaagattctttctttttcttataatttttttgacatggaacggtaatttgatttagggcctttgtgcaatctttttacatatgtgtagtattcattttacaaatataaaattcttatagctaacaaatttttcattctgtgatttatacttatttctactcagttcattattagtggagattgagaggagttggtcactctcctgaatgcaagaatcttttgttttattgaagcttttcattagtcagtttctttaacattatcttgtagctcttgtttgacattgtgaataatcactaccactcttctctgaaccttatttacatttccacgtatttttaaagttctgaggcaaagagaaggaaaatactctagtactcatttgccttaaacca

SEQ ID NO: 54549 - DNA, 819 bp, Homo sapiens
gactattatttaatttaacttcatggctgatgttgttttatttcaaaataaacccaaattgcctacaccagcattctttttcctctgggcctctccttccctctctatgtgcccactttagccatgcacctggcaggtaaaaaggcactcctgagacctcagttgttgattaaaaccaggttaggaaaagtggcttccatgtgcatctgactgggaccagacctccagcaaaaccatgaaaggtcacaccaagacagccaaagagcactctttttctatctgtttccacacctcatcttttcctgtcacatgtgacacctagaaggctttacactgaagccgcctggttggcccaggggttcataaataatggcctagaagcagttattctttcaactcattattattgttttaytgaagtagtggctcgagagtgctaactctgctttttatgaattttggcttgcttcgagaccaggcctctgggtctggcttggaaaataactagagttaacctcacacactacccactcagtctctttttaattcattcactggactccccatgaaacttgaggagtcagtccaagaactctgtgggacttggggtctgttatcctttaaaaaatggttcttggtggtgatggccccagaaaagaatagagtcttcaggatcaataagttgtaataactcttacctggggaagatgatttcatttttgtattcttgccccatctttgcagggtgttagagctgaaaataaattgattatttaattcagtcagtcaattgacaaattattattgaacatctctccc

SEQ ID NO: 54550 - DNA, 574 bp, Homo sapiens
gggtcaatgaggtgtggtttacaaaagcatttattcattcatttaataattyataaatcacttattgaaaacacatttatgttgaagcaatgtgaatgacccagggctatgaagacatggcttattcacattacaatcaggtagagagagataacatataaaccagcatgtgtacaaaatatgatatacactgtaaaaaagattcagcagaagaaaaaggcaatggtcaactctacctggggagaaaaaaaatagtcttttctacagcccaagaattcttgaagtaccattaaaagactattgtgtgcagctgaaatatgtgtcatcaaattaaaactttgaatatataacattatggacaaacaaagatattcagtgaacgttccaaaactttaccctcctccacttccagaagcaaaaaatgaattcatagcttgtaaatgttgatctcaaatgggaaaataaagaaaaacatttgtttcctagcatcttttctagaaatttccagttttcttctctttgtgtttcacctccttgtcagaacttagtaaagtcaaactttccaacaaaaagt

SEQ ID NO: 54551 - DNA, 633 bp, Homo sapiens
tctgccttataaagaaaaaaatggttatttacagatattaaaatgcactgtaaagtgtccttggaggagcagatgtactttttaataatgagatactacaatatagttttcatgacacattacccctgtataacagataatcgtagattgtgataaacataacaacgacctttatatgacaatgacttacttagggtttttagtaacctgagaattgtgataacagaacatctaagaaaatgaactaagggtaaagttgtgattgagaaagtggcagctgtcattcatattaaccaacatacagaaatggggggtcatttttgggatttgggcaaatgttcatgattttgtctgtattcataagtgattgtaaacggtcttatttttcttggtccttcatggtcacagagttgtctcgtctgatgttagtattctgtgaaatttttatgttaaagaagagaycacaaaagcgtaactgtgtctaccaggccagcttctaacaacaccaagcaaggcctcattgatagaccaagccagaatagtttctgccaggagctacttttttctcttttttttttatagtgataaattatataagcattcctggaatatattctatttgttcataatgca

SEQ ID NO: 54552 - DNA, 618 bp, Homo sapiens
accgctatctagcctcttcgtaagcagaaacatctacaaaatcatgtttgatgtgctagttatatttttcctatgaatattaaatataggtaattattaaactgcattcatccatatgctctctaaaacctcccttaaaccccattggcctgcacagcatgccatgggaaatgctgcaggcgtgaaaagagcactgtaccaggagtctggagcgtgacttgggactgcatcctggcctctgatgtgctgggtgatgttgaactattcccgatcccccatgcctctttttcttctttgcatatcagaccatgtgagcaccagggtccctccaggctcacacgttttgagtgactgcaggatgccattcagtggtacctcgaggttactcagcccctctcacatcacctgcgccgtgaggaagctcaggactctgacctagacatgtgatctatgagctcaaaagattgaaaaaygttgcagctcaggaacattttgtcttcacgtgtgctgcttgtttttgtttgggtttcagctctcactgtttattagccaaggaagcagcctggtctagtgcaaagagtaagggctttggagctaggcaggaccttgaatagctcc

SEQ ID NO: 54553 - DNA, 599 bp, Homo sapiens
cctacattaatgcgctcacagggactctttttacttctaaagtcctagaagaaagagcagagagggagactgaatcccaagtgaatccaaattctgaacaaggagagcaagtatatgactggagcactggcttggaggacacagatgattctcacctttacttctctccagaacagggaaatgtggtgtttaccagtgcaatagatgggtggggctttgggtaagtctgtttgcatcygattaaatctctttgcagattttatatgcagttgattgtttttagtgaaacttttattttgagataattatagattcacctatagttgtaagagataatgcagagagttctctggtgccctttacccagtaactgcctcctatccatgataacatcttgtagaactgtagtacaataaccaagcaggactttgccatttgccgtcaatatacaaaacatttctatcaccacaaggctccttcacgttgcccttatattgccacagctacttccttcccaccctcaaaccctttttaacccttgacaaccatttatctccaaatttctcatttcaagggtgttatagaaatggaaccaaaaa

SEQ ID NO: 54554 - DNA, 599 bp, Homo sapiens
cctacattaatgcgctcacagggactctttttacttctaaagtcctagaagaaagagcagagagggagactgaatcccaagtgaatccaaattctgaacaaggagagcaagtatatgactggagcactggcttggaggacacagatgattctcacctttacttctctccagaacagggaaatgtggtgtttaccagtgcaatagatgggtggggctttgggtaagtctgtttgcatctgattaaatctctttgcagattttatatgcagttgattgtttttagtgaaacttttattttgagataattatagattcacctatagttgtaagagataatgcagagagttctctggtgccctttacccagtaactgcctcctatccatgataacatcttgtagaactgtagtacaataaccaagcaggactttgccatttgccgtcaatatacaaaacatttctatcaccacaaggctccytcacgttgcccttatattgccacagctacttccttcccaccctcaaaccctttttaacccttgacaaccatttatctccaaatttctcatttcaagggtgttatagaaatggaaccaaaaa

SEQ ID NO: 54555 - DNA, 631 bp, Homo sapiens
ccggtgactctaggtagtgattgttcattttcattcggccctttcccccagatcagctcattaayagcaggcagaacctatgaagagccttctagttttcccatcactgtgaacttggaaattgatttgcatctagtagcagacaggggctcccaacctgagcacaacataccaggggaactgtggcaagaggctgttctcacagtctctttccttggctgagggataggcctaaaaagatggagtaaacgactccaggattacaaaccattgctggattatccagagctatgcgccctaagctatgaacccccttaagttcccacccccaggactcataggtgaatgatcctggacaagtgttttttatttaaaaataaaaaaaatttttttaataaaatttttcgttatttattttacatttaaaaagtttttttagagacaggtcccactctgtcaccccagctgcagtacagttgtgcaatcatacatagctcactacagcctcaatctcttgtgcttaagcactcctcctgccttggctcctaaagtgctgggattacaggtgtgagcgactgtgaccagcccagacaaattttttatattttgggcatgaatttgccttttctaa

SEQ ID NO: 54556 - DNA, 631 bp, Homo sapiens
ccggtgactctaggtagtgattgttcattttcattcggccctttcccccagatcagctcattaacagcaggcagaacctatgaagagccttctagttttcccatcactgtgaacttggaaattgatttgcatctagtagcagacaggggctcccaacctgagcacaacrtaccaggggaactgtggcaagaggctgttctcacagtctctttccttggctgagggataggcctaaaaagatggagtaaacgactccaggattacaaaccattgctggattatccagagctatgcgccctaagctatgaacccccttaagttcccacccccaggactcataggtgaatgatcctggacaagtgttttttatttaaaaataaaaaaaatttttttaataaaatttttcgttatttattttacatttaaaaagtttttttagagacaggtcccactctgtcaccccagctgcagtacagttgtgcaatcatacatagctcactacagcctcaatctcttgtgcttaagcactcctcctgccttggctcctaaagtgctgggattacaggtgtgagcgactgtgaccagcccagacaaattttttatattttgggcatgaatttgccttttctaa

SEQ ID NO: 54557 - DNA, 665 bp, Homo sapiens
ctttctggacaagaccatattatgtgtgttgtcacaatagggacattggaaacagtgaaaaagcaagtgtggcgccaggcatgaccttatgtttgggtcaaccccaaatcttgcagagttctgatttggaaatgtcctcacgccatcagacaataaaattcttttttttttttttttttttgtgagatggagtctcactttatcacccaggctggagtgcagtggtgcgatcttggctcactgcaagctctgcctcccgggttcacgccattctcctgcctcagcctcccgagtagctgggactacaggygcccaccaccatgccccgctaattttttgtatttttagcagagacggggtttcaccatgttagccaggatggtctcgatctcctgacctcatgatgcacccacctcagcctcccaaagtgctggattacaggtgtgagccaccacgcccagcccaaacaataaaattcttgaagacagcacagtgtcttgttttcttttgtatctttaactcttatcagtgtttggcctttaaattgcaggataaacggaggaaaaggacaaaacttccctgggctgtaagtgcactcctctggcctccgtgcccaggtccacaggccttaggtcacagagcaatgttgaattcttaggatgtga

SEQ ID NO: 54558 - DNA, 665 bp, Homo sapiens
ctttctggacaagaccatattatgtgtgttgtcacaatagggacattggaaacagtgaaaaagcaagtgtggcgccaggcatgaccttatgtttgggtcaaccccaaatcttgcagagttctgatttggaaatgtcctcacgccatcagacaataaaattcttttttttttttttttttttgtgagatggagtctcactttatcacccaggctggagtgcagtggtgcgatcttggctcactgcaagctctgcctcccgggttcacgccattctcctgcctcagcctcccgagtagctgggactacaggtgcccaccaccatgcccsgctaattttttgtatttttagcagagacggggtttcaccatgttagccaggatggtctcgatctcctgacctcatgatgcacccacctcagcctcccaaagtgctggattacaggtgtgagccaccacgcccagcccaaacaataaaattcttgaagacagcacagtgtcttgttttcttttgtatctttaactcttatcagtgtttggcctttaaattgcaggataaacggaggaaaaggacaaaacttccctgggctgtaagtgcactcctctggcctccgtgcccaggtccacaggccttaggtcacagagcaatgttgaattcttaggatgtga

SEQ ID NO: 54559 - DNA, 665 bp, Homo sapiens
ctttctggacaagaccatattatgtgtgttgtcacaatagggacattggaaacagtgaaaaagcaagtgtggcgccaggcatgaccttatgtttgggtcaaccccaaatcttgcagagttctgatttggaaatgtcctcacgccatcagacaataaaattcttttttttttttttttttttgtgagatggagtctcactttatcacccaggctggagtgcagtggtgcgatcttggctcactgcaagctctgcctcccgggttcacgccattctcctgcctcagcctcccgagtagctgggactacaggtgcccaccaccatgccccgctaattttttgtatttttagcagagacggggtttcaccatgttagccaggatggtctcgatctcctgacctcatgatgcacccacctcagcctcccaaagtgctggattacaggygtgagccaccacgcccagcccaaacaataaaattcttgaagacagcacagtgtcttgttttcttttgtatctttaactcttatcagtgtttggcctttaaattgcaggataaacggaggaaaaggacaaaacttccctgggctgtaagtgcactcctctggcctccgtgcccaggtccacaggccttaggtcacagagcaatgttgaattcttaggatgtga

SEQ ID NO: 54560 - DNA, 584 bp, Homo sapiens
atatataaaaagaaagataactttactagaagaagcccacatgaaactgggcttaataattttctagtgagaattttaatgaaagaggtttatgttttaaagctgaataatattttattgtatatttattacactttcttcatccactaatatgtcagagaacatttagattgctttcatatcttggctattgtgaataataatgcaatgaacatgggagtgcagatatctctttaagatattgattttctttcttttgaatrtatacccaggagtggaatttctagatcatatagtacttctatttttaagtttttgaggaccctccatacgttttcgcaggagctgcaccattttccattcccacaaacggtgtacaggcttctgatttctccatatcctcaacctagaggatattatactaagtgaaaaaagacagttttagaaggacaaatgctacatgattccacttacataagatacttaaaatagtcaaattcatagaagcagaaaatagagcggtagttgctagaaactggagacgggggtatgggatgttttccaatggatttaaagcttcagtt

SEQ ID NO: 54561 - DNA, 1436 bp, Homo sapiens
agcatgttaatttctaccaaaagtctcttgggatttttattaggataacattaaatctatacatcaatattgggagaattaaaatcttaacaatatctgctctccatatagtatgtctttacggacctactatatttctctgcttatttaggtatcttaaaatttctttcagcagtggtttttcagtttatagagaataggtcttattagattatcctaaatcatgtatgtttcaatggtcctgtaagttctacttttaattgcatttgccaatttttcattgcttgtatatggaaatacaattcatttttgtatattgatcttatatttcatgaccttgctaaatttacttaatagtagctgttttttaaagtagattccttagagttttcttcagagtctatcatgttatctgcacatcaggaaagtttacctctctatacctagtcagttttgtgcctattgcattccttacctcatttcctgtgctgcccatggtccattgtctgaaaataaattttagatagtttgtccagattcctaactgtttacaacaggaggacaaatctggtacagtaattcatcagagccagaagacagaatttcatgagatcaattttagcacagcttattccaccaaatcctactttgtatacttcatttccattaaacaatatcattaaaatgtcttcatatcgtcaaaaaacttcataaaaacttccatttaataactagtattctatcatgtgaatattttgtaatctattcaattctttattatcagactattaggttgttttcatgagtttgaatattgctgtagcaaaccttcttatgtgctctctttgtgtttctgatactttttacttacttttggaatagtaattctctcactgtattataggatttttgtgggtttctcgaggaggagaacaatgaattacaactctttacatctgcccgatgcctagcagtccagggaatatcaaagaaactcagtaaatttcccatgaacaaatgggacttggtgctccttgcgaagtgattgamctacacagatgatgccttttatgtttgtaagcttgaaccttttcaagacacacttacgatcttcacattcctgggaggtcagaaagttgtatatcagttctgctataagatagaagaaacaaatacagagaggtaggaagtcaggccaagcagctagtccctcgcagtgacaggaccagggtctcagtcacctctctcctattcctgtgccttttctacctgctcctctggattctctgaaccaaggcagccacccagaggtctttggaatttctaggctccagtgctgcatgctgctctccaagtaagagcagaacacagtgagcttccaaaggccttcctaggacagagctttcctctgggaacctggatttaggggttggtca

SEQ ID NO: 54562 - DNA, 572 bp, Homo sapiens
atttttccttcaaaactgattttgaaacgagagtcatgggtacattttggcctggggcaggacagggaagaataggaaaacattccttcttacttcttccaacctcagccttgcccttgtgtccatacacatctctaactgaaaactggctgcttgagacagctgctcagacttgcatcttttttttttggacagtcaagctctgttgtccaggctggagtgcagtggcgtgatcttggctcactgcaacctctgcctcccaggttcaagcgattctcctgcctcagcctcctgagtagctgggacgacaggcatgtgccaccacgtccggctaattttttgtatttttagtagagatggggcttcaccgtgttagccaggctggtctcgatctccygaccttgtgatccacccgcctctgcctcccaaagtgctgggattacaggcatgagccacagcgcccggccacatcttgaagactaaagctaaaggattctattagggattccataaaagatcctattatttgcctgtataacctacaaaaaataaattctagcaaaagaccagca

SEQ ID NO: 54563 - DNA, 586 bp, Homo sapiens
acaaatgaaattggagatagaaggccagatgtgatggttcacacatgtaaccccagccttttgggaggccaaagcaggaggatctcttgaggacaggatgagaccagcctggggcaacaacgaaaaaatccatctctacaaaaaacttaaaacaaaaaattagctgagcatgttgtcatgtgcctgtggtcccagctactcaggaggctgaggtgggaggattgcttaagcccagaagtttgaagctgcagtgagctgtgattgcaccactgcgctccagcctgagtgacagagtragaccttgtctctggaaaaaaaaaaaaaaaaaaattgagcataggaaagaaaaatctacctcactaatcccttactaaaggtaagaagtaaagcagagatttttataagcaaataaaatatcctacttagaatgtttaaaatacaaatataaaatgtgaatttatgtgcattagctcatttcacggtacagtaatcctgtaaggtagatggagccaccattcttaccctcagattgcataccctcccattcatttatgtaacaagcacttattgagaacctaccaggctc

SEQ ID NO: 54564 - DNA, 798 bp, Homo sapiens
tcaaaaaggatagtatctactctgcaggactgggtagattaaaaaaatactgagcgaagccactaagtgctacgacgtgggcttccatccagtgattttggtatttgtgtagtatgtgttccatgttgaaatgtgtctgcattaacgcttgtcatcctttgtaattcttacagttcttcccccaaattacaaggaatggaggctgggaaactacatttctgagactccttcatcatcaggatgccagataatattttaagtaaggaaaataaaattaacttttctggggcgagatgacagacgaatgtgcaaaggctttcctgttttcaagaagcagtttcttacactatgctttttattcaygttaaatgaaattctattagaataaattgtatcatgagtttttaaataaaatatttaatgatttttcacatctctccatctgactgttgagggtcagaagagagaatatcattctgcttgtataagaaaggactggacgcatttctatcaaatgtaagttctcagtaaatgttaattggcttacaataagttacaacagcattgtggaaactaaataaaatcatatcaccttttcttggagtaaattctatgaaacgtaaatgctccatatgcataaatcctgggttaaagtactttaagaatatgcagttcttctttaagttctgcattgctataaaatctgcctagaaattacagtaagaatggctttcattaccacaatgacattgaagggttaaatctttatttctctctgtgcgtgattaaaatataata

SEQ ID NO: 54565 - DNA, 602 bp, Homo sapiens
cattaaaacagcagcaccaaatacatattacctacagatgttgacagggtcttctcataacataaagcagaatgatgaagaatatattgggagttcagaggaaaaaactaatattttatatttaataataatatcaataatattgataactggtacaattaattgaggagrtggaaagccacttaaattgagaggtataatgaacaacaaaggacatagtcatgaaactatatgcaaaatgacaaaaaatatataaagctaaatttatttggcaaataaagaggaattaaatcttgtccattggctaaaatatagcaggtgttcaatagctatttcttcaatgatttttcaacaatttgcagaatcacaattgcaatgggcttcagattatccataaagaagggttttgacagtagcattatagttggaagaagagcctgggggacttatcttgaagctgtatgtgcacagcaaagcaggttttttatttaggttgtacgtttctttggaatttcggaagtcagtggctgatagaggatagaaaggaataaaagcccttcccaaagctacgcattggcactgcccttaatactgtgagattt

SEQ ID NO: 54566 - DNA, 1699 bp, Homo sapiens
aatgattattctactgaaaccatttctatggtggtaatatcttcgttttatttctcaatttaacataatatattttaattaacttgtaatttaatccacgtttgttaaaaataatttctttttaggtaggtatggtctaagaaaaayaggaacagaatataaatatttcttttgttttgcaggactatgttggcaaaataaattactttaatagcataataaaaaacaaccttgttaatttatacgtgcataacctttttgttgagagcataattgatgagtcttgttgctatcttctaacaggccattctgatgggaagggttggtaggattgggtaagcaagaatttgaaatcatcatccaccagctgaacttttttatttagtgattaatttatttaattctaaatgtagtgtttgcctccactgactccttcataaataatttgtttaaactaattagagtaataaattagatttaaaaaggtaaatgtattcaacatcaatgtataaatcagtgaagaaatgtggataaaatagatttggaattaatttaagaaaccattagcaaaagaaataagatcaagatggataaataataaaatgtgttatttgattggttcattatttcatttataggtcaatagtgaatttaaaaagaaaaaacactactacagcaaaaatgttattgctgaatatggactgcaaatatatagattattatatctatctaaatcactcgcttatataaaaattaacatcttcacatataatacctacctgttataaaaaagccaatcaatctctattggataagctcaaatttattatagcaaagattcctagcctaggaattgagtaagaagttctattccctgtattttgacataaagggagccagtttgacaattgtgctctcaatatatattctagggaaaacaaacaaaaatagactagtcctagatttgccaagtaaacattatgaaggtgtattggcatattctgcgtgaatatcctcctaagttcccacagctggaagcatttgtaatcacagagcttttattgcaaacaagaagttagcaatccttctctagctgaatattcatctatcagtacctttgaagttaaatacaaaggagccccagaataaaaggagaaatcgtcatttaaaaaattcatcaggttatgattctgataatttggctacatgtaaattatcgaactactttttatttttgtcagaatgtttggtattattatgtagacacaaactgtgttgttattttaaatttacaaccctataaaatacctgttcaaatatcctaacatctgtgcagaaggcagcttctgaaatgactgtcatgtacaccagcctccagctactcacatctttgggtaatctgttccccttgagagtgagttagaccttgtgtcctgtttctagcaaacagaatatggcaaaaatgatgggacaccacttccaagattaggttaaaaggattgtgacatacgtctcacttgcatactctctttgttgcttctctttaccagatttgatgaagccagctttcatgttacgagctacctctgtggagaagcccacatgtcaagagagtggatgaccctcttgcccacagccagtgaggaatggaggccctgaggccaatgggctacaaagaactaaatcctgtcaacattca

SEQ ID NO: 54567 - DNA, 1699 bp, Homo sapiens
aatgattattctactgaaaccatttctatggtggtaatatcttcgttttatttctcaatttaacataatatattttaattaacttgtaatttaatccacgtttgttaaaaataatttctttttaggtaggtatggtctaagaaaaacaggaacagaatataaatatttcttttgttttgcaggactatgttggcaaaataaattactttaatagcataataaaaaacaaccttgttaatttatacgtgcataacctttttgttgagagcataattgatgagtcttgttgctatcttctaacaggccattctgatgggaagggttggtaggattgggtaagcaagaatttgaaatcatcatccaccagctgaacttttttatttagtgattaatttatttaattctaaatgtagtgtttgccyccactgactccttcataaataatttgtttaaactaattagagtaataaattagatttaaaaaggtaaatgtattcaacatcaatgtataaatcagtgaagaaatgtggataaaatagatttggaattaatttaagaaaccattagcaaaagaaataagatcaagatggataaataataaaatgtgttatttgattggttcattatttcatttataggtcaatagtgaatttaaaaagaaaaaacactactacagcaaaaatgttattgctgaatatggactgcaaatatatagattattatatctatctaaatcactcgcttatataaaaattaacatcttcacatataatacctacctgttataaaaaagccaatcaatctctattggataagctcaaatttattatagcaaagattcctagcctaggaattgagtaagaagttctattccctgtattttgacataaagggagccagtttgacaattgtgctctcaatatatattctagggaaaacaaacaaaaatagactagtcctagatttgccaagtaaacattatgaaggtgtattggcatattctgcgtgaatatcctcctaagttcccacagctggaagcatttgtaatcacagagcttttattgcaaacaagaagttagcaatccttctctagctgaatattcatctatcagtacctttgaagttaaatacaaaggagccccagaataaaaggagaaatcgtcatttaaaaaattcatcaggttatgattctgataatttggctacatgtaaattatcgaactactttttatttttgtcagaatgtttggtattattatgtagacacaaactgtgttgttattttaaatttacaaccctataaaatacctgttcaaatatcctaacatctgtgcagaaggcagcttctgaaatgactgtcatgtacaccagcctccagctactcacatctttgggtaatctgttccccttgagagtgagttagaccttgtgtcctgtttctagcaaacagaatatggcaaaaatgatgggacaccacttccaagattaggttaaaaggattgtgacatacgtctcacttgcatactctctttgttgcttctctttaccagatttgatgaagccagctttcatgttacgagctacctctgtggagaagcccacatgtcaagagagtggatgaccctcttgcccacagccagtgaggaatggaggccctgaggccaatgggctacaaagaactaaatcctgtcaacattca

SEQ ID NO: 54568 - DNA, 681 bp, Homo sapiens
atgattgggtaatgcattccaactgacataactactacaaaggagaaagctagggtgcttcaaacatgtagaaagtaaagtggcacagagtagatgtttagcaaataattaacagaaggatggacagatggatagatgaaaatttgggaattagctaacttcactggtgtgagaatattgtaaagttgtttggaaacagatggacaacatatgctatttgtcatctttatctcctgcaggtgttttgcacaagtgtgagcgctgtgaagcagagcacatctgcccattgcctctgggtctcctgcccttagggcagtgctaggtccctggttatgtatttattgaaggaatgaatttaatgcaaaacaggggctacatttcaataattacaaaataastctgggtacggtggctcacgcctgtaatcccaacactttgggaggctgaggtgggcggatcacctgaggtccggagtttgagaccagcctgaccaaacaatgaaatcccgtctctactaaaaatacaaaattagccaagtgtggtggcacatgcctttaatcccagctacttggcaggctgaggcaatagagttgcttgaacctggtaggtggaagttgcagtgagccgagatcgtgccatggcactccagcctgggcaacaagatcaaaactccgtctcaat

SEQ ID NO: 54569 - DNA, 681 bp, Homo sapiens
atgattgggtaatgcattccaactgacataactactacaaaggagaaagctagggtgcttcaaacatgtagaaagtaaagtggcacagagtagatgtttagcaaataattaacagaaggatggacagatggatagatgaaaatttgggaattagctaacttcactggtgtgagaatattgtaaagttgtttggaaacagatggacaacatatgctatttgtcatctttatctcctgcaggtgttttgcacaagtgtgagcgctgtgaagcagagcacatctgcccattgcctctgggtctcctgcccttagggcagtgctaggtccctggttatgtatttattgaaggaatgaatttaatgcaaaacaggggctacatttcaataattacaaaataactctgggtacggtggctcacgcctgtaatcccarcactttgggaggctgaggtgggcggatcacctgaggtccggagtttgagaccagcctgaccaaacaatgaaatcccgtctctactaaaaatacaaaattagccaagtgtggtggcacatgcctttaatcccagctacttggcaggctgaggcaatagagttgcttgaacctggtaggtggaagttgcagtgagccgagatcgtgccatggcactccagcctgggcaacaagatcaaaactccgtctcaat

SEQ ID NO: 54570 - DNA, 731 bp, Homo sapiens
caactttttttctccctatccctatattatatgaactaccctcagtcctacacagctgccttagaatgatctggaagagacctttgaacctgaggcactttaatatataacaaagacagattaatggcagtattaaagaaaaatgaaattccatagttctggttatgcaggtattaagtcaattccaatggttctagatattaattacatagaaacattgtttgagttcaagctgttacgacaaaatagtatcctaggtgacttatcaacaacagaaatttatgtctcacagttctagaagttggaagtgtgagattggagtgccagcatggttgagctgtagtgcrggccctcttctggggtgcagatggctatttcttgttgtatcctcacatggcagaaagggcgacagagctttctcagatcccttttataagggcactaaatccattcatcagggctccatactcataatctaattacccccaaaaaccccacctcctaataacatcatattggtgattatgttttcaacatatgaatttagggagacacaaacattgtgtctcctgattcaaccaatgccctatattgctaattttcatgaaaatattcaagacttgaatattaaaatttttaatgagaagatgcttagcttttacttaagaacaacttgattgaatattaacaatgtttttttatagcatatttaattccaagcacagaggaat

SEQ ID NO: 54571 - DNA, 731 bp, Homo sapiens
caactttttttctccctatccctatattatatgaactaccctcagtcctacacagctgccttagaatgatctggaagagacctttgaacctgaggcactttaatatataacaaagacagattaatggcagtattaaagaaaaatgaaattccatagttctggttatgcaggtattaagtcaattccaatggttctagatattaattacatagaaacattgtttgagttcaagctgttacgacaaaatagtatcctaggtgacttatcaacaacagaaatttatgtctcacagttctagaagttggaagtgtgagattggagtgccagcatggttgagctgtagtgcgggccctcttctggggtgcagatggctatttcttgttgtatcctcacatggcagaaagggcgacagagctttctcagatcccttttataagggcactaaatccattcatcagggctccatactcataatctaattacccccaaaaaccccacctcctaataacatcatattggtgattatgttttcaacatatgaatttagggagacacaaacattgtgtctcctgattcaaycaatgccctatattgctaattttcatgaaaatattcaagacttgaatattaaaatttttaatgagaagatgcttagcttttacttaagaacaacttgattgaatattaacaatgtttttttatagcatatttaattccaagcacagaggaat

SEQ ID NO: 54572 - DNA, 594 bp, Homo sapiens
ggaacacataggcagagcacagagaatatttggggtagtaaaactattctgtatgatgctacagtggggaagacatgccattatacatttttcaaaacccatagactctacaacactgtacaatacagagaatgaaccctcatgtgaactatagactctaggtgaccctgttgtgtcaatttaggctcactgattgtagcaagtgtagtactgtggggcacaatgtttatgcagggaggttgtgagtgtgtaggggcagtgagtgtatggaaactttctgtaatttctgtttaatatttctgcaaacctgaaactcttctattaaatataatttaattatagagaccattgagaagctatcaactgagatatcattctaatttcaaatatactgttacaaagattgttctctatttgttcttttcacctcattttctattccaacaaatcaaaattatttctaagcctctggtatagtcttttagtatattgatagtaacattataggtagaaccattcaawtctcttcaaattttcccataattttttcacaactcatctatgtggtatatagctcagtaatttaagcagagt

SEQ ID NO: 54573 - DNA, 566 bp, Homo sapiens
cacaatagcacatatcaggcatttaagaataaatgtttgtttcctttcctgttcttatttycacatattggtagtttgagactaagttaataactttttaggcagtcaccctaaacatgactttcaagagttattttaggattagtctgccttttactttagtaagtactgtattctctccattgccaggaggaatatttgaaaaaggaaggaatgatttgaacattgtaaatagctaactgaatatagtgtcttgaggacatatttttggtaactgtgtttaacatctccataaaagtgttttttatttatcttcaatcacaggtacgggaaccttaaagatagattttgttggagagctgaatgacaaaatgaaaggtttctatagaagtaagtatactaccccttctggagaggtgcgctatgctgctgtaacacagtttgaggtatgggttattcttctctaaaatattattattcttaaattaggcattctgacaaaggtgtgtttattatgtggggtgattatttgaggctaggtgcccttggccatgattgtattcaca

SEQ ID NO: 54574 - DNA, 432 bp, Homo sapiens
atagataaggatatacatgcaaaagtgaacagtagttaaatttgtgtggggaaatatggatgattatatttctttatattttttatatttaagatattctcttctacttcaaaagatattaaatttggtatttttttaaaaaamgaattaccagtccaaccttgtttacaacatttcacttacaaaatgtagataatatgaccacctactatgtattccagagaaagttttcagagagtcacaggggcttgcagcaggaagctgtctgtgaccaccgaatgccaaggagtggtggacagtgaccaacagtaaatgctacggatgtcttgagttccaaaaggtgcctccaattaaggctgtcttctaggtgtttctttgatttacattccttttgaatttgatgagcgggggaatagttactgtggctgaaga

SEQ ID NO: 54575 - DNA, 794 bp, Homo sapiens
acagagtaatctacacttaaatgtatttctaaaatttgtataaagggtaaccattttctacaattcactgttttcactccataacattttaaacacgtttccacactgatctatatagttaattgttatgagtttgtagatttcattaatatttatgtgtgtgtgtgtgtgtgtgtatawatatatatatcactttttattgattcctttctttcttttttttcttttttttttttagatggagtcttaagagtgcagtggcacgatcttggatcactgcaacctccgcctcccaggttcaagtgattctcctgccttagcctcccaagtagctgggattacaggcacccacggccacgcctggctaattttgtatttttagtagagacggggttttgccatgttggacaggctggtcttgaactggtaacctcagaccatccacctgccttggcatcccgaagtgctgagattacaggcgtaagccaccatggctggcctgatttatttctttattggtggatattagatcctttacaatattttactattgctcatcagtctgaaacaaagatcttggaatctactctattttttgtagggtagattcccagaagtggaatcacgggtcataggaattgcacatttgcaattcccataggtgtttcaggtgattttttaaagaaagataaagttaagaccatttttacacagcaagactatatcttgacagtctttacagatttgctgttttgaggaattcgtatttagctctggctttttaaccacatgca

SEQ ID NO: 54576 - DNA, 794 bp, Homo sapiens
acagagtaatctacacttaaatgtatttctaaaatttgtataaagggtaaccattttctacaattcactgttttcactccataacattttaaacacgtttccacactgatctatatagttaattgttatgagtttgtagatttcattaatatttatgtgtgtgtgtgtgtgtgtgtatatatawatatatcactttttattgattcctttctttcttttttttcttttttttttttagatggagtcttaagagtgcagtggcacgatcttggatcactgcaacctccgcctcccaggttcaagtgattctcctgccttagcctcccaagtagctgggattacaggcacccacggccacgcctggctaattttgtatttttagtagagacggggttttgccatgttggacaggctggtcttgaactggtaacctcagaccatccacctgccttggcatcccgaagtgctgagattacaggcgtaagccaccatggctggcctgatttatttctttattggtggatattagatcctttacaatattttactattgctcatcagtctgaaacaaagatcttggaatctactctattttttgtagggtagattcccagaagtggaatcacgggtcataggaattgcacatttgcaattcccataggtgtttcaggtgattttttaaagaaagataaagttaagaccatttttacacagcaagactatatcttgacagtctttacagatttgctgttttgaggaattcgtatttagctctggctttttaaccacatgca

SEQ ID NO: 54577 - DNA, 656 bp, Homo sapiens
ttttcttttaaacaaatacaaatactactttttggaaatgaacaggctgtaaaaaagccaaacattccccccctcaagatgaaattcaaatgtgtccctgcctatatcccctgtcttgtccattaactcacttctcagtccagcgtctatgtctttgctcaggttcttctccctgcctgcagcacctatcctctcctttctggttaattttgtgctttcctttaaagatccaactagatcacttccctcataaagcccttcccgactagtctacaagtatctttcttctcccaagaacacctgtggcactgattcagcagtccattaagaacacagcctcatagtgtaatttcttttaatgtataggattgtttccaactcatcaggtctggtgcaattctgtcacgatttaacatggaacatccgggctgcccttcctgaatagtccagggcaagagcagtagtgagtrattcttctcttttctcgggttcactttgacctgaagcaagttgctatcttcggagagtatgtatggaccccaacagaatggggcccaggggtcttcatcccttacaaatcctggactgtatcaaagggaaggcctcggtaattcgtgctcacccagcccattcggatcctggtcctccctctcttg

SEQ ID NO: 54578 - DNA, 541 bp, Homo sapiens
gttccatgactttgctcttgtaaatagtgctgcaataaacatacatgtgcctgtgtctttacagtagaatgatttgtattcctttgggtatataacaagtaatgggattgctggatcaaatggtatttctgattytagatccttgaggaatcaccatactatcttccacaatggttgaactaatttacatgggccctttctttcttaatgtaaatatgcacaaagaccatattacttccattttacttaaactctggcaagtacaggtgccataaaacctatggagtgcttgaaagggaatcattctctttgctttctcctcattcttagattatttgtttcccagttttcttcttaaaaagaggaactgagctgaggcctagaggttttctgtggtggatcaatatgtgccatttgtgggcaggactccacagtgggtcaccactgaaaacaacagttcagttcctcatgcaaatgcacacagacaagccgaatcgagcttaatttgtggagaaaaagcaacagagaggaccctttagaa

SEQ ID NO: 54579 - DNA, 541 bp, Homo sapiens
gttccatgactttgctcttgtaaatagtgctgcaataaacatacatgtgcctgtgtctttacagtagaatgatttgtattcctttgggtatataacaagtaatgggattgctggatcaaatggtatttctgattctagatccttgaggaatcaccatactrtcttccacaatggttgaactaatttacatgggccctttctttcttaatgtaaatatgcacaaagaccatattacttccattttacttaaactctggcaagtacaggtgccataaaacctatggagtgcttgaaagggaatcattctctttgctttctcctcattcttagattatttgtttcccagttttcttcttaaaaagaggaactgagctgaggcctagaggttttctgtggtggatcaatatgtgccatttgtgggcaggactccacagtgggtcaccactgaaaacaacagttcagttcctcatgcaaatgcacacagacaagccgaatcgagcttaatttgtggagaaaaagcaacagagaggaccctttagaa

SEQ ID NO: 54580 - DNA, 683 bp, Homo sapiens
ttgtgacacttaatggacacttaattcatgacagttaattctgtcagtggccacttgcaatcacaggattgttgcaaggatgaaataatttatgctttgaattgaaagtgctttgaaaagtacagagttccctgtgagggcccagttgtggagatcgatattattttcatccattttcttttttgggagcgtggataaactgtaaagtcctgaagggtacggtctgagctgttttctcacagcacctccgcaacatggaaacccatttctggaatgcccatgtgcgcgcgggcttactcagcctgccctcacccaggcccctagccgggccgctcctgtccagcgaggagcatctgtttcattcagggtcattatgatgasgcagcaagttgtaaggccgctgcatatgaaagaacagctgggtccaggcgcggtggctcacgcctgtaatcccagcactttgggagaccgaggtgggcggatcacttgagctcagtaattcaagaccagcctggacaacaacatggtgaaaccagcctctactaaaaatacaaaattagccgggcatggtggtgagcgcctgtaatcctagctactcgggacacatccgtagtcccagccactcgggaggctgaggcaggagaatcgcttgaacccggggggcggaggttgcagtgagccga

SEQ ID NO: 54581 - DNA, 438 bp, Homo sapiens
  misc_feature (1)...(438): n = A,T,C or G
agnnnnnnnnnnnnnnnnnnnnnnnnnnnnnnnnnnnnnnnnnnnnnnnnnnnnnnnnnnnnnnnnnnnnnnnnnnnnnnnnnnnnnnnnnnnnnnnnnnnntgtacatttttccctctttctgccatttacttttaaaatgatagcatttgagcaatacagagtttagttaaaccagacatggagagtctctggtttaaaaggcaccagaaacgaacagcaaccaatttttgcttttttttcttcttcttttgtacaacactgtttattagaccagatgatgtactctactccaaaacattcatatggaaaaaaattgargaattgtgattaaaattgattttttccctttggaaagttggaatcaaaaatggttacctgctcacttatgaaacagatttattctgttgacatggaggcttgtttgaaatgtaattg

SEQ ID NO: 54582 - DNA, 560 bp, Homo sapiens
gtactgcttgaatcttcataaacataattttaactgttaattgatttcaaatattccaggattgagaatgatagaattcttaggaaatggtagcaataatttctcataatatcaatatagccaaacttcctagagattcaagaatatcttacttatatcagtgttttgcattaacgatgcaaacttttgtgacaactttcttcctgttaatctgttcctgaaataggagaaaaccatatagagttgccctcaatatctgtgggggattggttccaggaccccactcactaaacgctaaagacactaaaatttgcagatgctcaaataccttacacaaaatrgagtagtatttgtatataacctgcacacattcccctgtatattttaaatcctctctagattattcaaaatacccaatacaatgtaaatgttatgtaaatagttgttatagtggtttttttggtttttgttttgttttgtttttgttttttgagacagggtctctctctgtcacccaggcttgagtgcagtagaacaatcttggctcactacaacctccg

SEQ ID NO: 54583 - DNA, 369 bp, Homo sapiens
tttttgcttattctgcatcaatttagtattttatatattttctyctttttttttttttttatttgagatgtagcttcgctcttgtctcccagactggagtgcaatggcacaatcttggctcactgcaacctctgccttccagggtcaagcgattctcttgcttcaacttcttgagtagctgggattacaggcacctgtcactgcgttcagctaattttttttgtatttttagtagaaatgatgtttcaccatgttgaccaggctggtcttgaactcctgacctcaggtgatccacccacctcggcctctcaaagtgctgggattacaggtgtgagccaccatgctcagccagatatattttcctgtcaa

SEQ ID NO: 54584 - DNA, 369 bp, Homo sapiens
tttttgcttattctgcatcaatttagtattttatatattttctcctttttttttttttttatttgagatgtagcttygctcttgtctcccagactggagtgcaatggcacaatcttggctcactgcaacctctgccttccagggtcaagcgattctcttgcttcaacttcttgagtagctgggattacaggcacctgtcactgcgttcagctaattttttttgtatttttagtagaaatgatgtttcaccatgttgaccaggctggtcttgaactcctgacctcaggtgatccacccacctcggcctctcaaagtgctgggattacaggtgtgagccaccatgctcagccagatatattttcctgtcaa

SEQ ID NO: 54585 - DNA, 1947 bp, Homo sapiens
agagataatggagggttctttttttttttcttttcagacttttaaaggtgtcagatgctcagtctctcctaaatcctggaaaggtgctgataaggcagcactgatgtccatgcttttattttgacccatattgccagggtgttgtggctgcctgctccaggtctatcttgtccctaggtagggcccctctggctaagggaaatagagcaaaaagacttatagccaattaaacattttaggtcaggcagaaatggaagtgggcaggcattcataaatcccttaaaccttttagacaacatgagagtcaaaaagcaagtttacaaaattgatatccataagcactacctgttgagccatctgctgtttaagtgtctgttgaccatctttgatatggagggtctgaactaattatacggttatgagtatagcagaatacatgactcttagtagctacataagaagttttctgattacattgaaaaatgtagataaagccaagagtacagaatcaatttatactaaggaaaatattgctttttccatttttttagacctttaatataaaatatttcagcatcaggccataacagtagttagaatcagagggaaaaaaattacagaagctgactgataaaaaaattgaaggacaaagttattatcttaggccttctcaaagacagaaaaagctgaaagcagcaaaatttgaacgtctgagatatgaatctgagaagttgtcaaataaataaaacagtttatagaattaaacataaaaacatcttataattttattaggagaaactcaataccttaagaaaatcttgttttaacataggggaactatcattaaaaagttatataaatatatgtgtttaaaaattatagccaacctaattatatacacaaatgtttacctttctttcttttttataacttttaaagtccacaatttgaattaacctttaaataatttttaggcaatttttcaataaaaacataattttatgtctttttataattaattttatattaaaaataatttttaaccacttttaatgcctatgaacataagatattcacctaagtaagaaccttaacattaagcagatgggcttttgccgataactcagaggatttagctgttttcattaaaccaatgatcttaaattagttttagtcttatttttgtcatgggtttgtagctataatcttcttaatcagccagggtatggcccaatgggctcttaggtagaataaaaattgagctgcacattttgaagttagggaacaaaggagcacaaatacacagatcaaagaaaacagagtactcccaaacaaattcccatagagggagactggaaagttaataaatcttatctcaaaccagttggtactgcaaacaacatatgttaggtccaaatgccacaaaaccaaaatgccagagacagaggatgttcrgtgtacataccagtttagcttaagcagtcctgaagcccttcagcttcccaatcatagtattccttgcaccagtgaagtgttgcaggcacctgatgccacaatggagaaagaagggaggatacctgagataaagaattcttagcagctcctggatgtctttagaatcccagctgtgaggtcagctatccatgagcagctggcactcgtgagcagttgtcactctgcccatagtgcgtacaggtaagtcctgacgctgccttggccaattactccatctgtttgaaaccagagaggctggatgcctgaggcctatcaccctgtgctgaatgccaggtaattgtaaccaaactcaggttcaactgctcactacttgatggaaagaaagcaggtttatttatgtgctagcaactttggagatggccagactgaaatctcaaaaagccatctcagagtctcaggctggctaaagggattttaaggggaaatgtggca

SEQ ID NO: 54586 - DNA, 602 bp, Homo sapiens
tttagagatgggggtcttgctatgttggctaggctggcatggaactcctagtctcaagcaatcctcctgcctcagyctcctcaagtgctgcgattgcaggcatgagccaccatgctcagccaaaagtactgcttttaaatgctttaaatctcagtttacagagaaaagtagggaggaaatgcagactatttatggaagttaagcccagatttcaaaaacttaatgtctttgctcaccatagaaataggtattctaagatgaaagtgcttatttgaacaaatatttttgctagaatgtattttatttttttctagggtttattatatacagtgggaaaacttgaagaaaaaatttctttaaatgccatttcccccctttgtgagataccacactattgtaagccatgctctactttagacttgatcttgtggtaatactgaattgcttgtggttgccagcacatgttagtgctgtgccacccgcccccccacccccaccccccgccacccaccctttgctcttgctgttccttctgccaggacagctatgtcaaccactgcacttccttcgctggctcattcttacaccacccaccaccttca

SEQ ID NO: 54587 - DNA, 600 bp, Homo sapiens
ttggctgtgactgagttttaagtaatcttaaaggactttgtaagtactcttataggactagcctatgaaaaatttccaggcataattctccatatttcttcagctgctacaagcctaataaagataaccatggtaattatagaagccactgctaaggaagatataggcattgaggaaaaaaaatcaggtccctgaattattgctttggcaagagttacaaatcaggagtatcagttttataagtaaacaagaagtgatttttctatcatggttgagcaatgacacatttagggtttatttttttttttaacagcagttgccttaaatgaaatacctcctaattgatattagtaatgtgattactatgagagaaatgtgatttggactttgaaaatgtattttcccttctccttatagagaaaggttacaatatgcaacttttgtgaagattaaaataattgcttcagtgatgttgcttgattaattatacatattatagttaacactactattatcgagtcaacagatgtttatgagcatttactaagtaaaagttgctgtgstatatctgacaacataatagttgacaagaactctcat

SEQ ID NO: 54588 - DNA, 642 bp, Homo sapiens
ctctgagtacttcattggaatacagtaaaagaaattaatatcttgaaacttccaatctgctctatayttatgctaataaaaatataatgcaagccgcatatataagtttaagttttctagtggacacactaaaaagagtaaaaagaaataaatgaagttaatcacttcttggccttttggctaagatcaagtgaagaaataagtaaaattaacagtaataatttatttaacccaatttattaaaatatttcaatgtataattatttaagaataattaaaaagatattacattttctaggttttatggtatttgtccctcaaaactgaataagtgttttacacttaaatcatagctcagttgacttgctggatttcaagttctcaatagccatgtgtggctagtggctatctcactgaacagcacagttatagactgtataatcagaatgaaagcttccacagaacacagctgcctaaaaaatttatatttacacttacagtacctgtaatagtacctcatccatgcacaaacacaataaatatttatggaatgaatgtataaatgcacaaatgttggtatatttcaaatccaacttacataaatgtgggaaaaagagagatcagattgttactgtgtctgtg

SEQ ID NO: 54589 - DNA, 642 bp, Homo sapiens
ctctgagtacttcattggaatacagtaaaagaaattaatatcttgaaacttccaatctgctctatacttatgctaataaaaatataatgcaagccrcatatataagtttaagttttctagtggacacactaaaaagagtaaaaagaaataaatgaagttaatcacttcttggccttttggctaagatcaagtgaagaaataagtaaaattaacagtaataatttatttaacccaatttattaaaatatttcaatgtataattatttaagaataattaaaaagatattacattttctaggttttatggtatttgtccctcaaaactgaataagtgttttacacttaaatcatagctcagttgacttgctggatttcaagttctcaatagccatgtgtggctagtggctatctcactgaacagcacagttatagactgtataatcagaatgaaagcttccacagaacacagctgcctaaaaaatttatatttacacttacagtacctgtaatagtacctcatccatgcacaaacacaataaatatttatggaatgaatgtataaatgcacaaatgttggtatatttcaaatccaacttacataaatgtgggaaaaagagagatcagattgttactgtgtctgtg

SEQ ID NO: 54590 - DNA, 642 bp, Homo sapiens
ctctgagtacttcattggaatacagtaaaagaaattaatatcttgaaacttccaatctgctctatacttatgctaataaaaatataatgcaagccgcatatataagtttaagttttctagtggacacactaaaaagagtaaaaagaaataaatgaagttaatcacttcttggccttttggctaagatcaagtgaagaaataagtaaaattaacagtaataatttatttaacccaatttattaaaatatttcaatgtataattatttaagaataattaaaaagatattacattttctaggttttatggtatttgtccctcaaaactgaataagtgttttacacttaaatcatagctcagttgacttgctggatttcaagttctcaatagccatrtgtggctagtggctatctcactgaacagcacagttatagactgtataatcagaatgaaagcttccacagaacacagctgcctaaaaaatttatatttacacttacagtacctgtaatagtacctcatccatgcacaaacacaataaatatttatggaatgaatgtataaatgcacaaatgttggtatatttcaaatccaacttacataaatgtgggaaaaagagagatcagattgttactgtgtctgtg

SEQ ID NO: 54591 - DNA, 642 bp, Homo sapiens
ctctgagtacttcattggaatacagtaaaagaaattaatatcttgaaacttccaatctgctctatacttatgctaataaaaatataatgcaagccgcatatataagtttaagttttctagtggacacactaaaaagagtaaaaagaaataaatgaagttaatcacttcttggccttttggctaagatcaagtgaagaaataagtaaaattaacagtaataatttatttaacccaatttattaaaatatttcaatgtataattatttaagaataattaaaaagatattacattttctaggttttatggtatttgtccctcaaaactgaataagtgttttacacttaaatcatagctcagttgacttgctggatttcaagttctcaatagccatgygtggctagtggctatctcactgaacagcacagttatagactgtataatcagaatgaaagcttccacagaacacagctgcctaaaaaatttatatttacacttacagtacctgtaatagtacctcatccatgcacaaacacaataaatatttatggaatgaatgtataaatgcacaaatgttggtatatttcaaatccaacttacataaatgtgggaaaaagagagatcagattgttactgtgtctgtg

SEQ ID NO: 54592 - DNA, 854 bp, Homo sapiens
tggtgtgagatggtatctcattgtggttttgatttgcatttctctgatggccagtgatgatgagcattttttcatgtgttttttggctgcataaatgtcttcttttgagaagtgtctgttcatgtccttcgcccactttttgatggggttgtttgtttttttcttgtaaatttgtttgagttcattgtagattctggatattagccctttgtcagatgagtaggttgcgaaaattttctcccattctgtaggttgcctgttcactctgatggtagtttcttttgctgtgcagaagctctttagtttaattagatcccatttgtcaattttgtcttttgttgccattgcttttggtgttttggacatgaagtccttgcccatgcctatgtcctgaatggtaatgcctaggttttcttctagggtttttatggatgggtttttaaaattttcaaagtcattggtctattcagttttttttcttgctcataaataaattttaactcataactcccttgaaagtcatatgcttcaccaaaatcatcaagtctattagcatagatttccatatggtagtctcttatgattttgtaatcccatttgcatcttgggttatagccaccttcttaaggtgtatttgtatttaattaaggtttttatgtyagaactcagaactcagaatggtcgtgttcttctgattattctattttttggggggagttgattcttttgttttgtttttcaaagatctagctcttgtgtgtgtacactctaaattagttggttttccagtttattaaagtctatgttgctattaattccttgctcctttcttcaagtattgatttaattatgca

SEQ ID NO: 54593 - DNA, 812 bp, Homo sapiens
tgttagagatagggtcttactctattgcccaggctaggatgcagtgacatgattattgctcactacaaccttgaactcctggaatcaagcgatcctcttgcctcagccactggagtatctaggactgcaagagcacaccaccacacccagataatttttcgttgttgtcttctggagagggggtatctatgttgcccaggctggcctcatatgatcctcccacctcagcctcctcctgctaatattataatttaagtatttgccttttgctatgctcaaagttttacttagccttgttgaaagtagggccaagtgttgactgctaatgtgtgaaacaaaagatatgacttctttccatgcttgggatacagaggagcatagaggaacagaagcttagaaaagccattatgtcaagccaactagaaactatcagaggccttggtacagcattttattgcaagaagtggccggagactaccaggacagatctgtggaacatggaagcattcctggaattctcagaaatctcaatagaaagaagctaggtttaaaaaacaaaaacctttgtctatttacacataatragagctcagacaatattagtgggtactaaaaatctcagtgacactgatacctggagaatttagatacattccaatttcaaataaataaatttttctgctataaagtagaataaattaaacaaatatcttgaccctccctccattgccccttgtgtccaatctagaagtaagagaaagaggaaacataggtgctgtggggttgttggtcatatagattccccaaaaaac

SEQ ID NO: 54594 - DNA, 656 bp, Homo sapiens
tgattgattttaacatttcttcttctctaatataagcattttaagctataaatttccacctctgattcaacgcagtgatttagctgtatctcactaattttaacatgttttcatttcattcagttcaaaatatattctaatttttctcatgatttctattttgacccatggcttattcagaaatgtgttgtttaatttccaaatattttggaacattaaaggtatctttctcttgttggccactaatctgttctattttgaccaagtattattttctatatagttctgagccttttatatttattgacacttattttacttcccatcatattactatattactacatatattatatactactatattactacawatactatattactgaatgttccatttgtgtctgaaaagaatgtgtagtctgccattgtgggtaataattttcaaaaaacatcaattaggtaaaattagttggcgttgttttttaacttttctatattcaaagtaatttactggtctatccattactgagaagaaatactaaaatcaccaattataatttgtatgtatcaatttttcttttcagttctgtcagtttttgcttcatgtgttttgaagctctgtaactgataaaaacacataaagaattatgcat

SEQ ID NO: 54595 - DNA, 507 bp, Homo sapiens
cactgaatattttattctaccaagaaagatagccacaacacaaacattcaaatgaagaaattaacagtgggcagaggtggggaggtaacttgaggccagcagctccagaccagcctgggcaacagagtaagacccccatatctacaaaaaaaaaattgtaaacaattatgtgcatgtggtggcgtgggcctgtagtcctagctactcaggaggctgaggcaggaggatctcttgagtccaggaggttgagattgcagtgagctatgatcataccactatatacctgcctaggtgactgagcaggaccctgcctcaaaaagaaaaaaaaaattaacactgaggcrttattgccatctaaccctcacatgccaccattcaaatgttccccgtagtcctttgtagctaaagtattcatttcataataaagagttgcagtcatttgtcatgtcttgtttgtctccttcactccataagactttttcagtcttggctgggctttcataacct

SEQ ID NO: 54596 - DNA, 507 bp, Homo sapiens
cactgaatattttattctaccaagaaagatagccacaacacaaacattcaaatgaagaaattaacagtgggcagaggtggggaggtaacttgaggccagcagctccagaccagcctgggcaacagagtaagacccccatatctacaaaaaaaaaattgtaaacaattatgtgcatgtggtggcgtgggcctgtagtcctagctactcaggaggctgaggcaggaggatctcttgagtccaggaggttgagattgcagtgagctatgatcataccactatatacctgcctaggtgactgagcaggaccctgcctcaaaaagaaaaaaaaaattaacactgaggcgttattgccatctaaccctcacatgccaccattcaaatgttccccgtagtcctttgtagcwaaagtattcatttcataataaagagttgcagtcatttgtcatgtcttgtttgtctccttcactccataagactttttcagtcttggctgggctttcataacct

SEQ ID NO: 54597 - DNA, 615 bp, Homo sapiens
tgtctttctctctacaggccaaataggagagtagattggggatgtagcgagaatcaccccgtttacatcttggaagtttttaatggtgacactaatctctgcaatccttcaaggaatgctgtattttttttatttactatattcctgagtagaggcacttctaattatttccatttagtctttatgaatagactatgatactagtcaatataaagtaraaagcaatccaaggcaagtacaacacaaatgctgctgagacaatttaagcacataattgccaaaaatattttgctatttattgagcttactcataagaatgtgccttactaggcactctaagaacattattttagcaaggaatggtgttgcctatcctgtgttatcaacttggagggtaatataattccttggattgatgaaggtattaagagagtgtatgttaataaagaaacaactgtcaaaaggtttctgctaaatatattattataaactaatttaatatggaaaaggatatgaaaatttgaattttaagcatcaagagaacaattcatttatatactgaaagcagtaacccccaaacagtcgaatgttatttaaaaataattttaatctaat

SEQ ID NO: 54598 - DNA, 584 bp, Homo sapiens
gacatgattacatttaaaaaaaaatttgtcaatatttttgacacgtttgcctggttcatgtctgatcttatataagctgatttgttagtgacatacagtgaggaatttaagaggactccacagggctcttcactggcccctaaatttctgtcaatcaatattaatgtgatatttctagaaacagaggacaaagcaaatttataacaatcttgtttggataatgctttaaaataacttttctcaatgtctggagatgtttcgaagtatactgaaagttccatggtagttgagaagttatagaatggatatcaggtaaggaaaaggggaagaagggtttgatgggagagttaaatggtgggggaagtacaagaaagagaaaaaatatgtasagtatattcaactgtgtgtgtgtgtgtgtgtgtgtgtgtgtgtgtgtgtgtgtgtgtagatatatacagttgaatgtacagtatatatcagttgacccttgaataacttggggtttcagggcactgacttccctatacactcaaaactttgtgtgtaacttttgactccctaataacatataattaaaattttca

SEQ ID NO: 54599 - DNA, 584 bp, Homo sapiens
gacatgattacatttaaaaaaaaatttgtcaatatttttgacacgtttgcctggttcatgtctgatcttatataagctgatttgttagtgacatacagtgaggaatttaagaggactccacagggctcttcactggcccctaaatttctgtcaatcaatattaatgtgatatttctagaaacagaggacaaagcaaatttataacaatcttgtttggataatgctttaaaataacttttctcaatgtctggagatgtttcgaagtatactgaaagttccatggtagttgagaagttatagaatggatatcaggtaaggaaaaggggaagaagggtttgatgggagagttaaatggtgggggaagtacaagaaagagaaaaaatatgtagagtatattcaactgtgtgtgtgtgtgtgtgtgtgtgtgtgtgtgtgtgtgtgtgtgtagatatatacagttgaatgtacagtatatatcagttgacccttgaataacttggggtttcagggcactgacttccctawacactcaaaactttgtgtgtaacttttgactccctaataacatataattaaaattttca

SEQ ID NO: 54600 - DNA, 773 bp, Homo sapiens
gtcacatcactgggaggagaccctagtgtgtcccatcctcaactgctacaggcatacttgacttgaactatgtttgttttgctccattgaacattttatgtcacattgttcacagtagagacataccccctccaccactgaccctttccacactgctgcacccaccaggtgatttgcatattgcaccctaggggaggaccttcccttgtgagtctgaggtaaaagctcagctctaaccttgcctcgacagatcaggactcctcagtccatctcacaatgaggctccctgctcagctcctggggcggctaatgctcaagatagaaaaaatatgaggtgggaaaatggggttggaaggtgagttctgggagctccatagcttcccatatttatttcaaccatgtgttaraggcacatggtctatgctccaggaaagagaattcatatttttgtcttaagaataatcaggattcacctccaaggaacaatgacctctgattaagatcttgaaaataaagagttccctgctggctggtaaataatgggttcattttagaaagtctactttccatgatataaatcaaaacttgaaaatatatgtaactgtaaatcagtatcatagagaaatcatgaaagctgctcataatgtgtctatacaaacttgcacttctctgttattatttcaggatccagtggtgatactgtgatggcccagactccactctcctggcctgtcgcctctagagagccacccccatatcctgtaggtctagtc

SEQ ID NO: 54601 - DNA, 1717 bp, Homo sapiens
gcttaacattatatagatgacatctttacaagtaataagtatagtaaagataccacaagtaacataaccagtcttctattgatggaattttttttttttttttttgagacggagtcttgctcttttgcccaggctggagtgcagtggcacgattctcagctcactgtaacctccacctccagagttcaagcaattctcctgcctcagcctcccgagtagctgggactacaggcrcccaccaccatgcccggctaattttttgtacttttaatagagatggggtttcaccatgttggccaggttggtctcgaactcctgacctcagataatccacccgcctcggcctcccaaagtgctgggatcacaggcgtgagccactgcacctgacccttgatggacatttagattgtttcctttttttttttaactaacacaaataacactgcagaaaatagcctcaagtaactttgcacatttgtatgtttttttgcagaataaatgcctaaacatggcaaatctaatatgtttgtgatggttttaaataacctctataaattatttgatcctcctcccatcaaaagtggagtttaattctcctccctttgaatatgggccagtattcatacttgtttctaataaacaatgtggtagaagtggcacagggtggcttctgtggttaggatagaaaaggtgacactgcttccacctggttccctctttgtcagttcctcatccttgaaacacagccacttcacactggagagaagcccaagccacatggaggggccgcagctggccgccagacccacctgaggtcacagccgacagctggcatcaacctccagccttgagagtgaatgaaccttcggatggccaggtcccatctcattattttatatcgaaatgatttactctcaaaagaaaaatgaaagaaatacaaattatagcaatgttatctttagcaaggactgcttgcaaggttggcccttggttcgtatctgggaaattggatttggggagggttcccgcccttccctgatatgaatggctcactgcccctaaactgtgtaaacactgtggtttatgtcttcgtactgggagtccagaattttggtacatgctaggcagagggggcctttgtgactagcctgcagtaaaaccctcggtgccaaatctctagtgagtgtccctgacaaatgacattccacacgtgttgtcccaacacacttctgggggaagtgggcgcgtccagcatgtgagagggtcttggacctcacactccatttcctctggacttgacccatgtgcctttttcctttgctgaatttgcttcatttccagttgtcgtaatacatcatagcctcgagtatcactgtatgctgagttctgcgagttctcctagccaatcaacaaacccagggtggtcttagagaccccaacacgccacagcaacaagacaacagggaagccggcgcttcctgtatgtgtatacattgctggtggtacctgggcactgtgagagcaacacagcctgtctgttgagagccactcaatgtccacttcctctgactcagtaatcccatctgggaatgtgtcctttggcaacaattccacagcaggaagcagaggcttgaagatattcatcacagcttgtgctaaacctgaacaaaacctaaatgcccaagaagagaaaaaattggttaaacacattatcatg

SEQ ID NO: 54602 - DNA, 1717 bp, Homo sapiens
gcttaacattatatagatgacatctttacaagtaataagtatagtaaagataccacaagtaacataaccagtcttctattgatggaattttttttttttttttttgagacggagtcttgctcttttgcccaggctggagtgcagtggcacgattctcagctcactgtaacctccacctccagagttcaagcaattctcctgcctcagcctcccgagtagctgggactacaggcgyccaccaccatgcccggctaattttttgtacttttaatagagatggggtttcaccatgttggccaggttggtctcgaactcctgacctcagataatccacccgcctcggcctcccaaagtgctgggatcacaggcgtgagccactgcacctgacccttgatggacatttagattgtttcctttttttttttaactaacacaaataacactgcagaaaatagcctcaagtaactttgcacatttgtatgtttttttgcagaataaatgcctaaacatggcaaatctaatatgtttgtgatggttttaaataacctctataaattatttgatcctcctcccatcaaaagtggagtttaattctcctccctttgaatatgggccagtattcatacttgtttctaataaacaatgtggtagaagtggcacagggtggcttctgtggttaggatagaaaaggtgacactgcttccacctggttccctctttgtcagttcctcatccttgaaacacagccacttcacactggagagaagcccaagccacatggaggggccgcagctggccgccagacccacctgaggtcacagccgacagctggcatcaacctccagccttgagagtgaatgaaccttcggatggccaggtcccatctcattattttatatcgaaatgatttactctcaaaagaaaaatgaaagaaatacaaattatagcaatgttatctttagcaaggactgcttgcaaggttggcccttggttcgtatctgggaaattggatttggggagggttcccgcccttccctgatatgaatggctcactgcccctaaactgtgtaaacactgtggtttatgtcttcgtactgggagtccagaattttggtacatgctaggcagagggggcctttgtgactagcctgcagtaaaaccctcggtgccaaatctctagtgagtgtccctgacaaatgacattccacacgtgttgtcccaacacacttctgggggaagtgggcgcgtccagcatgtgagagggtcttggacctcacactccatttcctctggacttgacccatgtgcctttttcctttgctgaatttgcttcatttccagttgtcgtaatacatcatagcctcgagtatcactgtatgctgagttctgcgagttctcctagccaatcaacaaacccagggtggtcttagagaccccaacacgccacagcaacaagacaacagggaagccggcgcttcctgtatgtgtatacattgctggtggtacctgggcactgtgagagcaacacagcctgtctgttgagagccactcaatgtccacttcctctgactcagtaatcccatctgggaatgtgtcctttggcaacaattccacagcaggaagcagaggcttgaagatattcatcacagcttgtgctaaacctgaacaaaacctaaatgcccaagaagagaaaaaattggttaaacacattatcatg

SEQ ID NO: 54603 - DNA, 1717 bp, Homo sapiens
gcttaacattatatagatgacatctttacaagtaataagtatagtaaagataccacaagtaacataaccagtcttctattgatggaattttttttttttttttttgagacggagtcttgctcttttgcccaggctggagtgcagtggcacgattctcagctcactgtaacctccacctccagagttcaagcaattctcctgcctcagcctcccgagtagctgggactacaggcgcscaccaccatgcccggctaattttttgtacttttaatagagatggggtttcaccatgttggccaggttggtctcgaactcctgacctcagataatccacccgcctcggcctcccaaagtgctgggatcacaggcgtgagccactgcacctgacccttgatggacatttagattgtttcctttttttttttaactaacacaaataacactgcagaaaatagcctcaagtaactttgcacatttgtatgtttttttgcagaataaatgcctaaacatggcaaatctaatatgtttgtgatggttttaaataacctctataaattatttgatcctcctcccatcaaaagtggagtttaattctcctccctttgaatatgggccagtattcatacttgtttctaataaacaatgtggtagaagtggcacagggtggcttctgtggttaggatagaaaaggtgacactgcttccacctggttccctctttgtcagttcctcatccttgaaacacagccacttcacactggagagaagcccaagccacatggaggggccgcagctggccgccagacccacctgaggtcacagccgacagctggcatcaacctccagccttgagagtgaatgaaccttcggatggccaggtcccatctcattattttatatcgaaatgatttactctcaaaagaaaaatgaaagaaatacaaattatagcaatgttatctttagcaaggactgcttgcaaggttggcccttggttcgtatctgggaaattggatttggggagggttcccgcccttccctgatatgaatggctcactgcccctaaactgtgtaaacactgtggtttatgtcttcgtactgggagtccagaattttggtacatgctaggcagagggggcctttgtgactagcctgcagtaaaaccctcggtgccaaatctctagtgagtgtccctgacaaatgacattccacacgtgttgtcccaacacacttctgggggaagtgggcgcgtccagcatgtgagagggtcttggacctcacactccatttcctctggacttgacccatgtgcctttttcctttgctgaatttgcttcatttccagttgtcgtaatacatcatagcctcgagtatcactgtatgctgagttctgcgagttctcctagccaatcaacaaacccagggtggtcttagagaccccaacacgccacagcaacaagacaacagggaagccggcgcttcctgtatgtgtatacattgctggtggtacctgggcactgtgagagcaacacagcctgtctgttgagagccactcaatgtccacttcctctgactcagtaatcccatctgggaatgtgtcctttggcaacaattccacagcaggaagcagaggcttgaagatattcatcacagcttgtgctaaacctgaacaaaacctaaatgcccaagaagagaaaaaattggttaaacacattatcatg

SEQ ID NO: 54604 - DNA, 411 bp, Homo sapiens
taaggatccctaataaccaaccagaggactccctcctatttcagaaaatggccttagttatgaaatagccatagataacatatttggagggccggccccttttctgggaactaaattctgcccacagtccctctgcaggggcaggtttagatggccatgacttgccttaggttattttcccctcccctccagctgcagttgattggaccaggggtggtcacctgatttcagagaagctaatataagttggtgagttcagccaatcagattctcccttgcatatgcaaaatgagagtatttggtggtgggcatttgagaaaggcctcacagaatgggagttagagttaatgacagggaaaacccaagccacatgcaagacaaaattggaggggagagrgtggccagaggaag

SEQ ID NO: 54605 - DNA, 2387 bp, Homo sapiens
ccttcttggtttctaagtggcatagcctccccctgtgtttgtaagctttacggcaagcttggccaacctgtggcccacgactttgaatgtggcccaacataagtttgtaaacattcctaaaacattatgagatttttaggtgatttttttaaagctcatcagctatcactagtgttagtgtattttatgtgtggcccaagacaattctttatccagtgtggcccagggaagccaaaagagtagacatctctgctttacggtgaccagccaaataggaaatatgggcttttatgcaaaacacattgtcccaatgatttttttttttaagagaccagttgctcaaaagaacagcagggcaactaccatcaacattatcaggaaggaactcttcccagggatttatataagcaagactttacatgatgcaatgaatgacaagacaggcaaaatctttccacaaatgctagctgatcaatcaaaacaatgtgatttgatggaaaacgacttggttggcagtgattagccagaccatttagctatctcggaaaggctgaagcaaaagttgattggacagcagcaatgatgtaggagctatttcagttaggaagacaagctaatgacatccaagtccccttctgcctctcctatgttgagtcctgctcaatggctcctcccaacataaaaaattacaaattgatgtaagcattcataaacctaaatgtttacagggatggaatggactgaattgtgacccacgaatgtttattatgttgaaagtttaaccccaatatgactgtatttggagataggaccattaaagaggtaattaagattaaacgaggtcttaagagtgggaccctaatccaataggactggtgtccttataagaagaagagacaccaggaaggcacatgcacagagaaaagaccatacaagggcacagcttgaaggcagcaaaccaaggagaggcctcaggagaaaccagcctgctgacacctagatcttggacttccagcctccaggactatgagagaataccagtctgtggcattttgttatggcagccttggttaactaataataatgggctaagcaaataatctaaataaaggaaaccaagaggttaaatgtacatgcatgcatttgagaagtaacrgagactgcagttaggccattgttgacacagaattgcaggaacagtattgtcaagctctctaatctttaaagaaaataaagtgtgtgtatgtgtatgtgtgtgtgtgtgtgtgcgtgcgtacattgaggtgggaggtagttcatgtgaaatctttttttttccacaataatattttgttggtttattttaaaagtcataaactattgaatgatctaagccaacacatctgggagttggatctacccctatgtggtcatcaattttgtaaatctctgtgccactgcttgttgacaattcattatagcagcagacagtgaaaggccatttagccatgtaatcatctagctgttcatatcacatcatccatgtgaatgcaagtatctagcattttgagtcaagtaaactggtagatactatacttaagagagatggtgccttataatatgcaagatataactgtcaaggcctctgacaccacatgtatattgacggaagccagaatagctattgctaaaaatgcatttcattgactattccctctgcaaatgtgccatgatgacaatcaatcaggataaatcacacagctattcaactaattcatccataaagaaaactgatagagtgttgaagtcagtgaggccaaaatcagatgcccatagcatctgcatttgtaggatatgaagctttaatggcggtctctcagaaattttaaaaacagccttatcggcattatccactgctatctacatggacagccttccccatgattttcaaggtcatataagtggttaagtattcacttccttatgcatttataaattgtaggggctttccagagaaagttctttatgacttacttattgctgcttgcaattctgaaaactctaaattagaaatgtcaactcctttgttggacaatagtttcatattggtgctggtcagtgggatttcccaacttgaatctcttacttaattactttttattaatctgtttttttaactacttttttttacttggttacaggatttacttcatatgctacctctggtaatagtctttagcttttgcccagccatggttctcactatccctttcctagaattttgcagtaagggctaatggactatagctttccaatctcatctgactctaaaacccattattactatgtctttctaaggcaaagttatatcacagattttggattgatacagtggtattaatgagcct

SEQ ID NO: 54606 - DNA, 311 bp, Homo sapiens
tgaaggactcatagcctagaaaggagaacaaacagatcacctgaaatgmtgtattctgaatgctgtataataactacctgtccacagagtgatgagagcccaaaggactgagtgccaaagggagggtttttcaaagaagatgctatttgtgttataaaatggtggcagaagggcattctaggcagaggaaatcacagcaaaaagaattatggaaaaagatgactttttaaacttcagaatggctgtacacgaagtgtgggtgtggagagatgcaagtggatgctggcagtatacagaccaaagggccttgt

SEQ ID NO: 54607 - DNA, 311 bp, Homo sapiens
tgaaggactcatagcctagaaaggagaacaaacagatcacctgaaatgctgtattctgaatgctgtataataactacctgtccacagagtgatgagagcccaaaggactgagtgccaaagggagggtttttcaaagaagatgctatttgtgttataaaatggtggcagaagggcattctaggcagaggaaatcacagcaaaaagarttatggaaaaagatgactttttaaacttcagaatggctgtacacgaagtgtgggtgtggagagatgcaagtggatgctggcagtatacagaccaaagggccttgt

SEQ ID NO: 54608 - DNA, 587 bp, Homo sapiens
  misc_feature (1)...(587): n = A,T,C or G
tccccctccccgacaaaataactacattgaagctgctcttgtcattttgggccaatrtaaattcttcaatttttttcaaagaacaataagaaaaaaacatatatttacatatttataatatatattatttaattatttatatattattattaattatttatatattttatatatatatatagtttcgcttttgtcgcacaagctggagtacaatagtgcgatctcagctcactacaacctctgcctccaggtttcaagtgactctcctgcctcagcgtcccgaataattgggattactggcacctgccaccacgcctggctaatttttgtatttttagtaccagatggggtttcatcatgttgaccaggctggtcttgaactcctgacctcagatgatccacctgcctcagccttccaaagtgctgggattacaggtgtgagccacncatgccgggccaaagatacatatttttttcttctccttttatgacactgctttcctgctattcctattcgccatcccctttttttcaattcttcattttacttccagttccacaggctctctttggaactttgtatttca

SEQ ID NO: 54609 - DNA, 705 bp, Homo sapiens
cgcacccggctttcttttttttattatttttrtttttgagacagggtcttgctctctcacccaggctagagtgcagtggtgtgatattgacctactgcagcctcaacttcccaggcttaagcgattctcccacttgtcagcctcctgagtagctgggactacaggtgtgtaccacctgtatctttttgtatcttttgtagagacagggtttcatcatgttgcccagactagtctcgaactcctgggctcaaatagtccacctgtcttggcctcccaaagggctgggattataggcatgagccaccgcacctggccccaaggaccatttcaaacctttattaggtttctcctgtctttttttctttttctttcttcccatccctttctgactctgactctttttcctcttcctctttttctagttctgatctctttccctctgcctgtacccctagctggacccttggtatgagctactggataggggtttctggccaggcctgggatccttcctcttactgccctcattcctctttgtgaatcaccattatgtatgttagttactacctaggtaggtacttgttgtattgcagatgctgataatgagcaggtgtttggaggatccagagtgggtagcattgatgatttagtcttgaaaagtttactcatttgctaggtccaagcgcaacataggccaattaccat

SEQ ID NO: 54610 - DNA, 705 bp, Homo sapiens
cgcacccggctttcttttttttattatttttatttttgagacagggtcttgctctctcacccaggytagagtgcagtggtgtgatattgacctactgcagcctcaacttcccaggcttaagcgattctcccacttgtcagcctcctgagtagctgggactacaggtgtgtaccacctgtatctttttgtatcttttgtagagacagggtttcatcatgttgcccagactagtctcgaactcctgggctcaaatagtccacctgtcttggcctcccaaagggctgggattataggcatgagccaccgcacctggccccaaggaccatttcaaacctttattaggtttctcctgtctttttttctttttctttcttcccatccctttctgactctgactctttttcctcttcctctttttctagttctgatctctttccctctgcctgtacccctagctggacccttggtatgagctactggataggggtttctggccaggcctgggatccttcctcttactgccctcattcctctttgtgaatcaccattatgtatgttagttactacctaggtaggtacttgttgtattgcagatgctgataatgagcaggtgtttggaggatccagagtgggtagcattgatgatttagtcttgaaaagtttactcatttgctaggtccaagcgcaacataggccaattaccat

SEQ ID NO: 54611 - DNA, 705 bp, Homo sapiens
cgcacccggctttcttttttttattatttttatttttgagacagggtcttgctctctcacccaggctagagtgcagtggtgtgatattgacctactgcagcctcaacttcccaggcttaagcgattctcccacttgtcagcctcctgagtagctgggactacaggtgtgtaccacctgtatctttttgtatcttttgtagagacagggtttcatcatgttgcccagactagtctcgaactcctgggctcaaatagtccacctgtcttggcctcccaaagggctgggattataggcatgagccaccgcacctggccccaaggaccatttcaaacctttattaggtttctcctgtctttttttctttttctttcttcccatccctttctgactctgactctttttcctcttcctctttttctrgttctgatctctttccctctgcctgtacccctagctggacccttggtatgagctactggataggggtttctggccaggcctgggatccttcctcttactgccctcattcctctttgtgaatcaccattatgtatgttagttactacctaggtaggtacttgttgtattgcagatgctgataatgagcaggtgtttggaggatccagagtgggtagcattgatgatttagtcttgaaaagtttactcatttgctaggtccaagcgcaacataggccaattaccat

SEQ ID NO: 54612 - DNA, 705 bp, Homo sapiens
cgcacccggctttcttttttttattatttttatttttgagacagggtcttgctctctcacccaggctagagtgcagtggtgtgatattgacctactgcagcctcaacttcccaggcttaagcgattctcccacttgtcagcctcctgagtagctgggactacaggtgtgtaccacctgtatctttttgtatcttttgtagagacagggtttcatcatgttgcccagactagtctcgaactcctgggctcaaatagtccacctgtcttggcctcccaaagggctgggattataggcatgagccaccgcacctggccccaaggaccatttcaaacctttattaggtttctcctgtctttttttctttttctttcttcccatccctttctgactctgactctttttcctcttcctctttttctagttctgatctctttccctctgcctgtayccctagctggacccttggtatgagctactggataggggtttctggccaggcctgggatccttcctcttactgccctcattcctctttgtgaatcaccattatgtatgttagttactacctaggtaggtacttgttgtattgcagatgctgataatgagcaggtgtttggaggatccagagtgggtagcattgatgatttagtcttgaaaagtttactcatttgctaggtccaagcgcaacataggccaattaccat

SEQ ID NO: 54613 - DNA, 616 bp, Homo sapiens
ttagccgggtgtggtggtgggcgcctgtagtcccagctactcgggaggctgaggcaggagaatggcatgaacctgggaggcagaggttgcagtgagccgagatcaggccactgcactccagcctgggygacagagcaagactccatctcaaaaaaaaaaaagaaaagaaaagaatgaagggacatttacccaaggcctagtgtatgtctaatttcaatgatataactttttctgatgccaaataaagaacagaacttcaaccttaaaaccctgaaaaatcttctcttcacaattaagtaaaattgaatttcaattctcagggtttgttctactttctaagacttgtgtaagccccatataacttcctagattgtcatactttatgtcttcttccttcttcaatttaataatcgaggaacacaatattttgaatttcagttaaatacaagttatcacctcaataaacttttttgttatgttgaatttggccttctccagagaatcaaataaccaagcacaatgagtaagctgaaattcactaagcttaacttatgcctacttcatgatttctctttagaccctccaccactcaagcacattcagcaagaatttgatg

SEQ ID NO: 54614 - DNA, 634 bp, Homo sapiens
cattcatgtttccccgccttttacacaaaaggaggcacactgttttgtgccttgctttcgtttcacttactatgtctgagaacttttcacatcattatatggagagcttcccctttctttatcagctgtgtgagagtccagtgtcaagatggactgtgtttggtttcatcagtctctgtggaaggatcctggctgacctgtgtcttttgcttttacaaaccttgctggatgatctcacaatcaccttgttgcatgcacacgtaggcagagctgtagaatagactcccagtggggcagttgctgggcaaagggtaaatctctttataattttggcacatattgccagagtgccttctacagggttctatcaactgctgggcactcctgtcagcagtaagagtggctgcttctcccagcctttccagtaaaatatgttaccaacatttgaagccagrtgcagttgctcatgcctgtaatcccagcaactttgttactaacatttgggatttccgcaatggtgtgtgctaataaatgtttaacaaccacttctccaaacaaaacgaaacaaaacaaaacccaaaaccaaaaaaacaagaagccctaattgtagtatctgctgatttccatagcataa

SEQ ID NO: 54615 - DNA, 537 bp, Homo sapiens
cagaaagaataagcacacgctggagccaataagggctggaattgaatcctggctccayactgagtaggttgggcaggttccttaaccacatcactttttctgcttggaaaactgctctgccctctgcccccaagatgaggaattaagagaccaggggcctattgttcaggttagtatcgctgtgtaacaaatcactccaaaacttagtgatttaaaacagccattttattttgatcactattttgtgtgtcaggaattcaagagctcagctgggctatcctcgcctggggcctttcatgctgttgtgtgaaatctgcaaccattgccggctggatctgcaaccacactgcaagctcagtggggctggatgtccagatggcacactcacatggctggtagttgatgctgctggtggttggctgggaactcagctcagctgtcaaccagaacacctggtggtctcaggcagctggcttcccattagacagccagatagaaactgcatgacatattctaatctagcctcagacatcgcac

SEQ ID NO: 54616 - DNA, 605 bp, Homo sapiens
gaatattatgcaacctcacccaggctttgtagaaagacaaagatcaatgtgtaatgtagaaagacaaagatcagatgtgagaagaaaggcatctcacatctacctataaaatattatcctgcaaacactccyaaaataaccctgccttcaggctgcagtgttggaatgatgatgaagcagtgtttttgaagtacctcaatgcttacaggcgatacttttagaagttctactgcaagcaccttttcacggagatttatttatattgcagctatgcaaagcttctcagcatgaaacctggcatacaagagcttggcctccaagagatgtttttaaagctaattgtcgggaatggtgggtaacacattaatttagtaatctgtctattataaaagcagaatggtaataaaaaggaaagacatttaccccagacattgcttcctattacactaacaaaaatgattttgaaatacatgcctaaaaggcattgttcaggctctttcttattccggactacccaactctactcggtttttattttttactttttgagacaggctggagtgcagtggtgcaatcacagctcactgcggttttgacctcccagg

SEQ ID NO: 54617 - DNA, 729 bp, Homo sapiens
tgttctttattctacacctgggtggtcacaactgaaaatgttttgcttatttctaaacagaaatcattttttgacatgttcattttaatgatgtgtctatgcctggggctaatgtcatgaaaacaatgtgtctggtaaggagaaaactgaaaaagtcagcattaaaaagacatttaagtccatttcaaatgcctcccatatgcagactccactttatctcctccagttctctaaaacccttcactccttggctttttctggctaatacacacatctagctaagaaagctcaacttttctttttactagagatgttctctstgtgtgtgtgtgtgtgtgtgcgcgcgccgtgtccgctctgagtttatcctacttttaaaaagctgagtggtgttttacacattttggaataggcagctagtgcttctttttctgcttttgaagtttcctgggaagtcccttaaaagcataccacaaaattaatctcttcctgtttgccagagggttgctctactctaaatttggctctacatctacaagcatgctctaggaagccaattaaaatggatgaacaagcaaaatgaaaacatacctatggaccaacccaaggttaccgtcaggtggtgaaggacttcagaatcacttacctgaagcattgtgtttctcagcagcaaagagtagcatccccagccctgaccctaattttattcctacttctcagttctgaggc

SEQ ID NO: 54618 - DNA, 596 bp, Homo sapiens
tggaactatcttttttgtattttgtttgcttttcaatctgatgttggttttcatccacttctgattcaatttcctttagcgcttctagccttttgtaggaaattgctttaaatgtttctatatgggaataaaatatatttaaaataacatttatgctccaatttaaaagtaatacatttccataactttggaacaaacagaaacctttaaagaataaaattataattaggcctctttcactatcyggagataatccttgttagcattttgccctttggtcttttaaagttcatacggaaaatataaatctatgtataatatacatttttattcataggaaatataaaaatacatgtaatgttacaaattagacttgagtttatatttacatatgtatatatttaaaattaagtgaaaaaataggattttttcacttaatgttatattattatgacggattaaagatcctttgccaatccttttattaaaagaaaatcttcagccaaattaaatttaaaggagtttaattgagcagtgaatgatttgcgaaatcaggcagcccccagaatcgcagcagattcagaaagactccaggg

SEQ ID NO: 54619 - DNA, 552 bp, Homo sapiens
tggaaattgcttttaacacagtgtttgtaacattaagatccaataattcaattcaaaggaacataacaaaaggaatttcctacagataacaacaaagagttaacatttcccagggcagacaagtttccaattcaattagttttaatgaaccttctgctcactggttactgaactagaaagaacagcaataaatgcccagaggaaagagagtgaggatattaaaggagggttagcgtatagtatataaattttcaagttgactaaaagagtagccttgatgcagttttgggagtaaagccacagaatcagatctgtcttctgagtttagtgtacaggggcagtaaattttagccagttgttttatgtgatgaaacaaacacactagtctgtaccctcagtctgataacacaatagataatagaatagataataccataatacagctccttaaaatagataagcatattccataagaaaaacataaratgatttttttcttctaatcagcaaaacagatttgttagttgatgtatgtataaatggatatatatg

SEQ ID NO: 54620 - DNA, 862 bp, Homo sapiens
tattaaccttacctgttaacaaatacggatttcagtttgtaaaggtaggaattaatattcatggagataatagaaatttatcaagtggaagagaaatattatttaaaaattaaagatacttaagattacatagttgatatattaagagacgtaaatgtgaaatatctctgagctgtttattcaaagctactcagtgatattggaaatgaatatgagtaggtaagaaaagatttgggaggtgtatgttactactattcttaaaaatctaacatttgtaatttccattcagtaactacagatgtttccatatttttatttaacccaatgtttattttgggtttcgaagcattatatgaaagtttaagtaatttctaaatacatatttgagaaatgtgaatttggaatgtacatatctttaaaatcataaaaagtgataatttagtttcagatatcaaataatttaaagttttctaaatttkacatcagagtaaagtctcagggaaaaaatatattagtagttttgaaatacctaagtaatagtcatcctacattatcagcatcatgccctctcctctccaaaatctgctccatcttacttaatactgccaccaaaaattttggagttagctgaggtaatcactacaatgtttttcacccacaattttcaaaagactattaaattatcacagcccaaattcaacttattagatccctcttgccctctccatagcactgccctagacctgaatattaaccacctctccactaggctacaggctgattttaggagtatttctactttctagtaccatccactgccaagtaatcatataccagaatcttctctttaagggacaaatgt

SEQ ID NO: 54621 - DNA, 628 bp, Homo sapiens
ggtacacaggtcttcacttattcttcttgtgatgatggcagatttttactaaactttgtagtatctatctgagccaagatacagctgcagaattctccacaaggagctcttaccaagagagaagggatgatattgcagaaaatctgtgattttagctctgaactcattactttcacctttttctaatatgccaaatttacttattttattttttgagacagagcccaggcgggaatgcactggcacaatttcggcttactgcaacctctgcctcccaagctcaggcaatcttcccgcctcagcctcccatgtagctgagtctacagccatgcaccaccatgcctggctaatttttgtatttttagtagcaatggggtttcaccatgttggccaggcttgtctcaaacttctgacctcaggtgacctgaccgtcttggcctcccaaattgctggggttacaggcrtgagccactgtgcccggcccatgctgcatttacttattgctaatatgcaccagtaaataaatgtatccatagatccagggaagtgttaatgtctcatatgacttaatttttgatgtgtcatttttcttaaacacactaggatatagaataagtaattttacaga

SEQ ID NO: 54622 - DNA, 545 bp, Homo sapiens
ttgcttttcatgatggcatatccctacatggaactttttagtggattttgtttgttttttgtatttttgtgtgctgtagaggatgtggaaagaagggcttcaggaaggaagtctgggttggggtgaggttagtttccctcagtacatgtgggcacarttttcttcagcttaagggaaatcttaggagagggacattgatacttttacttgcctttaatttgtttacattactgcccaagcagatgaaaataaagtagatgggatgaatgccccaaaaggccaaactgggaactctagccgtggtccaggcgacggagggaacagagaccactggaaggagtcagataggtatgcttgttctctttctcatctttcctctgatccacatgtttgtgtaattaagaaattaagttcttggttctcagagcactgccagatcgctcattgtgagcaaactaaagtcagccaacgtagacagttaagattctgaaaatctagaagtaatacatcatccagacaacaaggactgttgactagaggtgcct

SEQ ID NO: 54623 - DNA, 545 bp, Homo sapiens
ttgcttttcatgatggcatatccctacatggaactttttagtggattttgtttgttttttgtatttttgtgtgctgtagaggatgtggaaagaagggcttcaggaaggaagtctgggttggggtgaggttagtttccctcagtacatgtgggcacaattttcttcagcttaagggaaatcttaggagagggacattgatacttttacttgcctttaatttgtttacattactgcccaagcagatgaaaataaagtagatgggatgaatgccccaaaaggccaaactgggaactctagccgtggtccaggmgacggagggaacagagaccactggaaggagtcagataggtatgcttgttctctttctcatctttcctctgatccacatgtttgtgtaattaagaaattaagttcttggttctcagagcactgccagatcgctcattgtgagcaaactaaagtcagccaacgtagacagttaagattctgaaaatctagaagtaatacatcatccagacaacaaggactgttgactagaggtgcct

SEQ ID NO: 54624 - DNA, 627 bp, Homo sapiens
caaaaacagttttatgtatcattttgttaactttgaaatatgctcctggaccccttagyccaagatataaaatctataggcttgggttaggacttcacttgagatttgtttatagtttttccatatgagcttctgtcactctactaaggtcctatcagccataaattttccagttggaaattcctcttgatttttgaacatgaaaccactgcacgctatgggcaacttgggatttctttttcaatttcctcaagactgaggaatatgtcatactacttagactatagccatgtattaacaatctacagtttctgcttttgatggctgacagctcaactacggaaaatagtattttgaaagctgtgggaattcaatcatcaactattctctcatgggctctcttccaaggtattggacctgattaaaggaaatgttacttttggaagtatgcattgctatcaagtaaaagacacacacagagagccacaaccaacaacaaaacagcatatagttatgaccgttccttattcgacctcagccatcccacaattctctattttttcaaatttattttcttttattgccaaatgtgtgtgagtgtgtgtgtgtgtgtgtgtgagagagaga

SEQ ID NO: 54625 - DNA, 468 bp, Homo sapiens
ttttttttttttaaagttttaggatgtagaaattatctttccttggctgctcatcaattctgtcatatgtttatcaataaaaacacaagtcttaataagcacctactgcatacaagacatcattctccacatttaaggcagtcttacaggatactacaatgcagytgggaagtcaaattattacatgtgttctaaatagggttatggttcaattattaatgattaaaagagaaaacaaaaaataaacaatatataaccaactagttgtttcttatatgcagaaaagaaaacttactgtttctaaataaggaccacctattgtgttgatgtaattaatataatagtaaagattttattgaagaatgagtatagattagatagaatgagaaaaaggagtccaggtgtagatgaggtataaataagttcaaggaggagtgtttaagtaataaatgatctagaatggatcac

SEQ ID NO: 54626 - DNA, 372 bp, Homo sapiens
caagaatgtgtcttaaacaagagtactatggaatgaaaggaaagtcagaaagagtttttccttgtgacacaggatgagaggtcactcagaagcctcccctaaaaagcccacgtcgccagttggaattgaactcctttgctcatattctcttagaactttgcttagaagcacataatctctgcygtggcaaagattatagaggtcatcccttacaaaataacctaattcaaaatcaggaaaatgactttttggataaacttttatctttcttttataaaatggaggtgtaaagattccagtgtcctttttaccttggctgccaggaaactcagctaaatccagtacttacttcaaaccatgaattcatctcag

SEQ ID NO: 54627 - DNA, 670 bp, Homo sapiens
cagaggtgctgtgacattcaaatcatttctggaggctgcatgagaaagtagcaaccaggggctggtgctgtagttttaacctagcccatttgtggatgcgacctctctctgggccttggagggagctcaaaagctaccagggttcccatcagacaaagctgatttaccaggtcatggtagtttcccgaagccaagccaggtgacttaggatttgcccgttttcctttatttaagacattcatgtgggtcagtgcttgggacatgccaggtgttatgttaggaggctgggaagacaaagacaaacaagtgaggggctgccctagtgtggtgtaaacacataaggtttagttcaaatccatttttgcagccttggattgtggtgctgacaccacattctgggtgttcatcatgagatttgattttatacattgactttttttcttaagcctcccacagtctccagttggaaaattttctattgtctgactcctggacatttcccatctgaggggcaaggcctggtgctcctgcaaaccctgccccrcagttccccaactctgtttggcaggggtgggagctgcaggtttcagaagcagtccccagggtgctttcctattcctgccacttctcagcagttcccttgagcgccctgtcctgtgattgatttaga

SEQ ID NO: 54628 - DNA, 2252 bp, Homo sapiens
  misc_feature (1)...(2252): n = A,T,C or G
aaccggggggggttaaactgctcaaagttctagacaccagtggcaggatgggtaccaatggtgctgtgacacagggtccactctatcgtggtagcaggacagagctgaggaggcaatggcaagacggggatggcagtggcattaaaacccacaatggccatgagtagttttctcaaggatgaatcaggtggaatagggtaactgattttaacaggggcagcataatgaagtatgttctgtggtgaaaaataaaacaaagaatcacagaacaaaaggagggagggaagaaagagatgacctaggcaggaatgggacaaggaattggactyttatcacaacaccctgcaagacttctggaaacagtcaaccgcagggatttctaacaggtnnnnnnnnnnnnnnnnnnnnnnnnnnnnnnnnnnnnnnnnnnnnnnnnnnnnnnnnnnnnnnnnnnnnnnnnnnnnnnnnnnnnnnnnnnnnnnnnnnnntcttgcttttttgacatactaattataaggttacctttattacagggatgtttatagtaagaggctctctacaattgaaaagcaaattagtatatctgtttttaatggaagggtacatcactcacaacctgtcagtttctagtatcaatcacctgcttccaaagagtggcagaaagcaaccaagtgcttagcaaaggcaacacataaagccagcacctaagaatctggggtatctagcaccatcctagagtccttgagaaaataaccacttgttcttaagaggttagataaaattctacctgtcctaaagaaagctgacacgacaaaagccccaaacacactgaacagataaacaaaaatgctcataacttactttaatcatgtgagtcggcttacccttgaaatccttaaagaatttatacaatttaactcaatacaaatttagttctctatctctgtttttaaaatacaagttccttcactgtaatgagttctgaacagattatgttttctgtatacaaaaaagagtcaatattggagtcagagctcataaggagagaagcctgcgtgctatgctaacactcccatttggaggctagtctctttgcaattgcccaacaccacctgcatacacttctctaagtctttcacttactacactagtttgattggcccagtacagttggtttttaaatgtttatgactgagagaaaaaatgtggacgttttgaaggagagcaaaatggaaagtgatcacgcagagtagaacccctggtggccgacagtactgtttaatttcatacctgtattgttaatcaaatattggctgtagcttaaatttcagtaaatcactcagtcctatgttacatgtaaatcctcaggataaaaatatctcacatagtgaaagataatggaaattagatgaaatcgacttgtttctgattctactgctgataacactgacgtcattttgatcacattgatgcagtgtgatcatctgcagaggcctcagtgcaaggcagctcccttccccgtgtccaagtcccctgaccctctctcttccctccatttcctcagaatgtaccctttaattcacaaacaaaaacgcagctattcgcattcttccctggcctactctgccctacctcaaacttgcctgtgccttaaatcctaaaacgttccttcctctctccagactcagtgggaaagcggtccctatttttcctggaactccgggcttgtctcttggaacttcacaacaattgcccctttctcctatattttcaccctctcccccatccctagatttaggacattgctcacgtcttgttcatcttacatacccacaccctcgctcagccctacatcatctcccagctactgtatcatccacttagcagccaacctataaactcctctcactttgcctcccattctcttgcctgagccactgatgacctctttattgccaaacccaggagacaggtttgaggatgagctgatgtgaaatctctgtgccatctgactgcaatgactatcgtttcctttatgaaactttctcctcctttggcttccgcaaaactcctctcttcctattttcttcctatgtctcctgccattccttctcagtgtcttcttgtgatcctttgcctacatcttagatgtctccatcttcatccctcttctctcttcatgcaattattccatctatgcaatttcatatactcccatgactaaaataccacctatatacactgataatgtc

SEQ ID NO: 54629 - DNA, 679 bp, Homo sapiens
gaaaatggaaatttttcttcagtttttttttcttcatcccaaagcacaagtaaggcgttaaatttcaataggtagatagatgtagagatagtagatttttagccacgttttaattttatcctattacatttattttaaaagatttggaagacttgtatttttttaatttgtaaatatatccttttgtcctaaaacttagataatttttgtgaacattccacatgtttgataagagggtgcattactctctgcctctcttaactgtcttattctctaccagtttatcttatataaatattaaaactattattacatgygtaaaggttatatttgctttgctaagattgtattagctatctttttatggtctggaacagaggttggcaattttttcttgtaatgggccggatggcttctgtcaaaaccactcagctcgccattgtgttgtgaaagtcgccttacacaatatgtaaatgcaagtgcagctctgttccaataaaattttatttacaaaaacatgtggcaggctagaattggcccactggtcttagtgtgccagctcctggtcagcataagccttatgacactctgaaatttagatattaagtttatgtaatatcgtatatgtctgttaaccttttgggtagtaatttgttgaaaaacatacaactttacccat

SEQ ID NO: 54630 - DNA, 679 bp, Homo sapiens
gaaaatggaaatttttcttcagtttttttttcttcatcccaaagcacaagtaaggcgttaaatttcaataggtagatagatgtagagatagtagatttttagccacgttttaattttatcctattacatttattttaaaagatttggaagacttgtatttttttaatttgtaaatatatccttttgtcctaaaacttagataatttttgtgaacattccacatgtttgataagagggtgcattactctctgcctctcttaactgtcttattctctaccagtttatcttatataaatattaaaactattattacatgtgtaaaggttatatttgctttgctaagattgtattagctatctttttatggtctggaacagaggttggcaattttttcttgtaatgggccggatggcttctgtcaaaaccactcagctygccattgtgttgtgaaagtcgccttacacaatatgtaaatgcaagtgcagctctgttccaataaaattttatttacaaaaacatgtggcaggctagaattggcccactggtcttagtgtgccagctcctggtcagcataagccttatgacactctgaaatttagatattaagtttatgtaatatcgtatatgtctgttaaccttttgggtagtaatttgttgaaaaacatacaactttacccat

SEQ ID NO: 54631 - DNA, 667 bp, Homo sapiens
ggccactgagcaagactctgtctcgagaaaaaaaaaagaaagaaagaatgcagacagtaccttgaaaacagtatatactactgaatgtattaaaaactttgcttagcagggttttcaacttccttttattttcgtgttggtcttgtttctctgagatgggacttaatttaaaaaatacaactttttttggaaataatttcaaatttacaaaaagttacaatattaaaaagmgttcaaagaacatctatatcatttgcttgctcttgtacatgggtgagttttctttttctctctctctccatatacacagtctataaaaaacacacagaggaaaaatacaagaaaaaaactttcaacccatatcaaggttttatgattatagttgaaaatatacatatcaaaaagtcaaactaaaattttgcagtgttgacactgccaaactattcttttaaggaacattggtgttctatcagctagtccagtgatttttgtttttttaagagacagggtctttttatattgcccaggctggcttcaaactcctggactcaagtgatcgtccattcagccttacaagtagcagggactgtaggcaagtgccactgcacccagctcagtgattcttaaactttgaaaatgtgttgaaagttatagaccctttctctag

SEQ ID NO: 54632 - DNA, 667 bp, Homo sapiens
ggccactgagcaagactctgtctcgagaaaaaaaaaagaaagaaagaatgcagacagtaccttgaaaacagtatatactactgaatgtattaaaaactttgcttagcagggttttcaacttccttttattttcgtgttggtcttgtttctctgagatgggacttaatttaaaaaatacaactttttttggaaataatttcaaatttacaaaaagttacaatattaaaaagcgttcaaagaacatctatatcatttgcttgctcttgtacatgggtgagttttctttttctctctctctccatatacacagtctataaaaaacacacagaggaaaaatacaagaaaaaaactttcaacccatatcaaggttttatgattatagttgaaaatatacatatcaaaaagtcaaactaaaattttgcagtgttgacactgccaaactattcttttaaggaacattggtgttctatcagctagtccagtgatttttgtttttttaagagacagggtctytttatattgcccaggctggcttcaaactcctggactcaagtgatcgtccattcagccttacaagtagcagggactgtaggcaagtgccactgcacccagctcagtgattcttaaactttgaaaatgtgttgaaagttatagaccctttctctag

SEQ ID NO: 54633 - DNA, 667 bp, Homo sapiens
ggccactgagcaagactctgtctcgagaaaaaaaaaagaaagaaagaatgcagacagtaccttgaaaacagtatatactactgaatgtattaaaaactttgcttagcagggttttcaacttccttttattttcgtgttggtcttgtttctctgagatgggacttaatttaaaaaatacaactttttttggaaataatttcaaatttacaaaaagttacaatattaaaaagcgttcaaagaacatctatatcatttgcttgctcttgtacatgggtgagttttctttttctctctctctccatatacacagtctataaaaaacacacagaggaaaaatacaagaaaaaaactttcaacccatatcaaggttttatgattatagttgaaaatatacatatcaaaaagtcaaactaaaattttgcagtgttgacactgccaaactattcttttaaggaacattggtgttctatcagctagtccagtgatttttgtttttttaagagacagggtctttytatattgcccaggctggcttcaaactcctggactcaagtgatcgtccattcagccttacaagtagcagggactgtaggcaagtgccactgcacccagctcagtgattcttaaactttgaaaatgtgttgaaagttatagaccctttctctag

SEQ ID NO: 54634 - DNA, 707 bp, Homo sapiens
ttcatgtgttctttggatagaaaaaaagttaagtcttggttttacatatggtcatggagactagactaaaaaaaactcagaataattcaaggctgaaayagtggctttgttttttccctcaaattcatctaatgtggagccactggggcgttacaatgtgagggaactaaaagtacaatcaatttattattgtcacaactatctcacctgtcagctgtgagaactggctgaggtggtgtctggcacactgaacacagtgcctgttgtgaagtaggcccatggcaggtggtgcttccagaactatcttctcctgcaccgcagcactgctctctccccatccacccgcttggagcaggaggttttcctgagacacctaaaacatacctggccctggccctctcctacaacagctgcctcttgggtctccatggcccttagtcaatggtgtcctggtgccggcttcaccctgctcagctagcagagccaactgtgtgcatctcctcccagctctgcaccagcgaccttgtgttggcaacgtagggggagtattcacactgtggaaactggggaatgctgcacgtcacactgccccaaccaagagccagttgttaaacatttaccagcacagcaccacttgggacaacagctgagtgtctcaacccagcgtgtctgtgtccacatccccaaggctcgcattgcccgtggcg

SEQ ID NO: 54635 - DNA, 707 bp, Homo sapiens
ttcatgtgttctttggatagaaaaaaagttaagtcttggttttacatatggtcatggagactagactaaaaaaaactcagaataattcaaggctgaaacagtggctttgttttttccctcaaattcatctaatgtggagccactggggcgttacaatgtgagggaactaaaagtacaatcaatttattattgtcacaactatctcacctgtcagctgtgagaactggctgaggtggtgtctggcacactgaacacagtgcctgttgtgaagtargcccatggcaggtggtgcttccagaactatcttctcctgcaccgcagcactgctctctccccatccacccgcttggagcaggaggttttcctgagacacctaaaacatacctggccctggccctctcctacaacagctgcctcttgggtctccatggcccttagtcaatggtgtcctggtgccggcttcaccctgctcagctagcagagccaactgtgtgcatctcctcccagctctgcaccagcgaccttgtgttggcaacgtagggggagtattcacactgtggaaactggggaatgctgcacgtcacactgccccaaccaagagccagttgttaaacatttaccagcacagcaccacttgggacaacagctgagtgtctcaacccagcgtgtctgtgtccacatccccaaggctcgcattgcccgtggcg

SEQ ID NO: 54636 - DNA, 563 bp, Homo sapiens
tgcattcccatagctctctctgtactttcctagatcacactatattgatctgggaaatactgatcataccatattgtaaattccttttatttgtttgtcttcctttccctactgaactatataagttctttgggaacatgaatgctctaggtatctaattcaccaatgtgatcccaatacctagcacataatatggcacacaataggttcattaaatgttggttaaaaaaatgagtgaatgaaaaaataaattaattggctgggcgtggtggctcacacctgtaatcctagcactttgggaggctgaggcaggcagatcacaaggtcaggagatcgagaccatcctggctaacacggtgaaaccctgtctctactaaaaatacaaaaaattagccaggcatggtggtgggcgcctgtagtcccagctactcgggaggctgaggcaggagaatggcgtgaacccgggacgtggagcttgcagtgagccgagatcatgtcactgcactccagcctgggcgacagagcgagactccatctcaaaaaaaaaaaaaaaraaaaaaaga

SEQ ID NO: 54637 - DNA, 570 bp, Homo sapiens
ctcaaagacagtgtcctggacaactcagggatgcaatgccacttccaaaagagaaggctacacgtaaacaaaagagtctgagaaatagtttctgattgttattgttaaatctttttttgtttgtttggttggttggctctcttctgcaaaggacatcaataactgtattttaaactatatattaactgaggtggattttaacatcaatttttaatagtgcaagagatttaaaaccaaaggcgggggggcgggcagaaaaaagtgcatccaactccagccagtgatccacagaaacaaagaccaaggagcacaaaatgattttaagattttagtcattgccaagtgacattcttctcactgtggttgtttcaattctttttcctaccttttaccagagagttagttcagagaaatggtcagagactcaagggtggaaagaggtaccaaasgctttggccaccagtagctggctattcagacagcagggagtagacttgctggctagcatgtggaggagccaaagctcaataagaaggggcctagaatgaaacccttggtgctgatcctgcc

SEQ ID NO: 54638 - DNA, 323 bp, Homo sapiens
caactatgtacagttttatcaacattttaataatttttgttgtctatcacaagaattcatttttttctcctgttatcccaatgtttactttatcaaagatcttttcacatctcaaggcctctgagtaggcaaaggcctcagatctctgtcattcaacaaaaggcaccccacatccycattgactccttaagcttctgaggaaaccccagaaaagcccataaaagccctttttctccccagtttgtctaccttccccctccacaagtttaggctttaaagacaaaacaatccaacaaagagtagacgcagtgtcttttgggact

SEQ ID NO: 54639 - DNA, 674 bp, Homo sapiens
ttcttgattatatgctaaacaaggggtgaattacttatgaagtttctgggaatggggtgggcaattactgaaactgaggcttcttcccctttttagaccatatagggtaactcccagacattgccatttgtaaactgtcttggcatttgtaaactgtctttggtgctggtgggaatgtcttttagcatgcgaatgcactataattaatgtataatgagcagtgaggatgaccagcagtcacttttgtcgccatcttggttttggtgggtcttggctggcttctttacggcaccctgttttatcagcaaggtctttgtgacctgtatcttgtgccaacctcctatctcttcctgtgactaagaatgcccctattcaagatggagttgctgtggttcaaatgcctctgacagtgtcactgaagagatgatttgacttaagttgaaaaacaggtacatagtattgattgaagatgtagggacaatgcctgggtttaggtgccagcayggtgtagtcagccttaccatctcattccctgccttctgggtggggaagtgagtccagcaaggccaaatgccccccacatttgtgcatcttcttggaaatttccactttatcacgggaggcatgtatttcaagttgcaccagctgtgttctgggcaactctttggatgcct

SEQ ID NO: 54640 - DNA, 1895 bp, Homo sapiens
ggctctgcaggatcttgcacagattctaagtggattacaagacccctcaagcctttgagagtattgtcagtaagtgcaccttcttgcaaggcagaggggaagcccatgaccaattaggaaggattgcctgtctgcaattcatccctccacacgctttcttgttatccccttcgaatccaactctggtcacacgtaatggtcatcattcattattaaaacagaagtctagggccaggctcagtggctcacacctgtaatcccagcactttgggaggccaaggtaggtgaatcacctgaggtcaggagttcgagaccagcctggccaatatggtgaaaccccgtctttactaaaactacaaatagttagccgggcatggtggtggccacctgtagtcccagctactcaggaggctgaggcaggagaatcacttgaacccgggagacggaggttgcagtgaaccaagattgtgccactgcactccagcctgggcgacagagtaagactccatctcaataagttcccatttacaggttcggagttgtaggatatgaatatgttttggggtcacaattcaacccattgaagttgtatccagttctttctggaggctgtagggaaggctccttccagaggaaactggttacaattgtagtggattgaactatatagtcccctcaaacgctatatctgcatcctagcccccagaacctgggaatgggaccttatttggaaatagggtctttgcagatgtcattaagggaagaatcttgagatcacaattcactgcagccttgaaactcccgggctcaagtgatgctccccactcagcttcctgagtagctgggattataggcgcacactacaatgtccagctaattttttgtagagatggggtctcgatatgttgcccaggctggttttgaactcctgggctcaagcaatctgcccgcctcagcctctcaaagtgctaggattacaggtgtgagccatggcacccagcctctgtaggtaaaattgcaacatgaaaatacgtattcaaatatagacaactattctttatgctaatgaagagaaatggagctgcagatgttaccgcatggttaattaaacattagtttgattttatctttattaatacttcaattaatgatttgttcctcatggaatattttccctttaatttaattaattttactttataagtaatatattttttttcattctctgaggaaacagctattaattagacaagagagggtcataggtatcctacacctggaaatgtgaagtggrggattctttggctataaagaaatagctgtttgtttaaaaaattattttcttttcccagtttttgtagagacagggtcctgtgatcttgcccaggctgatctcgaactcctggcttcaagcaatcctcccaccttagcctccaaagcactgagattacaggcatgagccacaaagaatagttgttttccttgtgaactgctcagtataaaacaggttcagctcaaaatatgaagttcttctggaaggaaattcgagaaactaagctgtatgtttatggtgtcttcccatcaaacaattaacaaggaaacaaaagacgatgtatttgaaataaaatatattttcaagtcttcatatattccttaactcttgagaggcaaagattactctgtgattggagtagaagaatttccctttccttcgtgacttctctggttttctaaggctgaagtaattcacagaagagaaatgatctctgaaggggaatattattgtggtttcctggaaggggttggtcacagaaaactccagcataacacctcatacatatggccagagcaatgaatacaaaggctataggcatcatcccatccccttaataaga

SEQ ID NO: 54641 - DNA, 594 bp, Homo sapiens
tcctaggagacaggaaggcttcagaaccccggggtggtatgtggtaagtgctgtggggagcctgtggctggctccaggcctgagtgagcttagcagacaagagctgctgacctgctctgcagaggatgctctcccagactacagaacctgggagtgccagggagcagcaggtggggaaggtaggtgaccagacctctgacccaccatggtaggacagaaaggaaaagcaatctccagaggagtggcagccacagctcaaagatcagggctcccacctgtgacccagttagaaaaataaaggagctttgtaagagtccaggaattaaaagctttgaagactctgaaacaacaactgatactggtttcctttcctccttttttttttttttttcatttttcttttcttttttttttctggtggaggatacaagrgaagcatcttgagctttttctaattaaagcaaaaaagaaaccaaatatgacattgcattcttaagtgatgtggaactgttcataactattgcatatatccaaaaaaaggagcaagtgttaaccatttgataattggaaaagcctgtacattattttagcaac

SEQ ID NO: 54642 - DNA, 802 bp, Homo sapiens
tctatcgtggtcaggaataacatggtctctgatctttcagattaatctttcatgtgtgaatttaatggtaattacttgcaaatattcatgaaaaaaaccaagactagatatagaaattctactctgggttattttaaacttcttaaattgattctataatgagtatatacttgctctcattacaaatatatatatataactgatctttacattacaaatgaccacagcagtgactgtgttgcttttctgccttttggggtgagtagatcaggaagataatcagcaagctttcctcagagcactaggcagcctttaacttaaggtgctatgtttgaggcaccattgactatgatttggggtcataggagagcaggtatactgatggaaccaggattcagaaaagatgcctggatccaaaaacgggaggctctctgcaagtcaaagatgaagagaaaaatagtarcatctcaagctactgatcctgagtatcatgctacagcattacaactacttgtgagaggagctcctacaagagcagtaaacttgtcccagtaaagtctgctaagttctaactagataagccacaagtaaaactaaattggtattttactaaagtgacatctacagaagcaaacatctaaacatttttaataggagttttacctgtcatgtaaattactctaattgtcacaagcctaattcaattagcttgtcataattcctaaaataatttaccaaaattcagctcatcttgacataggttcttgagccagtattccgaaccgtttcattataaagttcc

SEQ ID NO: 54643 - DNA, 579 bp, Homo sapiens
ctgcttaatttcctcttcctgtaatcatccccagtcgttttcttttctcccttcattccatcccttgtcaattaatctcttgcccttctttcttcctctctattcctttcctttttccatttctccatttgctccccgtatctcccgagtttctctctctcttcttgcctctttttctctgttcccttgaatcctgacgatgtggctagcactgctgtggtcattgccgggctgggggcgggggatgggataggatgggggagggcagcggtctgatcccaacagcagaragagtgctctatgtgaccatgggggaacagggagcactaagatgccacgctgcacccaggcccaggacggctcccctttcatttcctctctatctgcacatctctcttcccaggttgtcttttagcgtcttcccaacttctcatctcttaccctccttcctctgtttcagcccctctctttctatctgtacttctctccctccgcattccaaggcgccgcctccaccactcccggggtggggatggggttgggggagaaggggaggagatcgccgcgcaggggcggatc

SEQ ID NO: 54644 - DNA, 579 bp, Homo sapiens
ctgcttaatttcctcttcctgtaatcatccccagtcgttttcttttctcccttcattccatcccttgtcaattaatctcttgcccttctttcttcctctctattcctttcctttttccatttctccatttgctccccgtatctcccgagtttctctctctcttcttgcctctttttctctgttcccttgaatcctgacgatgtggctagcactgctgtggtcattgccgggctgggggcgggggatgggataggatgggggagggcagcggtctgatcccaacagcagaaagagtgctctatgtgaccatgggggaacagggagcactaagatgccacgctgcacccaggcccaggacggctcccctttcatttcctctctatctgcacatctctcttcccaggttgtcttttagcgtcttcccaacttctcatctcttaccctccttcctctgtttcagcccctctctttctatctgtacttctctccctccgcattccaagkcgccgcctccaccactcccggggtggggatggggttgggggagaaggggaggagatcgccgcgcaggggcggatc

SEQ ID NO: 54645 - DNA, 793 bp, Homo sapiens
tgtcgtttcctgagaggaggaaaaagctgcctgtttcttctatttccaggcactttttatttttaaatttccatgttgttaatgtattcatttatctatttgtctatatatctatctatcttgtgataaagtatatgtaatataaaatgtaccattccaaccattcttaagtgtgcaattcaatggcattaagtgcacttacgatgtcgtgcaaccatatcactatctattttcagaactttttcatcatcccaaacaaactctgtattcctcattctccactccccacagctcctggtaagctctattctactttgtctctgaatttgctggttctaggtgcctcagatgagtggagtcaaacaacgtatgtcctcttttttgtgtctgcaaatacttcttttttataccttttagttagtggctgataagctaaaagtttacaaaactagttctacgaactttttatcgtatgctgctatggtggcctggcagtttttgtggtgttctcagcttcaagaccagagccaaaacagagagggaaggccatcttgacagcctgcccacattgatatcagctcataataatctaaacactgtatatttcattgagacaaatcaaacatacggttttgcccattagcaatacatcctkccatatcatacttggatagaccctgatgcataaagtagtatgattataatgttgctggaaggctcaggagggcctctggatgctggtggaactccagccccagccagtttttcagattcttgacaccatcttgagaaa

SEQ ID NO: 54646 - DNA, 569 bp, Homo sapiens
aataataataaacagtattaatttttccactctcacttgtctccttggaccccaaattggagataaaagagaggatccagggctgggtatggtgcctcacgcctgtaattccaacactttgggaggccgaggcaggcaggttgcttgagytcaggagttagagaccaacctggacaacatagtgagatcctgcctccaaaacattaatgaaaaaaattagcagggcatgatgtacctgtctgtagtcctagctcctcaagaagctgaggtggacggccaggcgccggggctcatgcctgtaatcccagcactctgggaggccaaggcgggtggatcacctgaggtcaggagttcaggaccagccaacatggtgaaaccctgtctctactaaaaatacaaaaattagctgggcgtggtggcatgtgcccataatcccagctactcaggagactgaggcaggagaattacttgaacccgggaggcggagattgcactgagccaagatcacaccactgcactccaacctgggcaacaagagcgaaactctatctcaggagaaaaaaaaaaaa

SEQ ID NO: 54647 - DNA, 729 bp, Homo sapiens
agcaatgtctcatttatttgacatatcaataaataaggtgttccattagaaattaatggatttttttgccaaagtaaaccatggaagttaatttttttagatttcatcattttaaatggtatattttaaatccaagatttacttatattctgcctctttagacatagtttatcaacacaatttacatttcctgatggttcaggattatcttcactataaacacatgatgctctccctcaaattkttgacacccaccccatgctgccattagtacatactgcctcaattactggaacctacttctattgtttcaccttaacctacagtctaacttatgttttacaatctttcttcccaaataactctaagttccttgatgatacagactgtcgttcatttaattccatgtcccagtgctttgcatggtgtccacattccagtatgagtttagtaagtactacctgaagttataaaagtcactgataacctgaaaacctattcatttttaggagagaaggaactatttgcaacacccatgttggtttacacagatttaatcttcacaactgaataaggaaggtaatattactatctccattttagaaatgagaaaactgaggctcagataacttaaatacctgcccaaggtcacacagctaccagcagaagagctataacttgagtctggacctgtcttatttcaaagtctattcttttcctgccacaaca

SEQ ID NO: 54648 - DNA, 628 bp, Homo sapiens
tgcatataaagttgccagcccacagcttggcatatagtagatcctcagtctactgtatagctggcagctattgtccgctaatcagggagctgcttaagaacacggacaggtcttgttcaccaggatttatcraaaagcttctcacatacaagatattcatcagatgttttttggataaatgaccaagtgagtgaattgctacatctgagcctctaagggaaaatgtccaaatggcattcatccagttatccatgcgacaagtatttactgaatgtaaacctctgccagaccttggacaaggtgcaagggatgcagttgtgaacacaacaatgttcttgccctcatgaaacttacatgtggcagagaaaacagaaaataaacaagtaaaagaataagtgcgtgatggcaggtaagggaaatgttacgacaaaaaaataaagcaaagcaagtggaaagagtaattggaggtgttatttttagaattcttcaaaatgcctgtggtggatgctgattcaccgtgtgggcctcggtttgcctatcttataatgcgggtactgttggactgaatgatttgagaggacccttctgggcctagtgttcttagtttctgtggttatgcaaggcagtg

SEQ ID NO: 54649 - DNA, 628 bp, Homo sapiens
tgcatataaagttgccagcccacagcttggcatatagtagatcctcagtctactgtatagctggcagctattgtccgctaatcagggagctgcttaagaacacggacaggtcttgttcaccaggatttatcaaaaagcttctcacatacaagatattcatcagatgttttttggataaatgaccaagtgagtgaattgctacatctgagcctctaagggaaaatgtccaaatggcattcatccagttatccatgcgacaagtatttactgaatgtaaacctctgccagaccttggacaaggtgcaagggatgcagttgtgaacacaacaatgttcttgccctcatgaaacttacatgtggcagagaaaacagaaaataaacaagtaaaagaataagtgygtgatggcaggtaagggaaatgttacgacaaaaaaataaagcaaagcaagtggaaagagtaattggaggtgttatttttagaattcttcaaaatgcctgtggtggatgctgattcaccgtgtgggcctcggtttgcctatcttataatgcgggtactgttggactgaatgatttgagaggacccttctgggcctagtgttcttagtttctgtggttatgcaaggcagtg

SEQ ID NO: 54650 - DNA, 584 bp, Homo sapiens
tccagccccgcccagggtctgtgaggctgactctcgcaggcttcctctactccagcctcccatggcagaggtggctgctttcagtgtagtgaggaactgctgagtggcccgtggggcgtgacaccccagctggggcttctgatagcttcttggggaaggtgcagatccctcacctgcccttttaagatcctcctgcagggtccgtgttccatgccttggtctccctggagatgggaaatcactgtggttttcattgtgtttctaagcttcatgtccccacgtttgactctgtgaccagatttttgaatggaaaaaatctaaatgtggttagttccactgttttctccccagaccctcttgctacttgttcatttggctgtggccctcactcagcgtgtaatcacctctaggtgacagtagtaataataatagtcatgaaacagcaaaagatattatcctctttsacgctaagtgcctcagtgtgtgggatcttgattaatcctcacaaatagccctgaggggtggattttattattattttaccgaagagaaaactgagattctgagaggctgagtaaccacca

SEQ ID NO: 54651 - DNA, 964 bp, Homo sapiens
ttgttcatttttctgcttggggtttgttttttgcttgtcttattgaactgtaggagtttgtggcaggcagcttccaagatggccccagatgactccatctcctgatatccacaccctgacacactccccctcccacatcgtaccacagttgctctgtgtgaccaataaaatatggcagaagagatggtatgccattcccaagattagcgcataaaagataatcagcttctgtcttggtggctctctcaatctcacttgctctgggggacaccagtagccaggtcttgagcagccctggataaagaagaccacgtggtgagaagcagaggctcttttgagagtttcatgaatgaccttagccagggtccttcagcctcgggtaagccttagaaagacccagccctgactgatgtctccactgcaacatcctgagagaccctgagctggaatcactcagttaatatgctcccagattcctgacccacaggaattttgagattataagtatttgttgccctaggrtattaagttttaaggcaatatttaagacttgataaaatagtgtaagttgataatatagagttgataatgatatagtttgataataatatagagtttttgatatattaagaaagctaagtcaagtgcaatgatgagtgcctgtagtcctatctacttgggaggctgaggcaggaggatcacttgagcccaggaggtcaagtgcagcctgggcaacagagtgagacttcatctctaagaatgaatgaattaaataaataaaatggtaaactttttaaaaagaaagaaaatcggtctctttctcctgagcttgagtttcttgattagaattttaaatgctttttcttgcttgttgaatgtctattagtcctctttgtgatttattttctttcttttttttctttattttcttttttgccatgcagatttttttaaaaaaatttac

SEQ ID NO: 54652 - DNA, 395 bp, Homo sapiens
gaatttccacaaggatcagtggagagtagaggatatattcagaatgaaatgaggtagtaagtgggttagtggatgcaacacattattctgatcttcataagtaatattctgttgatcttatttttcttatgaaaggaacttcacctctgcccatcacctcctacttctaagagagttgttttgtctgctctataaatgaggtcatggtgyatgacgaaataaccaataattcttaaatacctctgggattttctattaactagttttcctatctggcagggacagcttctgtgggaaatctcttaagttttatgggaatttatttgggatatttttatgtttaatgatgatgtggacaaacccagtatgttctcatggtttttattctcaagtaa

SEQ ID NO: 54653 - DNA, 1839 bp, Homo sapiens
atgctgggataagaaatgttaaagtggtgagtaaaagacctgtgatatctcataaaatggaacaaaactacaaaaagatcaccgattcagtatgaatgtgcaacagtgctataggagcagatataatgtcaaacaaggaagaaatggaaagatacttgcttacactgataaaagagtagggctttgttaccatcctgtgaattttaactagaaattggaaaaaaaaattactttcaaataagacaaagtttcataaagctttaagaacaatgcaaaagtagttcaaaataaatcttaagacagtacccattgtttgtaactgccagtagaaattaacccctgaaagttactcttatgggaataagatgtttagattgactgttgctgtagttcaaaattaaaaatctttgataaagcttaaagtccttataagaaagtaactttaaaaaacacacagaaaaaaatgtaaccaaaatgtaaacctgctttcctttcagaaacaataatcagcttacaacatctgtgtaaaagattgtgaaaggtggacacagcctacatatttgaataataatgtaataataaagtatttccaacagataatatataatatattcttttgagaaaaatcagtgtttttytttataaagaaggtatacactgagttaaagagcttgttcctataattcatgatctttcagaacatgtggttacgttaggcttcaatcacctcttactcttactcttcccagcatttggtaatatagacagtggagctaattttctgtcattcaggaagaactgctggatcactaaacttgtatcatcatcatctctgaaacacagtaaaaatcactgttagacccaatagtttattagatcgaacccaccatcaacaatgtcaactctgcctggtcgtgttaacaggaaaatgttttacgagttccaccactgggcatcaatttaacttccagcaccagctatgctgtaaaaccgtgaatgtaatttatatggtgacccgcgtgtgtgggaagcaatatctaggtgaaacttctcacagtctgacaaaatgctttgatttgcaccattcagatgattgagcaaaaagagtttaagcaatcaccaccaatagcctttatctccaaattcactaaaaatttattactctatgagtgcaatctattgctttagagcctagattgacagaatagaaatgactggataaatattacattttcaactggtacacatcttgtccattaggtttaaatattggacaagctatgtgtttaagataaatatcagtcttagcttattccctcgaacaatacttttagaaagcctacaaatgtttccacagtaacatttttgtgcttacatatagcagaggacacatgttcactgccaattaggagaaagtaaaccaagagaccactgtattcttcttataacaacatacctttgtcttttacttagcacttaacacagatgacaatatttacatatattttgctgtgtactaaacaactgagtaatcactcaagctggaaaggacataaatagagctcacccacctatcctaaataacagtttactattcaggccttcctaggaattttaaactagcatagatttcatacagatggctttccaagtagctactcctgtgcactaacagaagggtgtttacctggcaacctctctatccacttgcctgagatcatatacctttaaatatggcaatggatgtttcagatctatatatatagagcaaagctgcgaagatcgctgcaacacaacttttaaatatcctttctagcattatgggagggatcctatgca

SEQ ID NO: 54654 - DNA, 634 bp, Homo sapiens
cactcaggcttgctcttctgtgaccttagatgttgttcccagaacattactcctggaagcctgaaagcaggcaaaaactctggtacactccaaatattttagagagtcaaaggaatcttagagaccatctagaccaagagtttaacattcctagtcatggaacactttgttcaaatgaactccaatggagaaagacaacatttagatattagtcaagctgtctgggtaaagtaggagtggggactcagcccttggctattcaccttccctctccccgcatcagacaattcagaattgagaggatttaaggagcacagtttcaaaaagaatcatctagtccaaccccttccttttacaaatgaggactctggaaccccgaaaggggatataatttgcttaaagtaacaacaaattagttcagagctaataataaaatctaagtctcytgagccagcaatactaatcctagacatttacacccaaaaataaaaatatatgtccacccaaagacttgttcatagtggctttattcaaaatgaaagctggaggcaacatcagcaggtaaatgaataaattgtggtacattcatgaaatggaatactactcagcaataacaaggaatgtattattgatg

SEQ ID NO: 54655 - DNA, 605 bp, Homo sapiens
ttggccgggcagtttttctacaaatacagaactcttacacctcaaaagtggtgaaataacagaatgcaatgactcttgtggtaaatcctcatttcctaagacaccccccgttaatagtcagaagatacattataacaaattcataagaaacaaataactcaaaattattgggagaaactgtcagatttttcaagttgggaaacagcttagagcataaagaaaaatagcagcatacttcaaccatacaaatgccacagaacttcttgatgaaaagtgtccacacacttcctagccatactttatttttaggcttttctatgttaatgtgtgaaaaaacagatgtgattcagtttcagacaatctgacaggaatgctttttctcatcatccaaaaacttaacttgttttgaaaaggagtcacaccatggagctcctttaagaactcaggggggcttccaggggscactgacttgaactaaattcatcacaaatgctgaattcctacgcaataccccagggaacaacaaaagcaacaacgacaaattttatcttcacaactatcctaggagatatcttctatctctatttttttaattgagggttttc

SEQ ID NO: 54656 - DNA, 512 bp, Homo sapiens
caaaatgcaggggtggagaaattwaaaaaaaagcaatcacaatttattactggctcagcacagaacatgtttgcatcatcacgacagagactgactactgactattaattcaatgcaaaattgtaatttatgggttatagtgggagaggttggtatggaagcctaatcctcattttctcttatagatgtgtatagtcagccctctgtatccatgatggattggttccaggattctctgtggataccaaattctggggatgctccagtcccttatataaaatggtgtagtatagtcaaccttcatatctgcaggtttttatctacagttggttaaatctacagatataaaacccatggatatgcagggccaactataatagataatattcattgatttttttcaattttaggtgacattagcataccatatataaatgggtaataccagaagcaactaaaaatattaaaagtagtttcttctggaaatgaaaatttggggtaaaaaggttggc

SEQ ID NO: 54657 - DNA, 510 bp, Homo sapiens
gaaggttactgagttaaagcagtacattgtaacccaatgcaaggaagacaaaaatcatgataaaatattactggagctgatagacaaaatagtcaggatagagaaaaatgtaactgacctgattgatagagctgaaaaacacactacaagaatttcataatgcaatcacaagtagtaacagcagaaaagacaaagtggaggaaagaaactcagaacttaaacactacctttctgaaacaccacctgttccttcaaaactattggaatttaaataaataactaaataaatatctcattacaaagaaagttaaagaagaatatgatttcttcctaaagaattgactctgctatctattaagacactaattttatttttctttatttgtctactgattgtttccccaatgagawggtaagctccctgaggacagggactatgtctgcttttatattgcatattccaccttcagcttagcacagtgtcttggtaatattttggaaactttaaat

SEQ ID NO: 54658 - DNA, 559 bp, Homo sapiens
tacttatccttcaagacccagctcaaacaccacttcgtgagaaaagtcttccctgaatctcctctgtgcagagcactccctctgtataagatacgtgggcaggcaaagctcatggcatgagctctggggtcacacagaaaggggtcaagtctctgctctgcagtgactcactrtgtgtctgtgggcaagtcagtgcacctctgagcttcagtttcctcatctgttaaacagggagaataatatgctgagcttattaggttatttcaaggatgaaatcagacagctcctgagaagcacttaatacacagcaagagctcagtgaatgattgagttgctcaatcgttggtcgttacaatgatcactgtctctgttctcgtctccagtccaaggggtggtgagcgtgcagccctgtggccaccagcactatttcttcttgcagactttcaaccctgggtttccgacaggctatttcctgttccaggaatctgggcggtgtgcctcactctccccacaggagtcatgaggctgaggctccgggagccagtacagcccatcctca

SEQ ID NO: 54659 - DNA, 559 bp, Homo sapiens
tacttatccttcaagacccagctcaaacaccacttcgtgagaaaagtcttccctgaatctcctctgtgcagagcactccctctgtataagatacgtgggcaggcaaagctcatggcatgagctctggggtcacacagaaaggggtcaagtctctgctctgcagtgactcactgtgtgtctgtgggcaagtcagtgcacctctgagcttcagtttcctcatctgttaaacagggagaataatatgctgagcttattaggttatttcraggatgaaatcagacagctcctgagaagcacttaatacacagcaagagctcagtgaatgattgagttgctcaatcgttggtcgttacaatgatcactgtctctgttctcgtctccagtccaaggggtggtgagcgtgcagccctgtggccaccagcactatttcttcttgcagactttcaaccctgggtttccgacaggctatttcctgttccaggaatctgggcggtgtgcctcactctccccacaggagtcatgaggctgaggctccgggagccagtacagcccatcctca

SEQ ID NO: 54660 - DNA, 697 bp, Homo sapiens
atgaactttctgtgaaaattgatcccacacaaagttctaagattagaaactaaaaatttgatgtatcaccaagtgttcaatttaaattccatgataagtggcctaaacatgaaagaaaattttcaaaataggctactgtgagacatcttcacattcagtgggttactcatcagtttttaaaagagaatttatatctttaaaacttgcattaatttgttttaaaataccaattctgattccactggaaatgtgttttgaagcagtaatggggcaggagaggatatagtaaaagaaaatattaaaaggaagtaataaaattcctcaattaagtctacttttaaaagatggagaaaatgaagagccatctctccgcctgtgcagtatagcatccctttcccttatggaggtaagagaacttcactcttccttgggggaagtcctccttccccatttcacataccctgtcctccccacctctcttctccctgtctcagcacagtgagagrttcatgacctagacttgaccaattagattctcctgggaatttgaatcttggatggagtggagttatttgggttcctggctttacaaaaagcttgcatattcaggttttccctcccagtccctcaattctatgagccaccagtatccttccaattaagtatcttcttcactttatttccagtaatgaggtta

SEQ ID NO: 54661 - DNA, 381 bp, Homo sapiens
tccttcttcccatcctgccrcctcacttcaccttcaggcctcatttttggcagaattgcaatagcatcctgggtagtttccccacctccaagtgaatttcccccacccctccctccaagaggctgtgcaatctctttaaaaagcaaatctatcactccctgggagccaagcacagcaccgttagaaatatttgctgaaacatttattgaacagaattggtgataatagacactgatttgaaaaaaaacggatcctattatctttgatctacttcagttctcgtttgtgagggactattttgattggacttcacccactacctgtgggtagttttgtaagaaagcccatttatctggcaaattaattcatgtataatacaca

SEQ ID NO: 54662 - DNA, 691 bp, Homo sapiens
atttttctaagcttagaatggaaataaattaatgttatggagatgaattatattgttacagttattcagttatctgaaccattgtggtagcattgagaatggagccaagaggcagatatgaaggattctaggaagaaaattgtagaaatacctggagactatctctgaggaactcagaaaaagcaagaaagattcaaaagcatacctaaattatgagtgtgagaggtataactgagagaacaatgtaggtggaatagtaagtgttaaggaagatggtacattaagtgctatacatgttgagtttagctatctgaggtcatatccattagacaatagaagatggactactagagaaagagagatgcttggatatgctgctaactaattgtgagctccatgaaagtagaaataaaatccttttttcattacctataaacccaaatacagcacacgtcacgcagtagatgctaagaacatggctgttgatagaggagttacctgatcaygctaataaaatgtcttgcaccaatggaacagaacagaggcctcataaataacaccacacatctacaaccatctgatctttgacaaacctgacaaaaacaagcaatggagaaaggattccctatatcataaatggtgttgggaaaactggctagccatatccagaaaactgaaactggaccccttc

SEQ ID NO: 54663 - DNA, 1834 bp, Homo sapiens
tgcatatgctacccatttaatgctgtatgttgccactaacacacattgttgatttcagggttacagcctacgaaacaaactgcgtactttgttcctagatacactaattttgggactccctctctgaacacacaagaaaactcaaccactacttcaaatacctcctcacacatttatatcggttggagatttgtttagattaacagactctccaagggttaagatagtaggtcattcataccttaatgtctttttttwaaaaaaattaaaatcccagctagctgcaatggtctcagtgattcagagctttgcagtaagggaagagagcaggaggccaggggaagaggaggccagccttcccttccttcctcccaccttgactagggctgcttgatgatgcccatatggtggttggcctctgaaattcttccttctcgacaaggtctcctgaaataaaatttaggtttccaaggtgaataaggtctagtttaagtaacatgatatatggaaataaagaagcttccgattctgagaactctggttgtgaaccctagcaactccaaacacaggttgtattgatattggtgagcttcttcaactctttaagtctcagtttactaatttgtaaaaagtggatagtaacaccaacctttctcaggagggttagacatctataaaaggccagcagaatgttcttatgactcctactcacaaccatttcttttcttttctttttttgagatggagtctagctctgtcacccaggctggagggcagtggtgtgatctcagctcactgcaacctccgcctcctgggttcaagtgtttctcctgcctcagcctcctgagtaggtgggactacaggaatgagccaccatgcccaattaatttttctttttctttttctttctttctttttttttttttaagcagagatggggtttcaccataatggccaggctggtcttgaactcctgacctcagtgatctgcctgcctcagcctcccaaagtgctgggattagacatctatttcttcagagcactgcacagttatcatcagctccttagccctgggtgaagcaggcacagcacagcaaacagctgcaagaagtggatgtgattctgcatctgaaagcacagaggtgggtctggacctccaagaatggagtcacaccaaaagatgtcaaggtgctgagtaaacttctgggaagaactgctggaggagcgaactctggttattggtgattcttgaagagtgtgtcctgtttcagggtagtgaatgtgacagatctctgcagcaggcagctgccacttcatccctgctcctgaaaagtgacactcgggggatacaatctgcttccaggtgctccctggagcccggaccatgaggacctgtgactagaatagcctgcccagagctgtaaaatgtgcttattctatgagacctgcaccgaaattacctttcaggaacagagaaatattctgtgaggaagctatgcaaggtggcctcttgaggaagggggcacaagtagacatttccagtttgttcatgagttttcaaaaaagcaagctatgctccttacaggaatgagaatcttgccttgttggagaataatgagtacacagatttttgtgattgttattcaagctgccaatcctggtagctattcagtagataagtaattagtaacagttttgttggaccatgaatatcagagattcataccctttgaatagaaccttaatacagcagtaaaggtttatagctgtataaagctgtccagctggagtggaggcaacccgcaacattttccatgcaaaacccactcacatg

SEQ ID NO: 54664 - DNA, 809 bp, Homo sapiens
atagtcacagtgaggtgagtatgggtggatggcagccatggcatgctctacatgcccacatttaatgtggcacagatgacctggaggtcagagatggagagaacactcagctccttattggggccagaagccaaagaggcaccaacaaggagcaggggaaagagatgcaggaccccagccagaaagctgggtatgcaatcttgggggttcaaagccagggctatagctgtagctgacggcagattgggtcatcactctgcatttattcaaggtgtttccagtggccctgagagaggttgtagcaggaagaagcatcaatctatcagtttcttggtggagatttgatcttttggatcttttgagtggttgattcacccctcagaaaagagcctttggtgccgtagaaacctcagactcaaggtggggagagaaagaaactacttactacacagcaggattgatctcgtcatcattamccttattgcatcctagtaactactccatcggtaagcaaacgtaaaaagctcaaggtcaccttaacaaagggcagagccaggtttcaaatcaaggtctggctggccccagagcccaagatttctcctctgcactgtgtgcctcaccacagacaaaggcctagacctaggaagatagtgatcagcagatggccggcctacactgggcttttgcagcactgctgcagcacgcctccgtacagccctaaagcagggtggcccacatgtacgttcataaaaaaccacagcctggccaggtacggagactcacaaggatcccagcattttgggaggcca

SEQ ID NO: 54665 - DNA, 678 bp, Homo sapiens
tgcatgtttaatatgaagaacaactgttactccaaaaacagtcctgaaatttctgtcacctagtgactcctaaatttactgtgatttttcccttttgaaaaataataagaaaatgtgtcaaacaacatatctaatcctgaggtaatgtgaaactcatatagctcctggtgagaagctgcaaagtggcaattctgaagagaaagtttatagaatatgcttggcaatcttgagaattttcattaaaaaaaagaccatacaacacttgctatgaaaagatattacattttctccagagaagtaacacttcctcctttgttctggaggttctccaaagatttcagagccattttgcaggttgtgttacctaaagttattaaaactcacaaaatatccatgaagtaataaaatggaarctattcgtatgccaatcaaacagatactgaaacaacggtcctaaggaaatatgacctgtctaaagcctcctaacaaaaaactgatgggtccagaaatagaatctaggcagctgactctagacattccaaaacacttcctctcttcagaattattattgttaattccctctacacataaacaacctccagctcccggaggatggatgagatcatgctaacaagtcatccattctttccataagaaacacagcagtcatagccaatg

SEQ ID NO: 54666 - DNA, 1342 bp, Homo sapiens
caacgaatgcataaatccaatttgttctgtaaaaacatgcatgcttcagaaataaagctaaaagtctttgatcaccatccctaaattcagtccccatccccttaagagggatcagttgctatcaggttgctatatacaaataacagacctttatttctatgcaagtacatccatacatmtgttttaggcttaattcagaaattcttcctggagtcaatatatgtgtgcttcataatttttgcctcctgaagatcatggtaatgcatttcaggagctattgtcaaaaagtgttaatacaccaatttgttgatgcattgtacaaaatctagccagctgtacacatcttggcaggtgtacccaaatgaaccactcttgttccctctggaacaaaattggaattgttagacagaattccaatatgatactgaacatcaacatgtttgaacaaatgctgaaaatggcaattctctcacctccagccttaaatcttagattcctaaaattgaccatcgaagttgaatgaaaataaattttcctaaagcaaggagccccattcacctaacttctgccctctcctgttaataacattttgcattattttaccccctttattaaacatattgaagagaagatgaaactggaataagatcattcttaaccaatatgttttgagttttctagtgaaaaacagaaatcatttaacatgatttttatctgacacaatcttcaaaatttccccaagccaatttttctttttcgaatatatataaattctgctgcttttaagtgatacttgtccattattaaattcctgacgccgtgcatccctgccaaaaaaacaggattagagaagtaaaacagtcagacacagatgtttttaatttcctcctaatagaaagcatcagaaacccaagttcgcataattctaataaacataattatcactaacgtgtatttcacatatcattcaaagcacttggcatgtattatctcatttcttgtcaaaattaccctaggaggtagatactactactccagaaatgctaaatctaagcattgggtaaactggacagatctatgtcctccccttgtcagagctgacattttaggggcaaatagattaattaataagaaaacaaatgaatacaccaaatcctctcaaagagtgactagcactaagaagacctagtgggaccatcttttatcttcagaaaaacatggcatgcagtcatactgcctttctgtagatgaagaaattgaggcgctgacaaagtgcctaaggccacaaaggtgacaagcggcaggcagaactaaagatggcatctatgagtttgtaactttt

SEQ ID NO: 54667 - DNA, 642 bp, Homo sapiens
gcattcgggaccaagttgacaacacatgaacttttgggtgacacattctaaccacagcagaagcacttcgtggcttttcttggtatacccaaactgctagcatcactactgttatactgtggggccattgttaagtaaaataagagttacttgaacacaagcactgcagtaccatggtagttgatctaataaccaagatggctactaaatgactaatgggtaggtagcatatacagtgtggataccctggacgaagggatgattcacatcccaggtgggacggagcaggatggtgcaagattttgtcatgccactcacagtggggcgcaatgtaaaacttatgaattgtttatttctggaattttttatttaatattttcagaccatggttgactgcaggtaactgaaactgtagaaagcgaaaccatggataagatgggattactgtgttctgtttagctttttagtgtcttgtttggttcttgtctctaattcacttagcagttttgagtatcttttcttttcattcagttctttatttaatttwattttattttatttatttatttatttatttttgagacggagtctcgctctgttgcccaggctggagtacagtggcgtgatctcagctcactgcaa

SEQ ID NO: 54668 - DNA, 632 bp, Homo sapiens
ataccattatctcacctcgttctatagcttgctaataagatgatgttgaagttgttgagacacaaagacttaggcagcatgaaaatggaggaaggtgcatctcttgcaggaaatttatgagcttagactcataaagctgagggaaggtaaatttcctactgtcataaagaatctgtttaggacagctccatatcccaacatcttcttgtatattttttttcctctttagrtctacaaggaagtcttcacgaggagcagtgagaactcagcgtcgtcgacgttctaagtctcctgtccttcatcctccaaagtttatacattgcagtacaatagcgtcttcttccagcagtcaactcaagcacaaaagccagactgactcacctgatggcagcagtgggctgggaatttcatcccctaaagagttcagtgcaggagaaagctctacttctctcgatgctaatcacacaggggcagtcgttgagcctttgagaacttctgttccaaggctcccatcagagagtaagaaggaagactcctctgacgctacccaagtcccccaagcaagtctcaaagccagtgatctctctgactttcaatcagtttccaagctaaaccagggcaagccatgcaca

SEQ ID NO: 54669 - DNA, 632 bp, Homo sapiens
ataccattatctcacctcgttctatagcttgctaataagatgatgttgaagttgttgagacacaaagacttaggcagcatgaaaatggaggaaggtgcatctcttgcaggaaatttatgagcttagactcataaagctgagggaaggtaaatttcctactgtcataaagaatctgtttaggacagctccatatcccaacatcttcttgtatattttttttcctctttaggtctacaaggaagtcttcacgaggagcagkgagaactcagcgtcgtcgacgttctaagtctcctgtccttcatcctccaaagtttatacattgcagtacaatagcgtcttcttccagcagtcaactcaagcacaaaagccagactgactcacctgatggcagcagtgggctgggaatttcatcccctaaagagttcagtgcaggagaaagctctacttctctcgatgctaatcacacaggggcagtcgttgagcctttgagaacttctgttccaaggctcccatcagagagtaagaaggaagactcctctgacgctacccaagtcccccaagcaagtctcaaagccagtgatctctctgactttcaatcagtttccaagctaaaccagggcaagccatgcaca

SEQ ID NO: 54670 - DNA, 740 bp, Homo sapiens
aaaataattggtctagctaggagtagacatccttaactggttcaatcaactgtaggcatgatggtgggaaaaacgatggaatagaatcatgacagttggggtgtataattcttacagaaagagatttatggaaaacttaacaggtatttcattgttttctaaatcacaaagccagttgattacatagttaatatgaggcaaaaagatatgtagtgaaatgttactcagatgaaggaccagaaacaaagattctttgtatgtttttctcaccgaaaaaaaatcacacctggagtccttctaaggagtattcttctaaragaggctgacaaataaggaagtgcatctattgacaagtatcattttctaataattttctttaaatgcttaaagaaacatatgattttaaattgtgctttattaatgcaccagggtaaaatgtataaacattgtaattcaagtcttcctatgaatttgttgaatgtattgcttaaaaaggtaattcctcaaaatttgaattataaatagtgtatattgattaaaaaaccaccaaaatgttaaccataaaaagtaaacattatttcattttctatagttttaaatttcaaatagttttgttcttcaagactaagacacttccacagataaaagattttctcactttttttttttttttgagatggagtccctctctgttgcccagggcagagtgcagtggcacaacctcagctcactgcaaactg

SEQ ID NO: 54671 - DNA, 740 bp, Homo sapiens
aaaataattggtctagctaggagtagacatccttaactggttcaatcaactgtaggcatgatggtgggaaaaacgatggaatagaatcatgacagttggggtgtataattcttacagaaagagatttatggaaaacttaacaggtatttcattgttttctaaatcacaaagccagttgattacatagttaatatgaggcaaaaagatatgtagtgaaatgttactcagatgaaggaccagaaacaaagattctttgtatgtttttctcaccgaaaaaaaatcacacctggagtccttctaaggagtattcttctaaaagaggctgacaaataaggaagtgcatctattgacaagtatcattttctaataattttctttaaatgcttaaagaaacatatgattttaaattgtgctttattaatgcaccagggtaaaatgtataaacattgtaattcaagtcttcctatgaatttgttgaatgtattgcttaaaaaggtaattcctcaaaatttgaattataaatagtgtatattgattaaaaaaccaccaaaatgttaacyataaaaagtaaacattatttcattttctatagttttaaatttcaaatagttttgttcttcaagactaagacacttccacagataaaagattttctcactttttttttttttttgagatggagtccctctctgttgcccagggcagagtgcagtggcacaacctcagctcactgcaaactg

SEQ ID NO: 54672 - DNA, 606 bp, Homo sapiens
agaattgaaacataacgagggaagagatttatgtctgctctgttctttattctgccccaagtttcctgaataacacatgcacagagtagaatctcaataaaatttttgaatgaacaaatgaatttgtaggaataacttttcttgttgacatgtgtccctgcttagacacagtgatttttgaggaatcataagcagtggtacattaacggtgggtacttgcagcccaacaattwccagagcaacacctaaaaaaatggtctcaaaatatttccagcaaaaacaaaaaacaagcaaacaacaaacagtaaatgaacatgataatgcaacctcttatattagtgtacctaaagttcaaggtttcctccccagggtccctgtgttgctatgttcctcctagcaagctattcagcacttttatagtagtgttcattagtactgaaaggaatatctctccagtctttctcaagatgcagaggaaaccagcctagtatctattgtagcccagtgaaagatgatgccttataggttttttttttgtataatacacaatgtagaattatatatgatcaaactaatgcttcttgggtgccttcaatgtgttcagca

SEQ ID NO: 54673 - DNA, 606 bp, Homo sapiens
agaattgaaacataacgagggaagagatttatgtctgctctgttctttattctgccccaagtttcctgaataacacatgcacagagtagaatctcaataaaatttttgaatgaacaaatgaatttgtaggaataacttttcttgttgacatgtgtccctgcttagacacagtgatttttgaggaatcataagcagtggtacattaacggtgggtacttgcagcccaacaattaccagagcaacacctaaaaaaatggtctcaaaatatttccagcaaaaacaaaaaacaagcaaacaacaaacagtaaatgaacatgataatgcaacctcttatattagtgtacctaaagttcaaggtttcctccccagggtccctgtgttgctatgttcctcctagcaagctatkcagcacttttatagtagtgttcattagtactgaaaggaatatctctccagtctttctcaagatgcagaggaaaccagcctagtatctattgtagcccagtgaaagatgatgccttataggttttttttttgtataatacacaatgtagaattatatatgatcaaactaatgcttcttgggtgccttcaatgtgttcagca

SEQ ID NO: 54674 - DNA, 619 bp, Homo sapiens
tctctaacacactcccaggcaggacctattatgtcatttacgaggtctagtacaaaataaaaatctgagcccgcatgttaaaaaattcttaagattttcaagatagcaacagcagagcrtgaagccaagagcaggcctcctgagtgcgagggctggtgtgactgcccaggacccaggcctatgaagccggtcccacctccaagtgatgcaggggttggaggagctcagtttgcacagaaagattgaatgcccaggcctggaaagcagagccttgtgacgggccacactttccactggcctttctatctactaagtaaaaccagcaaaaacactcatgatttttcagtctagatctctgattcatcgattaaaattgataagttggtgaccctagagtaatgctccagaaatgcacttctttttctttaaaacactcttgatgaaagctttccaattataaagaattaagaaacattctttgagcctttctttagacaatgatggaagaggaaggaggcaggacaaatgggaaggccccagaaccttcactcttgctctgagctttgctctgtttgacgattttattgggggtaggtgaagggggatgttgatgcgggtc

SEQ ID NO: 54675 - DNA, 618 bp, Homo sapiens
agcaatttctcatgttttgaatgtcagagtgaccactgggatttgaattaaattcatgttaaaaacaaattttgacattcgaagttaaccatctcagaaatacatatgagagtgactgattctgttagcttatatgccttactctgtatgtgtttgtgtatgtgtgtgtgtgtgtgtgtgtgtatgtgcgcgtgtgtatgaacagctagctgacagacaggtgtcatttttgattatagaattagaaaatcattttgcttacttttttaaatgaaatactgttattcttgcataaaatctttcaaatgcagatatgataaaaacatcacctttaaaaagacatagtgtttgaaaactttgattctcagtatccaaacctccaaacccgtttcattttctataactcttcattttgaggctttggtgggagggagaaccccatctcctatctgagaagcatgaagaaatcatgtatttcttatccctttcacagatagtaagtgtgggcctgtgaattaggctcaagcaattgaagrctccctcttgggatgctgaattttgagcaatgaattcccttcacttctgtgagccagtcaatagtcagtcagtagacacctt

SEQ ID NO: 54676 - DNA, 1057 bp, Homo sapiens
caagagcccttggccacagggggcctgtcgactgtctttgtgaataaagttttattggaacacagccacacacatccatttatgtgtttctatggcaacttttgctctatgaaggctgaattgagtagttgcaacacagaccacagggcttgaaaagcctaaaatatttattcttgggcctttacagaaatgtttgctgctgcccctggttccaggctctgtgacagttgcctcatgtgctctgcaggggaggttgaggcaggaatgacatttccaaggtcctctctactctccctgatccttcccccaggtggtgcctgtgccatattgcatatttttaatgtcacccctgggctgggggtctgtgattcaggtactctcccctcctcctgcccccacccactggcacacaatcaaaaaaactccaatatttttcctttcgtatgttagggatctgtttaaaattttatttgaagagtaaaagtttaccccctaaaagagcttgaaaccacgggcctggaacaccccttgctccagagcatctgggtctccagaccacatgtctagtactcattctaccttggaattgctttcctctggggttccacagtaaagcagccacttagggttgtccacctgtactcatggcttgctctgcacgatgacagtttccccagagcttatctcacaggcacccccggagcagtgagcaatgcactcaactgtgtgtagagaccatgggtattacagcggggtgctgggaacacccaccttggggagtggagagcctgcaagagaagtcacctcctggtcccaacacacctctcggctgcactgtggcctatgacagtgataagccacatagtgctgcttcctcctggcctgggagcacatgtggccttggccatgtctctacyccctggggttcactcccacccacctggctccccactcctcaatcatttctggagcagcagtgtgcccaggggacttggggctcttttcttcaatctcttactgagattgttacacagataatcttattttgcagatgaag

SEQ ID NO: 54677 - DNA, 1329 bp, Homo sapiens
cactccatcccctttccagctcttcattccactgagatccacttccatcagcaataaaatcctctgggtttaccatcttcaattcatttgtgtgacctgattccccctggatgccagacagtgacccaggtacgggtgcaagagactgtcacactgaccctccactgagctgtctaacacttaagccatccatggatggcaaaactaaaagagtacactgtaacacagggcctctgggactctgggggcttgtgggcaactcctagatgctgccatgggcctgcacggagttttgcttctgcccagttgcccagaagctcttgtcctggcctctgcacctgctcacctgtgtgctaccctgcccatgaggggttgagagctgtgggctgagtaaatgagccaaccccttcacgagtcttgcaaagagtctgaggggaatatcccatttcataaagatatagagtgaacatagagagaaggtcatggagtttggaatcagacagactagatttgaatcctggttctgtctcaagcaactaggatgacttcagcatgtttcttggtgcttgtgtttgtggctacttcctcaatttttcagtagagaaaaaataatactcataggaccactctggtgaattgttgaatagattgtgtgttatctgccacacttcaagtactagcatgcattaaaatccctatccctttgccctccaatgtaaaatgatatgaattctgtggcttacacatagctattttttttttttttttttggcctgcatagataaggcaattccgtaaggctgtgttaccattctcctaaagggcctccctgtggggccacagtacatcttgcctaatttctttttaacaatatttatttctgtggtcaagaagaagataaggtaccttagaagtagtcactgttctatctcartttggatatgcttgttgaagaactcttacaaccacttatttctgggaaaaaaaaaaaagaaatattttcagccatctcttcacctcaaaaacagcaggcatcgtggattattggaagggaattacccagagaaagtgctcttaaaaacaactgcatgtagaggaggctggcttatcaacaggcaaaaaaggagatttttttctactaaatttcagcttgtcactataaacgagaaaatagccacattcgtaatatattctatggggacagtgctgtgagtgtttctactggtggaattctcaagtacgagattctaagaatgagcatttactcttagaaaaccctagggaatggctgttaggaatcaggtaaacaatgaaatgagagccctttca

SEQ ID NO: 54678 - DNA, 814 bp, Homo sapiens
cacctatgctgggataaatgtaaaatcggggcagcatttttttcaaatagaatcctggctttgcctttgcaagctgcaggattgagaaaaacagtttccttcttcacttgtgcattgggaggaatgagttgattgccaaacacctgagcttcttcacaggctgctctccttagtaggttatcacagtgttttccatagagccactggcctccccaggtcagcaggaagagcccagctgtagttttcttccaatgattttgaagtgttttaaagaacacygtcatcttctagagatttgcatggctggtcccactcaataaccacttttattagcgttttgttgtagttgttcagccttcagtgtttccttatgcaaattttatacaagcaaatacaaatatatatatatatcctatgtaggtagcatactagtattacactgttttgtgcattctttttcctcatttatcatggagatctgcccttacctgtgcatggagaacttcctcatttcttttcacagctgcataattttgcactgtgtagacaaaccaaagttcactcagccagtctgaaattaatatttcagcctcaacaagactgaaatgaatatcttcatacatatgtcaatttatatgtgtgcagatatatctgtaggatagatttccagaagtagagttgctggtcaaggataatgaattggtagtcatgatagctatatttccttccataagggttagtatgggttgaattgtgacccataaaattcatacattgaagtcctgagccctagtaactcagaatgtgactgcat

SEQ ID NO: 54679 - DNA, 841 bp, Homo sapiens
tgccccccaaatgatggctcgtccatcctctaactggttactgctgttggcatcttcactggaccaaggtactgaaagtcagttccatctttttttttaaagaagactttattcttttagagcattttcaggtccatagcaaaattaagtggaaagtacagagttcccacattcccctacccccacccttacccagaagctccctcacgatcaacatcctgctgggagtgggacatttgtcacaatcagcgaacctaccttgacacatcagtatcacccagggcccatagtttacacgagggttcactcttggtgttggctattctatgggttttgacaaatgtctgatgacttgtatcaccattatagtaccatatgcaatagtttcactgccctaaaaatcttccatgctctgttattcatccctctctggcaacctctggtctttttattgttttgtctccatagttttgtcttttccagaatgttacatagttggaaccatacagtgtgtacccatttcagattggcttcttccacttagtaacatgcctttagggacatcccttttccaagctcatctcttagagcccaggaaagccttttccctgatctccactcttcatgtgtccaagcctttggttctgtctgtgcagaccccagtaaggacttagtctatgtgctgattgcctgaaggcgtgggcrgagttggagatgagagggacagtgatcacagaggatggattggggagtggggatggaagtggagtgtggtgagggcccaggtagaaaaacagggaggttcgggaccccgggatctaagatgaagaaaggcaagacc

SEQ ID NO: 54680 - DNA, 656 bp, Homo sapiens
catgactggtattgtaagagaggccacagggagtagaattaaatatgacacctccttgacatatgatcaaagctccttctaacctcaatttggggcaccatatatcacaaaccagacagcaagaaattaagtaaatgtaagtcttttttttatgccatcccaattacatcttgctcagttcacaaacaygttccagcaaatgctggaggagtttttctctctttaggagtcctccctcactttaccctgtttaacaaaagacctcacacacttagaaagaggatggaggcaggccagcttcaggacatgctgcacagggaggactgactgtcccaaagagggggctctacacccctctgacaactccacaatagaccagctacacacaaatgcctgaaataaggaagtccatcaagaaaatgaacagttggcgagatcaaggcttctggcccaaagggcctgcagctggtctggccattcatcaaaaaatctgaatttaaatggagacacattcgactgtgacatgtaataaaagaactggagcaacaaagggtcttgattttggtttcctttccaccctacacatctcctgccaatggaagagtgagcgtgcctgtggtgctcctgacacatctggggtagttcccattcacagt

SEQ ID NO: 54681 - DNA, 635 bp, Homo sapiens
gcataattatctcaaaataaaatattaaaaaaaaraaaaaaaaaaaggccggatatcatcctgccctgtgttgtacaattctgaggttaaatgagataaagtatggcaaggcactttgactgccttgtgccctgtaaatactaggtaacatcatcatcttcctctatcaaccagtctcatcagcattactcactgttagactattccttatccacagagccttcgatatctctctactatgaccctatcactgtacttgtgtaatccgatcacccctcttgctattgtttgaatgtcccctccaaaactcatgttgaaacttaatccccatggtggggccttcaagaggtgactggatcatgaaggcatgtcatcatgaatggattaatagattaatgggttatcttggcagtgaaactagtggctttttaagaagaggaagagggacccgagctggcaagtttacacactcagctccctctctatgtgatatcctacgccaccttgggactctgtggagagttcccatcagcaagaaggccctcaccagattcagccctcaatcttggacttcccagcctccagaaccggaaaaaaaaaattgtttctttgcaaattacccagtttcaggcatt

SEQ ID NO: 54682 - DNA, 635 bp, Homo sapiens
gcataattatctcaaaataaaatattaaaaaaaagaaaaaaaaaaaggccggatatcatcctgccctgtgttgtacaattctgaggttaaatgagataaartatggcaaggcactttgactgccttgtgccctgtaaatactaggtaacatcatcatcttcctctatcaaccagtctcatcagcattactcactgttagactattccttatccacagagccttcgatatctctctactatgaccctatcactgtacttgtgtaatccgatcacccctcttgctattgtttgaatgtcccctccaaaactcatgttgaaacttaatccccatggtggggccttcaagaggtgactggatcatgaaggcatgtcatcatgaatggattaatagattaatgggttatcttggcagtgaaactagtggctttttaagaagaggaagagggacccgagctggcaagtttacacactcagctccctctctatgtgatatcctacgccaccttgggactctgtggagagttcccatcagcaagaaggccctcaccagattcagccctcaatcttggacttcccagcctccagaaccggaaaaaaaaaattgtttctttgcaaattacccagtttcaggcatt

SEQ ID NO: 54683 - DNA, 635 bp, Homo sapiens
gcataattatctcaaaataaaatattaaaaaaaagaaaaaaaaaaaggccggatatcatcctgccctgtgttgtacaattctgaggttaaatgagataaagtatggcaaggcacttygactgccttgtgccctgtaaatactaggtaacatcatcatcttcctctatcaaccagtctcatcagcattactcactgttagactattccttatccacagagccttcgatatctctctactatgaccctatcactgtacttgtgtaatccgatcacccctcttgctattgtttgaatgtcccctccaaaactcatgttgaaacttaatccccatggtggggccttcaagaggtgactggatcatgaaggcatgtcatcatgaatggattaatagattaatgggttatcttggcagtgaaactagtggctttttaagaagaggaagagggacccgagctggcaagtttacacactcagctccctctctatgtgatatcctacgccaccttgggactctgtggagagttcccatcagcaagaaggccctcaccagattcagccctcaatcttggacttcccagcctccagaaccggaaaaaaaaaattgtttctttgcaaattacccagtttcaggcatt

SEQ ID NO: 54684 - DNA, 533 bp, Homo sapiens
cctccaattggaggtgaggattcccgaggtgagggcaggatggctgggcrtcagtattatgaaaatgtcccccaggcccagggctgggcccactgctgtggggggcagctcagcagagctgtgcggctgtccatgacatgggagaccctccctaggggtggcacagggaggttgtcttggggagaggacaggcaccctgatatttgaactgggaccttcccttctcctttctttccctgcctcatgcggtggagggcagggacccagcctggagggtttggggatgaggtcatggtcaaggagagctctgggcgctgggctcgggctgcctggccagactcaggtgggtggggcaggagctggagttggcctagttgttccaggagagtctgtttttctaaaggaaaaagaatcatgctaacgagcctggcgccctcctgaacgtctctaacaggccccgttctgactgggaactctggctgtgcgccctctgcttcagcctagggccaaggaggtcccctaagagaggactc

SEQ ID NO: 54685 - DNA, 533 bp, Homo sapiens
cctccaattggaggtgaggattcccgaggtgagggcaggatggctgggcgtcagtattatgaaaatgtcccccaggcccagggctgggcccactgctgtggggggcagctcagcagagctgtgcggctgtccatgacatgggagaccctccctaggggtggcacagggaggttgtcttggggagaggacaggcaccctgatatttgaactgggaccttcccttctcctttctktccctgcctcatgcggtggagggcagggacccagcctggagggtttggggatgaggtcatggtcaaggagagctctgggcgctgggctcgggctgcctggccagactcaggtgggtggggcaggagctggagttggcctagttgttccaggagagtctgtttttctaaaggaaaaagaatcatgctaacgagcctggcgccctcctgaacgtctctaacaggccccgttctgactgggaactctggctgtgcgccctctgcttcagcctagggccaaggaggtcccctaagagaggactc

SEQ ID NO: 54686 - DNA, 1797 bp, Homo sapiens
tacggagatcagccccaggcagctgcgggagatgagcaaacacgttgcctctggcctcagtctccggctgcaataacattttgaaatcagttattttcttttaataaagcagcctctggttcgcccatgtctgcagtgggccaggcattgtttgtgctttgctacattttcagggctctggttttctttgaaagacgacaatgtttccaattgaaagttgactcagaaaacaatgactcccaactcaaggtcaaagctcttctctaatccaaagtaaaccgagtaattcttttatctcaggctgggggagatgaaggcagcatcattcccttcccatttattaaaggtgcgggatccgtgtgtcgtggcagatacmaggtctcacggaagtctaattagagagatgaaccgataaatggaatggtttataatttatctaatcatgaaggcaactttgctccgggcgcagtgttcacagggagagatttctatctagaatgtgtccgaggatccaggaaacgaagccgcccttggcacacttttcttggcggattgcttcaggaagtttctgtggccaagagggccgggcgggcctcagtgagaccattcctgcttccaccaaggcctggaggtgcactctgggcaaatgacctccccgggccccattttcacacaagaggggttctcccaaagcccttcatgccagccctgctcggcctctttccggacacccccactgttgcctgctgacatcggggggaaaccctgggctcgggcccacatctccagggcaggagcagcaaggataggagcccatatcctggaaaaagcccttggttaacagagtgctgctgtgggctctgggtcaaagcacggtcaccctattgaaatggggaaagtccccttgtccccttcgcaggacgtgtgatgggggagtggctcgattcttcatgccctgctgctcaaacttctaggggagcagacagacgagcaggctatggggctcctgactccactgccgtgtctaggggtggatgtttccagctcctgaagccccagtgcgcgtgtgttccagggtgctctgttagttttgccgtctataggcttgtgttaacccctccaccatgtcacaaggacagagggctttctgtatccccggttcttgccttggtgtaccggaagaatcggatcacacctaggcttggagaatgggtgaaaggtttgattgagtggaaggagctctcaacagatgggggagccagaaggggatggagcaggaaggttttcccctggagtcgggctgctcagcaccccgggctctcttctgacagccctggccaaactctgcctcattccgccagttggtggcctcctggtgcctgtcgtgttcctcttgatgtctggccacctgtgtgtccacctgctagggtctcaaggtttttataggcacaggatgggggcgtagcaggccagggtggtcttgggaaatgcaatatttcggcaggaaaacaaaaatgtgtgtactcatctaggtccctgggcacaggccctggggtggagccctagccagggaccacgcccttcccccttccatattattcaaagggactgcgcccttcccccttccatattattcaaagggaccgcgcccttcccccttccatattattcaaagggaccgcgcccttcccccttccatattatttgaagggaccgcgccgttcccttcccagcacttctgtctcacgatgtccccggctcacccagtccctcctcccagcgacatcacgtccacag

SEQ ID NO: 54687 - DNA, 2891 bp, Homo sapiens
cattttgtgcattgtttaggtcggtgtttcttaaactttactgggcattagtacaacccgaaggacctgttaaaacatagattactggctgggcatggtggctcacgcctgtaatcccagcactttgggaggccaaggcaggcagatcacaagatcaggagtttgagacaaggctggccagcatggtgaaaccccgtctctactaaaaaaaatacaaaaattagcccagcatggtggcaggagaattgcttgaacctgggaggcggatgttgcagtgggccgagatcacgccactgccctccagcctgggtgacagagcaagactcagtctcaaaaaaaagaaaaagaaaagaaaagaaaaaatagattactgaacctcagcctcagaatttctgattcagtaggtctggagtgaagcctgagagtttgcatttccaatggccactgatgctactggtctgagggccacattttatgtaccattggtccctctaggtctttcacagtaagtgtctgtgtctgttagcaccttacacatttcagaaatcaacttataaacccgctgttgcattttcttctgacttttcttttaccttcctgaatttcattgtcctacctgcagtaaatagatcctaataaactctaggctatgctacttcaaagaaaaatgtggtggtagagcagaaaactgactgcttggatgaaaccaacattggatgttcggtttgaaaataattcaatctttgatactttcatatacgaatccaacatcaaagtgaactcccaggttctgtcagatttcttctttctagtaagagatgaaatgtttgtctgctgtcattccttaacacaataattagacagtgtgacaatacagttttcctagtgtttgtaatccttgatcacatattgtaatcataaatataggccacagactgaatgacttaattacaaccttgatggtagactgatagagaaaaacctcacactatcctcagggtaaaaaagggaagcttttgaacatattttagaatcaaactatggcaaatatttagaaatgtagtgctgatactcaatctaacataatgattttaacatgccctgacatacttaacttttatgcctttatgcatgttccacttagcacatattttcaattcatccacatcatgccaaattctccaacttttttcaaagcccccattatgtttgctcaatccattgacctatcacttcctttgttgacacccatttatttattaaacacattcgacacagtagcctctatgctagatggaaaagatataaaggtgaatggaacataagagaagcacctgatggttaggaaaatatgctcgtaaacatataaacacaataaagtattagagggttatcatagaagtataatggctcagtttgactaaaaaaaatcgaccttgttttaatgttattctctgaaatatcatgtgagcagattctgtctttttctgctaatgcaattagttccgcatattcaaaataaatcttttctcaatgttataacaatcattgacttgtgtgttcaacatttaacttatgtaaagccaacatatttagaccactcctcccattgtagtgacagcatagaaaaaaaaagcattaaattccttaccccgacatttcaatagttaaaaatacaaatcctctgaacttatcttatgtattagttttgagccatgaaaataatcaacattagatgtgggagacagaagttagatagcggtcagacatttccttaggatcctcccctcttccaccatcctccagccccaacccccaccaaaaaaagcctaggggttttgccagtgtcctggtaggctgagattaagactttgtaggacccaaaggccagcaatacctggctacattgctggacattgtgtataaaaatatatatagtgcgtgtgtatatatatacatactatgtagtgtgggtgtgtatatatacaaatatagtatataatttatgtatatatatacacacaaatacagttacataataaactgtattagaatatatataaactgtactagtatatataaactgtattattacatttatatataatgtttatatatatacctaaactgcattagtaattacacaaaaattttaaaccgtgcaattctttttctactaattattgtgcagtagtagaaatatcatgagagaataacactttcagatattgttaagtaccacagtgacatttgtagacacttctctggtctctaggatatgtcaacaagacagccagtacatgtttaatggagagcagtggctggaacagattcattacgcttggccttggtccccctccatctcctagaatggaaacatgtgtcaacaccaatagatcacataatcatttaattattaatctgaactccagctttctcttttataaaggtctatagttcaaatgcatgtgtttagtgattcctctaaaattctatggattctcaatttcataggtactttcactcttagacagatagtatatttgagctgataatttgactagttaataggtaactttgaagtttttcttttgcactgacagttcccctcgcagttttaaaagctatatctaataawccttattttattctgaaataaaaaattgatttccagagaatataataaatggagagtaaagaagtcctcagagcaattaaaatgcatgttctcaaaaacatctaccttaatcctcatgaaatcatgcaaaagtgccccactcagtgcacacctagcatcttagaaggaataaattgaaaatgaattattttatgaaagcaattgaattttatggttttatgttcataattttactttgtttcaaatgttttgc

SEQ ID NO: 54688 - DNA, 741 bp, Homo sapiens
gggtgcctattgattttaatttgtaaataaactttgtaaaagaagaatatgttgccactggcgcctcaaaacaacttagagatgctggataatgtgatgttaatatgcacatcacatgaatctcctttgaagaggttgttatcaatgttatgtcatcctgtgctcttgaagaaatgtagatgtcattattgatatttaaacaggatcctcacttcaggatagagagtcttggcagaactccaaaaggtaacatgaagctgcacatagcacagcaaaagaaagccatcagtgtaaaaagccttctcaagttgtggagccaatcagagtagcaaattagtaagccatgaatagttaaagagcatctcctaggaaatttccaccccagtttagaatgatcccattctcattgccattggtattgaaaatgcyaaagtcaggctattgggtctttatgaatcactctaagatggtcatgaaattttcacttggaaaggcatgtggaatatgatttattttactcacaggtcctagagagggaagtagggcatgctacgtagaaagccatatgagaagagctcctaggaagcaggctcaatcaagcagatggggaagcaagagagaaagaattcctcagcaagtgcctttactgggagtcagggtagagggtacaagcaaagagcatgatgggatttactggtgtctttttatgggattaggtcacaatatgggagggcaagaaag

SEQ ID NO: 54689 - DNA, 691 bp, Homo sapiens
catgcgcgtgtgcacgcacgcacacaaacaccatacacacaaatactctaacaaaacttaatgtaaaatgatctcatgtttatgagagctggaattacttgggagggatacttgtgttctgcaggcttagtgggcacgatgtgaaagcaaggctatttggcctgtggagattgaagataagagcgtgatatgtaattgagtaagaatttgaaaaattatccgataacgttaggagcagcaaagcaactgcttstacttttttatgcttgaaactatttggagtaggagtgaggagctagcattgttttcagggcatgggaaccccctccccacctcactagccaaatatgtttgcctgggccgagagtgtcagatctctgagagatcttgacagagtatttaaatacattctgccctcggacaattcttcagtgttaatcatttcaggaaaagggctgtcagctaacctttaaaatcctttccagaatagtataccacagcccacctttccatcttgttccagtgacccaatctataaatggtcagttccttcatttgcagaacttgaaatagtttaaagaagagacttgatgaattgaactcatgtttttgctgctgtggccacaccctctatacagacatttgcttcatttgggttctcagcaacttgggaaggaggaggctattgatg

SEQ ID NO: 54690 - DNA, 691 bp, Homo sapiens
catgcgcgtgtgcacgcacgcacacaaacaccatacacacaaatactctaacaaaacttaatgtaaaatgatctcatgtttatgagagctggaattacttgggagggatacttgtgttctgcaggcttagtgggcacgatgtgaaagcaaggctatttggcctgtggagattgaagataagagcgtgatatgtaattgagtaagaatttgaaaaattatccgataacgttaggagcagcaaagcaactgcttgtacttttttatgcttgaaactatttggagtaggagtgaggagctagcattgttttcagggcatgggaaccccctccccacctcactagccaaatatgtttgcctrggccgagagtgtcagatctctgagagatcttgacagagtatttaaatacattctgccctcggacaattcttcagtgttaatcatttcaggaaaagggctgtcagctaacctttaaaatcctttccagaatagtataccacagcccacctttccatcttgttccagtgacccaatctataaatggtcagttccttcatttgcagaacttgaaatagtttaaagaagagacttgatgaattgaactcatgtttttgctgctgtggccacaccctctatacagacatttgcttcatttgggttctcagcaacttgggaaggaggaggctattgatg

SEQ ID NO: 54691 - DNA, 691 bp, Homo sapiens
catgcgcgtgtgcacgcacgcacacaaacaccatacacacaaatactctaacaaaacttaatgtaaaatgatctcatgtttatgagagctggaattacttgggagggatacttgtgttctgcaggcttagtgggcacgatgtgaaagcaaggctatttggcctgtggagattgaagataagagcgtgatatgtaattgagtaagaatttgaaaaattatccgataacgttaggagcagcaaagcaactgcttgtacttttttatgcttgaaactatttggagtaggagtgaggagctagcattgttttcagggcatgggaaccccctccccacctcactagccaaatatgtttgcctgggcygagagtgtcagatctctgagagatcttgacagagtatttaaatacattctgccctcggacaattcttcagtgttaatcatttcaggaaaagggctgtcagctaacctttaaaatcctttccagaatagtataccacagcccacctttccatcttgttccagtgacccaatctataaatggtcagttccttcatttgcagaacttgaaatagtttaaagaagagacttgatgaattgaactcatgtttttgctgctgtggccacaccctctatacagacatttgcttcatttgggttctcagcaacttgggaaggaggaggctattgatg

SEQ ID NO: 54692 - DNA, 691 bp, Homo sapiens
catgcgcgtgtgcacgcacgcacacaaacaccatacacacaaatactctaacaaaacttaatgtaaaatgatctcatgtttatgagagctggaattacttgggagggatacttgtgttctgcaggcttagtgggcacgatgtgaaagcaaggctatttggcctgtggagattgaagataagagcgtgatatgtaattgagtaagaatttgaaaaattatccgataacgttaggagcagcaaagcaactgcttgtacttttttatgcttgaaactatttggagtaggagtgaggagctagcattgttttcagggcatgggaaccccctccccacctcactagccaaatatgtttgcctgggccgagagtgtcagatctctgagagatcttgacagagtatttaaatacattctgccctcggacarttcttcagtgttaatcatttcaggaaaagggctgtcagctaacctttaaaatcctttccagaatagtataccacagcccacctttccatcttgttccagtgacccaatctataaatggtcagttccttcatttgcagaacttgaaatagtttaaagaagagacttgatgaattgaactcatgtttttgctgctgtggccacaccctctatacagacatttgcttcatttgggttctcagcaacttgggaaggaggaggctattgatg

SEQ ID NO: 54693 - DNA, 691 bp, Homo sapiens
catgcgcgtgtgcacgcacgcacacaaacaccatacacacaaatactctaacaaaacttaatgtaaaatgatctcatgtttatgagagctggaattacttgggagggatacttgtgttctgcaggcttagtgggcacgatgtgaaagcaaggctatttggcctgtggagattgaagataagagcgtgatatgtaattgagtaagaatttgaaaaattatccgataacgttaggagcagcaaagcaactgcttgtacttttttatgcttgaaactatttggagtaggagtgaggagctagcattgttttcagggcatgggaaccccctccccacctcactagccaaatatgtttgcctgggccgagagtgtcagatctctgagagatcttgacagagtatttaaatacattctgccctcggacaattcttcaktgttaatcatttcaggaaaagggctgtcagctaacctttaaaatcctttccagaatagtataccacagcccacctttccatcttgttccagtgacccaatctataaatggtcagttccttcatttgcagaacttgaaatagtttaaagaagagacttgatgaattgaactcatgtttttgctgctgtggccacaccctctatacagacatttgcttcatttgggttctcagcaacttgggaaggaggaggctattgatg

SEQ ID NO: 54694 - DNA, 691 bp, Homo sapiens
catgcgcgtgtgcacgcacgcacacaaacaccatacacacaaatactctaacaaaacttaatgtaaaatgatctcatgtttatgagagctggaattacttgggagggatacttgtgttctgcaggcttagtgggcacgatgtgaaagcaaggctatttggcctgtggagattgaagataagagcgtgatatgtaattgagtaagaatttgaaaaattatccgataacgttaggagcagcaaagcaactgcttgtacttttttatgcttgaaactatttggagtaggagtgaggagctagcattgttttcagggcatgggaaccccctccccacctcactagccaaatatgtttgcctgggccgagagtgtcagatctctgagagatcttgacagagtatttaaatacattctgccctcggacaattcttcagtgttaatcatttcaggaaaagggcygtcagctaacctttaaaatcctttccagaatagtataccacagcccacctttccatcttgttccagtgacccaatctataaatggtcagttccttcatttgcagaacttgaaatagtttaaagaagagacttgatgaattgaactcatgtttttgctgctgtggccacaccctctatacagacatttgcttcatttgggttctcagcaacttgggaaggaggaggctattgatg

SEQ ID NO: 54695 - DNA, 982 bp, Homo sapiens
gttttcacagacatggtctgaagttattataaagcacatgcttcctctattttcttatcttatatgcagcatatattattttgacccttgatcctaatcataagattaaaaaacgaatccaaagactatcatgagcttatgctactacttataaacaaatttgaaaaaaattaagaggtgtactctgcatggtgactttatgtaactgttggccaaatctcatatttgagctgtcgatattacctttggaataaacctaaattctaatgactgagactcagttagggttgctagcttgaaatggcacaaacaataaacacaaccagcagccaactttcttccccacagtatcttttgccaagcttaacaccaacctacttttactcatttaattgccatttatgagaaggtaacaaacaaaaggtacttgttaattgtgtttctttttgtgtgtgttagctaygggtgcaacctttacttgtctataacatgccagtgagagaggtcggggacactgcaaatggattctgattctctgccccatttgtatgtccttgggcctcctggtactttgtcaaaatgtatgctttcatgagatatttatgaatccatcagtattctgaacacatttaaatgacaaatcatgaataaaatatattatgtgtcacattactagcattacttcaagctctgtaaagggagttcttgcataggtaacaatatattgataggctccatcattttaagtgacattttgttgttacaaatatggttccttcaagctttaaattttttttgaaaacatgaattaagttatggttgtttatttttttttaagtagtaggtgaggtactaattatggcagaaactcttaaactattcagtatctcagtaaccacactatagtatatactgtatactggctgaataattagcaactcaatctaggtctctgttatgaggggtcattgcttctcttcca

SEQ ID NO: 54696 - DNA, 982 bp, Homo sapiens
gttttcacagacatggtctgaagttattataaagcacatgcttcctctattttcttatcttatatgcagcatatattattttgacccttgatcctaatcataagattaaaaaacgaatccaaagactatcatgagcttatgctactacttataaacaaatttgaaaaaaattaagaggtgtactctgcatggtgactttatgtaactgttggccaaatctcatatttgagctgtcgatattacctttggaataaacctaaattctaatgactgagactcagttagggttgctagcttgaaatggcacaaacaataaacacaaccagcagccaactttcttccccacagtatcttttgccaagcttaacaccaacctacttttactcatttaattgccatttatgagaaggtaacaaacaaaaggtacttgttaattgtgtttctttttgtgtgtgttagctatgggtgcaacctttacttgtctataacatgccagtgagagaggtcggggacactgcaaatggattctgattctctgccccatttgtatgtccttggrcctcctggtactttgtcaaaatgtatgctttcatgagatatttatgaatccatcagtattctgaacacatttaaatgacaaatcatgaataaaatatattatgtgtcacattactagcattacttcaagctctgtaaagggagttcttgcataggtaacaatatattgataggctccatcattttaagtgacattttgttgttacaaatatggttccttcaagctttaaattttttttgaaaacatgaattaagttatggttgtttatttttttttaagtagtaggtgaggtactaattatggcagaaactcttaaactattcagtatctcagtaaccacactatagtatatactgtatactggctgaataattagcaactcaatctaggtctctgttatgaggggtcattgcttctcttcca

SEQ ID NO: 54697 - DNA, 1916 bp, Homo sapiens
gaaattgagtgatgacaagataaaggcttccaggaagaattaggatccagattttgcctaggcaataagaggtattcataggtactataagtcagataggcctgaagtctggaagctttggggcagcagaacccaggagtgaaggacccaactcggggtctgacctacaagaactgagaatccaggcttagagtttagacagaagcctgggaattggcaaggagctggagcaccaacagtgtggataagggtcaggaatagcacttgaatcttgtgtgcctgttattattccttcccagcataaaggtacacttcagagtagggstaagcctgagtctgcagttgtcactcaccctccaatagatggaccacatctccttcatccttatcacatcaggcacatagccatcaactaggtccagtaacttcaccaactgtagtgctatttacaaattagtaccttgcaaattaacatattgctttataagttgctttgtaactaatcttcattttctttttggggtgtgtgttgaatattcccaactacaaatgtgaacagctcctttaaagtagaaacactgttttgtcttctcctatagctttttagaatcatgcatccctcaaaatagtcattttttaaaagatggtaactaatctatttgaaggctactgtgatacaacgacagacctaacctaaaacagtgaccaaatttttagactcttatcacttactcagtagactggatatagataataaaagataaatccctctttccatgccttcctattctgattaagaataaagaaaatttgactgcaataggatctgaatggaaaactaatagtcatttttctacattcagaaatagaggatgtaacctatacttcagccagaagttttcaatttcttagcagtgacaatttaagtaaatttcatacgagttgtggggatctaactttgttatgattgacaatataaaattagccttttctgctgttaagattatctagcatacctgtcattcaggtggaatgtggaacgagattgcccagctgtggatttgaacatcattaaagtcaacaaagggttaaaagttacttcctctgatggatttaaaattgccgcatacacgcaaacaagtttttcaaactgccccattttatgtctttgttgagagacagtatagttgctgcattttaatgtccagattatattacagatatatttcagtaaaccatgaagaaccatcatagattctagaagctggtgatctgtgcttaaataagcatctcctgcagcatcttttttattttataggctctgtaatcacaatggcattctgaaagaagaccttgaagctcacagagcagctgtccttcaccagctcccaggactcctacctgggggtggcagctatgaaaagcaagtcagggcttactggcttgacattgctgtcgtggtgggatggccattcttgtttccgaatgctccaaaatcaaaaagatcacaaagttgcaatcctcttattaattttttattttattttattttattttgagacagagtcttgctctgttgcccaggctggagtgcagtggcgtgatctcagctcactgcaagctccgcctcctgggttcaggccattcttctgcctcagcctctcgagtagctggggctacaggcgcctgccaccatgcccagctaattttttgtatttttagtagagacggggtttcactgtgttagccaggatggtctcgatctcctgacctcgtgatccgcctgcctcggcctcccaaagtgctggaattacaggcatgagccagcgtgccaggccgcaatcctcttattaaaatacatctgcactgtttactagcagagaatagattattactcaggagtggtcagtagatgc

SEQ ID NO: 54698 - DNA, 1844 bp, Homo sapiens
atgccacaaaagaggtgtggtcgtagtgccaaggaagcagaatgaaagaactgcattttcaggtagaacaagaataagaaagttacctgaaaaaagtgacaatttacgctgattttaatacttggtataattctagtgggcagagaaacacataggcagttgaaactgagagagggtggttatctaatgtaatagttaggggatgtttggggctgtgagtcatgcagtttggttaatgagtggggaaaaaatgtaagatctatgtggagaatctagaaatttgctgttggaaacaaactgaagaacatggaaagatatctgcactaaagtgtgggatgtaattgtgttttagaacctaatcagaagattttaatatgcactgagcaataaaagtctaggggtgaggagggggttaatataataggaggaaggatgcacagaggacytaacaggcttaactaattcattaatttatgtcgggccctggggttatggtgttaagcaaaaatagccatatcacaatcaaatgcagtgggagaaattaagtaattgcacacatctgagcataatcatggcagagatgtatactcaatagaagcaatctcaatctaggaagatttgagtactcagtcctagtacttactaggagtgattgagaatattatactttctgtcacaaatggttccctgttaaaaagtttgagttttatcttttcgataatgagacaccattgaaaattttggatcaggaactaaaatttaaaaagtcatttttttccatatttcttccaatcatgttttcttctttctaaagatttacattacatgatgtacaccatgacattctggaatctgagtcagagacagtaaattgcataagtgcctcttccatcctgagttcacgtccagtgggcatgaagtgttctactctcattcaatgaagttcttttttgagacagagtctagctttatcgcccaggctggagtgcagtggcatgatcttggctcactgcaatctccccctcccgggttcaagcgattctcctgcctcagcctcctgagtagctgggattacaggcgcctgccaccatgcccagctaatttttgtatttttagtagagatgggatttcactctgttggccaggctggtctcgaactcctgacctcgtgatctgcccacctcggcctcccaaagtgctggggttacaagcgtgagccaccgcatctggccaatgaaattctttacataatgtttctgtgagcactcagtaactcatccataacagtgtagaaactcaacttacattgtagctttctagatagtggatttttccttccctacattgcattgttcaattttctagagttataattaggcatatttggttatattttttggctggtaaaaagtcaaaataagaggaggcatagtgatcttaagaacttcagaactccagcctgggtgacagagcaagactctgtctaaaaaaaaaaaaaaaaaactattattttttatttttaacttttattttaggttcaggggtatatgtgcacatttgttttataggtaaattgtgtgttgcagggcttggtgtacagatggccaccctccaccttgagtagtccctggtgtctgctgttcccttctttgtgtccatgtgtactcaatgtttagctttcacttataagtgagaacatgaggcatttagttttctgtttctgtgttaaaaaactataacttggctactctgcctatggagtagccattctttttcctttactttctcaataaacttgctttcacttaaaaaaagaactgtagcttcaaaacatgtttctatgc

SEQ ID NO: 54699 - DNA, 610 bp, Homo sapiens
tgccaattctctataccttttggaccaggctctgacctaaggagaatataagaagttgtcggtgaagttcttaagcctctgccataaaaccttgggctttctgtcttccacactagaccaaattctgctwacacattaaggctgaattcaaatgtcatctcctatgtaatagcttcctccttagagatctcccctgttgctgaagtttagctggctgtacatggtttggtccaccctgatggatggtaatttccttaaaaacagggcttggggctcatttgcctgtgtaaactcagcacctcatcacagatgtggcatctagttaatgattattggtaagtgcttgctcaactgagttgactactgaacagcattaaattcaaaccaatttagtaaatcccagttttaaataaacaagaaatttcctgttggggaaagactgtgtaatcttatacatattgttgagatatctgtcccaaaaggatagaagttatatccttcaaccccacgaatcacagccaagagtttggaatttaagccttctttcaaaatcatatctttactttgatttataaaggatgttgattatcaagaaacacagtttaagagc

SEQ ID NO: 54700 - DNA, 638 bp, Homo sapiens
gcccacctgtcctcaggtgtgactcacactcactgcagtttgctgctgccccaaagtccagttccgggcaagggtgggggcctccgactagggtcttcccacatgggattctgtgtaatgatggagacgtgctgccatttcacttttaaagctgtcattcttaggcagaaggaattcgaacaagaacgagagcagatgaagcgtccgagaaaacctcaccacccacagctggccaggccccaacaactgacctgggccaagtcacaactgtgtcacccgcgaaccaggtgtgcagaccraacccgcctctggaggctgctctaacgttcacgaggcaacactgcgcctggggtccccgcggctggctgctgccgtcagtgtgcaccagggcaggtggagtgtgggctgtgcacggcgtgggacctgtgcagacctgctctgctgaactctcaaaggggctgtcctgaccccttcaccagaactcgtaactttggagcaggggatgcccacgacggctcctggctctgacactggctcctgcaagggacactagagcatcgttgcatcctcagcaagtgaagtcttttgctttcaagaggaagagcaggcagcctggcaggacagaactgcaaggcgca

SEQ ID NO: 54701 - DNA, 638 bp, Homo sapiens
gcccacctgtcctcaggtgtgactcacactcactgcagtttgctgctgccccaaagtccagttccgggcaagggtgggggcctccgactagggtcttcccacatgggattctgtgtaatgatggagacgtgctgccatttcacttttaaagctgtcattcttaggcagaaggaattcgaacaagaacgagagcagatgaagcgtccgagaaaacctcaccacccacagctggccaggccccaacaactgacctgggccaagtcacaactgtgtcacccgcgaaccaggtgtgcagaccgaacccgcctctggaggctgctctaacgttcacgaggcaacactgcgcctggggtccccgcggctggctgctgccgtcagtgtgcaccagggcaggtggagtgtgggctgtgcacggygtgggacctgtgcagacctgctctgctgaactctcaaaggggctgtcctgaccccttcaccagaactcgtaactttggagcaggggatgcccacgacggctcctggctctgacactggctcctgcaagggacactagagcatcgttgcatcctcagcaagtgaagtcttttgctttcaagaggaagagcaggcagcctggcaggacagaactgcaaggcgca

SEQ ID NO: 54702 - DNA, 645 bp, Homo sapiens
tgattttaaaactaccttttagaaaagaagttatagaaggatcaggatagccatcagagtatgctagtgttctacctatgaaaccatctaacaacagaataaaaaggctaaataaaatgtacctttatgtagtcaacaagattctgatattcaatgtagttgcctcctcccaccacaaaaacaatggcctaaaatgcaaacagattaaaaaaaaaaaaacacagtttttagtctgaaacctcttctaaaattaaggttaaaaaatgctagccaaaagtcatattctaagcccctgatgctattttaattattaagaaatgtttctaaaaagtcaatttataaatttctaatgtctcttgagtagtatgaagaagagatttttcagaaacaatttagaggaaaataactrtaatttccaatatatgttatttactgtattttttacggagaagcttctttgtatttcaaatgaaaacagtcatagtatcttcacaaatgtttggaatccaatttcagaaaaaggttccacacatgtaaaactctcactgcaatttgaaatacttcatttcctgtgaattgtccgttatttttaagcttaaaatattataaatataagcagctttataaattagaaaaatataattg

SEQ ID NO: 54703 - DNA, 516 bp, Homo sapiens
tgacgcawgacactgacgaaaatgacaatccatgcacttagctttcccaagaatgaaatgaatcaaaaagtaccaagaaatcaaaattctagctaaagctcatgaaaaggactcaaaactactctctgaatggcttatctttagctgagctcataacagaactcttaaatttctgaaaatttggtagaatcttcttgtgaaattcttcagaaaggattgcccaaacctagggatagcaaaagtttttgatgacctttccgctacctatgactcaacttatccctgattacaataggcttctggagaagagaatttatattagcaattggctttgagtaaaagggtctgtgaaactatctgttcctcatcaggtccctcccccaacccaggttaaaagaataaaatgaaattaaattattaaataaaatggataacaactggccaaaactctgcaaaggagattcttaaattgagtgggatactctggggttctttttaactctaacactctatgac

SEQ ID NO: 54704 - DNA, 516 bp, Homo sapiens
tgacgcaagacactgacgaaaatgacaatccatgcacttagctttcccaagaatgaaatgaatcaaaaagtaccaagaaatcaaaattctagctaaagctcatgaaaaggactcaaaactactctctgaatggcttatctttagctgagctcataacagaactcttaaatttctgaaaatttggtagaatcttcttgtgaaattcttcagaaaggattgcccaaacctagggatagcaaaagtttttgatgacctttccgctacctatgactcaacttatccctgattacaataggcttctggagaagagaatttatattagcaattggctttgagtaaaagggtctgtgaaactatctgttcctcatcagktccctcccccaacccaggttaaaagaataaaatgaaattaaattattaaataaaatggataacaactggccaaaactctgcaaaggagattcttaaattgagtgggatactctggggttctttttaactctaacactctatgac

SEQ ID NO: 54705 - DNA, 516 bp, Homo sapiens
tgacgcaagacactgacgaaaatgacaatccatgcacttagctttcccaagaatgaaatgaatcaaaaagtaccaagaaatcaaaattctagctaaagctcatgaaaaggactcaaaactactctctgaatggcttatctttagctgagctcataacagaactcttaaatttctgaaaatttggtagaatcttcttgtgaaattcttcagaaaggattgcccaaacctagggatagcaaaagtttttgatgacctttccgctacctatgactcaacttatccctgattacaataggcttctggagaagagaatttatattagcaattggctttgagtaaaagggtctgtgaaactatctgttcctcatcaggtccctcccccaacccaggttaaaagaataaaatgaaattaaattattaaataaaatggatracaactggccaaaactctgcaaaggagattcttaaattgagtgggatactctggggttctttttaactctaacactctatgac

SEQ ID NO: 54706 - DNA, 643 bp, Homo sapiens
ttttctatgctgattgtgacactgataaaatccttcattcatttattcaagaaatattttttatgcacagtatttttcaatactggcatagatctagagacagcaatgaagaaaatgaagttagtcttgcagttacaaaatatatagaaatagatatattagtttatagatatattaaaaagcacagaaataagaatatataagcacagaataartaagttaatatatatattagttaaataagcacagaaatatagaaaaaaatgtgataagacttgtattggaaaactagagtgtgctatgaaaaaaataatattaaataaaacaagaatgtgagaagacactcctgagtaagtgacattttaaggtctgatgaatgagtaaaagtaattcaggctaggaatagaaggaaaaattttcaaggcagagataattgcatttgcaaaatctgaggtaggaaatgtcttggtgtattccaggaactgaaagaaagttgatgtgtcttttagttatatatgcacctttcttatctcttctagatggatgagaacttgtttttcatttctttatactccataatgattaacatagtgtttttttattattattatttttaattattattattatactttaagtttta

SEQ ID NO: 54707 - DNA, 643 bp, Homo sapiens
ttttctatgctgattgtgacactgataaaatccttcattcatttattcaagaaatattttttatgcacagtatttttcaatactggcatagatctagagacagcaatgaagaaaatgaagttagtcttgcagttacaaaatatatagaaatagatatattagtttatagatatattaaaaagcacagaaataagaatatataagcacagaataagtaagttaatatatatawtagttaaataagcacagaaatatagaaaaaaatgtgataagacttgtattggaaaactagagtgtgctatgaaaaaaataatattaaataaaacaagaatgtgagaagacactcctgagtaagtgacattttaaggtctgatgaatgagtaaaagtaattcaggctaggaatagaaggaaaaattttcaaggcagagataattgcatttgcaaaatctgaggtaggaaatgtcttggtgtattccaggaactgaaagaaagttgatgtgtcttttagttatatatgcacctttcttatctcttctagatggatgagaacttgtttttcatttctttatactccataatgattaacatagtgtttttttattattattatttttaattattattattatactttaagtttta

SEQ ID NO: 54708 - DNA, 643 bp, Homo sapiens
ttttctatgctgattgtgacactgataaaatccttcattcatttattcaagaaatattttttatgcacagtatttttcaatactggcatagatctagagacagcaatgaagaaaatgaagttagtcttgcagttacaaaatatatagaaatagatatattagtttatagatatattaaaaagcacagaaataagaatatataagcacagaataagtaagttaatatatatattagttaaataagcacagaaatatagaaaaaaatgtgataagamttgtattggaaaactagagtgtgctatgaaaaaaataatattaaataaaacaagaatgtgagaagacactcctgagtaagtgacattttaaggtctgatgaatgagtaaaagtaattcaggctaggaatagaaggaaaaattttcaaggcagagataattgcatttgcaaaatctgaggtaggaaatgtcttggtgtattccaggaactgaaagaaagttgatgtgtcttttagttatatatgcacctttcttatctcttctagatggatgagaacttgtttttcatttctttatactccataatgattaacatagtgtttttttattattattatttttaattattattattatactttaagtttta

SEQ ID NO: 54709 - DNA, 984 bp, Homo sapiens
ttttcacacagtaagtaacacatgaatcttagccgtttgttattgctttgttattgctgttgttactggcatgtgctgcaaagagcctttagggacagaggtttgggattgaggctcagtggcaattacttgttagttctctgtccttagccatgctgcttaatttctccttgttacccagtgcatgaagtaaggatgggtgaagcacttgtcttggtgtggtgcttgtgaagagagagagtggagtacctgacagagcacttggtgaatggtaatgacccaggtcagttttagtgggtaagaggatgtcactgcagcctggagggctggcatctactaaggcgtggtcttcaagggcggtgctgagaacaggcatgctcagctctgaccttgggttagggtggaggtgtgttcttctaggcccgctttctagggcctcctgagaaaggggtcaccggacttctctaggtcagttgtccctaaaagtaggtcgaggacctgcaggtagagcctggtatagtttgagtcagggacagaggtattagtgttctttcacaagtcatttttttttttttttttgaaatggggtctttgtgtcccagactggagtgcagggggacagtcatggctcactgcaacctcaacttcctgggctcaagtgatcctctcaccttagcctcccgagtagctgggaatacaggcattcaccaccatgcccagctaacttttttagaaaaattttttgtagagatggggtctttctgtgttgcccaggcttgtcttgaacacctggcctcaaatgatcctcttgtcttggcctcccaaastactggcattacagacaagagctactgcagtaggctacagttacttttgtttccaatcccaggtaatagacatcccctcactactgactcatcctcttcctgactgtttttcactagcttagccttacctacttccagaggaagacttcatccgaaa

SEQ ID NO: 54710 - DNA, 645 bp, Homo sapiens
aaataaatgtcttggttttcaacataattcccctcataattccaaacaacgtacagaaggtgaagagttaaaatcaaatgttccattgaaggcatatcttgttaatataaactccaataaacttctttattttataatattggattttttaacatcaaactgctcaaaagtagtatctatcacaaaatcttgaccataggttgttatagaaaagcrtgtgataatggtatttgttataacattataacaagattttgatagcttaaaatggaagttattatagaactacaagttcataatttttgctgagttaataaatcttgaagctttctgcaatgatttgcttgatatctctgtttagcttaagaatttttcaaactcaataggtccaagggccaatggagttcagaggtatcataaaactggccaaagaacagagaactagaaagtggtagagaaaagacaaacacaggtgaacaggtcaccgttcaggggagacaccaagtcccttataaaagaagggaggtcattatctgctctgcagaaacagtcaagtgagttctttgacaactgcataactctggtttaaaatttataaaaaatgaaaaaattcatattatatatggttttcagatgaatgtcacc

SEQ ID NO: 54711 - DNA, 1494 bp, Homo sapiens
cacatagtgtcgtgaagtttcaatgagctgacgttcataaagtgcctaatcctgtgcctggcccacagaaggcactggataaatgagagggaagcctctgccagatttggccgtagggcctggaattttaacacactgctacaaagaacgtaccagataacacagagtggaaaccaaataagtgagatccatggacagtttaattaggaagcttcgacttgttagaataacagaggaagtcccagttatctacctattccttaaaacacattttgtcaggctggaatgattcccrtagtaaaactcaacatccacacctgcataaacatcgcctcccaagtgactatttattactgagtcgacacaggatgtcaccagtgagcctcatctccagtccaatggaggagttgacttagaccttccttggacaggaagggtctcataagcaatgccagaacttcaacagagcctaaaggtctggggacagggagatgggacttcatgtgctccaggcagggaagagctgtgcatttttgagaaatgggcagggacaggtcttccatggtaccagtggttgaggatgtcgtgggtacaactttccctggaggtcagaaagcatgagacagtttctggaagtctccgctagtgctgtgatcttttggtaaatccacactgcgggttagttacgtaaaatcccgtgaactctgtaaaaggtagcagtgagcctagaacacccataaccagcaactgcctggtgttgccaggtccaaatgctttcacgtgtggcccaaagagctagctgtgaaccagccaattatgataaagactgaggcatacacaggagtatgtattttcccctttctgatacaaacccatttaaaatcatcatgcaacctatgactagccattccccgactttcctctgcgggatgttctagcctcacagaccaatcataattatgatgtgttagcttatcgtttgcctgggaacaatcagtctagggtgttccagttttagtgagtaaccgatgtgagatgtagaaacaagcaaggagcagtggtgactttttcagaataaaggaatgcccaaacataaaagtaaaatgaaatattttaaatatttctaagtatcattgttaaatggaattaatggcacttacgctgcaagcaataaaaacatttcaagcttactgtacaaggggtacattttctttttgtttggagatagcgagattggatcttatcactatgtctaccctaagacacccaagggacaaaaagccctgagatggaaagatgccatggtcctcctcagtgtgtctcagaaatgcaggatgtctacttttgtaaaaatgtaggatcagctagacagaacagcaagccactggcatcatgcaaggcaattgttttggtatttctacccctcttatcaaaacaagttataaccaaagtacatggacatttccaaatcagtttattgtcaccattgcaccc

SEQ ID NO: 54712 - DNA, 652 bp, Homo sapiens
gcatacagaatataattttagccagatgtaaaagatggaggagaaagaagaaaagacatgacctttgacttccaggagatttgtatgttagagagacagagcctgtgagaccaagtacaagagcgcacatacgccaccttaaatctttcttgaaaacagatggtgatgaatgaaattagttttaaaatagatggcacatatgtagtctaatatcctatgcagtgagaaaaaatatatactttaaaaaacttttgtctttttgtctttaatgtttttaatatactttaaatattcagataacactggatgcagtagtaataaaataaaaaccaacakaaagatttagatttcatttgaaaggcaggctcattcacattctaaaatatttaccaatactgctagtaatattatatactacaactaataataaagggaaaaataccattatactgtggtaccttctgctttctcaaatatatcagagtttaagcagaagtaaatgctaaatactgtcaagtagagcttaagatctctggggattgatgtatatttttaaaatgccccaaaatattatgcaaatcaatgaaacaatatgtttctatgcagattttgaccacaattaaaacatgatttgccaagaccacatgaaata

SEQ ID NO: 54713 - DNA, 652 bp, Homo sapiens
gcatacagaatataattttagccagatgtaaaagatggaggagaaagaagaaaagacatgacctttgacttccaggagatttgtatgttagagagacagagcctgtgagaccaagtacaagagcgcacatacgccaccttaaatctttcttgaaaacagatggtgatgaatgaaattagttttaaaatagatggcacatatgtagtctaatatcctatgcagtgagaaaaaatatatactttaaaaaacttttgtctttttgtctttaatgtttttaatatactttaaatattcagataacactggatgcagtagtaataaaataaaaaccaacataaagatttagatttcatttgaaaggcaggctcattcamattctaaaatatttaccaatactgctagtaatattatatactacaactaataataaagggaaaaataccattatactgtggtaccttctgctttctcaaatatatcagagtttaagcagaagtaaatgctaaatactgtcaagtagagcttaagatctctggggattgatgtatatttttaaaatgccccaaaatattatgcaaatcaatgaaacaatatgtttctatgcagattttgaccacaattaaaacatgatttgccaagaccacatgaaata

SEQ ID NO: 54714 - DNA, 551 bp, Homo sapiens
gcagcctccacttttgccctcttggcagtagttgctagctgccctgatactaccatgctatgaaaaagctgatctactgtactggaggatgagaggccatatggaggagaaaagaggtggcccagctaacagctagcaccaattaccagacatgagaatgaaaccatcttggacctcacagcccagccaactctccatctgaacaccaggtgagtgagcccaggctaaccattagagaactgctcagccaacccatgggatcatgagaaaataaatcattgtttaagctatgaaattttaggtggtttgttatacagcaataaataacttgtacaactgggttttaaatgaaaatttattagctgggaaaggtagatatcattaacggaaagatctgcttacaaatcatatacgggacaaactcattttgataaaacacacagatagacatacagacaaaaagacctagaagaatatatactgataacagagsggtatataataaggttcatgctgggtagtgaaaataagtttttattttcttatttttg

SEQ ID NO: 54715 - DNA, 754 bp, Homo sapiens
ttgccgtactcatgaacatgaatagacacttggcagtgcaggttattttaatggacgcatcattttaagctaaaccttctccatctgttctgctctctaattaccaatgaataaagtacataattcacaattacgtcataaatataagatctacattatatcaactcatgtcaaagctttttaatccacactatttggcatctgttttacagtattaatatttgcttcattctgacaaatcagggacaaacacagtacttcctcagttaagaaaatctgaaataattacatgtttgcaaargagaaaggaattttctcatactattttattttataattgtcttattgatcagtatcacttaccttccactatcattagtcctgtggggtttaatctctctctgagttgggccttcacaacttttatcagagtggagatgagttaaaagtcacaaagtgtcaaattttgcacgtgctacaataatagtcaatttttagctcactttagaaatataaatgatacaactgagaatagaaaaaatatataaaatatgtattttcattttgaagctgattggattgatctgtgtttttattagaagaaaagccataagaggagagtaaagaaagagaaaagaagaggaaaatagtggatagaccaacccatctacctgcctacccccaagctttctctcaccttaggccgtggagattgagtgatgtgtggaattccctgaaaatcatgtccccttgc

SEQ ID NO: 54716 - DNA, 754 bp, Homo sapiens
ttgccgtactcatgaacatgaatagacacttggcagtgcaggttattttaatggacgcatcattttaagctaaaccttctccatctgttctgctctctaattaccaatgaataaagtacataattcacaattacgtcataaatataagatctacattatatcaactcatgtcaaagctttttaatccacactatttggcatctgttttacagtattaatatttgcttcattctgacaaatcagggacaaacacagtacttcctcagttaagaaaatctgaaataattacatgtttgcaaaggagaaaggaattttctcatactattttattttataattgtcttattgatcagtatcacttaccttccactatcattagtcctgtggggtttaatctctctctgagttgggccttcacaacttttatcagagtggagatgagttaaaagtcacaaagtgtcaaattttgcacgtgctacaataatagtcaatttttagctcactttagraatataaatgatacaactgagaatagaaaaaatatataaaatatgtattttcattttgaagctgattggattgatctgtgtttttattagaagaaaagccataagaggagagtaaagaaagagaaaagaagaggaaaatagtggatagaccaacccatctacctgcctacccccaagctttctctcaccttaggccgtggagattgagtgatgtgtggaattccctgaaaatcatgtccccttgc

SEQ ID NO: 54717 - DNA, 627 bp, Homo sapiens
ttctcaaacaacctgctatgttgttggagtttaatggctgacagactaatgagaacgaatggcttacaatcttccaagactgacccacttagtcattcacaccatccatcgaatgagagactgcttcagaggtacaaggtcacacccttgcaacaattattctgtctaatgaggtgtcacaagaaatctactggttcaaaggtgtgtggtaggggcagctgagcataaaatattctgtgtccttgcaccgaagtgtagatacacatttctgagcagctctttgtcacaataccatattaaatgaaaaagctacttagttatggaatcatttgcactttaaagagatagaagtgatacaaattttactttcatgttgtcaaggatttgttggggtggggsaacttcggagacattttccccccaaagctcaatgacaggttgacttaattattcaaataactatttataggcgataattagaccatatgttaatctcagagtttaaaataaccaatttgcttatattgtttcgttcttgtctaactctgcagaggtacaattttcagagtgaaaatgaggcttaggtcaaatcaaagcatccattaacatattattgtgtctacagaa

SEQ ID NO: 54718 - DNA, 599 bp, Homo sapiens
cctggacaccctctgagcaccaggcctgtgtccatgcaccgtggccttggtccaggtggctgtcatctccctagctcatcctgactcctggcctcacccctccgtggcccctctggcatggctctcccagcctcggatggcaggtgctctccccagaattggcctctctctgctccaggggacagggatcctgccacagtgctagcccctcccctccatgtctggcagcagggaactgtcgacaagggggctacgatgccacccccagctgccagcaggaaggaccccaggcacagcctgcaggtctgaagtgggtgacagtggccagaggttctcacaggtcgcaggacttcagtggagtgaaggttggaaattggttacaaaggccatgccttctgcgtcacagccatttcacatttcaattygtgattctagtggctttttttggcccctctaaagtagcaagtgggggttatgtgagagaaacaaagcttaatctaaaaatgtctgatcttaaaatatcagcgacagacaaagctatcaatttctgttaaaaacaattcttggttgtaaggggaaaccagagtgtacacaatgca

SEQ ID NO: 54719 - DNA, 580 bp, Homo sapiens
gctatatgaagtgtaaatttgttttgcagatttgtgtccattttataacaagatacaatttgcactgaagagtttttaaaaagataacctacacacatacacttaatttgcctcaaacaacttctttgaaatacagtataaacatttaagaaccatgacaaagttgtggttcaaacttcaacaaagattttcttgaaacccagtacaaagattactggctcaagaccataccccaaagtgacatcagcaggagatttgattgtaagactctaccttttaaaaaaagagcacacttggttatacatggcttttaaacttgagctacagttatgctacaaatccccccaccctcccaatctaaagtcagtcrtgtagagatatgtacattctctgagcattgtttaagagtccttggttttccagctttgatggagatctagaaggcgttcagaagtctgtgtgcttacattcagagcaagatgaacttaacaaattccactttcctccattagtgacaggccacagatcccaaagtatgcatgcaaagcacctggattactggccacttggcaaatccccc

SEQ ID NO: 54720 - DNA, 578 bp, Homo sapiens
tggcagccctggctctgccctgctgatgtagcaaggcgggaggcagaggctgaccagcaaggccactccggcctattgctgtgagtcaccgcctggctcaaggcccaggcaaaggccgcgggaggcctctgtctggggttcccacagtgaatggctcatcggttccttggtgttcctggtgggctttggggaaacctttacttcagataacagagtgagtaggtagatggtttggagccmtatgacagtctaagcctatacctaaagaatggtggggtcatcgacccaatttctagcacctaaaacctttggcccagtggttctcaaacgctggtgggcactgcagtcgcctggaggtggggaggtgtttgttaaaaaattacaccttcccgagcccccacacctgtggaatctgaatcttggggctctggtgtgattcccgtgcccccagcgtttgaagttcagtgtgtcaggcaccctcagacacattcacaaagactctcaacccccctctcacgtcccctttcctgtgttcccagcctcacacatccgcacgcggcccgcactctcacagggcg

SEQ ID NO: 54721 - DNA, 578 bp, Homo sapiens
tggcagccctggctctgccctgctgatgtagcaaggcgggaggcagaggctgaccagcaaggccactccggcctattgctgtgagtcaccgcctggctcaaggcccaggcaaaggccgcgggaggcctctgtctggggttcccacagtgaatggctcatcggttccttggtgttcctggtgggctttggggaaacctttacttcagataacagagtgagtaggtagatggtttggagccatatgacagtctaagcctatacctaaagaatggtggggtcatcgacccaatttctagcacctaaaacctttggcccagkggttctcaaacgctggtgggcactgcagtcgcctggaggtggggaggtgtttgttaaaaaattacaccttcccgagcccccacacctgtggaatctgaatcttggggctctggtgtgattcccgtgcccccagcgtttgaagttcagtgtgtcaggcaccctcagacacattcacaaagactctcaacccccctctcacgtcccctttcctgtgttcccagcctcacacatccgcacgcggcccgcactctcacagggcg

SEQ ID NO: 54722 - DNA, 578 bp, Homo sapiens
tggcagccctggctctgccctgctgatgtagcaaggcgggaggcagaggctgaccagcaaggccactccggcctattgctgtgagtcaccgcctggctcaaggcccaggcaaaggccgcgggaggcctctgtctggggttcccacagtgaatggctcatcggttccttggtgttcctggtgggctttggggaaacctttacttcagataacagagtgagtaggtagatggtttggagccatatgacagtctaagcctatacctaaagaatggtggggtcatcgacccaatttctagcacctaaaacctttggcccagtggttctcaaacgctggtgggcactgcagtcgcctggaggtggggaggtgtttgttaaaaaattacaccttcccgagcccccacacctgtggaatctgaatcttggggctctggtgtgattcccgtgcccccagygtttgaagttcagtgtgtcaggcaccctcagacacattcacaaagactctcaacccccctctcacgtcccctttcctgtgttcccagcctcacacatccgcacgcggcccgcactctcacagggcg

SEQ ID NO: 54723 - DNA, 648 bp, Homo sapiens
  misc_feature (1)...(648): n = A,T,C or G
ggagaccaaactcagctgccttcctgatgtgttggtttcctaataaagccttgagctgggggtgcagatatagccgtggagcatctgtgagcatccttggggatcagggaagaaagggaggggttacccggcagaagagtgtggcgtgggctgccctcatgacaagcagctgccagtggagaaaagagccttatcttcagggaaggracagctccttcccagcctacaggctcacaccctgatggcccaggagagatagcagtgatgttgtaatcaaatggccatgatactgcaggcagggattagagtcaccaagaaaactagctgtattggaaatgtcttcctctggcttatctcaggaactgttcctgcttctccctgcaggggatcattttccaacatgcctgtctctagtcctcatcaaaaagcatttatgaaaggcctgataagttttggtgtggtgagaggtcagggcacatgggctgactggcactgaagtgtgggccagtgtcccctgtgccaccttcanttgtctgccacctgtaagggtcttaacactgctgctgtgagagctgacaaccagagccatcagctgctgctctcccataccagagctctcctagcagaatttagcacagaaattctgcc

SEQ ID NO: 54724 - DNA, 597 bp, Homo sapiens
atgagaactataaattacactagattgacaagagtacgttttgtgtgtcacggccttcaatgcaattggctcttgggacataccatgagcattaactcatagacaacaatcaagggatagctagtttatttgctttactctaatacrtagctgtaacacaaataacataagctgtgaaagcaatctattaggtctccagactaaaagatcaatttactacaggtgactgacagcaattttcaatggtaaacaggttgataaataacattcatttatttctttataagtaaaatataagtataatttaaaatatcaaattattgatcaagctgtttctgtacctcacttccgtttctgtctatgaatgctccctgcccacctgtttgcccaatgggactctcttagcctcctttggttctgagggctgcctgattagagaatcattctttgctcaaataagctattcaattcaatttgtcaaaagtttttcttttcatagtattatgtatcacgtgttatgagacatccttcttgggcaaaaaggaagccattaatggttattgcaggatgcttaacctaataaaatttaggacattt

SEQ ID NO: 54725 - DNA, 978 bp, Homo sapiens
tgcatgcaataaagttattcatattgattatatgtattttaaattcctataaaggtctcaaaaatttgacattgccgcaggcatactcttccatatccaaacacaaatgggagagttttgtttgtcattgttacacaaggtctaactaaaagtaataagactggttttgatgacttagttttgatgacttagttattatctgtctcattgcttcataggtacattatgtaacagtagacaatagtaattattgtgagttccttatatggaactttcttgaagtgaactaaattatttttgacctcatgataaatgtttgcccttttaaggatgttactaatatttataggacatttgctagtctttttttgtttgtttgtttttgttttttatttttttattttactttaagttctagggtacatgtgcacaatgtacaggtttgttacatatgtatacacgtgccatgttggtgtgctgyactcgttaactcgtcatttacattaggtatatctcctaatgctattccttccccctccctccacccccctacatttgctagtcttttaaaagtaaacttgaggctgggcgcagtgtctcacgcctgtaatcccagcactttgggaggccgaggcaggtggatcacctgaggtcaggagttcaagaccagtatggccaacatggtgaaacctcgtctctactaaaaatacaaaaatcagctggttgtggttgcatgcgcctgtaatcccagctactcgggaggctgaggcagaagaattgcttgaacccgggaggtggaggttgcagtaaaccaagattgcaccattgcactccagcctgggtgacaagaatgaaactctgtctcaaaaaaaaaataaaataaaataaaataagattataaactgcgttttctgattagttcaagacagcaccaaagtaatccttaacaattgaagaggaattgttgctttctaagca

SEQ ID NO: 54726 - DNA, 617 bp, Homo sapiens
  misc_feature (1)...(617): n = A,T,C or G
ttgagtttattacccatggtctaggaagatgtaataaaccaagccagggaaaggtttggctatctctctttagtcacgcctatcaggtttagtctccctttggggtgggggctcccttgtggggattccatatgtacataactgataggtgacttccaacacatgttggtgaaaatagatacagctaacaagtatttatactagggtctatagtaagtgcttaaatgagccaatttacttaattcttaaaaacctttgargcgtaagtactgtcttctgaggcacaaagagttgttacttgncccataagcataggtgataagtggcaggatgggaactgttttttgactctggagttagtgttcaccaactgcttttatgctgtcgctgaaatagaccctagccttttcaatttggttgttgtccacatagttacagataatttcttagggtgattatttttagccgttgaaagactcttaaatgatccaagtatgtcactggggctcttgtctgctgacttgctaggtcctggatttgaaaagttttctgcctttcactatctactttgtgaagtttgggattgttaaaagttctagtttagcatgtaggtcagc

SEQ ID NO: 54727 - DNA, 617 bp, Homo sapiens
  misc_feature (1)...(617): n = A,T,C or G
ttgagtttattacccatggtctaggaagatgtaataaaccaagccagggaaaggtttggctatctctctttagtcacgcctatcaggtttagtctccctttggggtgggggctcccttgtggggattccatatgtacataactgataggtgacttccaacacatgttggtgaaaatagatacagctaacaagtatttatactagggtctatagtaagtgcttaaatgagccaatttacttaattcttaaaaacctttgaagcgtargtactgtcttctgaggcacaaagagttgttacttgncccataagcataggtgataagtggcaggatgggaactgttttttgactctggagttagtgttcaccaactgcttttatgctgtcgctgaaatagaccctagccttttcaatttggttgttgtccacatagttacagataatttcttagggtgattatttttagccgttgaaagactcttaaatgatccaagtatgtcactggggctcttgtctgctgacttgctaggtcctggatttgaaaagttttctgcctttcactatctactttgtgaagtttgggattgttaaaagttctagtttagcatgtaggtcagc

SEQ ID NO: 54728 - DNA, 429 bp, Homo sapiens
cactccaatatagtaaccacttcttttttttttttttttttttccctgctggttcattggtaatcagatactaatttgtctttgtttataatttgtatttttcttctcaatgtaagctctccctcctggaatgtayacagttcctctagagggcataattttaaaaaatagtttatattttagagcagttttaggctcacagcaacactgagcagaaagtacagggaattcttaaatactccacacccctacacatgcacagccttcctcactatcagcattgggcacaagagtggcatattggttacatttgatgaacctacatcaacacattctaatcaccccaaatgcacagattacattagggttcactcttggtgctgtacattctatggtttggacaaacatataatgacacacaccattata

SEQ ID NO: 54729 - DNA, 626 bp, Homo sapiens
aggttgtggtgagccgagatcgcgccattgctctccagcctgggcaacaagagcacaactccatctcaaaaaaaaaaaaaaaaaaaaaaggtattgtggtatttgggtgtatgttttatttgcataaatgatagtgtattacatattctgcttcttactattttttctctctaaaaaactgctaggttctgaaatctcatacatgtggcacaggcattatctaatctgggttcccattgccgaacatcaccctggtgtcatctgccacatttcacctgtgcattctctcattgatggtgggcactcagttggctccagtgctctcccacgtacatacaccacaccaaacaacctcaaacctgtgggctcttgtggatcctatgagaatgtctctggactatatactaagcagcataactgctgggtcatagcattagtagccctagatccttccagaaaggctatagcatccacaccccatcagccaycaagatacagaacccatctatgccaacatttggcttatccagcttttaaatttttgcagtccagtagatgtaaagtgccattttgttctaattctcatttgtgtgattactaataactttaagcttctctttacatgc

SEQ ID NO: 54730 - DNA, 626 bp, Homo sapiens
aggttgtggtgagccgagatcgcgccattgctctccagcctgggcaacaagagcacaactccatctcaaaaaaaaaaaaaaaaaaaaaaggtattgtggtatttgggtgtatgttttatttgcataaatgatagtgtattacatattctgcttcttactattttttctctctaaaaaactgctaggttctgaaatctcatacatgtggcacaggcattatctaatctgggttcccattgccgaacatcaccctggtgtcatctgccacatttcacctgtgcattctctcattgatggtgggcactcagttggctccagtgctctcccacgtacatacaccacaccaaacaacctcaaacctgtgggctcttgtggatcctatgagaatgtctctggactatatactaagcagcataactgctgggtcatagcattagtagccctagatccttccagaaaggctatagcatccacaccccatcagccatcaagatacagaacccatctatgccaacatttggcttatccagcttttaaatttttgcagtccagtagatgtaaagtgccattttgttctaattctcatttgtgtgattactaataactttaagcttctctttayatgc

SEQ ID NO: 54731 - DNA, 1836 bp, Homo sapiens
agtttttatactgtaagttgctcacctgaaagtggtttttaaaaatcataagtattcacaaagagggaagtaaaaggttcaatatctaaaatcatcctttttaaaggaacatgacattctcctaaaacaatagaaagtatactcattgcatatttctttaagacagggaaaaggaaacagttctgttttttaaagatgtggagagagacagggagcaagaaagaacagagccaaaaactacttctatttttaagaaaagagggagaaattgaatatgctttttacaaggagaagacacagtatacagtggtatgtgtcagactttcagtaaaagcaagcttctttactcatatctaataaataatagaccagaaaaaaaagggcctggtcatcttattttataatgaaatgataaaatgcagataaactgaacctctgagtcaaaaatgtattgggttcaaaggccatttttaggatagctttgacctttccataaagtgtgaaaggttcctgtctcccataaagttgtgaccttaaagagcaagatgtattcattgtgtttttaattttttatttatttatttatgtttgagacaggagtctctctctgtcgcccaggttggagtgcagtggtgtgatctcggctcactgcaaactccgcctcctgggttcacgccattctcctgtctcagcctaccgagtagctgggactacaggcgcctgccaccacgcccagctaattttttgtatttttggtagagatggggtttcacgtgttagccaggatggtctcgatctcctgacctcatggtccgcccacctccgcctcccaaagttcagggattacaggcgtaagccaccgtgcccggcctcattgtttaaaaaagttataaaagaaatagagagtgctctgacccatcagatgtgtagttgtggtgtctgtcacacagcattctgtcaagaaaatagctagcgagtcttgaacataaggcattctgaggccaacatccccttttgatttctaaaggacttattgttacttctggttttacaaattgcaaattagggtcttaaaaattttagtatttgatgttagttcactgaactctcttgtcagccaattcataaggagaatttactgcctaccatgtatctgacaatgaaatggagaaccggtagaaacagcccttagtctcagtgttgagatgagtgagcgttcatttagaatgcatttcaccagtacttcttcagtttgattgttaacccatttggtttctaagtcttaggagatatgcaaatgctgaagtcctcaatgttctaatgcggtaaatagatttttttttctttgttgttatgtgagacaccttaagtatagattggtgttaaaacaagtttataataatgctattgatgtgtaaaaacaagctttctaaatgaaaatcaatacctgggacagcttataaactattcttcataatccctttgggtggaattcacagagtggttgtttctttttggtttaaatgctaaatctggccatctttggttatcaaatggaatttgatgatccaaaatgtatttaccacatttgttggatctacttatgaatctttggaaaaactaattgtagtaaaatgggaaaaggctgggacttgtcatctgggtgaacctgaacacggtaaaacctccctgtagaaaacctaatwtttgtaatctgtaaaatggaattgaaattatatatatatttaaatatataaattatatataattattattatataattaatattatataattatatataatataaattataaataaattataaatatata

SEQ ID NO: 54732 - DNA, 649 bp, Homo sapiens
gtatagaaggtgttatttcaagctgtgtttacaaataagaaatgttatcaatatatttactattcttatatataattggctaaaagtgtctaatagttgtaatgtataaaaactagttacatctaagagatattagtaataaaatgttatttgaattctcttatcattagaagggcaagttgaagttgtggaaataacaggcttctgaagagactcactctgttgtgggttcaaatctcaatattgtgattcctggctgggtgatcttgggccttaatttctacatttgagcattggaaatcacattgcaagggtaaatattggttccttctttcctacactatcaaataatatattaattkggaagctctagtgatttcatggacaaaatgtatggcaactgttccttccctgttgtgtttttgttaactattcactcacccttacccctcattattatttaagagttgaaaaactaaagcccagaaagataaaatgattgatttgggataaaaccctaattaattaaaaaataaaaatgggtagcaaagatcaactcatctgggtcactcagtcatgggaatgcatcaagttttgccataatccccaactccttactctctcttacaactgtcacatatccctcatg

SEQ ID NO: 54733 - DNA, 842 bp, Homo sapiens
gacacaatagctttatctggtaataggaagcatttaaaaaaaaatccctttgaaataaatttaagaaaacttaaaggatatctttttttccctcgagacagggtcttgctctgtcacccaggctggagtgcagtagcatgatcatggctttctgcagcctcaacctcccaggctcaagtgatcctcccatctgtgcctcccaagtagctgggactacaggtgcatgccatcacacctggctaatttttaaatattttttgtagagttggggtctcactatgttgccagggctggtctcaaactcctgggctcaagtggtcctcctaccctggtctcccaaagtgctgggattacaggtgtgagccaccacgcctggccaaagaatatgattttcaattactgtcttcctaaattaacaagtagtatttatttaaatttctaatatcaaaaaaattaaaactcttatttccaatctgacagactgaataatgggaagaagactcgcaaggataaaggctgaatgactcccaactttttatcaygaagaactcctttcctttacttctgtctgctctccaaggactccatttgaaacagttctaccaatcaagcttcacttagtaactacttgtttttccaataaattaattccaaaagtttctaatcagaataacccatattgtcacaatgcactcagaaaattacagcccaaagcaaagaaagttggcatttaacaagttggcatttttttttcttttcttttttttgcagttgcaagatttaatagagtgaaaacagagctcccatacaaagggaggtgacacaaagagggtagcccacag

SEQ ID NO: 54734 - DNA, 605 bp, Homo sapiens
gcccccatgcccagcaaaccttaaatttcttataagagcaataaaaacagggatctttcactcatctttgtgtcaaccttgttgcctaaagtgttgctttagatataatcagattcagtaagtgtttattatgaagaagtgagcaaatttccttgccatttctcttactttgctgtctctacaatattggtataaggacaagcctgaaagctatgataactttattgttacatggtcaacctgaaaattttatatttttatggttttgtatactgaggaaaaaattactctaacatatatcttccaactataatttttctcaagcaaacaacaaaaatcagttataatatgttcttttaaaattgattttatacaaatggatttttagagaaaggaaacagttttaattaataacaaaataatttgtctttggcaagatagactaacagggactttctgccttaaagaactattctaaacaatggtctgttttcagaccacaggcagsacatgacagtgatcacttagagaaagagggaaaagcaatgtaagaaacaaacctgggtgtgagccctctgattgtcccaacttgctgcctagagagt

SEQ ID NO: 54735 - DNA, 637 bp, Homo sapiens
tgacctgttcactatttcccagcataccaatcttctctcctgttagtccttataacaatggactggatacactatccctacaatatgaactaccacatagagtcatttttttctgatttaattaaaagctccacgtaaaccaatgtggatgttgtaaatcatgccgagttgtggtamacatgcctctgtaatattaacagtggccccaaggctaaatttagctataccacattattaaatcctatgagtgtagctaacatcagaaaaatgttttgaaagcataaatattttagcatgaagatttaacaaaaatgtatttcatcatatcagaatatcaggggggaaaaactcactcatttataactgagccaaaggagagctgtttgcattttgccttgtctgtaacttggagatgtatcctataagcgttctttggtgagataaaaaccagtttctattttcctactaaaatatttttaaaaattgtatttacctggcactgattagtttgcttggtcttcagacacaataagaacatgtttaggtttcttcattaagaaagtaaatatagaatattccaaaaaggctttagaaaattcagcagaactaatgtaataaacatactcactctaacatg

SEQ ID NO: 54736 - DNA, 2702 bp, Homo sapiens
  misc_feature (1)...(2702): n = A,T,C or G
tggtgctcactttgggcacctatgagtgatattatttagagcaggagtttttctaagtccttatccttcgtacctgccaaatcggcattatgtagccaactgatagttaacattgctccacataaaggaacaaattgctttggagctccttcaatcactttagcaacactgatagcaagggataccttgatttaaaaaatcctcctatgctcattatgcagccaaaggtctcagctcagcagaactctgagctcagatccagcttacaaataaagatgttgcattcctttaggtatcttctttaatccaggctgctctcatcctgcatgggtggaactgaatggaggtggcagggaggtctgtgtagctgtgtttagagacgagaccctgaagccagatgtagccacgtgtctcccagggatcttatgttcaacatgaaaagcccagactcaggataaaggactgtcaccacgagaacttctctggctctttcaatcaagctctggtggttttcttccagggcatggcccatgggaccaagcacatggtgtgtggagctgtgctctgcttcctcgtgttgatgtaacatgggctttggcagggccccaccacagatggggccccttgacatgcgtatgttttgattttgtggtgcctgcatggtaactagagctgtctgtcaaggaaattaataaaatggatgtgatgctgattcttcagtgctattagcagcagggaaaacctctgcccaaccttcctccagaccctgatgggcctcacctctaaagccaaggatgtccgctccagctcagctaatcccattgccaagttcctatttaggaagagcttgtgggaaaggctgggcctggccctggtgtaactgaaaacacattttcctctgggggttatgttaccacattatttctgtataaggccaattcccgcctgtttggaagtagctctctgaatatgaccttttgacactgagatggtctttgtgttggaattggctaaggtacatgacctggaaatcacaagccttcccctcatatatttttctcagctaaaatagagatgccttattcacatgctccccattctacattgctatctttgtgtacttacctccaaatcccagatcttcgtctcctttaggtcatggtgaacaccataatggcaccctccttggcatgttttatgtattatctcccattccagggatcacaaagccctcacttacttttgttgggggtggggggtaggtggaaaagtaaacctacaaatggattattgtttacagaaattgcttccttctccaatgacctccgtatcctatgacggagaattcatcaatatttccatggggacaagcaggcctattaggatggacaaagaaggggtgaggctttggcagcacttgatcctttgggaacaattagsatttctggaagccaaggtaaagtgttagctcaccctctcccttcccctaggccggtcgtgtctgttttttggtgcggcagaacccctgttaaaataagagaaacaagactgtaacagcaaagatgtggcacaggcagaagcacagtgactatccactgggctttttaattttattttaattttttgtagagaccagtctccctgtgttgtctaggttggtctcaaactcctgggttcaagcaatcctcctgcctcagcctcccaaagtgctgggattatataggtgtgagccacttccactgggcattttatcatgcatgagaccaaaatgccaagactgaaagtgggggtgatatgtttaataaaagaaagagggattactggccaggtgtgttggcccacacctgtaatataagcactttgggaggccaaggcaggtggatcacctgaggtcaggagttcgagaccagcctggccaacatggtgaaatcccttttctactaaaaatacaaaaattagctgggcctggtggcgcatgcctgtagtcccagctactcaagaagctgaagccggggaattgcttgaacccaggaggcggaggtcgcagtgagccaagatcatgccattgcactccagcctgggcaacagagaaagaagaccccgtctccaaaaaagaaagaaaaagaaagagggactactggcatacaggaattacaaaagaggcccagcctggaggtaccaagaaatatggagcaatgcttctttatctctccatcaatgccactctcaaagataccaaccttaggaccctaagtctttgtccctgaaaacctcactcctatgtggatatatctctgaattgatctaaactttttaggaatcttttttatattttatatacccccatatctttgggggtaatgaatttcttaactttgctaactactgctaaatattttttttctggctatttgtccttaatttactccatttaaacttcaaggcatgccctctacagcttctgcagtgctaggatttaacaaatcttatgctaattttatatctaatacctttaggaaagagactcaagctggcaatccagggatcctccagctcagcagctgctgttaaggacaggttaagcattttgtgcaataggannnnnnnnnnnnnnnnnnnnnnnnnnnnnnnnnnnnnnnnnnnnnnnnnnnnnnnnnnnnnnnnnnnnnnnnnnnnnnnnnnnnnnnnnnnnnnnnnnnngt

SEQ ID NO: 54737 - DNA, 425 bp, Homo sapiens
cagcaactccctttccagaggaccaagactgcatacatcagtgtcagcatgggctgggcgagcagacatttcatagctgccacccaagtggttcggcagtacttgggagggtggttagaaatctccctgcagccccaaccyagactcagcttaattacagataatggtatctccgtggtggctccatttgctttaaattatcttgcattttcaagatttattgactgacctactgaacttcccagctgtgtcttcatgttaacacacatctggaggaaaactaaaaagtgaagtcaaacatcaaacatgattttatctgtgctatctgtgctgttccagactcctggaggcattcctttgcccacactgagtgtgggctgtgtctggtgtgtgcctcacagtgtctcagatgccgcctgtgtaag

SEQ ID NO: 54738 - DNA, 1003 bp, Homo sapiens
ggagaagcattactggtcccgtggggttagccattccttggtaactcacattatggacgctggtgcagatcttagacattgccgtggagtgggaaaggaggacaaccagccaatcgcttcacaggcggccccaacgtgcaagtcctgtctttaaaacctgcttcgtcctggggaggccacggaaagtgccaaggaagcctcacctctggagtcctctggcatcccgttggggtggacacaggcggcacccccgaacgtcagtgctcatcaaacatacacgggccaacggacacacagggtggagacaaggtcctcagaccctagaagacgcctctgctgaggcccctgggtcctggcagggggcatggcgagggcctcacaagcactacacccaagcctgacgatctttgatggaaacagcacacgtcatctcaaattaactcccggaggctccagactcctttcctatggcacacacgtgtgcagcttcttggaagcgagagtgcgactcacccggctcccagggcaaggagggcagcaaaggccagagagcgctgcgtccccctctgggagtggctgagatcagggggctggcactatagccaccacccccaagtatgctggtggctactaggacctattagcacacaggcccacagggcaacagctgtgccctccaggctcracaggctgggggtgtagcaggtgcagggtaaggatgagtaaaccaccttcccgctgccttctgtcggcacgcccccaccacgggcctcacacaggcttctccaggggctgggcctgagcttggcagagggaccccggccagacttggcgtgggaaatgtgtggtgaggccgggaggccagggtggcaggcaccaaggacccttcctcgggggcacgtgcccatgctcagcccccagtgaagccaggaacggcgttctgtaaagtgtgccatggtgccaatttcctagctttttaggaccagagtgggcaccgaacaca

SEQ ID NO: 54739 - DNA, 608 bp, Homo sapiens
catgcatacaaccgatacctaaaacattacctgagtcaatgatcagctgggcataaccgtcccagtttttgtacaccgtgaaaaactaaaaagacattataggcaatatcatgtactgtaacacatattccaaagggaaaacgtcaattcyaaaatacctaggagcaaatgaggcaaccagggcagacactaaagcactgagcaagatgctgtcatgatgactacttatttatttctattttatatgcggggaaacagctcagttattactcaaagccacacttaccaaagccagaggtaaactagtacaagtcttttgattcttagcattatattcaataaattcactaggtattctctaactgtacttttgatgggatattgaaatctttaaaggagaaattccatgttggaaccaagcaaagggtggaatttgacaaagcagcccaaccactttggcttacaaagtcctttatttagttcctaccctcttcatctgcatagtaaatcatagggttcccccccacccccaccacgaatagcagttaatcatggctattctccaaaaagctaggtgcaaattaactttatggctccagtctatctaa

SEQ ID NO: 54740 - DNA, 1760 bp, Homo sapiens
tatttccattctattattgcttattcagcaaaaaaaattatagagaaaacattttaaaatatgttcaagctgaatttaagttcatatacttgaaactaatatacttgttttgatgataaacattactgtcatctctccattggtgtgatttatcccaacacaaaccactaatggtaaataacttggccttcagttgagagtttacagattcgtgacaatattagaaagacaattgtagcactccccagaaaagagatctcacatttacttgtaagtacagacaccttacaaactagtcgaaagagtacataaccctgaacatggaagagaatagacagaaatcaatactgaatatttaaaagtaacaacatttagaagaaaaacttactctcttagtaaactcctgaatccaaacagaacagaatatatgagaaaagtacttttcatccattactcactcaggaatcaccagtatataaggattcgaaaatgatgagtttcttttctttgagttagggaaatacctgttttgctaaaccaagccctcccagaagtatatctttctaaatctaccttttcctatgaagataatcttccccccaaccatgcacctcacaaacctaagctcaggagagagcgttctttgaagagaagataaaggcctgaaaatatcaagacagattattctattgagagggggaaatctgtaaaccttttctaatgtgaattttgctttgataaattcttgaaagagccagttttacctcttcatttagactctccattgagtaatagaaatgaaaaaataattctcttacttcctacctgtgctgccttagaggctccaaagagagtcagcaagggacaatagagtcttctagtgatttgtccataataactgagcatcttgggttgaaaaaaaaaatggattgttgatcgcctgagcttgtttagctttgcttttttaattgctaaatgccagcctgggaattctgcctaaaatggtaataagttgcatttatactacacctttcatctaggaggcacatacttccctcagttttgaaacacagccattctggagctgaaaagcagtaactgttttagtgtcgaacatttatccagtgccataattatacaaggtggaagaaattgtttgaagcagaaccaaaatattgcagtaacaaagattgtgggctgcaggttttgaaaatattctagatatagtctgttttgtgacttcctttgcctagagartatttatatatccctttgaatcttgagtttcctaagaggcccacttttgtgttcctgtttgggtccaacataattggccaagaatttaggaagaatgaattaacattaagtattttctttcaggaaaatcttctgagacctagaatgtgcatcgagaaaaaaggcaacaagaaagagatttataactatttgtattttacagacaatattttactccttataaagcaatttctatctttgaaaggagtgtgtgggtaaaacaagatcacaaaggcccacccaggaacttctgaacatatgcctcatagctgattcctcttctgctagcccaagagacagagatatggtatctatcattggaatacaaacctatcaggtcagaactgaagtcttactcattgctctagccttagaacccagataatacttagagatcatagatcctcaataaaagtttgctaaatcaatgaaaaattgaccctcttcccctgaaaacatgaaaa

SEQ ID NO: 54741 - DNA, 594 bp, Homo sapiens
attgcagttgcagggctgggggtgggggagcgctggtcgcagagttagaaactacaagacaaaaagcaataaacttaaaatggtgaaatttcagggcagtagtgggggaagggtgaacactggtagatgaggttgcagaatgaattcacatgattcagaaatgcttcttggccacacaggcctggaaaaagaaaaacatgccttctaccttggatatatcatgaatacacacttgatggcagacatatcgcaatatacgataacactaacttgtgtggagggcaatgaggtgtgtagaccatggaacattaaacatggagaagaagagaagggcaaaactgatggaaattataactatagttatatacagcatatatataataaaaattatatagtatatgttatataaaytatatataataaaaattatattatattatataaactatatataataaaaattatattatattatataaattatatataataaaaattatatattatataaattatattatgtaaatgatatattatataaattatatattatattatataaattatataaagtacatataatataatttataa

SEQ ID NO: 54742 - DNA, 594 bp, Homo sapiens
attgcagttgcagggctgggggtgggggagcgctggtcgcagagttagaaactacaagacaaaaagcaataaacttaaaatggtgaaatttcagggcagtagtgggggaagggtgaacactggtagatgaggttgcagaatgaattcacatgattcagaaatgcttcttggccacacaggcctggaaaaagaaaaacatgccttctaccttggatatatcatgaatacacacttgatggcagacatatcgcaatatacgataacactaacttgtgtggagggcaatgaggtgtgtagaccatggaacattaaacatggagaagaagagaagggcaaaactgatggaaattataactatagttatatacagcatatatataataaaaattatatagtatatgttatataaattatatataataaaaattatattatattatataaactatatataataaaaattatattatattatataaattatatataataaaaattatatattatataaattatattaygtaaatgatatattatataaattatatattatattatataaattatataaagtacatataatataatttataa

SEQ ID NO: 54743 - DNA, 1840 bp, Homo sapiens
tgcatttatttaccatttatttgttcatcgcattatttataacctttctttatgttcaagttttatttttgtggttgtttataatgtctcaatgtaagaatttaatccatttcataattagtgcaatgaccgatatatttcatttttattattttctcttgctttatatttggtatttatttcatattcttgttttttccttttcctttcttcatttttaatggtttggccatgttgatagtccttccatttcttctcattgttaatttgaaattgtaatatacttttctattctgttaacgtttaccacccctttttccattttctttaatgtttacctcgctcttttctggttggacacattgcttgaacatattttagacaacagtttccattattatttaaagtaagatatcaattatactcctaccaagaggtaacattttcccaatcaagtaactttttcttctaacgtttcaccctttccagtatcaagagaccttcagaacactttcattttccctatctcagcttcctatcaatagacctttgaaaaatttttacttcaccccttctccatctctaaacttttggctttccgatgaaaaggggtattatttttacagtattaacagaatttcaccagtattttaagaaatttagcgcttatattgcatgttctcacatattgtatcattagagataaatactgagtccaaacaagattaactactcaacatacttctttcctattcttcctttttctaactttgaagtttatcactgggatctatggatgatttactttctgcatttgcatttactttctgcacttgatatttgcatattgtcgaatatgtttctttagcactatagacagatatcttatcttggttgggtataaagtccttggattgcagtcccttcctctcatgaatcgataaatatgattctagtgccttctagcttccggtgttatacatgagaagtccaattataatgtgattcatttaataattccttttttggaggtagaggaggctgagcttttgtaagattttctcattatgtttagagatcaagaattttactaagacattccaggtgtttatctactcaactttttttactctgcagtcttggattattcttagctctataatttattaataattgcctctcctccatctcctacttttactttctgaaatgcctatcatatgcatcttaactcctccgaatttatcctctatatctcttacctttttccctcataattttcatatctttacatttttctatgtgctttgagataactattgcattttattctccctaattaggtctgaagagtgactttttgacaaaaaatyatttagttgtgaattactgtgtgttaactctagaaaatctcttttgtgctacatttgagtcccactattgttctccttactttttaaaatttaagttgtcatctaatcccaactattttgctggcagatattacgttctgtcttagcttcctctatgttggtgcattactcccctcaccctaagtattcccccccacttttttttttttttgctgcttgatgggattcagttgtaatgtaatcaatggtaagggtttgagtggaggattttaatgggattttaaatgattccctatctcaatcttcccctccaccaactctaggcaaccactactctacactccatctctttagatttgcctattccagacatttcatataaatagaataaaatatctggtctttgtgattggtttctttcatttagcttaatattttcaaggttcatccatgttttagcatatatc

SEQ ID NO: 54744 - DNA, 1337 bp, Homo sapiens
ttcagttattctgtgatgctctcagggttaaagcccaaactgcttaaaattgttgagaaatccctccctgattttgtccctgaatatctttgtagccttattcttactaactgtgctcttcgaattttaacctttaaccatatataaatctccttatggatcagtaagaagccatgcccttatctctcttcatgcctttacacattctattattacttcatgagacactctcttcatattctcagtctcctaagctagactaatttctactctttaaaggtagtatggaattgtttgagaatggaagctattggagcagtcagattcagtttcaatttctaggtcttccatgtgctggatataggaccaatctatgttttattgtgagggttaaaatatattttatttgataatgtagcatagtatctaccacaaagcaattactcaataagctattttctagtagtagtaaaactattcatactaattgtttttgtgaaatgtgatgatatttattgaagtacaataatgtattacatgttgacttatgttgtttgagtttctggagaacttgagggaaattatgtagttcagtttaacttttttaaaaaaataatttaaatattcaccaagagccctgtccacacactctttcatatagtttaaaacatgggaaagtaaaaagaaaaaaactccattagctattataaatcaatttttattacttctatcagtgcaagattgatatactgctttctgaagttgtatttatctctactgaggaatgaactgtttgtgacttttaaagtcattgtcatcagcatcagtaaagcacacagcaacactatttgttgaaatgaaaaataggagaaatatttttcttctaaattcgttaataatgttatttctattaagctatcctttctgtaaagcagaatttttatatggtagctttctctttcattggttctcccaggtgaactattctagttatgaaaagacagaaatatgtttgtgtgaaacataatgacagcttatttcacagagcagaaataatgatgggtccagacagtccagtgcagctggtctaaattactacccgaaagctgtcattattaagtgattaacaaatggctcacagtttgcccaccattaccaatcaagagactctcgctcaagccacattcstttagacaaaaatgaaaggaattttttaatgaactcacattaatttcaccacaataaaagttacgaatatggaggagagagattttgctctaatgtttgtgcagttgttatttattatgcaaatatacatgagtaagatataaggaaat

SEQ ID NO: 54745 - DNA, 759 bp, Homo sapiens
ggtaagcatggagtgtttcttcaggatgggcccaggtaagcatggaccattccttcagagtggagtcaggtaagtgtggaccattccttcaggatggagcaaggtaagcatggactgtttcttcaggatgggcccaggtaagcatggaccattccttcaggatggagccaggtaagtgtggaccattccttcggaatactgccaggtaagcatggagtgtttcttcaggatgggcccaggtaagcatggaccattccttcaggagggagccaggtaagtgtggaccattccttcggaatacagccaggtaagcttggagtgtttcttcaggatgggcccaggtaagcatggaacattccttcaggatggagtcaggtaattgtggaccattccctcagactacagccaggtaagcatggactgtttcttcaggatgggcccaggtaagcatggaccattccttcaggatgkagtcacataagtgtggaccattccttcacgatggaatcaggtaggcagggaccattccttcagaatacagccaggtaagcatggactgtttcttcaggatgggcccaggtaagcaaggaccattccttcaggatggagccaggtaaatgtggaccactccatcaggatgcagcaaggtaagcatggactgcttcttcaggatgggcccaggtaagcatggactattccgtgaggatggagccaggtaatcagtgaccattccttcagaatacaaccaggtaagcatgg

SEQ ID NO: 54746 - DNA, 614 bp, Homo sapiens
ctgcacagttctcaatgataatttatttaataattctatgcaatgagcttttgtttttgagacaggttctcactctgttgcccaggctttagtgcagtggcatgatcatagctcactgcagcctcgaatttctgggccaagaggacctctctcctcagccttctgagtagctggaactggcacaacaaattttcttgatattaaatgaaactcgtgtgttgtgtgtatatgtgactgtgtaatgwgtgtatcaaaatggtattgccaagtttgggatcgttccagaaaagaatatgtgagacagatgtttgcaagaggtagtttattggggattctctcaagaggtatggcaacctagaagatcatggcagctagaagagtatggcaacctagaagaataagacaaggatagaggcatccattcttggcaatccaaagatacattactgagctcgttcactgccatgaaaacccacggttaaatcctactgagacactgcaatatctaagtaaaataagcactcagaattgtcactgtaatataaaggagaggagagtattcaccaactcctgtccttcattggtaagaggtcacctcatggtttgttaacttt

SEQ ID NO: 54747 - DNA, 614 bp, Homo sapiens
ctgcacagttctcaatgataatttatttaataattctatgcaatgagcttttgtttttgagacaggttctcactctgttgcccaggctttagtgcagtggcatgatcatagctcactgcagcctcgaatttctgggccaagaggacctctctcctcagccttctgagtagctggaactggcacaacaaattttcttgatattaaatgaaactcgtgtgttgtgtgtatatgtgactgtgtaatgtgtgtatcaaaatggtattgccaagtttgggatcgttccagaaaagartatgtgagacagatgtttgcaagaggtagtttattggggattctctcaagaggtatggcaacctagaagatcatggcagctagaagagtatggcaacctagaagaataagacaaggatagaggcatccattcttggcaatccaaagatacattactgagctcgttcactgccatgaaaacccacggttaaatcctactgagacactgcaatatctaagtaaaataagcactcagaattgtcactgtaatataaaggagaggagagtattcaccaactcctgtccttcattggtaagaggtcacctcatggtttgttaacttt

SEQ ID NO: 54748 - DNA, 602 bp, Homo sapiens
gctagaaagacatgccaaaaacagatgagaactgtgtttcaaaactgcctaaaataattacacaaatatatataaaaggcatacctttacaacccagaaatgagagaacagaactcagaaaaactaaaaattacagaaatgtcaaggtcaggcatgttggctcacacttgtaatcccagcactttgggtgggaggtgaaggcaggaggacagcttgaggtcaggagtttgagaccagcttgggctacataggaagaaccccatttgtacaaaaaaaaaamaaacaaacaaacaaattaaaaattagctaagcatagtggcatgcccttgtggtccaacatattctggaggctgaggtaggaagaaagcttgagcccaggagttcaaggctgcagtgagttatgatgacgctactgtactccaccctaggcaacagagcaagaccctgtctcaaaaacaaaaaaatttaaaatcagaattgaagacaaaaataaaagaagagataagaaaaaagacaacaaggaataaacaaatcagataatgcccatgagaaatggctaacgtgaaaaaatgtccaaaagaaatggagataagtgtgaaaat

SEQ ID NO: 54749 - DNA, 608 bp, Homo sapiens
ggatgaggacaggycagcagagagtcaccagcactggctaaaggtctcagaccaaattttatactcttgaccaggagaaacttctctgttattctaatcacattaaactcaagcattttctttttttctttcttttttttgagaaatcacatcgaacttccaaaattataaagttgaaaatatgtaataattgacaattggaaacaagaaagaggattagctataaaaataactcaggacaatgtatttatcatgaaaagatggtcttggtggaagaaagtttcatgcccagccagcccattcttcaatatctgctaaaaaaaaaaagagcaaagggaacttaaagacatcatagacttggaaatttcgtctcacagtgcattaatttcccaaatcacatgtggaagagaagaagctgctgcatattagactaactagttttactgaatgttgtctgttgatttaaaaattaatactcttatcaagagcaaattgaaatactgaaagttatttactaaacagcaaagaatattttcagtatataaaaagatttaaaaaaacgttgacaccttaactaaatctgacacaaatttaaaaggaaaagtaac

SEQ ID NO: 54750 - DNA, 685 bp, Homo sapiens
ttttattttattgcgacaagatcttgctctgtcacccatgtttggagtacaccagcacaatcctggctcactgtagcctcgacctctcaggctcaagtgatcctcctatctcagcctcctgaatagttaggaccacaggcacatgccaccacgcccagataatttgagtttttgtagagacaaggtctcactatgttgcccargctcacctaatttttaccaaactttttgtagagacgggggtctcatgttgcttaaattggtcttgaactcctgggctcaagagtcatcttattcaattaataattctctgtctcctaattccagcagacatagaaagacacagaaggccagcgccatggctcacgcctacaatcccagcaatttgggagactgaggcttgagcccagaagtttaccaccagcctgggcaacatggtgagaccccgtctctccatatatatatataaaataataaaaattatccgggcgtgttggcatgtggctatagtccaagctactcagaaggctgaggtgggaggatcacttgagcccgacaggtggaggttgcagggttgcagtgcgccaacatcgcgccactgcactccagcctaggcgacagagcgagaccctgtctcaaaaaaacaaaaaacaccccaaacagaaacaacaacaacaacaaaaac

SEQ ID NO: 54751 - DNA, 405 bp, Homo sapiens
cgatctatttgattatttatttctagtatatcaatttgaatgcatcatgtcatagtgttttgtaatataagtattctttttctttttgttacatgttctactatatctaaatatttattcttttatattaactaactgattaaaaagtaataatgaatagttagtccaattctatcccttcttttaaaatattgggagtattgttataatttaattcatatattagttttagacaattatagatttctaaatttttaaataaacattttatattagtgcttatactaaattaaaacatgttgtaagatcttcattattaaaatattaaaactcctatttatcaaattgkttttttattttcacagcctaagaaactaagttgtaaactatgtaaccatgtgggaa

SEQ ID NO: 54752 - DNA, 706 bp, Homo sapiens
agaaaaggcagaggaaggaggaatttgttcctttttcttcctgcctgcctgcttgagatgggacatccatcttcacttatccttgaagtgatgcttacatcattagtttctttgcttcttaggccttctgattaaaactgaaattgcatcactggctttcctaggtttccagcttgcagacagcatattgtggaacttctcaggctccataaatgtgtgagccattccctcataataaatctctctccatatctagttagatagatgatagatagatagatagatagatagacagatagatagatagatattctattatttccatttatctggagaaccctgactgatatgctggccccaacctagatgagaaaaaggaacattggcagcatcctggaagtctgccctatgcctttcctgctgatagcctcatctctcttctccatcagtaaccactatcctgccttttgtggtccttattttctttttctcctacatgytgttaaacagtatagtttagatttgcctcttttttttactgtataagaaagaattataatagattacttgtccaagtgtcctgttgcacatttacatgggtttctgttgggtatatatgtaagaatagacttgctgggtcataggatatatgttatcttcaactttaatagatcattccaggtttgtttccaaagggtttttgttc

SEQ ID NO: 54753 - DNA, 594 bp, Homo sapiens
gactgcactgagctgaacctgtgaagcccaggacccagccctcaagggcagtgacccactgaggcacacattctgataggctcccccaggtcaaccagggagccacttcccatacacatctgttaccatctttgccatgtgtcatgtccctcactgaagcaacagcatacrttccacattttaattgagtaagaagataaaccctcttgaaagattatgagtggatgccatagtcagaaggaagtggaggaacactataaggatgactcttaccccaaaccctcccatatgagttgaccgaagaggacctacagacaattcttagattactagatttttaaagactgacctcttgctggattcggcacattgtgttctaggagtaggggacagacccatatcctttcaagagtccacatcccagctcctgcttttgctcagatgctagtgtgatgtgtctcctacacaggaaggtaggggagttattttgtggttaaacttggatgaaacattgaacaatgcccccaagagataggtgcacctgttcataggaagtaatagtgagggccatctagcacccaccaccctagtcca

SEQ ID NO: 54754 - DNA, 606 bp, Homo sapiens
caaaccactcttgaatcatcattcatagttatgccaacatctcccacactacagatgttcactgtccacttgattattcatgcctgacttttgctgctggctgccgaagttcatagaccacaatccagtcactctgtgaacccatttccctccctagcctgaggacacagtcacggtgctcttaaattcttgagatttagccacgttaattcaaggttagggcagcgcaagggccatgtacaaagaacagagaaaactagcagaataaaattgggccttaggcaagaggcttctgaatcatggtagccaaaataatgcactcygcgctgaaaaatgaagtcgctatttcttagtattgagagattcttgagaatataatgggggataaaaaaaggaaacaagaagaataaacatcagaaaggaagagatgaaaatatcctttctgtttctggcatggtcgtaaatctaagagaactcacaaagttaactaaaaagctgcaaatgatttgcaagtatgggtaagttaatcagaaccaaggtaaattctcctaaataatagcattgctattagtctctgaaaaccagttaaattaatataatgtgggg

SEQ ID NO: 54755 - DNA, 798 bp, Homo sapiens
ttatgaaagaatccttcattatagaaagagaaattcacccagattgtattagtttcctgtggctgctgtaacaaattacctaccacaaaatcagtgtcagtgacttaaaacgacaggaatttattctttcacagttctggaggccacaagtctgaagtcagtatcactgggtcaaaatcaaggtattgacctcctacaactcctgctggcatcccttggcctgttgctacattactccaatatttaaggccagcatcttttaccctctcttgctctgtcttcscatggccttctcttttgtctgtgtcacacctccctctgcctccctcttttaagaacaattgtgatctcatgtaggatgcacccagataaatcaggttaatctcttcatttcaaactccataatttaatcacatattggtatattttccatataagatagcatttacacattccaggaattacaacctgatatttttaggagctgttattcagcctaccataggaaattagggaatttgggtaccattgcaattttaaaaagaataaaattaattttaaatatcccctataaaataaacatattggcactactttttcgcagcttacctgaatcctagatgcattaaaatagattatatcaatctataaactttctagcaatttcatgtttgattgtctacatagcatcattgccttatagaggggattgagcaatgttccagtaaaagtctgcttatcatcatttctcatcagtttctcaccagttcctctccttcacaccacaaaagtgcatgt

SEQ ID NO: 54756 - DNA, 798 bp, Homo sapiens
ttatgaaagaatccttcattatagaaagagaaattcacccagattgtattagtttcctgtggctgctgtaacaaattacctaccacaaaatcagtgtcagtgacttaaaacgacaggaatttattctttcacagttctggaggccacaagtctgaagtcagtatcactgggtcaaaatcaaggtattgacctcctacaactcctgctggcatcccttggcctgttgctacattactccaatatttaaggccagcatcttttaccctctcttgctctgtcttcgcatggccttctcttttgtctgtgtcacacctccctctgcctccctcttttaagaacaattgtgatctcatgtaggatgcacccagataaatcaggttaatctcttcatttcaaactccataatttaatcacatattggtatattttccatataagatagcatttacacattccaggaattacaacctgatatttttaggagctgttattcagcctaccataggaarttagggaatttgggtaccattgcaattttaaaaagaataaaattaattttaaatatcccctataaaataaacatattggcactactttttcgcagcttacctgaatcctagatgcattaaaatagattatatcaatctataaactttctagcaatttcatgtttgattgtctacatagcatcattgccttatagaggggattgagcaatgttccagtaaaagtctgcttatcatcatttctcatcagtttctcaccagttcctctccttcacaccacaaaagtgcatgt

SEQ ID NO: 54757 - DNA, 2583 bp, Homo sapiens
tgcattgtgccactctatgtcttttaattagatagtttaatcctttcacatttaaagtcattgttgataggtaaggagtaacttgcgtttggttaattgtttttcatatgttttgcagttcttttttttttccctctcttgctgtcttcttagtttggttatttcttgtagcggtttggtttcatttatttttcttcacattctgtgtagmtcctataagcttttaatggttgcaaatttacatcttctataaacagatgtcttaatgttatcagcttttttggaatcattttctttctgtttcctcttcagacatatttgcaaatactgtttttcaagacacaagtaaatagggctctagttaaaaatttaacaatacgaaaaaaaagatcctctgagtcttttgataagttagaaaataatgatagactgcagtagaatgtcatgtatttcaagttctgtcatctatgttactctgcaatatattttctgtgtgtattagtcagttatatatttataaggtaaatccataaagcatacattctagaatgccctaacttaagtccttaagagatatgctcctcatagccttcttggcactcctgaagtgttaaatatttccattgaagaaggttgtatatggcttctgagatgaagtctagacagattaggattattttttgctccttttgcccacacagcacccactgtcccctccctttgttattagccattatctgataccctagatgaagccatcttctatccttcagttttggcgtggtggctgatttcacccccagtttcaggaataagcacaggacagctactaacaagtatgttgttcactcaaggaagaaacccagctaagggagaaaggggggttgaaatccagcctgcatgctcttctccaagccacatgccctgatacagggctgcatctaactggagaaaggggagccattttctaatacttgcaaaggcactgtgtggacagtggaaaccctgtatgacctcgtgacacaggcctggccaatgaatataattctaatcctggcacagatgaaactagaaatggacatgaaatccaagcctcacacccaaagtcaatctctagtctcttattgaaactattagaagtgtttctgtttttgctttattctggggctgtggaactaaggaaatgtaaactggaggagtgatgatggccacattgcagcacaaagggaaaacttgtctgagaataaaatcaatggggaagaaaaaagcaaggaagctgagaggagccaagtcctgagtccctacattcagccattctgaagctacaccctggatttttccattatacgagtccacaaattaatattttttttttggcttagaccagtttgagtttgaattctattatttataaccaaaggagtcctgccatattatcttagccggattttcataaacacggtatatgttgatcaacaaacttcctaaatgtttcaagttcacttcaaagagtgaggggaaaaaagaaagaagtggaagaaaatagttacttatcatccacagtagtcaaggaagcttcagaagcatcaagcaaaagcagcagaagttagctttgtactcccacaaaccctgctctgaagtactccgcctagtggcccacagcagaagctgcatttctaaaatctttaaaaagacagaaaaggaatcgccacttaccctgggaaccctaacaggggagcaggccacatgggaatatgtcccattggtttgaggtcgataagtccattttcaaagctttagtaattccagaaacaagaacatatttattttactttgatcacacaatgcctagttatattaaaaggagatattcaataaataccttttatggaaataaaaacagacaatttaggagaaaattaactatcgatgcattgttttcaaaggtaaagaaaaaagaaattattctgaacacacaaaactattttatcaagtatcatggtaaattatcattatatactaggtcacttaataaatttccagagatgattggaaagagtttccacaatagattttgtttcaccccaggaagaagtttcacaaaaagttagttacttatctccattgttactagtaccaaactaatcctatcattctgagtcaaattacaaataacgtccacacttttctccagtgagatcacaggagatgcctaagtggagtgtgttttaatgtgaggggataactggtttatatttttcactgaaaataacaaattctagacaacttaagcaaaataggaattcgatgaaaggatattgaatagttcacaaaatcactgaagatgctggagaagcaaggtaagaactgagggaaactcagcacagccaagttcattcgatggaagcagatcttgggatgccaccactaggatgttgccatttgacacttgtcaccatgtagctgggctctgctgaacctaggcccttgctgccacattcctggacctgcatctctgctcaatgtctcagaatcatctctgattctttcaggtcttttgcatcatttcatcgggttccaagt

SEQ ID NO: 54758 - DNA, 2583 bp, Homo sapiens
tgcattgtgccactctatgtcttttaattagatagtttaatcctttcacatttaaagtcattgttgataggtaaggagtaacttgcgtttggttaattgtttttcatatgttttgcagttcttttttttttccctctcttgctgtcttcttagtttggttatttcttgtagcggtttggtttcatttatttttcttcacattctgtgtagatcctataagcttttaatggttgcaaatttacatcttctataaacagatgtcttaatgttatcagcttttttggaatcattttctttctgtttcctcttcagacatatttgcaaatactgtttttcaagacacaagtaaatagggctctagttaaaaatttawcaatacgaaaaaaaagatcctctgagtcttttgataagttagaaaataatgatagactgcagtagaatgtcatgtatttcaagttctgtcatctatgttactctgcaatatattttctgtgtgtattagtcagttatatatttataaggtaaatccataaagcatacattctagaatgccctaacttaagtccttaagagatatgctcctcatagccttcttggcactcctgaagtgttaaatatttccattgaagaaggttgtatatggcttctgagatgaagtctagacagattaggattattttttgctccttttgcccacacagcacccactgtcccctccctttgttattagccattatctgataccctagatgaagccatcttctatccttcagttttggcgtggtggctgatttcacccccagtttcaggaataagcacaggacagctactaacaagtatgttgttcactcaaggaagaaacccagctaagggagaaaggggggttgaaatccagcctgcatgctcttctccaagccacatgccctgatacagggctgcatctaactggagaaaggggagccattttctaatacttgcaaaggcactgtgtggacagtggaaaccctgtatgacctcgtgacacaggcctggccaatgaatataattctaatcctggcacagatgaaactagaaatggacatgaaatccaagcctcacacccaaagtcaatctctagtctcttattgaaactattagaagtgtttctgtttttgctttattctggggctgtggaactaaggaaatgtaaactggaggagtgatgatggccacattgcagcacaaagggaaaacttgtctgagaataaaatcaatggggaagaaaaaagcaaggaagctgagaggagccaagtcctgagtccctacattcagccattctgaagctacaccctggatttttccattatacgagtccacaaattaatattttttttttggcttagaccagtttgagtttgaattctattatttataaccaaaggagtcctgccatattatcttagccggattttcataaacacggtatatgttgatcaacaaacttcctaaatgtttcaagttcacttcaaagagtgaggggaaaaaagaaagaagtggaagaaaatagttacttatcatccacagtagtcaaggaagcttcagaagcatcaagcaaaagcagcagaagttagctttgtactcccacaaaccctgctctgaagtactccgcctagtggcccacagcagaagctgcatttctaaaatctttaaaaagacagaaaaggaatcgccacttaccctgggaaccctaacaggggagcaggccacatgggaatatgtcccattggtttgaggtcgataagtccattttcaaagctttagtaattccagaaacaagaacatatttattttactttgatcacacaatgcctagttatattaaaaggagatattcaataaataccttttatggaaataaaaacagacaatttaggagaaaattaactatcgatgcattgttttcaaaggtaaagaaaaaagaaattattctgaacacacaaaactattttatcaagtatcatggtaaattatcattatatactaggtcacttaataaatttccagagatgattggaaagagtttccacaatagattttgtttcaccccaggaagaagtttcacaaaaagttagttacttatctccattgttactagtaccaaactaatcctatcattctgagtcaaattacaaataacgtccacacttttctccagtgagatcacaggagatgcctaagtggagtgtgttttaatgtgaggggataactggtttatatttttcactgaaaataacaaattctagacaacttaagcaaaataggaattcgatgaaaggatattgaatagttcacaaaatcactgaagatgctggagaagcaaggtaagaactgagggaaactcagcacagccaagttcattcgatggaagcagatcttgggatgccaccactaggatgttgccatttgacacttgtcaccatgtagctgggctctgctgaacctaggcccttgctgccacattcctggacctgcatctctgctcaatgtctcagaatcatctctgattctttcaggtcttttgcatcatttcatcgggttccaagt

SEQ ID NO: 54759 - DNA, 2583 bp, Homo sapiens
tgcattgtgccactctatgtcttttaattagatagtttaatcctttcacatttaaagtcattgttgataggtaaggagtaacttgcgtttggttaattgtttttcatatgttttgcagttcttttttttttccctctcttgctgtcttcttagtttggttatttcttgtagcggtttggtttcatttatttttcttcacattctgtgtagatcctataagcttttaatggttgcaaatttacatcttctataaacagatgtcttaatgttatcagcttttttggaatcattttctttctgtttcctcttcagacatatttgcaaatactgtttttcaagacacaagtaaatagggctctagttaaaaatttaacaatacgaaaaaaaagatcctctgagtcttttgataagttagaaaataatgatagactgcrgtagaatgtcatgtatttcaagttctgtcatctatgttactctgcaatatattttctgtgtgtattagtcagttatatatttataaggtaaatccataaagcatacattctagaatgccctaacttaagtccttaagagatatgctcctcatagccttcttggcactcctgaagtgttaaatatttccattgaagaaggttgtatatggcttctgagatgaagtctagacagattaggattattttttgctccttttgcccacacagcacccactgtcccctccctttgttattagccattatctgataccctagatgaagccatcttctatccttcagttttggcgtggtggctgatttcacccccagtttcaggaataagcacaggacagctactaacaagtatgttgttcactcaaggaagaaacccagctaagggagaaaggggggttgaaatccagcctgcatgctcttctccaagccacatgccctgatacagggctgcatctaactggagaaaggggagccattttctaatacttgcaaaggcactgtgtggacagtggaaaccctgtatgacctcgtgacacaggcctggccaatgaatataattctaatcctggcacagatgaaactagaaatggacatgaaatccaagcctcacacccaaagtcaatctctagtctcttattgaaactattagaagtgtttctgtttttgctttattctggggctgtggaactaaggaaatgtaaactggaggagtgatgatggccacattgcagcacaaagggaaaacttgtctgagaataaaatcaatggggaagaaaaaagcaaggaagctgagaggagccaagtcctgagtccctacattcagccattctgaagctacaccctggatttttccattatacgagtccacaaattaatattttttttttggcttagaccagtttgagtttgaattctattatttataaccaaaggagtcctgccatattatcttagccggattttcataaacacggtatatgttgatcaacaaacttcctaaatgtttcaagttcacttcaaagagtgaggggaaaaaagaaagaagtggaagaaaatagttacttatcatccacagtagtcaaggaagcttcagaagcatcaagcaaaagcagcagaagttagctttgtactcccacaaaccctgctctgaagtactccgcctagtggcccacagcagaagctgcatttctaaaatctttaaaaagacagaaaaggaatcgccacttaccctgggaaccctaacaggggagcaggccacatgggaatatgtcccattggtttgaggtcgataagtccattttcaaagctttagtaattccagaaacaagaacatatttattttactttgatcacacaatgcctagttatattaaaaggagatattcaataaataccttttatggaaataaaaacagacaatttaggagaaaattaactatcgatgcattgttttcaaaggtaaagaaaaaagaaattattctgaacacacaaaactattttatcaagtatcatggtaaattatcattatatactaggtcacttaataaatttccagagatgattggaaagagtttccacaatagattttgtttcaccccaggaagaagtttcacaaaaagttagttacttatctccattgttactagtaccaaactaatcctatcattctgagtcaaattacaaataacgtccacacttttctccagtgagatcacaggagatgcctaagtggagtgtgttttaatgtgaggggataactggtttatatttttcactgaaaataacaaattctagacaacttaagcaaaataggaattcgatgaaaggatattgaatagttcacaaaatcactgaagatgctggagaagcaaggtaagaactgagggaaactcagcacagccaagttcattcgatggaagcagatcttgggatgccaccactaggatgttgccatttgacacttgtcaccatgtagctgggctctgctgaacctaggcccttgctgccacattcctggacctgcatctctgctcaatgtctcagaatcatctctgattctttcaggtcttttgcatcatttcatcgggttccaagt

SEQ ID NO: 54760 - DNA, 2090 bp, Homo sapiens
  misc_feature (1)...(2090): n = A,T,C or G
tgtggacctgttattctatctggacctaaaggtatttactggaaatgtgacataatatcagagctgtaagacatgggagtccaacaggaactgtgacttcagtaaagtcacaatccatggagacacagaagaaagggagccaaaagaataaataatctgacctcactgtcctcaccccctctgatctcctattgtcatttctcttgacgtatcccaactagaatccagtggcaaggaagcccattgtaacagtctrtatagatcaggctcctgccaaagaccaggatgagaagagtggaggatagatctggagaagcaaatagaaaatatccagcacaatagtcactgagtaggtgaaagaaaatgaccgcagactgaaagcagatggtgcgtaatggagagcatagcaagcaaaaggaacagtatgtactaaggcctgtggcaggaatgagcctaaagtcttctaagaaggcctgtgttcaggcaggaagacctggcagaaggctacctcagctcgtcagaagggtgatcgtgttccaatgatagtcaaggaagaagagtagagatcatgaagatcaagagtgaaaagtgtcagatgcatggggtgatttggaggccaagaaataagaaagagggcccgaatgcagaacacatggaaggttgagtgaaacatcataggctgtgaatcttgaataaggcaagggcatcctgagctcaacctctttgggtgctgccttgtgatgcaagagcattcccggagtccaaatgttagacaaaagtcataggccttttccaaagatatttcaaagtgatgttggaattaaaagactgctatcttgggccatcccattcagccatttaggcaacaagtatttattaatggtttttatatttcctactgtgctcactaggttctgagaggtgatgtgattcctgtctttggtaagctcacaggctaagcaggaaagacaaccatgtaaagaactacttgtcatatcctgtgataagtgctgttagagagtgacatgcaaaggtgccagagggcccagcctaccctgactggggaatcaggcatccctgagatatgagatttgagctaggtcttgaagggtgtttcccaggtagaaaaatgagaggagggaatgttatctaggggaaatgtattgatcaatggatgccaactactactaaaatgatccccaaatctcagctgtttatcataataaaatttatttcttgctcatgacatgtccagtgtgttctgagtggctcttcccaaagtggtgatccagagattcaggctgttttcatcttcagtgcagggaatgtatgctggaactttaaccaccttggtccagaagtgacactcatcattttgcctcacattccactggccacgcatgtagatgcaaaggggtggagagatgtagtcttgggtaggcagctgcttcctggcagctgcattctgagagagcgtgaacatttggtatggggtaatggctcccactgccacagagaattgctcatgagggagcacagaatgaagtaaagggacatgattcctggcccagggtgtgtgtggaagaagggagagaagtacaaaagaagaggccagaaaggtcagtcattactggatggctcaggactaaggacaacgtaccaaaaagaccttctccttcttctcctccagatgtgtggaactattagaagtgtgacatggccagatatgcatctcttcacagtccactcatttcttttttttttttttctgcacaaaaagagagcaagagtggtgcgaagagctaaacactggattttcataccaattctgccaatgctacctacttgggctggctactcagtatctctgagcctcagcttatcaataaaatgggcacaaaactnnnnnnnnnnnnnnnnnnnnnnnnnnnnnnnnnnnnnnnnnnnnnnnnnnnnnnnnnnnnnnnnnnnnnnnnnnnnnnnnnnnnnnnnnnnnnnnnnnnnatattttttcccacagcatcaaagtatcacttaatgtctgccaagttccttaaatatatccacttctgtcatgatctaccaatggt

SEQ ID NO: 54761 - DNA, 1708 bp, Homo sapiens
attgggctgtgtggtttctgtggtactaaaatatcctacatctaattactacaatatcagaaattgaataaataaataaatatatatgctacaaatgggatactttcatttgtgtaacacagaaacttaatacacagaaatcacatttataatgataagccagagattcacagagatggttattataaatggctaaaattaactacgaagtttgaagtagctccaaattgttggcataatgaccaactttagtctacaatacagtaggatgacatgagacacacagcacattgtacatttcagttgctcttagcacttactttctcgtaatacttgatttcatattctgtgatgactccattgggatgctctggttcctgccaggaaagctcgacactccgctgcagtactctctccttcattactccactcacttgcgagggagctgtttggacaagatgtgtcaataaacaatgagaaaattcactggatgcctcaaatcaaatgtcacaactgatcagtcccatgctgtgccagtttcattaaggtaaaagaaagcaccttttcatagctcacaattcagaagctaatgaatattcaaacaggaccttattactgttcataaaccttaatagaaatttaaattaaagtgcaaacagcagaagatagcattgttcaagttagtgaaaaatggaaatgatggggctgagaatgacaattaagcaaatgaatgctaattaaggctagaaaatatgatttcagattaatctccagtgataaactaagtccaaatatttatttcacatgcaacagcaatacactttgtaaaagaaaaaataatttaatatgatgcaagcaaaaagtgtatgaaatggctactttgatcttaaattaaaggaatcatatttttaaaaatgtttccatgtttcacttggtgtgtgtatactcccaaagaattccaaacaactttggaaaacatttttagactttattaggtcaagatgcaagaaaatgcaaaggctgcctgctacttaaattatgtgcatgaacacacatacatacacatggactcttgcatgtgtaatttatacctacgtaacctaggcttcaagctttgaaaggagcaattcaaagctacaatcttgctttctctttctatatagataataatatgcttagagttctttcattctaattagtgacatatactctttttggtagctaagtctgtggaatgtagcaaactaatttgctcgtctaatttgctcagtgatgattaactagttgtctactctgtctaaatgagtagctgcactggcttggctgaatttcagtggggtcattatgtttcatgtaccaygctctatctcattctgtaaaatattttcaggctattaatttaattttcagatgtctgaaactgttaataatcctgctgacagaaaagcaattatatgggaccaagccgtttaagcaaccttccgatgtttatccctttggctttattttgtttcttctacttaatattttcttgtatcaatgtctaaaaaccacatttttcacttctttctggcttggcgattttgaaggaaggacatggaagatacatgactctcatttcctcccagattactaacaaaagcgtaacgagggcagtttaagtgggacaactttcccttgaaggagatgtagctgaagtactcaacaa

SEQ ID NO: 54762 - DNA, 789 bp, Homo sapiens
acagctcttgaggtagataatattatctccactagataaatgagggaactgaggctggcagggctaagtaacctacccacagtcatgcagagggtacaaggtggagcagagggatttgaatccaggctggtgggagtccatcctcatatattagctattccaccctaccgatgaggaaatgaaatatgtattgtaagagagcacagagccgtgcgattcttttttattattcttatactttaagttctgggatacatgtgcagaatgtgcaggtttgttacataggtatacacgtgccatggtgattagctgctccttgcttagatagatatgcactagctggtaaccatacacacaaacaacaacatcaacaaaaaccaccactcacttgaccttactagtctcatcctgtaagagacagtggagcatagtacaaagtcaccaaattttagtggcagatgctttgtttttgcaagaccaatttactcagtttctctgagtaatttgagtaastaatgtaatgcccattataataaagaaaactaggaggtttcattattatgttttataataataaaactaggagttttattacaatggatattacaatacttaactgttttgtcagttacatgtaaaaagtcaagtacaatacctagtagatactcaaaacatcaagtgtttgatatgatatgattatgatgtattttcctccttcctttcagagttgtaccttccaaagaaacagagccttttgatatttcctccctactcactttgcaatccctt

SEQ ID NO: 54763 - DNA, 1847 bp, Homo sapiens
tatcaacatgcttgattgattaactcctgggccaatgggatcatgagggcaggtacacctcctcgctccttacaacctcagtattgtgggtttcatttcttatctagattttgtttactgacaaataataagctacatgactggctggattctactgaaaaaaaaaaaaggaacctttatttatggcttgggttttaggcttagaaagacactttcgcattattttgtatattagcattgtaagtccttttctgtattaatgtaaaccactggaagtggatacagaaatctcctctcaggccctgtaacagaattgactgtacccagataattcttgtggagggatttgttagctagttagccagctagcttttttggtagtcctaataagcttcccccagatctttcttctggtgatacactatgtactccaggagctgccgcctactcattcttcaggagaggtcacatgacccagaactgtacccatactcttggtccaatcagagtttctccctgggatccatatatgcacagtgagaaacagatgccatctccttcctcaaatgttgttgaacctcggctgcttgtggtcatgttctctgccacgtggtgataacctggctggagtaggagaaacaggctagtgctaaaagcaaagtgaaaggctgacagagatgagagctgcagcaggagagaaaaagccacggcagtgttgactgtcttattccagagcccaaggccttgcttcttacagcccctcctttgtttctgtgggttaccctcattgtctccccatttctggattacacaagtctgtgatggatttctgctattcacaaccaaaagaggccttactatcattgcctcgtaaaacagaaatgagagtgatgcaatcaacaattaaatacttacaggtaagggaagaggcctcattttctttattgagactagaattataaaggatagagaaacagaaacagaaaaaaattctctagagtattagattacaacaataactagcatttgtgtagtgctctacagtttttaaagtacttccataatcatttctttcatttgaccctcacaataattctgcaaaatggagaatacagtgtataattatccacatgttgccaacatagcagaatggtgaatggaagtgtttcctgtggttctggaattatagtgaaggctcatggatgaagacaaaggattctgcattttgtgttttatattttgagtccaagggacccccaatttgggggcctagccactttctctacagttttactgggaagggccagttcagagaatccacaaaataaactccaaacccaaagggagtcaagaaaatctcatgtgaatattggggcatctacaagaagtggaagctggcatatcgttccccagctagacatcagtttcaccagcagacctgccttcttgactctaaacagtcagagtacaggaaaggaagatggagagagagaacatggagtgggaaactaatgctcagagaggttactttttcaaggccacaaatagagttagcagctgatctgaggtttgaaaataaccactgatgctcacacagcatgtgtcagatccatggggtaggagtcggccagagacttggtaacagacagattgctggatcccacccctagactctctgattcagttagtttggggtaaggcgcaagactgaatttttcacaagtttccmagtggtgctgatacttctggtccaggaacttagtgggagagaacgactaatctagaccatttcacttcacattctgagcttcttgtacactgtcacactgcatccttttaacaatgca

SEQ ID NO: 54764 - DNA, 555 bp, Homo sapiens
gaaaaagagaaagtaataaagaaagaaagaaagaaaaggcaaggccaggcaagtccaggcaaggcaaatctacctgctttcactacatctggggagaatcaggaaagtccccaacaacaacaaggcctaaagtggagctgccatctgtcaaacccgagcggaagagtccacgcgggttaaagacacgaagaaagacaaggaaacccctgaccaaggagaagaacaatcgggcccagccagggtctgtctcccggggttgtctgggcaaccagggagggcgggcctccgagactccgtctcgaaacatcaatcaygataataacataaaatgaagttaaaaaaagaaatcacgcataattcctaacgtgtttgaggcctcgaaaggcgagaggcgtacgtgtatgtcacggtggggttgttctgttttgttgtttttttcttttttcttttcttctttttccccagaaactcactttttaattattttgttgcgtttcattttcattttcattttttggagacggagtctcgctctgtcgcccaggctgggttgca

SEQ ID NO: 54765 - DNA, 1880 bp, Homo sapiens
tctatgcaacagtttcctgtcttctaaagtgggattgttatggcagcacttctcaaaccttattgtgcataaaatcccaaggagcctttgaaatgcaggttcctattctggggctgagactgtatttccaactagctccctggtcatgctgattctactggtccgtagaccacacattgagtagcaggcggttctagtgcttaacttcctggaggtgttgaaaggcttgaattagacaatacatcctaagcatttagcctggtgcttatgtcaggtacttatcatagatagtagctcattgtcaatattacagtgatttatgggtttataggatgtggggtgggttgagaggtaaccctagatggatcgtacctgtggggtttgaaaagagcaatgtgctaggaatcaggagaccaaggttcaagtcctagctttataatttgtgccatgagctgtgtaagcttaggcaagtctctcaaactttctgagcctcagtttcccctctacaaaaagaggggagaagtttgaattagatggtgactaaaggttctctcagctttaaattgctgaaatttgagggttatagtccctgctccatccccaccaccaaaagacacttagcaagcctgactttggccatagccttgaacttcatctgtggcagggatggggctgctctgagcctgccttgaccatggggaggatgaataactgaacggcccagcctggtgcccttggcattcctcgaacctcgggtgacatcagtcccagaagcctctgttctctgggcctcgtgcaaagttatccttgttaaggcagagtgatatgcagactgaacaggagaaagtctgcagcatgtccagaaaaatggtgttaaaaggaggcattgtgcacattctataccaccacttcaacacacagaggcaaagatgattcatgagtaaactaacttccttgtaagcacatgtcatctccccctcacccccaattccatccctttggcatgtctctctggactctagggacttgagacccaagcagccagaccctgcaggaaacctgcctcttggtggaagaaatgagcatgcagcagcatagtcccctaatgggaagaacaggcccatgagataagtgagcctcttggccacaagcaccctcccagtccagccccagcctgtgtattaacccccaagtctatactaagtcctcaccatgaacacacatttattgagcacctgctgcatacttctggctaagcaagttcacctgaataacttacttaacctctgcttcccagtgaagagatgagtacagatggggcacccaggttcatagaggctaagtgacgtgctcagagtcacacagcaccaacaagtatcactcatgaggctgagctgaccctaccttttctcttctctgttatgaacttgtccatgcccttgtctttcgtgtttacatttgattatctatgtttccctctctccccgtgaccaaagagtcagctcctaaagccccgcagacacattccctagcctgtccctagtaggatattttgcccartgaatacgtgaaattcctgggtggagtagggaagggagagaagcccaagatttcattcctgacctcaggaagggctggggaaaggtgtatgagggttgaaaaccagggaggatttactctggcagagggagggggaagggctctgcagctgaaggagacaggggaggcggaagcacaggaagtgggaggtaggaagcagccaggtgtcatttccagggaggatgagggggcagggaggttttgggaatggtaaaaaggtgggggcggggcggaggtaagtatggaaagtaacacctgctttgtgcaatcaggcattatgc

SEQ ID NO: 54766 - DNA, 603 bp, Homo sapiens
tatgccctgctaattttgtatttttagtagagactgagtttttccatgttggtcagggtggtctcgaattcctgacctcaggtgatctgctcccttcggccccccacccaaagtgctgggattataggcgtgagccaccccgcctggccagttaccttctttttatggtgaatgataatattttaccatttatgtggtgatttaaagtttccactatacacatatttatggggaaaaaaagtcaatttaaagaaaaatgtcgtataaataatagcgtaggaarcatgcagatatagaacaaatcatgaaagtgtggaaattacctaacatgtgggaaatgctagttaagcccagccacctatttggcaggtgaaacaggggccccgatagggcaggtagttagccagagaccacccaaccagttcctctcactctcttcagccacacatggccctttaagaactctttctacatttattttgtgatgtcaggtattaaagaaaatagctaaccaaagagttcttttaatggtaaaggggacaggggctggggatgaaggtggaggggagactgttctgaatttcccagcagcgaacaggtacc

SEQ ID NO: 54767 - DNA, 1415 bp, Homo sapiens
ggctactgtatatttaccaccagggctttattcatgcactcttagttgaacacagataatacgttttacttattcctcctttgaattctactcatttatcactggaacactatccacatttatatatagcagactcaaactatcttaaactgaattggaagactgcaggcttgaattatttaaaagaaaaacatttccacttgtcctgccaagtacttgatcaatgctcacttaagtgatgtaatcatctcctctcattttgtaagctctattctctctcttcaggtgactaagcagtctgcaatcttccttcctttaattgaataattttcaggcttgtgtcttatccttccggtttttacaaattcatgcaatcattttctcctgtgactacagtaaagggttttatggctatggtcctttcgttagcacacatgtctctagaactctctagatctgctacacatacactgtctcaacgcagactttcatctactcttatgttccagatagactagctactctgcaatggctatctttttctgcttgtggtcttgcttttccttctttttgattgaccttcctgtgccttccacacatccctctggctcaggtattttttttctcctaactcagatattttttttctccatacctctcagatattttttttctcctacctctctggacctgcacggtacttttggtaatgttatcacctactattgtaaacacagctactgtttatcccacctctggacctgcacgatacttttggtaatgttatcacttactattgtaaacatagctactgtttatcccacctctggacttgcatggtacttttggtaatgttatcacctaatattgtaaacatagctactgtttattaagcactaaccatgtgctgtgtttggagccttatgtatgtaacacaaactatccagcttttcctcctacccctcacaatgcactttccagcccctataaaatctgtcacttacaggcctggcacagtgcccggcacatagcaggtgctcaagaaatggaaggtattattatcataattatgagaagaagcaccatatgacttattcatgtttgaccccaatgtctggttcgtttaatatttgtttacaaaactaggcaatgggctgggcacagtggyttacgcactttgggagaccaaggcgggcaaatcatttgagatcaggagctcaagaccagcctggcaaacatagtgaaaccctgtctctactaaaaaaatggaaattactgggtgtggtggcacatgcctgtaatcccagctacttgggaggctgaggcaggagaattgctggaacccgggaggcggaggttgcagtgagccgagatcgcgccactgcactcccgcctaggcgacaagagtgagactc

SEQ ID NO: 54768 - DNA, 1415 bp, Homo sapiens
ggctactgtatatttaccaccagggctttattcatgcactcttagttgaacacagataatacgttttacttattcctcctttgaattctactcatttatcactggaacactatccacatttatatatagcagactcaaactatcttaaactgaattggaagactgcaggcttgaattatttaaaagaaaaacatttccacttgtcctgccaagtacttgatcaatgctcacttaagtgatgtaatcatctcctctcattttgtaagctctattctctctcttcaggtgactaagcagtctgcaatcttccttcctttaattgaataattttcaggcttgtgtcttatccttccggtttttacaaattcatgcaatcattttctcctgtgactacagtaaagggttttatggctatggtcctttcgttagcacacatgtctctagaactctctagatctgctacacatacactgtctcaacgcagactttcatctactcttatgttccagatagactagctactctgcaatggctatctttttctgcttgtggtcttgcttttccttctttttgattgaccttcctgtgccttccacacatccctctggctcaggtattttttttctcctaactcagatattttttttctccatacctctcagatattttttttctcctacctctctggacctgcacggtacttttggtaatgttatcacctactattgtaaacacagctactgtttatcccacctctggacctgcacgatacttttggtaatgttatcacttactattgtaaacatagctactgtttatcccacctctggacttgcatggtacttttggtaatgttatcacctaatattgtaaacatagctactgtttattaagcactaaccatgtgctgtgtttggagccttatgtatgtaacacaaactatccagcttttcctcctacccctcacaatgcactttccagcccctataaaatctgtcacttacaggcctggcacagtgcccggcacatagcaggtgctcaagaaatggaaggtattattatcataattatgagaagaagcaccatatgacttattcatgtttgaccccaatgtctggttcgtttaatatttgtttacaaaactaggcaatgggctgggcacagtggtttacgcactttgggagaccaaggcgggcaaatcatttgagatcaggagctcaagaccagcctggcaaacatagtgaaaccctgtctctactaaaaaaayggaaattactgggtgtggtggcacatgcctgtaatcccagctacttgggaggctgaggcaggagaattgctggaacccgggaggcggaggttgcagtgagccgagatcgcgccactgcactcccgcctaggcgacaagagtgagactc

SEQ ID NO: 54769 - DNA, 2576 bp, Homo sapiens
tgcataggccccagctactgacacgctgctccgagtgagcttgtcctgccttggcacaaattttaagtctcgccagggccacagaaggctcagtcccatggatggtaattttggctgctttctgcacttgaacgtaaagtcctcctcaagaaggcctgtggtccgcctcttggcaaccaagaagcctgcagtaccatacgayccgaggcatggactggagccccaaaggcagtgcacaccctgctcctgagcttgctgcttgtttcctctctgtggctccatttgtaggacagttgttgcactgaagcttgtgcatgccgggcaaggccaagctggctcaaacagcaaccacccacctctgcaagggtatgcctggagcaggtgcaccagtcaccatctagcggccggacatggtacatcacttcttctaccctaaaggtgggctacagcaccatctgcttttcctaaggccactgctccatcagcagttaggtggcagccaaggcaggacaagctcactcagagcagcgtgttagtacctggggcctgtgcatgccagggaggccgagctcgctcaaagagcaaccagccacctctgcaaggtctggccagggctacagaaggcccccctggatggtaatcctggctgcgttctgcacctgaacataaagtcctcctcaagatggcctgtggtctgcctctaggcaaccaagaagcccgcagtgctacacgacccctgaggcatggactagagccccaaaggcaatgcacaacctgctcctgagcctgctgctcgtttcctctctgtggctacatttgtagcagagtagttgcactgagctgtgtgcacgccaggcaaagccaggctggctcaaagagcaaccagccacctctgcaaggctgggccaggagcaggcggaccagccaccaacctcactccctgccagacatggtacatcctttcctctactctaaatgtagggccaagaggcagaccacaggccgtcttgaggaggactttatgttcaagtgcagaaagcaggcaggattgccacccaggggactcggcctgctgtggtccgcagtgccgtacgaactctgaggcatggactggtgccatgtgctttatagaaaaattaacttaagatccattaaagagttaaacgtgccatctgatttacctcaggcctctgctccatcagccatcaggtggcagccactcaggctgttgtaatctcgccatccctgcttccttgagtgggtgagcttggtggctggtccaactggtccaggcacacccttgcacaggtggctggtggctctttgagccagcttggccttgcctgccatgcacaggccccaggtactaacacgctggtccaagtgagtttgtcctgccttggaacaaattctaagtccggacagggccacagaaggccgagtgccctgggtggcaatcctggctgctttctacacttgaacataaagtcctcctctagacagcctgtggtctgcctcttggcaaccaagaagcccacagtgccatatgacgcctgaggcatggactggagccccaaaggcagtgcacaccctgctcctgagcctgctgctcgtttttatatggcgccatttgtagcacagttgttgcactgaagcttgggcatgccggccaaggccaagttgcctcaaagagcaaccagccgcctctgcaagggtgtgccttgagcaggtgcaccagtcaccaactagcagccagacatgtgcttcacttcttctaccctaaaggtagggccacagtgccatctgcttttcctaaggcctctgctccatcagcaattaggtggcagccaatcaagctgtgggaagctggccatccccacttccttcagtgggtgaggtggtggatgctctgcctgctctaggcgcacccttgaacaggtggctggttgctctttgagccagcttggccttgcctagcatgcataggccccagcgactggcacgctgctccgagtgagcttgtcctgccttggcacaaattctcagtctggccagggccacagaaggccgagtcccccggacggtaatcttggctgctttctgcacttgaatgtaaagtcctcctcaagacggcctgtggtctgcctcttggcaaccaagaagcctgcagtgccatatgacccgagtcatggactggagcccgaaaggcagtgtacaccctgtcctgatcttgctgcttgtttcctctctgtggctccattcatagcacagttgttgcactgaggcttgtgcaggccgagcaaggccaagctggctcaaagagcaaccagtcaactctgccacggtgtgccaggcaccggttctccagccaccaacctcactcactcccgcaaatggcacatcagttcttctaccctaaaggtaggaccaaagggccatctgcttttctgaagtcctctgctctatcagccatcacgtggcagccactcgggctgtgggaaccaggccatgtatttccttggttaagtgaggtttgtggttggtctacctgctgcaggtccaccctcgaataggtg

SEQ ID NO: 54770 - DNA, 2576 bp, Homo sapiens
tgcataggccccagctactgacacgctgctccgagtgagcttgtcctgccttggcacaaattttaagtctcgccagggccacagaaggctcagtcccatggatggtaattttggctgctttctgcacttgaacgtaaagtcctcctcaagaaggcctgtggtccgcctcttggcaaccaagaagcctgcagtaccatacgatccgaggcatggactggagccccaaaggcagtgcacaccctgctcctgagcttgctgcttgtttcctctctgtggctccatttgtaggacagttgttgcactgaagcttgtgcatgccgggcaaggccaagctggctcaaasagcaaccacccacctctgcaagggtatgcctggagcaggtgcaccagtcaccatctagcggccggacatggtacatcacttcttctaccctaaaggtgggctacagcaccatctgcttttcctaaggccactgctccatcagcagttaggtggcagccaaggcaggacaagctcactcagagcagcgtgttagtacctggggcctgtgcatgccagggaggccgagctcgctcaaagagcaaccagccacctctgcaaggtctggccagggctacagaaggcccccctggatggtaatcctggctgcgttctgcacctgaacataaagtcctcctcaagatggcctgtggtctgcctctaggcaaccaagaagcccgcagtgctacacgacccctgaggcatggactagagccccaaaggcaatgcacaacctgctcctgagcctgctgctcgtttcctctctgtggctacatttgtagcagagtagttgcactgagctgtgtgcacgccaggcaaagccaggctggctcaaagagcaaccagccacctctgcaaggctgggccaggagcaggcggaccagccaccaacctcactccctgccagacatggtacatcctttcctctactctaaatgtagggccaagaggcagaccacaggccgtcttgaggaggactttatgttcaagtgcagaaagcaggcaggattgccacccaggggactcggcctgctgtggtccgcagtgccgtacgaactctgaggcatggactggtgccatgtgctttatagaaaaattaacttaagatccattaaagagttaaacgtgccatctgatttacctcaggcctctgctccatcagccatcaggtggcagccactcaggctgttgtaatctcgccatccctgcttccttgagtgggtgagcttggtggctggtccaactggtccaggcacacccttgcacaggtggctggtggctctttgagccagcttggccttgcctgccatgcacaggccccaggtactaacacgctggtccaagtgagtttgtcctgccttggaacaaattctaagtccggacagggccacagaaggccgagtgccctgggtggcaatcctggctgctttctacacttgaacataaagtcctcctctagacagcctgtggtctgcctcttggcaaccaagaagcccacagtgccatatgacgcctgaggcatggactggagccccaaaggcagtgcacaccctgctcctgagcctgctgctcgtttttatatggcgccatttgtagcacagttgttgcactgaagcttgggcatgccggccaaggccaagttgcctcaaagagcaaccagccgcctctgcaagggtgtgccttgagcaggtgcaccagtcaccaactagcagccagacatgtgcttcacttcttctaccctaaaggtagggccacagtgccatctgcttttcctaaggcctctgctccatcagcaattaggtggcagccaatcaagctgtgggaagctggccatccccacttccttcagtgggtgaggtggtggatgctctgcctgctctaggcgcacccttgaacaggtggctggttgctctttgagccagcttggccttgcctagcatgcataggccccagcgactggcacgctgctccgagtgagcttgtcctgccttggcacaaattctcagtctggccagggccacagaaggccgagtcccccggacggtaatcttggctgctttctgcacttgaatgtaaagtcctcctcaagacggcctgtggtctgcctcttggcaaccaagaagcctgcagtgccatatgacccgagtcatggactggagcccgaaaggcagtgtacaccctgtcctgatcttgctgcttgtttcctctctgtggctccattcatagcacagttgttgcactgaggcttgtgcaggccgagcaaggccaagctggctcaaagagcaaccagtcaactctgccacggtgtgccaggcaccggttctccagccaccaacctcactcactcccgcaaatggcacatcagttcttctaccctaaaggtaggaccaaagggccatctgcttttctgaagtcctctgctctatcagccatcacgtggcagccactcgggctgtgggaaccaggccatgtatttccttggttaagtgaggtttgtggttggtctacctgctgcaggtccaccctcgaataggtg

SEQ ID NO: 54771 - DNA, 1013 bp, Homo sapiens
taatttattaatgcaaacagtacctaacaaacccacaggtcctaaactaccaaacctgcattaaaaatttcggttggggcgacctcggagcagaacccaacctccgagcagtacatgctaagacttcaccagtcaaagcgaactactatactcaattgatccaataacttgaccaacggaacaagttaccctagggataacagcgcaatcctattctagagtccatatcaacaatagggtttacgacctcgatgttggatcaggacatcccratggtgcagccgctattaaaggttcgtttgttcaacgattaaagtcctacgtgatctgagttcagaccggagtaatccaggtcggtttctatctaccttcaaattcctccctgtacgaaaggacaagagaaataaggcctacttcacaaagcgccttcccccgtaaatgatatcatctcaacttagtattatacccacacccacccaagaacagggtttgttaagatggcagagcccggtaatcgcataaaacttaaaactttacagtcagaggttcaattcctcttcttaacaacatacccatggccaacctcctactcctcattgtacccattctaatcgcaatggcattcctaatgcttaccgaacgaaaaattctaggctatatacaactacgcaaaggccccaacgttgtaggcccctacgggctactacaacccttcgctgacgccataaaactcttcaccaaagagcccctaaaacccgccacatctaccatcaccctctacatcaccgccccgaccttagctctcaccatcgctcttctactatgaacccccctccccatacccaaccccctggtcaacctcaacctaggcctcctatttattctagccacctctagcctagccgtttactcaatcctctgatcagggtgagcatcaaactcaaactacgccctgatcggcgcactgcgagcagtagcccaaacaatctcatatgaagtcaccctagccatca

SEQ ID NO: 54772 - DNA, 1827 bp, Homo sapiens
tagattaaaggcagtgagttgagaaacttaaagcatggtccagggagaggctgttgaattgacttttctgatgctgcagtttcagagtcctcctggttgagtgtatagctctggtttcctttaacctaatgatgccctccctaggagctcacagtctttgggggaggacagccaccaaagtttaaaggaggagaagctcgtcttccagggctgaatggtgtgtatatctacaccctgggactgcataagaaggcacaaaccagggcgatggtgggtggaagttctgctctcagatcaacgctacatcagaagtgggcatatctgcacacagaggtgctgggtgtccattgttaacataccgctggctgtccagattactcttcccttccatcagcacaaagaagctcactgtagagttaggcaggttattcattgcacaaggacacctagcaagagcaggggaggttgaaatccagcccaggctttgcttgcagagccatgtgccctggcagggggctggaggcatcttttcctaatttgctcaaaagcacagtgagaaccctgagagtgcatgctcaaaggggtctctgcatgtggccttttgggcatcacccatgaatgctgctctctccgttgagaggaaccagttctgggtctggggagaggaacttataccactgcaccaggctggcttttccctcccttggggttgctgatggccaccctcttccctccagccttcttcctgcaggctccaaactgcattgagctccagactacaaagtgcattgatatggtgggtttaatcctgccagagggctgtcccatgacctgggtctgcatgttgaaatccaaggcagatgccttttggataatcagagtttttgttccttgtccctcaagcacggacaattggacagttgagggtttgtaccaggcttgtactcccaagaggttagggttggagaagaaatcacctgctttagggctggtaaatgcaaacttcaacgggggcttggtgggtcacatgaatgaagccaaacttgagaggcatgcccacctagagggacagtagctgctgctcactccagccacaggcctacctagccttgccagaacttctggtatgtcaagagggtcagagagatccagattcttacttgaaaccactcagttattaagtgttggcaactaatcagatctctataaaacagtgtgcaaggcaagtaagacatgcctgtgggcctgatagggcctggagctgccagtgtaccactgctaatgtatttctcctgtcttgttttacaatgcaattcagtgagaatgaggcaaagtggtctggttggtggcagagttagagtgagaggtctcctaattcctggtctgggatactctgtcctgggcttcagtgccccagcaccagaggtaaggaagagtcatggtatgtacatttaaaaattgctgttgtacaaatgcccacaaacttagcaacttaaaacaacacaaatttactacctaaaaggctgatgttaaggtgtcggcagggctgcatttctttttggaggccccaggggagcatctgtttccagggacatttaggcttttggcagaattgaggtccttgtggttgcaggactgaggtccctgttctcttgctggctggctgccagaggttgttctcagcttccagaggctatccacattccttggcttgtggccccctcttcctccatcttcaaagccataatagygggttgagtccttctcatgtttcaaatccctctagtgcaggcacctttggggggatcattatttgcctagtatgca

SEQ ID NO: 54773 - DNA, 483 bp, Homo sapiens
gtctggtccctaagcctcctaaccccagcctgggcccttcctccttgatggagagagaagacagtaacatttgaggtgaagcatacagctgyccctgcaccatagccaccctaaactcctcttttgctgcagcctccccaccctctgtgagccagccctaccctttcagccccattcactccacactccccaccgctgggctgccttctggtccttcccacctggcaagcctgctgctgccttggggcctctgccctggctgtccccctccctgagatgctcctcccttatgttttcttttcttttttttttttttttttgagacagagttttgctcttgttgcccgggctggagtgcaatggcacaatctcggctcactgcaacctccgcctcccaggttcaagcaattctcctgcctcagcctcctgaggagctgggattacaggcaggcaccaccacgcccggctaattttgtattttta

SEQ ID NO: 54774 - DNA, 1928 bp, Homo sapiens
gtacatttgaaataattactgcaatcaagctaattagcacatttatccccagatagttattgtgtgtgtgtgtgtgtctgtgtgtgtgtatgtttgtgtggtgagagtatttaagatatattttcagcaaatttaagctatatattaactatggttaataatgtaaatgtatcatgctgtacattcgatcgccagaatttattcatttggcataactgatagtttatactgtttgaccaacctcttccctttcccttaagcctcagcccctggtaaccacgattctactgtttctgagttggactattttagattccacataaaaatgacatcatgcagtatttgtctttctgtgtttggtttatttcgtttagtatgtcttccaagtttattcttattgtcacaaatgccaggatttactacaaagacaagttttagatgtataaatcctactttattagggcttccaaatgttggaactggatatataacatatattaaatttttgatgtgccttggtttccaaatgcagctccaaagggctgcattttcataattcaaaataatgcaatttggaagcttccacgaactctttgatattatttgttcaagaataactaccaaacagccttcagtttcagaggttaacattttttttcttatttctatttctataaaaacttaagaacaaatctccacttacatttactaccagtcatactccttgttcatctgggaggcatggaacataacagagcatatgctcaatttcatgggagagagaaaattgtaaatacggcaatcacactataaaaatgcagctaaaaaatctttttctgtagtttaactttacaaaaagactagctatttgggtggtgttaaggaggttattttattttgtgtcttctaaagaaaacacccagtaatttgttctgagtaattattttcctcttggtctacccagctaaaacacaagatacagagttttcttttgcaatgtatatatctccagtttttaggatacaaattattttggattatgtgtatatgtgtctgtatttatttttaatgcctcggttaaacaagctgagattgatttaggaaaacaaatgctgaataaggataacaactattcagttgacaacatgcactcaagagacactttccgagctgtctacacctcaccaggcagggaattttccaggccttatgaaacaattgtagcgtgtgggcctcataatcactgcagcacagctgctcagccaccataatctgatatttttcttcctccttggtttgggctttttgctctaaattttcactagaagtttaaatgtttataagtaaaatcagacctcacaagtttattgtcccttgatctgcccccacacactaacaaagcctttacattcagtcactgattcttgctggttttctgtccttaaaatttcccactcccctttccttcatctctgttatactagctcagctaacacctgcattctttctcaaagagaacaagtgtaactcggcattacctgcctcaaactcatcrgcgtcctatccattctcctactgctaccacagaattacattcctacagtgctaattaaggacaagtctcccctgcttgaaattcatcactttctctttctctttgtaaattaaattctcactcttcagtgtggctttcaggtttcttcaggatccccacgccacgccacccacccctgcccatcctatttctcttgcttctcctcttgccacttaacttcctccagatctccagtccatctgatcgacttaggagtcctcaaatgcatcatgctcttccacacatatttctcccttctctgctttttctgtgtgcctttcttttagcctggttaacttaatctaaattaagtctccttaattctctaaacttc

SEQ ID NO: 54775 - DNA, 1099 bp, Homo sapiens
gaatgcaaacagccagaagaacctcttgggctgcttgcggggtctgttggacacctactgcagacacaactacggggtttttgagagcttctccatgcacaggcgaggtgagcaaggcgggtgggggaggggagtagggtccctgagaacagggagtgtgtgtgtatgcacacgtaagcaccctgtgggagggtgtaggattgtgagccagaaggaattaggagggctcaggtaggtgagtgtagagtggggatttgtctgtgtgtctgctgtgggagggaacacaggagggagcttcagcttgtccttccagccttctgggcagagatgagatgagatgggggtgggaatggtggtgcagggggctggagaaggagaccttaatcgccctgaatcattagagatgcaggaaagggaaacttacctagtctgctgttggcatgaaagtttaggggagaagagatgagaaatgataatgtgagggataatgtgaggaggctagtcacaaactgtccttggtacacwccctttatgatcccgaaatctctgaaataaaagtgtatgatatttgtttgcataagcatttcactgagaaaaaagtattgaactaatttctttcttttttattttaaacttttattttagttttagggatacatgtacaggtttgctctataggtaaactgcatgtcaggtgtttgatgtacagataatttcatcaccaaggtaataagcatagtatctcacaggtatttttcctgatcctttccctcctcctatccttcaccctcaagtaggtccccatatctactgttctcttctttgtatccatgtgtactcaatgtttagttcccacttataagtgagaacatgtggtatttggttttttgtccctatgttagtttgcataagataatggcctccagctccatccatgttcctgcaaaggacatgatcttgagaggtgacgctggctgggcttctgggttgggcagggacttggagaacttttctgtctagctaaaggattgtaaaagcaccaatcagcactctgtgaaaacacaccaatcagcactctgcatctagctaaaggtttgta

SEQ ID NO: 54776 - DNA, 541 bp, Homo sapiens
actttgggctaattatagaagtgagacaatgaccgggctggcctgttccgcacagtgtaggctgtgggaaacgcgcaggcacctgccaggtgtctctcctccccaagcgttccaggagctccaggctgccatcatccctgggagggccccaggcactttggacggcccgcccttctcacctactctcagtgtctgggctcagctggaagactgggcttcacgaggccaagagcatgggctggattctctrgaggccgctcgccttcccttgtgtttgttgcgggggtctcaggttacccttttttaagaggccctagctcttccctagccaagccaagaaaaccctgccctcctcgctcctgtcctggggaatgtccctggggacactgtcaaacgctttcccactgggccccaactgagccttggaatccttctcaacacagccccaggcagcctctgtcgatggatgaaggctggtgtttgagatggaagccatttgccagttctgccttaaacctcacgactctgaaaacatcccagg

SEQ ID NO: 54777 - DNA, 534 bp, Homo sapiens
tgcatcaaaaatgtctaggtcccaaaacatgctttatgagagctaaaaaggagatctagtccctctgcctcaggtgacaaatgggccatatgtctgtgagatttacctgctcaccggcacctgatattcggcaagcctctgaaatcataagggatcattccagggtgcagcatggcctcagtccagtcatagtaacaatcatcactcatcattgcagtgggaattccagcctagcagactgtttaagaaagatacaggaacatgtagccaagtgatatatggtcactgtataattaytcaacaatcacatatcttctcgagttacgaaaatgagaaactacctcaatattcctgactgctgagcacaatgtctatgttgagtaagatgttattgacattgatccttgggcccccaaacctacccatttcatccaatattcagagtccactggtgtagaaacagaagcagggtagctttcaggcttggaaatctcgtggctttcatttgatgaccacctccttccatttctattt

SEQ ID NO: 54778 - DNA, 863 bp, Homo sapiens
cctcttttttatagtaggtgagttcacagcatgctttgtgcttcagaacaacaggtgaacatcctttccttgaccacatgttgttgccgtttgctaggggttgggtgcacagtggtgcaccagatgtggtccccaccctggcgacacaggcttggatctggcctgagacagacggttgtgctcagttccaaatgatgctgaaggtgtctatagggaaagagcaagacgggagctacttgaacaggccttaacagatggagtggtttcactccattgcctttggcatgggaaaacctgggttcaagtcccaactcagccacctttgagcttggtgagcttgaacaaggattttgtttaactcagactcaatttcctcatttgtaaactctaatagtgatgcctatagtcttgatttattgtgcaggttaaatgatttatattaaatatagattagataaagatatatccacatatatctaattcawtctatatataatctatatgtcccttagcatagtgcctgggaacaaccaaaaaaggatagtatctatttttttggaaggggaactcaggtgcacagagttgagtagacaccctctgcaaaggttcttcttttgttttaagttactccctgtctttcatcttccatccttttttgttttgttttgttttttagagacaaggtctcactccattgcccaggttggagtgcagtagcacgatcatagctcactgcagcctccaacctggctcaagggatcctcctgcctcagcttcctgagtagcagggactataggcatgtgtcatcacacccggataatttttattttttattttttgagacagaatttcactcttttcg

SEQ ID NO: 54779 - DNA, 528 bp, Homo sapiens
caatagttgagtaaaggatctcacaaataagcttgggttgcttaaaacttcaataaaaccatctgaagaggatcaatatagaaaggggtcattaaaacaggggttagatcccaccgcgaggtgacatcaaggcagatagcctggtgaagcatttgaaaaatcagaaaaatcctcaagtggaaactaaacattaacgaagtattgctagtgagctttaatatctccaacaaacaggcaagcccacctcacatcatctgtagcaggaaaaacacagcaaagkcgaatgttctggcagcccagagtttcaaggaagaatgaagtacagtgacgacatgccttagtgaagcttgtacatgtgtgtgggtgccagagccaaagagagaaaacatatatctttcctcaatcccctttcgaaaaatgaaactgctgcattagcaaggttacttgaaaaagattattacctattctatttttctttcttttttttttttttttttgagaccaaatctcgctgtattgcccaggctg

SEQ ID NO: 54780 - DNA, 528 bp, Homo sapiens
caatagttgagtaaaggatctcacaaataagcttgggttgcttaaaacttcaataaaaccatctgaagaggatcaatatagaaaggggtcattaaaacaggggttagatcccaccgcgaggtgacatcaaggcagatagcctggtgaagcatttgaaaaatcagaaaaatcctcaagtggaaactaaacattaacgaagtattgctagtgagctttaatatctccaacaaacaggcaagcccacctcacatcatctgtagcaggaaaaacacagcaaaggcgaatgttctggcagcccagagtttcaaggaagaatgaagtacagtgacgacatgccttagtgaagcttgtacatgtgtgtgggtgccagagccaaagagagaaaacatatatctttcctcaatcccctttcgaaaaatgaaactgctgcattagcaaggttacttgaaaaagattattacctattctatttttctttyttttttttttttttttttgagaccaaatctcgctgtattgcccaggctg

SEQ ID NO: 54781 - DNA, 1027 bp, Homo sapiens
taatttactaattatataattgcataatcaattatattttataaaatacaatctaatatataaagatataaagattttatataattaacataaaacatgacaaatgcatattatatattttatataattacaatataattatttaataactgcatgtatttgaaaaaaacactacagaagacataatgttgaaaagcatcattcttcctctgtacctcagtactattttctagaaatagaattctatcaagtttttaatatttttaattatgctagtgataaccttgaattatcagtttgaacagttagctcctgcccacttgattatttgagctcattcttgccatcatgttcttctacatattctcctttaaatgttgttttttctaggattatttatattagtattacaatagtaattttaagtaactgatttaaatctctgctcttgttcaattaactttcaacaatatcccttgcctcctattttttaacaacttatttttccctccaactttcccgccartttccactgtcatgccccatccttggtgagctcttattccatgacatcagtgttaatacatgaatctcttttgcaattccaaccaagtcttacaagatttgttcactctaaaggttggaaataaataaacaggatcagtgaattatgtgactataaaaatattgttgactgctggccaaaaaatatacaaggattatatttcttttcctgtgtcccaatgtcaggaaccctggactatacaaataaaatgttactaacactattttttaagacacaaactccactctttaaaatcatgccacattttagtttgcttcatatttggagtataatttacttgtgcagcttttagaagtttgttcccctggtgttttagattctttgttgtgtactatttgcctttattataacctcatttttttttcgtatttttcagttgtgtcatgatttccaatggttctcaaagtgtggcctgcaaaatcttgtggttctccaataccc

SEQ ID NO: 54782 - DNA, 718 bp, Homo sapiens
tgaaaccccgtctctactaaaaatacaaaaattagctggatgtggtggcacacgcctgtaatcccagctactcaggagactgaggcaggagaattgcttgatccagggaggcagaggttgcagtgagctgagatggcgtcactgcactccagcctggtcgacaaagggagactctgtcaaaaagaaaaaagaaaagaaaaraaaacgtgagtctgcatctcactggctaggtaacactgagcaaggcacttcacctctctgagcttcggaatgggtgtgagaatgaaacaaaaccacaagatgaaggggccagcagtgtgccttgtttataactgaggctccggaactgagggccccctcccacactcccccagctaccatctctttgcagccctgccaagaagggctggctttctttccccttacctggtgacctattactgtgttgcaaaccacctcaaaatttgtggcagaaatgataacccttttggggccatctgggctgctataacagaataccatacatggggtggctgataaacacattcatttctcatggttctaggggctggaaagtccaaaatcaaggcactggcagattctgtgtccaattcttggtcatagatggctgtctttttgccgtgtcctcacatgacagaaggagtgaggcagctctttggggcctcttttgtaggggcactaatcccctataaaagat

SEQ ID NO: 54783 - DNA, 550 bp, Homo sapiens
gcatacaaagcaatatataattgaaactttgataaaattatgtatggcaaatttgatacagaattgtgaaggccagggcatctgccttagtggaagaggcctgtctcttcctccatgaagtttagaagcttcatctgagacytgagggatgactaactagggagagcgacaagtcatgatgacaatttccataggacaaagtgaaagaaaaggaatctaataggaagacaaatactaaaaattaaaattatttagcgaatgtcttctagaccaaatacagagtagaaaaaataatcagaatgctatatgtacaaagataaaaatcatcaacgatataaaatgtataaggattttaattttaattacaactttttcatatggaagtatgacaggtatttactgcttacataaaggattgttttaaactttaagtttaatttaacataattaaattattttctccttttcaaatatatcttttccttgaacagtagttaaaagtttttgtttctggctaaaacatagacctagcatattgtttgtgttgacc

SEQ ID NO: 54784 - DNA, 1783 bp, Homo sapiens
tgtgactagcttttcttcccttccataactagataagcattattcaccctctcttgggcctggaggaaggagaggtgtacacaatgaagaaaaatgctggaaattccctagttaatttttacctttgatgacccattgttctgacaaaaagggtatgtgtgttgtgttcacattatcacatctttctcggtgcatccttaaatgcaggtacttatttaaaagccagagtagcttagcaggagcctgttaggctggaactcagaattctgatttaattcagttttgctgatgaattccctgctgtcacttttaataactgtatctattttcccactgaaagtttcttgggccaccccggatggtttggacaaggagatgctgattgctgtggtgggtgactagtggctgggcattcaraatctgttctctgcaactccttaaatgtactttttgctaagaaatttcttttgaataatgttgtaacttgctgaaaattgtgcgttttcttgtttgtggtaaggtagagatgaagtacattatttcaaaagattgtctaggaaaacatctactttgataccctgttctgtgaaagattcaagcagataagtatttgcaccatgtgtattgaaacacacctcagacattagtgtttagtttcctcagcaaataaacatctaggcaaggaaaaaaaaaaactttaatagcatttactttttgtttcccctttgatgctggtttatttttgaatatagctgttgaaaataaagcaacaataaaaccaacgttgaatggattattaccctaatcttatttcttctctgtttttgagaagaggcataccagtgcacacctgtgtgtgtgttcacacgcatgcatgtgtgtgtgtaatgagagggaaataagaatggcctaagtggagggctaagaagtatgcacagaatgtgaatcccttttaaaattatctaccctgcttttgaatttaggcttcaatttaccatcttggctcaatacaggcaaaattttagtgcctcctttttaccactgggaaagtcaaatcaaagttccaataacagaaaaaaaatgaaatactacattgaaatcccaagcaagagtcaaaaaaaaaaatcactgaaataaggaagatggggacgggtctgtgaaagaaagccatgcaaaagcaaaagagaaggtactttccagacacttggggcatctttgatctgccctttccaaataacagattggagggcatggcccatgaaataaaaggccctttctgagctcctctaatagggtcttcatattcctcaaagtacacagaggcttgatatcacaatgacaatcatggcttcgtggttttaaagcacttttgagtgttggtgttcacaacagctcaatatggtagagtttgttactcttcccattttacagataggaaagcagaggcccagtgaggttacatgtcttcattaagattattcagaactcaattccaagtttcctggctgcaagtctggctgtatttgacaattacactgcattcttagttggccttttggaggctttcattgagatgataacaatagaaattagtccaggtttaccaggagtccagactactagagatgcgattgcttgcatatctgatataggtgaagcgaagatcatagcttcatatttttgaaactcaaatccttgaggacagagaccataactggtttgtaatgtttatcacaggaatggattactactgttaggaatttaatatgttctcaataccttc

SEQ ID NO: 54785 - DNA, 782 bp, Homo sapiens
tgcattcgtcagcacacagggctgctattattattttataatccttgaaactgaataacaagagcaatacgaaattacccagaaagccatctcaacaaattaccatcacaatggaaacatcataaaatcttgagaccttgacagttgtgtggaccagagatcagataaaagcatttaattgctaataacatgttgtgccgcaaagggtcaggatggtcgccatctgccagctttttagttttgcccttgattttgaatggaagaaatgcactgttaaggaaggcctttttaccccctacccccaactttactagtacgaagttatatacaaaaagatgtcacttagactgtaaaacagttcttttgaagaactagctttgccagcatcagccagaggactcacaaattccattcctgctacgtgatactcaactgataktacctgcaagatgcctcccaccacacatgtagcaaagggctacagcatttaaagtaaacttaaatgactggttaaaaggatgaagaggttttggaaacaaacagcagtagttaggcagcttggcttctgagacactcaggctctgtgttctcctatctatccacttgctgtccccagctctccatgtacactgcctgacctgtttggaggtcatcagaagtggtgtggaggaagagggagtggacatctttggtcaggctccttgttgttcccacatctagaaacaaagcggcactgcttgttcctactttaccaggttagatcctagataagccatctactg

SEQ ID NO: 54786 - DNA, 733 bp, Homo sapiens
ctcttgaataacagtcttaggtctgccttcaggggaaggcctgagacgcttttgctggtgctatggcctgcttcaggggagaagagcgagaggaaggtgagaaggaccttcctgttgctgttgtctccaatgccaaggtgccatgttttggggtagtatgttttggggttgtgtgtcttgaaccccatcattagcaattttatcttttgagggccgagtggagattcttgaggttaagaagtaaatgctaatgaaaagcaaagtattctttttttttttttttggcaggttctcgctctgtggcccaggctggagtacagtggcacgatcacagctcgctacagcycaaatctcctgggctcaggtgatcctaccatctcagcctcccaagtgtctaggaatacaggcacatgctgctatgcccagctaattttttaatttttttgtagagatgagatcttgctatgttgcccagactggtctcccaactcctgggctcaagcaatccccctgcctcagcctcccaaagtgctaggattacagactgagccaccatgcctggccccaaagtatctttttaaatgcagcctccttgagtttgagtacaacatctatttacttacttcatttaaattctcaaagcagatgagacataattaacacatacatcatgatgacatttcccatagcacaataaaacttaactttcaaattaagccactctgctattgaa

SEQ ID NO: 54787 - DNA, 1089 bp, Homo sapiens
aaagactaactttccttaagtcattcccagaattagtctggtctatttatgttaatcccactttttttttcctctcaaagaagaattttgtcatagttaccttgctgaaaattgagtgttgtttttctttttttcttttctttctttctttctttttttttttttttgaggcagggtctccctctgtcacccaggcttcagtgcagtggtgtgatcttggctcactgcaacctctgcctcccgggttcaagctattctcgagccccagccccctgagcagctgggcttacaggtgtccgtcatgacacccggctgatttttgtatttttagtagagacgggattttgccatgttggtcaggctggtctaaactgttgtgtcccttaatacagtgctaaactcaattcctaaccacttgtcagaaccaaggcaacccctttctcttccctaagtgacttgtttaggcagccctttgcatctcggagagctgtggagatggcgctggcggtccttggagtggactccacatgttggcttcagagctatgttgggtgctctaarctgcggtcccccagcccaaaatacagacttaaaaatatgtgaaattgacttctttagacatgacatgcatgcttttatttgccgcactctcactgtgtcatactgtctttttacactctgatacatcactgagtgagtggcctgattgatccacaaagacattctcctttgcatcctctgggacaagaactggtctccccttggtaagtgacagtatatctcagctttgctgttaactcttctgtgctgagctcagtagactcccacttgctgaataaagatctatcttttggaactaaagtctagacacaggtattattcatatgcagggttggagaagggaaaaggccctgctttaaatagggacaagttctccttcacattattaatatgctgagataattacaggtctcctgacaaaatttcaggggcagaataattgatttagggacttcttggagtcaaagtcaagctgccctctgatataatctccccaggaacttggtgagcatcatcactaaggccatc

SEQ ID NO: 54788 - DNA, 1089 bp, Homo sapiens
aaagactaactttccttaagtcattcccagaattagtctggtctatttatgttaatcccactttttttttcctctcaaagaagaattttgtcatagttaccttgctgaaaattgagtgttgtttttctttttttcttttctttctttctttctttttttttttttttgaggcagggtctccctctgtcacccaggcttcagtgcagtggtgtgatcttggctcactgcaacctctgcctcccgggttcaagctattctcgagccccagccccctgagcagctgggcttacaggtgtccgtcatgacacccggctgatttttgtatttttagtagagacgggattttgccatgttggtcaggctggtctaaactgttgtgtcccttaatacagtgctaaactcaattcctaaccacttgtcagaaccaaggcaacccctttctcttccctaagtgacttgtttaggcagccctttgcatctcggagagctgtggagatggcgctggcggtccttggagtggactccacatgttggcttcagagctatgttgggtgctctaagctgcrgtcccccagcccaaaatacagacttaaaaatatgtgaaattgacttctttagacatgacatgcatgcttttatttgccgcactctcactgtgtcatactgtctttttacactctgatacatcactgagtgagtggcctgattgatccacaaagacattctcctttgcatcctctgggacaagaactggtctccccttggtaagtgacagtatatctcagctttgctgttaactcttctgtgctgagctcagtagactcccacttgctgaataaagatctatcttttggaactaaagtctagacacaggtattattcatatgcagggttggagaagggaaaaggccctgctttaaatagggacaagttctccttcacattattaatatgctgagataattacaggtctcctgacaaaatttcaggggcagaataattgatttagggacttcttggagtcaaagtcaagctgccctctgatataatctccccaggaacttggtgagcatcatcactaaggccatc

SEQ ID NO: 54789 - DNA, 1033 bp, Homo sapiens
tcaggaggctgaggcaggagaatcgcttgaacctgggaggcggagggtgcggtgagccgagatcgcgccattgccctctagcctgggcaacaagagtgaaactctgtctcaaaaaaaaaagaagaagaagaagaagaagaagaagaagaagaagaagaagaagaagaagaagaagaagaaaaagagaaagtaataaagaaagaaagaaagaaaaggcaaggccaggcaagtccaggcaaggcaaatctacctgctttcactacatctggggagaatcaggaaagtccccaacaacaacaaggcctaaagtggagctgccatctgtcaaacccgagcggaagagtccacgcgggttaaagacacgaagaaagrcaaggaaacccctgaccaaggagaagaacaatcgggcccagccagggtctgtctcccggggttgtctgggcaaccagggagggcgggcctccgagactccgtctcgaaacatcaatcatgataataacataaaatgaagttaaaaaaagaaatcacgcataattcctaacgtgtttgaggcctcgaaaggcgagaggcgtacgtgtatgtcacggtggggttgttctgttttgttgtttttttcttttttcttttcttctttttccccagaaactcactttttaattattttgttgcgtttcattttcattttcattttttggagacggagtctcgctctgtcgcccaggctgggttgcagtggcgcgatctcggctcactgcaacctccgcctcccaggttcaagcgattctcctgcctcagctcggcctcccgagtagctgggattacagacagtacagcacagcacagcgcccggctaatgttgtgtattgtgagtagagacggggtttcaccatactggccctgttggtctgaccgcctcttgatccaccggccttggcctcccaaagtgaggggatgacaggcttgagccaccgcgcagggcccatttatttattttattttatttatttattttaatttatgtatgtatgtatgt

SEQ ID NO: 54790 - DNA, 820 bp, Homo sapiens
tcagttctttagaatttctgttttctaattaaggctgcaatacatttatccttaggatagattcatttcatttgtttgaacatttatctttagcataaattctttttgtttatttttttttttagtcttagaatatttgtttttctgttatcaaggtggtacttttagaatttattcaacatacagtcttttatctttatcactcttatgcctcttaaaaacataagcagaatagattgtttcaagagttaggtttttaaaattctcctcactcctctgaaattcacttttactcaaggtattgatgggccatgtgccataagcaatattggtgttggagtggttcctattccaggattttctttcaagctgctgaaatcsattctgcaagtaaaataatattattattaatattaacatattttatttctataatgttaattaaagtttattcaacatttattgcattaagattatattatgtctatattacagttaataattttataaatattaaataagaaaagtatttgatctattatattgattaattaaaatatcaacatattcatatttaaaaaataacattttattaatattaaaattttaaacataatgtaataaaatgaaaatgtaaacatctactattgaaaaagtaaatatctcaagcatacaagagtaaccaccaccatcctgacttttaaaactcaatatttgttttgcctgtatttgaaatttatcagaatggaatcactcaatttctatttgtatttggcttcttgccatgagcattttatgagaaaccaatgcattctgttgc

SEQ ID NO: 54791 - DNA, 571 bp, Homo sapiens
tctgggtgatgaaatttggagactttttattttcatatttttaaaatctgtgttttctaaatatttgtatttctcttagaaaaaatatatwtttttttccaattttcattttgtttgatctggttttaaataagaaacccaagctaaagaggttggccacccttttcctctgtagtttccctgcctgagcagcctgaagtggtagaggccgcctgccccgtccaggctgggcctgctctggtctcaatatccctccagaggagcagagtcccaaggctccccagagcaaggcccgcacaggcccaccctgctcctctgaaaggttggggagggcaactgggacagtccaggtgcgtctgcagcaggggaggaggctcagatgaccaagagttggtctctgaaatggatgcagtagaaagaatcagaaacgtcccctcgtgggcaccaggcaggaggctgagcccgctgatgaagcaggtctcagtaaggagctccacgcagtggcagtgacatcttgaaaggagagaatcccctgtcccaggaccctcaggtaccagcctgagctggagac

SEQ ID NO: 54792 - DNA, 552 bp, Homo sapiens
tgcagttaattacattttgtgattacacattatgagtccactacaatttgtttaaccaatactcagtattggatgtctacatatttgctcttgtttacaaaaatgtggtgaatatgtaaatctgataaatcgcttaaagtatttttttgctataagcaaaataagttattgggttacagggtgtcttaatttttaaggttcttcggaaaacgaagtaccgcatgttctcacatataagtgggagataaattattagaacacgtggactcatagaggggaacaacacacactggggtttattggtgggtggagggtggcaggagggagaggatcaggaaaaacaactaggcttaatatgtgggtgatgaaataatctgtacaacaaamcctcatgacacaagtttacctatataataaacctgcacatgtacccctgaacttaaaagttaaaaaaattacagaatagcttctgaaaaaaactttttaagattcttgaagcatattttgaagttgctttcccgaaaattttttattgattttatattcacaaca

SEQ ID NO: 54793 - DNA, 600 bp, Homo sapiens
tcttttttgtaacttctgccaaccattgcttctgtttttactggtagaacatttaagcgtatttggatgctattatgttgatgtgtgcctaaagacaacgctatatttgtagttgatccatagatctcttacttccccaaaacatggcatatgccacaatgctatgaatgtyccatcaatatttgtctttagattagaaccacaaacataaattttcttcactgtttaaattttaattgtatttatagtggtattagtaataatgtcagatgtgtgtctttgacaggacaaaactccccaagctttccccgattgtatttaacaaatgataagaacaatttaacaattattggaattatcctgttttttattgttttttttttctgttaatttgaaagatgagacattatcagacgtttgtaaaggtctttttttttcctaatggagccaacgcagtcacagctatgcttttatttttaatttactcagttttggtacatgcacaagaaaaattgaatttaaaatgaggaaaataaatttagaataatcattgatctaaataaaaagcaatgtttcacactttctgtaattgggaatgtt

SEQ ID NO: 54794 - DNA, 615 bp, Homo sapiens
catcaaattggattttgaaaaaacaaacatttaatttgaaacacatttgcctgcatgaatttctatgtaatgcggaccagaaccagctaaattgcataataatcctttccttgtatttgcaagtataattatggctttagggtttcttctggttaattagctcatatgtggaggtcagagtgagggctarattctatttggagaagaaatgatctacatcttacaaatgtattatgagtgcaggtgttaactcttctttgcaaatgcggagactgagaaaaggaaagatgagatagcttgcctaagatcatattaccaggtcaccactgaatcacagcaaagcaccttcctcaatgattatattattgctttcctctctctcatctataattcctgcagtattcttctctgagataggattcttagtctcagaaatgaatgtaagctcgatattactaggtgacaatagttagaaaacatcaatattttatctgaagctttcagttgcctgtaatatggcattatggcaagccccaaggaagagagacatagatttttaaatgtggttgtattgttgatacttacggaagatcagcatgagctcaaaatctgatt

SEQ ID NO: 54795 - DNA, 615 bp, Homo sapiens
catcaaattggattttgaaaaaacaaacatttaatttgaaacacatttgcctgcatgaatttctatgtaatgcggaccagaaccagctaaattgcataataatcctttccttgtatttgcaagtataattatggctttagggtttcttctggttaattagctcatatgtggaggtcagagtgagggctaaattctatttggagaagaaatgatctacatcttacaaatgtattatgagtgcaggtgttaactcttctttgcaaatgcggagactgagaaaaggaaagatgagatagcttgcctaagatcatattaccaggtcaccactgaatcacagcaaagcaccttcctcaatgattatattattgctttcctctctctcatctataattcctgcagtattcttctctgagataggattcttagtctcagaaatgaatgtaagctcgatattactaggtgacaatagttagaaaacatcaatattttatctgaagctttcagttgcctgtaatatggcattatggcaagccccaaggaagagagacatasatttttaaatgtggttgtattgttgatacttacggaagatcagcatgagctcaaaatctgatt

SEQ ID NO: 54796 - DNA, 608 bp, Homo sapiens
tgcatctattgaattcatctttatgtagctacattatatttcattattttaaaactcaacagcaacaacaaaaaaaacatgaagccaaatgacctaatgcctctgggatagggtcatggcgcattgtgtataactgataattgatctattcctgatagcaggttttgatggacaatgggctgggacaccaagccaaggatacacaggcatcagtgaggtaaagaataggatgcaaaataagtccaagactgactgacatggcccaaggaagagaccacgggtcacagtgttctctccagcagaatccaaacccaagcacatttgtgtatggtgatamaagctgccccaccagaaaagcatccctccaaggaggcgacctggagagatttcaggcctctgagcatgatcattggccatttacatcttccttgagattcgttagtgaacttacctcttgcctacaacagaagataagagcaataatgtaaatcaataattggataagcaaatcaacagtgtactcacgctagcatctgatacccagaagcagtgatgggaatctggtctcctttctctaggtgatctgttctcactcacaaagaaaatgt

SEQ ID NO: 54797 - DNA, 638 bp, Homo sapiens
tattttgtgatcattacaaattcttacactaaataaatatttttattttacaatattaatatgtttgatacctstgtacttttttacaatgtgttattttatttttgtcatagagtcatgtcatgcataataacattttggtcaaagacagattacatatacaaaagtggtcccatgatattataatacatatttttacatacttttttacgtttaagtatgtttagatacataacctcttaccactgtgttcttattgcctgcagtattcagtacagtaatgtagtacacaggttcatagcctgggagagagaggctataccatataacctagacgtggtaggctgtacaatctaggtgtttgtaatattctctgtgatgtttgcaaaatgatgaaattgcctatggatacatctgttagaacgtatccctatcattcagtgatgtgtgactgtactaaaatgttcaaggtaagtttcaatgccctccataaaactgttgtactgtgaaatacaaatctctcacccatgacctgaatatgtttgcaaactaagcagatcatgggaaggagaatgtgctggcatcactgggatgattttctcacactacatgagtaatatctacagacttcgtgaata

SEQ ID NO: 54798 - DNA, 689 bp, Homo sapiens
tgtacacgtataggtacatgtcatttttgattttgcatattcattttattaaactcaaaaacagacatacatctgtacctgtaatgtgtcccctaccttaacagctcacaattattatgttcaatctacttttaaataaagaataaaaaagcatagtaaaaggacaagcaagtacaggaataaagaagacagaaaggggcactaacatgagaacaaagttttagattctatttaagctgagaacagtgctccacaaaatgtgggccatgggtaagtgctggtccatgaattggttgtttataatctgagataggtctagaaactgactggaagctcttagaaacttttacagaaatttgtcagagtaattttatgtctattcaatctaataataaaattttggactcatattttatagatcttrtattttattccatttctttttctactagcttattttcactctattttacaaaagatcaatgtccacaggtagtctgcgaagcactggtgaactctacagagaagaaccggccttcttggttagtccagtgagcctctcctaacccaggattttaatacaaaagtgaatatcctcaacttctcataattacttactgtgaatctgtcagcaatgaacgatctctgttttctgtgaatctaccaacttctttttagcttgtatcccc

SEQ ID NO: 54799 - DNA, 935 bp, Homo sapiens
  misc_feature (1)...(935): n = A,T,C or G
cnnnnnnnnnnnnnnnnnnnnnnnnnnnnnnnnnnnnnnnnnnnnnnnnnnnnnnnnnnnnnnnnnnnnnnnnnnnnnnnnnnnnnnnnnnnnnnnnnnnnatcatattacgctccctttatcattggattaaagctaatttataatagaatactcattgtaatttaaagcacatatgcatatttagaatatcagtttaaaaagtaataaatcacattacttacctggctttgagggagatagtttcctacttaaacatcaacatttttatgtgcaacatctggaacactggttttcaaactttgtactgcaaaattctagtgaaggggttctaagaattccgtgaatatttttatattgaaactaacaaaatgcaacacatactactaaacattaacatatgtgctaatgaacacatcacataaccgatgtttaacgtgttaatttgtgctatcagatttcatccaaaccttagaacaaagctctttgatatatctgtttactgcaatcaaaaataatataaagaacaagatcagatattggtataagattataaccattaactaaggccacaatagaaaatgtctgtattcatcaacatagcttcatggttctcaccataaaggtgagtttatatgttggttctcaccatgaggtgagtgtgtgtgcrctgaacacaagtaactgatgacaatttaaatccataagctacaacactcacgctattttccatctgctcatatctcactatctactgattaaaaaaaaaagagtttgaaaaccagtggtctcgagattccagattttttcatgatacctgagacattttactctggattcagatatttgagctaaactttgatgtgagtcataagccttagcccgggttgtcaggagtttctgcaattctttcattctttgcttctgtttagtta

SEQ ID NO: 54800 - DNA, 569 bp, Homo sapiens
aagcaataaggattatttagtaaatagacatggaaactcatccagggttggctgatgagaagctggttagcaagggggtctrccttcagttaggacaaggtctgtgcttcccatgggttctctccacagcaggagggatgcaaacttccctttcctcccctgcacctaccctcaaatggcccagaggtcttcaggtgctagaatttctcaattaatgctgcacaaaataacagacaaccttgactgtcacagtctgttctcatgaagctagtctctgctcactacataaaacaggagagtaagaacaagggtgtttaatgctaccctagctcaaacatgtttctctctgtaggatgccaagaacctgggaaccagtgcatctgctgctttcccttctaggattctagcccagacaaaagaggcaaggggcatttcttcagaggccttgagcttcactacacaatgacccaggctctacatgcaccccctttatatatttctaccttgaaaaaaaatttttatataatattaataatatatatttttatataataaacatgtttatttca

SEQ ID NO: 54801 - DNA, 569 bp, Homo sapiens
aagcaataaggattatttagtaaatagacatggaaactcatccagggttggctgatgagaagctggttagcaagggggtctgccttcagttaggacaaggtctgtgcttcccatgggttctctccacagcaggagggatgcaaacttccctttcctcccctgcacctaccctcaaatggcccagaggtcttcaggtgctagaatttctcaattaatgctgcacaaartaacagacaaccttgactgtcacagtctgttctcatgaagctagtctctgctcactacataaaacaggagagtaagaacaagggtgtttaatgctaccctagctcaaacatgtttctctctgtaggatgccaagaacctgggaaccagtgcatctgctgctttcccttctaggattctagcccagacaaaagaggcaaggggcatttcttcagaggccttgagcttcactacacaatgacccaggctctacatgcaccccctttatatatttctaccttgaaaaaaaatttttatataatattaataatatatatttttatataataaacatgtttatttca

SEQ ID NO: 54802 - DNA, 569 bp, Homo sapiens
aagcaataaggattatttagtaaatagacatggaaactcatccagggttggctgatgagaagctggttagcaagggggtctgccttcagttaggacaaggtctgtgcttcccatgggttctctccacagcaggagggatgcaaacttccctttcctcccctgcacctaccctcaaatggcccagaggtcttcaggtgctagaatttctcaattaatgctgcacaaaataacagacaaccttgactgtcacagtctgttctcatgaagctagtctctgctcactacataaaacaggagagtaagaacaagggtgtttaatgctaccctagctcaaacatgtttctctctgtaggatgccaagaacctgggaaccagtgcatctgctgctttcccttctaggattctagcccagacaaaagaggcaaggggcatttcttcagaggccttgagcttcactacacaatgacccaggctctacatgcaccccmtttatatatttctaccttgaaaaaaaatttttatataatattaataatatatatttttatataataaacatgtttatttca

SEQ ID NO: 54803 - DNA, 651 bp, Homo sapiens
aaaaaaaaaaaaaraaagaaagaaagaaagaaagaaaaacagggacttgagtgtccttccacaggagtggccaaaacgctggctctggagagacccagtccctgtggtctgggcaagttacttcccctcggagacgatgtttcctgccctgtggaacagcgacatgtatagctctgggctcacagggtcaggctgggcacacagcagggtcaggctgggcacacagcgggctcaggaatgggaccccagtcactggactgactagacaagctttgaactgtggctggcccacatcagtgtcagggaggccaatgactatgtgagaaaaaaggcgccaatactgcctcattgaaaagaaaatgaggctctggttacttagatacatagaaaagtctgagaaaaatagggccccagacatcattatttttcattttcttttttcctcctttatttttctatttttttttcttttttttcttttttttagatggagttttgctcttgttactcaggctggagtgcaaatggtgtggtctcggcttactgtaacctccgcctcccgggttcaagcaattctcctgcctcagcctccggagtagctgggattacaggcatgtgccaccacacccagctaattttgtatttttagta

SEQ ID NO: 54804 - DNA, 1133 bp, Homo sapiens
taacttgagaagcaaaatgttaagatataattaaaattccccgcaccaccactgccacattgtrtttctttgtggttcactgactaaggatggaatatttcgaactcccagatgtctgactggctagaaaccatgctttttctctactcagtctaaagtaagctccaggtgtagtttctcctacagagacatcctgcagggattaggaggtgggcaggggatgagacggcactctaggatcctggttgtcacttacccaccccggtgaggtagagtagagctttgactggtggagtcttgggtccgtagtatgaaatctgaacctatgggagagcagatcactaatgacttctcttagtcattcaacaaacacccactggaccccctcctatgtgccggctcagggtagggcactggggagacaaagttgggcaagaactggtcctagcctgtaaggagtggccccatccgatgggaatggagggaaagcaaaaagcttgaatgactggtgctacagaagagcatcctatgggggcccagcaatggagacactctgcctggcagggtcgtttgtgaaggagtgtgctttgaggtagatctgggaaagggagtaggggcccagcagctggagatggggcagaagaggcgctagagagagctgatcataagccacagaactgactctggcaagcagaagggatcaaggaaagacccgaagaaccagaccctggaaaggccgggtcctgggggatctggggagcaggagctttgagtggatggaggtttcttcaggaagagatgagaaaacaccaatccactgtgcccaaggttcagaaatcctaggagaacacctcggattggccagaggagggtggagcatctgggttgacacatccaagcaaaatggcggtggggagtttccaaagcagagccaaagagctgccaccagaggaagaggagctcctgaggggccacgcggaggtgctcggacctgccctgtagacagtggaaatccaggaaaacgccacggccatcactgcctctgcctggaccatggtgtcagccttctgtctggtctccctgcctcccacccactccctagatcctatctacttgctaggccacagccattg

SEQ ID NO: 54805 - DNA, 1133 bp, Homo sapiens
taacttgagaagcaaaatgttaagatataattaaaattccccgcaccaccactgccacattgtatttctttgtggttcactgactaaggatggaatatttygaactcccagatgtctgactggctagaaaccatgctttttctctactcagtctaaagtaagctccaggtgtagtttctcctacagagacatcctgcagggattaggaggtgggcaggggatgagacggcactctaggatcctggttgtcacttacccaccccggtgaggtagagtagagctttgactggtggagtcttgggtccgtagtatgaaatctgaacctatgggagagcagatcactaatgacttctcttagtcattcaacaaacacccactggaccccctcctatgtgccggctcagggtagggcactggggagacaaagttgggcaagaactggtcctagcctgtaaggagtggccccatccgatgggaatggagggaaagcaaaaagcttgaatgactggtgctacagaagagcatcctatgggggcccagcaatggagacactctgcctggcagggtcgtttgtgaaggagtgtgctttgaggtagatctgggaaagggagtaggggcccagcagctggagatggggcagaagaggcgctagagagagctgatcataagccacagaactgactctggcaagcagaagggatcaaggaaagacccgaagaaccagaccctggaaaggccgggtcctgggggatctggggagcaggagctttgagtggatggaggtttcttcaggaagagatgagaaaacaccaatccactgtgcccaaggttcagaaatcctaggagaacacctcggattggccagaggagggtggagcatctgggttgacacatccaagcaaaatggcggtggggagtttccaaagcagagccaaagagctgccaccagaggaagaggagctcctgaggggccacgcggaggtgctcggacctgccctgtagacagtggaaatccaggaaaacgccacggccatcactgcctctgcctggaccatggtgtcagccttctgtctggtctccctgcctcccacccactccctagatcctatctacttgctaggccacagccattg

SEQ ID NO: 54806 - DNA, 1133 bp, Homo sapiens
taacttgagaagcaaaatgttaagatataattaaaattccccgcaccaccactgccacattgtatttctttgtggttcactgactaaggatggaatatttcgaactcccagatgtctgactggctagaaaccatgctttttctctactcagtctaaagtaagctccaggtgtagtttctcctacagagacatcctgcagggattaggaggtgggcaggggatgagacggcactctaggatcctggttgtcacttacccaccscggtgaggtagagtagagctttgactggtggagtcttgggtccgtagtatgaaatctgaacctatgggagagcagatcactaatgacttctcttagtcattcaacaaacacccactggaccccctcctatgtgccggctcagggtagggcactggggagacaaagttgggcaagaactggtcctagcctgtaaggagtggccccatccgatgggaatggagggaaagcaaaaagcttgaatgactggtgctacagaagagcatcctatgggggcccagcaatggagacactctgcctggcagggtcgtttgtgaaggagtgtgctttgaggtagatctgggaaagggagtaggggcccagcagctggagatggggcagaagaggcgctagagagagctgatcataagccacagaactgactctggcaagcagaagggatcaaggaaagacccgaagaaccagaccctggaaaggccgggtcctgggggatctggggagcaggagctttgagtggatggaggtttcttcaggaagagatgagaaaacaccaatccactgtgcccaaggttcagaaatcctaggagaacacctcggattggccagaggagggtggagcatctgggttgacacatccaagcaaaatggcggtggggagtttccaaagcagagccaaagagctgccaccagaggaagaggagctcctgaggggccacgcggaggtgctcggacctgccctgtagacagtggaaatccaggaaaacgccacggccatcactgcctctgcctggaccatggtgtcagccttctgtctggtctccctgcctcccacccactccctagatcctatctacttgctaggccacagccattg

SEQ ID NO: 54807 - DNA, 504 bp, Homo sapiens
agtttccaaaatattaccaagacactgtgctaagctgaaggtggaatatgcaatataaaagcagacatagtccctgtcctcagggagcttaccatctcattggggaaacaatcagtagacaaataaagaaaaataaaattagtgtcttaatagatagcaragtcaattctttaggaagaaatcatattcttctttaactttctttgtaatgagatatttatttagttatttatttaaattccaatagttttgaaggaacaggtggtgtttcagaaaggtagtgtttaagttctgagtttctttcctccactttgtcttttctgctgttactacttgtgattgcattatgaaattcttgtagtgtgtttttcagctctatcaatcaggtcagttacatttttctctatcctgactattttgtctatcagctccagtaatattttatcatgatttttgtcttccttgcattgggttacaatgtactgctttaactcagtaaccttc

SEQ ID NO: 54808 - DNA, 504 bp, Homo sapiens
agtttccaaaatattaccaagacactgtgctaagctgaaggtggaatatgcaatataaaagcagacatagtccctgtcctcagggagcttaccatctcattggggaaacaatcagtagacaaataaagaaaaataaaattagtgtcttaatagatagcagagtcaattctttaggaagaaatcatattcttctttaactttctttgtaatgagatatttatttagttayttatttaaattccaatagttttgaaggaacaggtggtgtttcagaaaggtagtgtttaagttctgagtttctttcctccactttgtcttttctgctgttactacttgtgattgcattatgaaattcttgtagtgtgtttttcagctctatcaatcaggtcagttacatttttctctatcctgactattttgtctatcagctccagtaatattttatcatgatttttgtcttccttgcattgggttacaatgtactgctttaactcagtaaccttc

SEQ ID NO: 54809 - DNA, 504 bp, Homo sapiens
agtttccaaaatattaccaagacactgtgctaagctgaaggtggaatatgcaatataaaagcagacatagtccctgtcctcagggagcttaccatctcattggggaaacaatcagtagacaaataaagaaaaataaaattagtgtcttaatagatagcagagtcaattctttaggaagaaatcatattcttctttaactttctttgtaatgagatatttatttagttatttatttaaattccaatagttttgaaggaacaggtggtgtttcagaaaggtagtgtttaagttctgagtttctttcctccactttgtcttttctgctrttactacttgtgattgcattatgaaattcttgtagtgtgtttttcagctctatcaatcaggtcagttacatttttctctatcctgactattttgtctatcagctccagtaatattttatcatgatttttgtcttccttgcattgggttacaatgtactgctttaactcagtaaccttc

SEQ ID NO: 54810 - DNA, 507 bp, Homo sapiens
ttttataaatataaatgaattaaatgtgtgaaatcaatactttctttgtatgtgagactaggacatacagagaccatattatgaaataaattctggataagtaatttagaatgtgatattgatctttaagataatttatcctaaaagattaaactgcaaattttgcctttttatggattcgggatgttgcttcggatatcactgccaactccaaataggtaattaaagacttagcttttagcatcacctgtttttattcattacatggcacctgaaagttacttttggcactaatattatttccttatattgaaaagttaaacagtaaacaatatttagacatktagaatacagaaaatttaacagaagttaaacaataaaccatctaggtggtaacaagaattatctcctaaaaatttgaatatagtctaagtttcataaactgaagctttgtaaaatgaaatggtaattctaaaggactagtctatttccatgttgtttatgtaa

SEQ ID NO: 54811 - DNA, 1146 bp, Homo sapiens
tccaaaaacacctcacttattaacaggaagtgacatatcaaacctacttactcattttatgctcctctgtattaaaattttgtgtgtgtgtgtgttggagatgagagtggagggtaggttgtaggggtgtctttgtcttctcaggctgctataaccaaataccataggttgggtggcttaaacaacagaaatttattttctcacagttgaggattgggagtccaaaatcaaggtaccagcagagtgaggtcttcctgaggattctctcattggcttgtagatggctgccttctctctgtgccctcacatggccttctctttctgcacaaacctccctggtgtctctctttattcctataagggcaccagtcacattggattagagccccatgcctatgacttcatttcactttgtctccttaaaggccttatctttaaatacagtcacattggggcttagggcttcaacataggaatttgggaggatgcaattcagttcataacaggagtacattatgagaacctttggtctcaaacttcctaagatagcaccacacattttctaaaacactgagttcaactacaaagtttttgcaactggcttgaatggaaaattctttatttctttttctaggagactatagtgttttttaaaattattttttattatgataaaatacatgcaatataaaatttgccattttaacaatttttaattgtacagttcagtggcattaagtacattcacaattactactatctattactaaaattttttaattgtcccaaagagagatttttacttattgtaaccagtaggcaatatctcctcatccctaccttctccccagcccttggtaatttcttatctactttctgtctctatgaatttgcctattatagatatytcacagtgtgcttggttccatgtctatagatcaaagaatgcttgagcttggagggatccagtggcccaagttccttcctggtacagatgaggcccctgaggctgagacgatgaagtagttgcccaaattaacatgactgcttaatggtaaagcagagtctcgacctcaagtttcctgcctcttcagggctctttccactaaaatgcttgaaatctctagaatgacaatcatagaatga

SEQ ID NO: 54812 - DNA, 1030 bp, Homo sapiens
ccaaatgactcctcaggaaatgacagtattttacctggaagaaagggagtcaagacaaagagtgggggcaggcacatgctcttccctgcagcaacggagaaaccttgttgttgggacagcaggcctttcccccatccctcatgccagaggcagtacctcaaatggattccagtgactcctgggtttctggcacatgcagccccagaagcctcaatacctgagtcttcgggactgagctctgggatgggtgcctgctcttgctgtcacacaggcttctcccctattgtataaggcgggcgggggactttactagcaattaccataagcagcctgtagtcaaccgctgactagagggagacacaaaccaggaatttgccccgaccacccttctacaaatacccattttagcattagatacatgagaacagggaagcacttgtcaatcaaaatcttggttggtgaagcttattttgtgccattttggcatgaaatgaattcccaagtactcctcgcacaactggggtcaagggtggcggggccctgtgctcagcaggacccggagaagctggagtgccacctgttctttagtgaagctgcagcgagttgtgtagacaccccaggcacgtggagtgcagtgcagggagcacaggaggtgtcccagggaggccaagggaggatgcccgctcccaccagcaagcacagccatgcctcagaaccagtatctcatagctttcagtgcagggctaggcatgctctgagcagcatgccttgcgattccctcacaattctgtgtttctattcccctccagttgtgcttattaggtaaaactgcaggctacaccttcctagtggcatttcccggtgggatgggtcagttgaattaaatttttgcctggacaactacagttaaacttwtttttttttttcattaaaaacatacagcacagaacattagtcttacatctttcttagtcttaaaaaatataaatatagagggataatttgtacaggatgtataggtatgtacacc

SEQ ID NO: 54813 - DNA, 642 bp, Homo sapiens
ttatttcacatactttttgtgtggtaagaacacaaaatatattctcagaaattttaaagtatacaatatactgttattaactctagtcactattatgtataatagatgtcttataactctcctaaagataattttagtatgttgtattagtactcctaaacctggtgataaagtctttaaagtattgccatgtgattatttaaggttttcattttaaaaataaataaagatcttsatatgtgtaattaagctttgcctaagtaaatttattcatattacatctcatttttatcaatggagcagtattatctcagcatccaggattaaagatcttccagaaaatttagtgatataatttctacatttgcatctaaactgaaatactttataaaagactattctctttgaaattcctgttattgcttcaaataaatggtgactgagaatgtctaaatacttttctcaaattatctgtttatctctgatacgatgcactgttggtcagatgagagggctataaaactttaaaaatactcaggcagcctgttcaatttaatgcgatgttattcttttaaaatttagcacaatcttttagatgtgagcagttgaaaccttccagtagtattattcaaccttatctct

SEQ ID NO: 54814 - DNA, 642 bp, Homo sapiens
ttatttcacatactttttgtgtggtaagaacacaaaatatattctcagaaattttaaagtatacaatatactgttattaactctagtcactattatgtataatagatgtcttataactctcctaaagataattttagtatgttgtattagtactcctaaacctggtgataaagtctttaaagtattgccatgtgattatttaaggttttcattttaaaaataaataaagatcttcatatgtgtaattaagctttgcctaagtaaatttattcatattacatctcatttttatcaatggagcagtattatctcagcatccaggattaaagatcttccagaaaatttagtgatataatttctacatttgcatctaaactgaaatactttataaaagactattctctttgaaattcctgttattgcttcaaataaatggtgactgagaatgtctaaatacttttctcaaattatctgtttatctctgatacgatgcactgttggtcagatgagagggctataaaactttaaaaatactcaggcagcctgttcaatttaatgcgatgttattcttttaaaatttagcacaatcttttaratgtgagcagttgaaaccttccagtagtattattcaaccttatctct

SEQ ID NO: 54815 - DNA, 671 bp, Homo sapiens
ttattacttttaacctcatatgaaccctatgagagacttgctgttaatattttcacgttatagatggaaagtctgaaactctggttaattaacttgtctaaggttgcacatgtattgtctgatagaggtttgatttaagctgtttaaattcaaaagcatatatttgtaatccttttttattttaattttttcaatcttatgaatatgtaatagaggtatatatttatgggttacatgcgatattttgataaaagcatacaatgtataatgataaagtctgggtaattgggaaattcatcacctcaaacgtgtattattgctttatgttgggaactttccaaatctgctcttctagtaattttaaaatatacaataaattattgttaactatagttgccctattgtgatactgaacactagattttattccttgtaactgtatttttgtacccatttaccagcccctctttatctccccatccccattaccctttccagcctctggtaatcaccattctattcactgcctctatgaaatcrttttttttagctcccacatatgaataagagcattgaccttaattactactatatacggccaattaataatgttttatattttttcctcaacatcttccctttgttgttaacttctctcttccttttaccta

SEQ ID NO: 54816 - DNA, 1015 bp, Homo sapiens
gggtcaacctctcctttctccaggctgaaccaagggtttctctcctggtccacataacttcctgctcaccagggttagcaactcataaagtaacctattgactggccaacctccctataaagactgagtatcgttttctttttgtttgtttttttgtttgttggttggtttttgtttttgttttcaatggcaccatcatagcgcactgcagcctccaacccctgggctcaagcaatcctcccacctcagcctcttgagtagctagggctacaggcaaatgccaccacacccagctaattttttaattttttgtagagacgaggtcttgctgtgttgggcaggctgaccttgaattcctggcctcaagtaatcctcctgccttggcctcccaaagtgctgggattataggcataaacaccatccctggcccactttatattcctaactakaatagtatctagcttgcagttggtgcttaataaatattggcttgaaatgaataagaaagaggatctagataccaaactcttttacatcttagagtgtatttctcagccactctccatgggcactagagaaaatatttgttgagaccaactttgaatgttatctactagcacagtgctagctgaagtgagtaatatctagacaactgcaaatcttggtataaactatattgtctcttctcctaaggaggctagtgacaataattcagagaggtggctgtcaagaaggctttggttcctgctagagatttaaaaattgctagagctttataaatacacaatctgtccaaaacaaccaacccttcttctcaacattgaggcctacaaaggcccccaataaatagctatttgctgactaaatatatgaatattctccagattgttctgtggatgacaacaacataagataatgaacaaatcatccagggcagacataagtgtcaaaggttctaaaaacttcggttcatgcatgtcatggagaccagtgtgggctgactgggatagctagg

SEQ ID NO: 54817 - DNA, 1015 bp, Homo sapiens
gggtcaacctctcctttctccaggctgaaccaagggtttctctcctggtccacataacttcctgctcaccagggttagcaactcataaagtaacctattgactggccaacctccctataaagactgagtatcgttttctttttgtttgtttttttgtttgttggttggtttttgtttttgttttcaatggcaccatcatagcgcactgcagcctccaacccctgggctcaagcaatcctcccacctcagcctcttgagtagctagggctacaggcaaatgccaccacacccagctaattttttaattttttgtagagacgaggtcttgctgtgttgggcaggctgaccttgaattcctggcctcaagtaatcctcctgccttggcctcccaaagtgctgggattataggcataaacaccatccctggcccactttatattcctaactatwatagtatctagcttgcagttggtgcttaataaatattggcttgaaatgaataagaaagaggatctagataccaaactcttttacatcttagagtgtatttctcagccactctccatgggcactagagaaaatatttgttgagaccaactttgaatgttatctactagcacagtgctagctgaagtgagtaatatctagacaactgcaaatcttggtataaactatattgtctcttctcctaaggaggctagtgacaataattcagagaggtggctgtcaagaaggctttggttcctgctagagatttaaaaattgctagagctttataaatacacaatctgtccaaaacaaccaacccttcttctcaacattgaggcctacaaaggcccccaataaatagctatttgctgactaaatatatgaatattctccagattgttctgtggatgacaacaacataagataatgaacaaatcatccagggcagacataagtgtcaaaggttctaaaaacttcggttcatgcatgtcatggagaccagtgtgggctgactgggatagctagg

SEQ ID NO: 54818 - DNA, 974 bp, Homo sapiens
cccttaaggccaggagtttgagaccagcctgggcaacacagcgagaccccatctctacaaaaaatttaaaaattagccgggtgtggtggtgcatcctatagtcccagctactcaggaggctcgcttgatcccaggaggcagagattgcagtgagctatgatggtgccattgtattccagcttggtcaacagagcaagactctgtctcaaaaagaaaaaaagggtgcatgtgtatgcatattcctaccatggaatttgaaacagcaacactccaaattcctcaagtcatggcttcccagagccacagtcccagtatgaagctgggaatacaaatgtgagccaccacacctggccttttttttatttttttaatcatggcctaccctgtgaacatttttttaaaatcttccaccatgctagctgtttaaacaatcgaagcaggccgggcacagtagctcacgcctgtaatcccagcattttgggaggtcgaggcaggcagatcacctggtcaggagttcaagaccagcctggccaacatagcaaaacctcatctccaactgatcctggaaatcttcacagagtagtccatgattaaaaaaaaaaaaaaaacaaggccgggcatggtggttcacaccagcactttgggaggccgatgtgggaggatcgcttgggcccaggagttcgagaccagcctgagcaacatggtaaaaccctgtctctactaaaaaatacaaaaatttgccacgcatggtggcacatgcctgtaagtcccaactacccaggaggytgaagtgggaggatcaactgagcccaggaggttgaggctgtggtgagctgtgatcacatcactgcactccagcctgggtaacagagtaagactgtctcagaaaaaaaaaaaaaaaaaaaggcttagaaaccacccacaggcatctattgtaacgatgtaagaaaaggacctaaggcaatccatgccca

SEQ ID NO: 54819 - DNA, 1851 bp, Homo sapiens
tgcataaaatcatgccctacttaaatcagtctctgttaccaataacgtcagtaaaaaagcaaatctaagcacatcctttccttcatttcctgtctcttttatgaccctactctttgcaaaatagtcccaactgtgaggacctttactcagtaaaggttccattagccttctgaccttgaattagatttggcctgtgtgagacactgacaagagattggaaagtgagaggaaagagttcacagtatttatttccacaactccaatccctttcctccctgactcactgtgggagctggtctcttttaaagccttttcttttggatggggcaatctggtctccttcccttgtccctttggatttaggtgttgctggtctttcagtgcatcactcaatcctttgtagtctttgcagtaaagtctctgattaaattctttgtgccagctgtttcccgcctgggccctaattaatatagcccccatcctagcctttacctatctcatttttccccatggagcctaccattctgtcacaggttacttaacaccactgtacagttaacctaggactcttcattgatccctgtttttacaaaatctgtcaactctttttagaatacttttaaccagctagttcatgccatacatttctcagtattaaacaccaacaccaccttttcacctgttcacacagtctctacttactttcaatctgtctttgactatctcacctaagcaaatacttttttgtcatttcccccagcacctggaacggtgcctgttcagtatagtaccttttaacaatagtggcccataacactactacagatatactgtagagaaccctatatataataaatttcagttacagaggtataaatatggtctggtaagtagatatattttggtaaaaattccctcccatcttttataaaaatgaagtaagcagagaaaataaaagagatactataaattcttaaatattggtgagtgttgttatttaaagactctgaataaaaggtaaaggcaccacattgaaggagcccaagtttctactctggttgccatctcttcactaaaaaaaattatgctctatgaatcacctctgtgagaatcaatctccactgaattcaacaggcaagcataaaaacaaaagaaactctggttcatttaacaatgacagaacaatgttaaatttagatttatggtaatagaacaaaccttaaatcctgtaatttccaatgcatttgtttttcttaattctgatttgcaatacaagcccaaaacccagattacaaaatatatcttcatttttaaaaaatctaaaacaaacagaaacatactcaatataatattagtctctcatactaccttgtcagttcagctgtctttgatttattacattcttagtacaaaataattgtttttaagattaaactgcatttctttctctgaatttggaaatttacattaggcaagctcttttgttccaaacactggactaaagctcgaagggcctgagataggaaaggcacactttttctctaatgggctcacaacgtaataggagaaatgtgttcttaagccagtaattacagtaggacaagtacggccaggtatactgtctgactctgtaaagtcatgctaaactctacctggggacaagatatggtagcatctcaartaagtataaaatagagaattatgatatcttcttagaagaagaacaaaacagcctgcagaaactattatctggactagactaagcttaagactccccctaggccaagtttatcctcctcactctgtccacttctgctaatctttccctagtctattacttctttttctatt

SEQ ID NO: 54820 - DNA, 706 bp, Homo sapiens
gatctcctgacctcgtgatccgcctgcctcggcctcccaaagtgctgggattacaggcgtgagacaccgcgccccgccatcttttttttttttttttccttgagatagagtctcactccatcacccaggcttgagtacagtggtgcaatctcagctcactgcaacctctgcctcccgggttcaaggccctcccaggcctgattctcatgcctcagcctccctccaagtagctggaatgacagacgtgcaccaccacacccagctaatttttttgtatttttaatagagttagggtttcactatgttggtcaggctggtctggaactcctgactctaagtgatctgcccacctcggcctcccaaagtgctgggattaaaggcatgagcccccgcgcccggcctgtttatgtttttaacttttttctaattgaatgtcatgttttctggcttcaaaaatggtgttaattgaagggttaaccaaaacagcttttaaatgtacacacgattactaaatgtatcctaattaaagaaatggtaaaagaagtgtgccttagaaccagagacatttgttgcctggtgcctaggagctatcaagtaatgattgctgctgctggcgggggcggtgcrggggttgggggtgggtagtggtgtgataacttaggttgtctttctgatggaggatgtcagtattgctgaaaaccttcca

SEQ ID NO: 54821 - DNA, 638 bp, Homo sapiens
gatttcactctagtcaaattcatggacacagaaagtagaataatggttgccagggctgggcggggaggaaggaatggggcattaytatttaatccgtacagagttttagttggggaagataagaaagttctggagatggatggtgattatggttgcataatgtaaatgtacttaatgtcacagaactgtgcacatgaaaatcgttaaagtagtagattttatgttttgtatattttactacaatttaaaaaatgcaatcaaaaaagcaaagccagctccaagtttttgcatccagagctcaggcatttcgtacttgtccctaccactagaacacatcccctaggtcccactctggcttcttcatctgtggccccctgcactgtcacacacattaccacagcaacttgcttccacacagactcagttcagctcaaactcactccactgcttccgccgtgaaggctttgaggagcacaaaccacacagctctagctttatcctgcttaggaagaaattttactatcatccacttctgtccaacctattttgttgggaatcttctgctgagaactctgagaaacatatcttcttgtctggttagctttttactagctcaaacatagagaaaagtgtaaaaa

SEQ ID NO: 54822 - DNA, 1205 bp, Homo sapiens
gtatattattacatatgtacatacatagtatatattatatatgtttatagtacacatacatataatctcaatgaacttaaatgaaatgaattcttttgtatggatattataatgtccctccaaaaagtaatatttttgaaataaacccaaaaagacacctttcaggatatttatataaaggagagtattaaaaagtgttcattttcgggtttccaatcwttttcactcttacaaaaagacccaattgagaattcagaagatttagttggaaatgagacagttgctgccaattggaattaagttacacattcatgacaattggagattaaaatgaatttatggggggagtaattttaaaactgccttctgtaaagcactatttataggagacgttaaaacatgcacgtaatttttttttctgtagtcaaatatagtttgaaaagcctgcatactctaaccccttttgagggtcacaatgctcattagcatcttcaaggtctaagatgttaactcccagggtcttctaaagtaatttgactatataaccctttattagagtaacagctgttagcctccttcaaatgcaatccaaggtggtaatcaccagatattgcaatttcagaaactctgacccagtgcttaagtgtcttttaaaaatatgaatcatgtaattttaacattggatattgtgtaattctctaaccaactgctgtgtgctcacattcaagacacatgattattatgcactctctgcttaaaaactccattgactgaacaatttatcatccctatcacttctttgccttctggtaacacagtatgccataaatacctttacccatgcttagaatatgcctctatcaaaattctttttatggatattccagagtcacacaaatataaatccatatgatagtttctatagtcagaatgtttgcgtcctcccccaaaatttacacattaaaatcctaacttccaatgtaatactattaggaagtgggaccttttgagaggtgatagatcttgaggacagagccctaatgaatgagttcagtgtccttagaaaggaggcctaagggagctcatttgttccctctactacatgaggccacagctagcagaccccaactatgaaccagaaagtgggctcacacaagacactgaatctgctttcaccttgatcttggacttcccagtctccagaa

SEQ ID NO: 54823 - DNA, 605 bp, Homo sapiens
acacactttctccctacagaaagaacaactacataattgactgaattgtaaacttttcaaaagattgccttgagtcatacaatcaagggttgtgaccataaaaagcaataaagggagtgggccagaagcatctcagaaaatttagggaaattcagaactcaggtgattttgaggcatgtgggtgaaggaccacgctttaagacacacagatcaatgtagagccatggtctcaaactggtatctcccaggccatactaagcccacaaatgggcttggtttggccactagtattcaaacagcattgttttgattcccattttcaacaactgaaatttttcacgtaaaaaatccaagttcctgacattttttgaaaaattttttgaaaactgagttgaccctgggctgtcagcccatgatgtggctactgccaatgggagctaagtggttagtgyttccctttatagtatccaggatgctccattcccagtgttcctctcacactgtgactcagacttaataccagtctactgactcaggctgcttgcttattgattttcccaaacgacctctataagcattttagtttctgatcttcatcttgcatt

SEQ ID NO: 54824 - DNA, 605 bp, Homo sapiens
acacactttctccctacagaaagaacaactacataattgactgaattgtaaacttttcaaaagattgccttgagtcatacaatcaagggttgtgaccataaaaagcaataaagggagtgggccagaagcatctcagaaaatttagggaaattcagaactcaggtgattttgaggcatgtgggtgaaggaccacgctttaagacacacagatcaatgtagagccatggtctcaaactggtatctcccaggccatactaagcccacaaatgggcttggtttggccactagtattcaaacagcattgttttgattcccattttcaacaactgaaatttttcacgtaaaaaatccaagttcctgacattttttgaaaaattttttgaaaactgagttgaccctgggctgtcagcccatgatgtggctactgccaatgggagctaagtggttagtgcttccctttatagtrtccaggatgctccattcccagtgttcctctcacactgtgactcagacttaataccagtctactgactcaggctgcttgcttattgattttcccaaacgacctctataagcattttagtttctgatcttcatcttgcatt

SEQ ID NO: 54825 - DNA, 603 bp, Homo sapiens
ttaaatgcattataaccagattgtaggaagtgcgtggaagtcataagaaaagccaatactctgtgatttcaatagcaacagagatcaggtacctactgaggaaatgaaacatgaactccacgaagacacggactattctgcagaatatgctcaccctcatcaggactagatttagatccaataacttgtccttagtgccttccagaagccctgctggccttcccatcggcaggcacttttgcctccatcccaattcctaagtcctcaatttccctggaatatcgaaatactagcttttccccacagtccaattcagtcctgtctcaactgtgatggactagcctctcaayttcgcttccatctggattacttcactaattggtgaattgtgtgtaactagctcttaaggatatacaacgcaacattgcttagtactgtggcatgtgtctacatctttattctctatgtaggttgtgaactttggggagcaggcatcatgtttcatacttttgtagtgtccactccaagaaaattctgagcatatgttcagcacattcttattacttaagtcacagtttcccacaggcttgctaaaggggaggg

SEQ ID NO: 54826 - DNA, 655 bp, Homo sapiens
ttaagcattctttatgctttattttccatcgtaagctacttaaatcttggctttgtttttaaaaaatcacaattttgtgctttaattccatgttattattgataacttatttataactaaaaataatatttaacttgtttggattattttctttattctggacctttctgagaatttgtttggtataaatgggcttargcagaattgctgacttctaattgatatgaaaatataaatttcctagacaccagcagattgctcttcaagatatcaacaccacgaaaccctgtctctactaaaaatacaaaaattagctgggcatggtagcatgaacctgtaatcctcgctacttgggaagctgaggcaggagaatcgcttgaacccagagggcggaggttgcagtgagctaagattgtgccactgcactccagcctggatgacagagtgagactttctcaaaataaaaaaaaaaaaaagaaagataccaacatcagatcatgttttcaaatgtagttccaagcgttcttattcattcacatcttttgcaccatttagcattattcagctcctgaaatgttgctaatttattggatctaaagtaatattttattttgtttaattgccctttctctgattacaaattaaactgggcatc

SEQ ID NO: 54827 - DNA, 762 bp, Homo sapiens
tgatcttttcagacctaattcttacaaccgactcacagatacaccaaatttctataaatttatttatcaggcctatttcttcccacttgtgtttttgcatttgtttacttttatcccacccaactggaatgtcctttattttgcctctagtaaaatctaactcttccattaaaattttaaagagactacttttgaggatttcccctaaatgttttacataaaatttgtatttctctcctgtgtgatactataaagcttttaacatatgtctcttttagtcttatcatatgctgttaaaatattttacatgaatattttactaccctatagtgtttacctcaagaactgaaatcatcacatttgtgtcttctgaatttgacgcacatacaaactcagtaaactgagttgcccacattaataagtgactgaattaggcaattgaaatgagtcattcaaggggaaattcaccagagtttatactaagaaggttgtaaataacagatctatcttgcttcattttcctggtctgtggcccataaagagacacctrggactcttaaatatcagaggaatgaggaattgatattcaaatatcagcatgagcaataaataacatttccaaatactctatttaccatttaatgtcaagttcctgaactatacaggtctacagaaatctctaaaatcatgaaacattttcaatcaagtaatgaattctataatctattctttgaatttattaaccttaataaaaatgtgatt

SEQ ID NO: 54828 - DNA, 556 bp, Homo sapiens
taagaatcccagttcagttctgattcaggaataagataactgataatttgaggctagaatttagtctacagatgttagaggccctacagtagaayactccgagcagaggaaacagcatctgtgaaggcctagaggcaaaaggaagcagggtatgtttgaaacactagaggtcagtgtgagtggagttcagactgatggcaagttactgatcatgagaggcttatgaaccgtgataagaagttcggactccatcctaaggacggtgagaagcaactaaaggattttaaacacaagtggtgaatttacagaactgcatttacataaagaaccatctagtggttagtggaaaatgatccaaggggagaaaacctgggggcaggaaactagcaaagggatgtgcaaaacgccacatagatggtgatcacttaggccagtggggacagggagaaactgatggattcaaatatgtagattatactgaatttggttattgactgaatgtggaaggtgagcaaaagaggcattaaggatgaatcctacatttctgcctagaaaa

SEQ ID NO: 54829 - DNA, 556 bp, Homo sapiens
taagaatcccagttcagttctgattcaggaataagataactgataatttgaggctagaatttagtctacagatgttagaggccctacagtagaacrctccgagcagaggaaacagcatctgtgaaggcctagaggcaaaaggaagcagggtatgtttgaaacactagaggtcagtgtgagtggagttcagactgatggcaagttactgatcatgagaggcttatgaaccgtgataagaagttcggactccatcctaaggacggtgagaagcaactaaaggattttaaacacaagtggtgaatttacagaactgcatttacataaagaaccatctagtggttagtggaaaatgatccaaggggagaaaacctgggggcaggaaactagcaaagggatgtgcaaaacgccacatagatggtgatcacttaggccagtggggacagggagaaactgatggattcaaatatgtagattatactgaatttggttattgactgaatgtggaaggtgagcaaaagaggcattaaggatgaatcctacatttctgcctagaaaa

SEQ ID NO: 54830 - DNA, 556 bp, Homo sapiens
taagaatcccagttcagttctgattcaggaataagataactgataatttgaggctagaatttagtctacagatgttagaggccctacagtagaacactccgagcagaggaaacagcatctgtgaaggcctagaggcaaaaggaagcagggtatgtttgaaacactrgaggtcagtgtgagtggagttcagactgatggcaagttactgatcatgagaggcttatgaaccgtgataagaagttcggactccatcctaaggacggtgagaagcaactaaaggattttaaacacaagtggtgaatttacagaactgcatttacataaagaaccatctagtggttagtggaaaatgatccaaggggagaaaacctgggggcaggaaactagcaaagggatgtgcaaaacgccacatagatggtgatcacttaggccagtggggacagggagaaactgatggattcaaatatgtagattatactgaatttggttattgactgaatgtggaaggtgagcaaaagaggcattaaggatgaatcctacatttctgcctagaaaa

SEQ ID NO: 54831 - DNA, 556 bp, Homo sapiens
taagaatcccagttcagttctgattcaggaataagataactgataatttgaggctagaatttagtctacagatgttagaggccctacagtagaacactccgagcagaggaaacagcatctgtgaaggcctagaggcaaaaggaagcagggtatgtttgaaacactagaggtcagtgtgagtggagttcagactgatggcaagttactgatcatgagaggcttatgaaccgtgataagaagttcggactccatcctaaggacggtgagaagcaactaaaggattttaaacacaagtggtgaatttacagaactgcatttacataaagaaccatctagtggttagtggaaaatgatccaaggggagaaaacctgggggcaggaaactagcaaagsgatgtgcaaaacgccacatagatggtgatcacttaggccagtggggacagggagaaactgatggattcaaatatgtagattatactgaatttggttattgactgaatgtggaaggtgagcaaaagaggcattaaggatgaatcctacatttctgcctagaaaa

SEQ ID NO: 54832 - DNA, 606 bp, Homo sapiens
ctaaattttgtttgttgaatagtaatgttcctagccttcattgcaattagaggtggctatgtaacacagttttggccagtgatccaatgacgcatgaaaagaggttttgcttttctaacatatttcttcctttattacttccttcttcctggtcttaaaactagaatgagacattggaggtgaagcarccttcatgtgactatttatgccttctgcatttatgttcagtggtaattcatcagtgaacaaaacagtcaaatgtctctccctttgtgtgtcttaaactctagtgtgtatcaacaaacaataatagaattaaataagtaaactatttagaatatgaacaatgataagcgctgtaggaaaaaatgttagaatacgagattctaagaagctagtgagtgtaatattaaacaaagtggtggggacagggagcaggccatgcagctagctagaagaggaactttccagagagtgagggggaaaaaatcaatgcaaagactgggaatatgcctgctatatttaacaaccagcaagcagctagtttactgaagttcagtggtgacagaggactagtagatgaggttagagaggacagacagatgg

SEQ ID NO: 54833 - DNA, 774 bp, Homo sapiens
ataaagtattttaggcaattaaaaatataaagcagtattttaggtgtgcccatcagcaatgactggtttgcaacctttttttttttttttttttttgagacagagtctcgctctgttgcccaggctggagtgcaatggcgcgatctcggctcacggcaacctccgccccgtgggttcaagcgattctcctgcttcagcctcccgagtagctgggattacagacacccaccaccaggcctgactaattttttttgtatttttagtagagacgaggtttcaccatgttggtcaggccgctctcgaactcctgacatggtgatccgcccgcctcggcctcccaaagtgctgggattacaggcgtgagccacsgtgcccagccctggtttgcaacattttattgaaagattgaagagcctggagaatacaccatgtggagctcattaaaacgcccaccatcttctcctgagggaggaacaaattctctggagaggggattccaaactaatccacttacccacctcactcctgctcccagggtgagagccactcacagaagcagcagaacattagcatagcatctactttaaaggtagaaaatagctcataaaataattttaattatagacttaaggaggattttttgttgttcttttttttctccagtgatttggaaaaattaaaatacgttttcaatttggcaaaggtaacctggaagttctcatcatgccatgcaaggtgtagacactttcatatttgatgttgagtttgcttgcg

SEQ ID NO: 54834 - DNA, 774 bp, Homo sapiens
ataaagtattttaggcaattaaaaatataaagcagtattttaggtgtgcccatcagcaatgactggtttgcaacctttttttttttttttttttttgagacagagtctcgctctgttgcccaggctggagtgcaatggcgcgatctcggctcacggcaacctccgccccgtgggttcaagcgattctcctgcttcagcctcccgagtagctgggattacagacacccaccaccaggcctgactaattttttttgtatttttagtagagacgaggtttcaccatgttggtcaggccgctctcgaactcctgacatggtgatccgcccgcctcggcctcccaaagtgctgggattacaggcgtgagccacggygcccagccctggtttgcaacattttattgaaagattgaagagcctggagaatacaccatgtggagctcattaaaacgcccaccatcttctcctgagggaggaacaaattctctggagaggggattccaaactaatccacttacccacctcactcctgctcccagggtgagagccactcacagaagcagcagaacattagcatagcatctactttaaaggtagaaaatagctcataaaataattttaattatagacttaaggaggattttttgttgttcttttttttctccagtgatttggaaaaattaaaatacgttttcaatttggcaaaggtaacctggaagttctcatcatgccatgcaaggtgtagacactttcatatttgatgttgagtttgcttgcg

SEQ ID NO: 54835 - DNA, 774 bp, Homo sapiens
ataaagtattttaggcaattaaaaatataaagcagtattttaggtgtgcccatcagcaatgactggtttgcaacctttttttttttttttttttttgagacagagtctcgctctgttgcccaggctggagtgcaatggcgcgatctcggctcacggcaacctccgccccgtgggttcaagcgattctcctgcttcagcctcccgagtagctgggattacagacacccaccaccaggcctgactaattttttttgtatttttagtagagacgaggtttcaccatgttggtcaggccgctctcgaactcctgacatggtgatccgcccgcctcggcctcccaaagtgctgggattacaggcgtgagccacggtgcccagccctggtttgcaacattttattgaaagattgaagagcctggagaatacacyatgtggagctcattaaaacgcccaccatcttctcctgagggaggaacaaattctctggagaggggattccaaactaatccacttacccacctcactcctgctcccagggtgagagccactcacagaagcagcagaacattagcatagcatctactttaaaggtagaaaatagctcataaaataattttaattatagacttaaggaggattttttgttgttcttttttttctccagtgatttggaaaaattaaaatacgttttcaatttggcaaaggtaacctggaagttctcatcatgccatgcaaggtgtagacactttcatatttgatgttgagtttgcttgcg

SEQ ID NO: 54836 - DNA, 607 bp, Homo sapiens
tctgtatccctccttttggttctgctcctctagagaaccctgaccgatataatatcatcaactgaagacaacgtgttttaccgaaccaccagcaggagatgtattttcacttattggagttgtttgaaagagttaacaagttagatatcttttaatattttaagaaaatcaaagtaatgattatatatatataatgtatagtgatagacattgcttacaaasttctgtttgatgtgtttacaataaagctgtgcgttaaatattattgttgtccttatttattgttgagaaactaaggcacagagagtttaaatggttattaaggttaaagagctaaaaagtggaagaacaggcattttaactcaggctgacttctgagaccttgccctgtacccaatgactaatataaagtgcatattaatagactttgttcagactattatcctcataatgtgcttttctatttcaaatttctttgatttttcaaattcattacatccttccaaaaggtattctttatttgtctgtccttaaatgaaatcattttgtaggatatattatcaattatgaaggtgatgaacggctgcattacttttcaaagagtaat

SEQ ID NO: 54837 - DNA, 607 bp, Homo sapiens
tctgtatccctccttttggttctgctcctctagagaaccctgaccgatataatatcatcaactgaagacaacgtgttttaccgaaccaccagcaggagatgtattttcacttattggagttgtttgaaagagttaacaagttagatatcttttaatattttaagaaaatcaaagtaatgattatatatatataatgtatagtgatagacattgcttacaaagttctgtttgatgtgtttacaataaagctgtgcgttaaatattattgttgtccttatttattgttgagaaactaaggcacagagagtttaaatggttattaaggttaaagagctaaaaagtggaagaacaggcattttaactcaggctgacttctgagaccttgccctgtacccaatgactaatataaagtgcatattaatagactttgttcagactattatcctcataatgtgcttttctatttcaaatttctttgatttttcaaattcattacatccttccraaaggtattctttatttgtctgtccttaaatgaaatcattttgtaggatatattatcaattatgaaggtgatgaacggctgcattacttttcaaagagtaat

SEQ ID NO: 54838 - DNA, 605 bp, Homo sapiens
tagattaaaggcagtgagttgagaaacttaaagcatggtccagggagaggctgttgaattgacttttctgatgctgcagtttcagagtcctcctggttgagtgtatagctctggtttcctttaacctaatgatgccctccctaggagctcacagtctttgggggaggacagccaccaaagtttaaaggaggagaagctcgtcttccagggctgaatggtgtgtatatctacacyctgggactgcataagaaggcacaaaccagggcgatggtgggtggaagttctgctctcagatcaacgctacatcagaagtgggcatatctgcacacagaggtgctgggtgtccattgttaacataccgctggctgtccagattactcttcccttccatcagcacaaagaagctcactgtagagttaggcaggttattcattgcacaaggacacctagcaagagcaggggaggttgaaatccagcccaggctttgcttgcagagccatgtgccctggcagggggctggaggcatcttttcctaatttgctcaaaagcacagtgagaaccctgagagtgcatgctcaaaggggtctctgcatgtggccttttgg

SEQ ID NO: 54839 - DNA, 638 bp, Homo sapiens
  misc_feature (1)...(638): n = A,T,C or G
aagctttgtttaaaaaaaaagaaaagaaaaaaggaaacaagaaaaggggagagggagacaggcaggcagggagggaggcagggcaaaaacataggaagaaaatatagatcaatagtaataaagtcctggagactgagaaagatctgaacatagtacaaatgacaaaagtcactttaaacgtttagataaatgttgtaatataaaatgtcaatgtataaaatatttaaaacctctatatgaaagacataaacaaagaaagaaatgatgaacaaactgggcaagggccaccttcaatacattatttatakaaaaaactttcaaatcaataaaaagtcaaccaccccaatagaataaaaaatgactatgtattttacaatacataataagtatatctagatggacagatagataatttccagcttttctcatattacaggtggtntggttggaaaatttcttgttcaagtctcccagtgacagatgtaagaaattctgaaggatgtatacccaggaatgcaactgcagatttgaaaggtttgaatatcctcaaccttactatatcatgctaactgttttctaaagtgtttgtactaatgtacactcccacctgcttggactatgaacacatttacttccct

SEQ ID NO: 54840 - DNA, 480 bp, Homo sapiens
catattctggccagtgagatggaagcagtcaaattctacaaactggaacaggcatcacaccgatcactctggcttattaccagtcagatccatgtgaagagttttatttcttcaggcctagtggtcccttgcaggatgcaatcatatatgtcataccactgatctttagttgaaaatgcctcttgtcacttgggtaagactgtagtcaacaatttcatccaccctttagggtctcctcccataggcagggggtgtgtgcagaatctcctccacctgactgtgtcctcactcygccatctcttcctgtagcactaaccatgaacattatgctgtctcccatgccagtatcccatactctcaggtacacaggaactagggaagtgactttcttaggatattacacagagaaggaatagtttttcctcataaatcctgcacctgcactctttgaaatatttatagtctttttttttttttttt

SEQ ID NO: 54841 - DNA, 480 bp, Homo sapiens
catattctggccagtgagatggaagcagtcaaattctacaaactggaacaggcatcacaccgatcactctggcttattaccagtcagatccatgtgaagagttttatttcttcaggcctagtggtcccttgcaggatgcaatcatatatgtcataccactgatctttagttgaaaatgcctcttgtcacttgggtaagactgtagtcaacaatttcatccaccctttagggtctcctcccataggcagggggtgtgtgcagaatctcctccacctgactgtgtcctcactccgccatctcttcctgtagcactaaccatgaacattatgctgtctcccatgccagtatcccatactctcaggtacacaggaactagggaartgactttcttaggatattacacagagaaggaatagtttttcctcataaatcctgcacctgcactctttgaaatatttatagtctttttttttttttttt

SEQ ID NO: 54842 - DNA, 583 bp, Homo sapiens
agaagcttggtttcctctgtaatccctcccttgttcctctccagggctttggggttctgtgccaaactctaggctacaaagatggagtggtctgtgtgaagaggaggcttcagcccaagctagtccctttagatggaccaaactggtttgccccgacctcaggaaactctttggacttggaccagacggtctacccaggactccccaggaattgagaaagattgtttttctctgtatggcgtctcttggagccactggtcctcttgccttttatcttctcagaggcaggggatgtaccagcaaagtatttcctatgctgtttttatagcttattagcctagggcaaggtggcttggcccctctgggtaacctgccaggtgagatctcggtgtttgcttgcatgtgcctcctggcctatccgtccyagagttggaggaggaggagccccaagatcagggttttcactctttggatgtgagtgtctctcagatggggagtatctttctaagaaaggggtacagagcatggaattcttaggctacaggcaggcagcgtctcagggtaagtggtggtaaattttgca

SEQ ID NO: 54843 - DNA, 752 bp, Homo sapiens
taaggctcagtagctctacaggaagtgggggaagcctggagcagccctgcacacacagcactaggccccgggtggaggaggtggacgaaggggacggggcagccagtctgctgcatggcaggttgcagggcccaggtgtccgggtcctgcctacagtggcccggtgacactcagggcccggccaccccagccccaggcaggacccctccctccccacagtgagccgactcactcggccctgaggctgaggcctccacccacgtccacctgccccagtgcccgagagccttgctgctccctgacttgcccgctgcgtctctggggatgtcagtcgagggaccctctgataggcctaggaaggtccccagggcccctgacaggggacctaggagaagggggtggaggagcagggccagggcttctggcccgtgggggggactctacctggtgcacggcctcggcgctctggcctctggtcctgacctsggtgcagggctcctgacgagtggctgtgggaggaggcagccgtgagcacaggtgtctgggttctgcccgacatggctcctccccagggcagttccctgcacttctggggccctggtctcggaccggcatctcctgaggctcacaccgcccccttgctctcagtgcggtgactgcttttgctccattccccgacatctgataaaacggccccttgctgtgcagatgcgggattagcacggtgattcccgctgggttacaggccacag

SEQ ID NO: 54844 - DNA, 791 bp, Homo sapiens
tgaacaagcatctactcctgcagggctgaattccacagctaaaaagtaatctcatattttttttcattktactttcaaataagatattttaccatattgtgtcttttggttatatgttcctttgaaaaaaaatgaagaccataagaaaatttactgcaatggtttccacttgaaatgagggaaaaaagaaagtatgattgaggatacattggaagcttcaattatacttgtaaaatggtgttattaatctaagtgtgagtaaaaaggtgttaattgtctatacattttggttgactgaaatattttttaaatgcagtgcttaaaagaaaaaaaaatgtaagtcaaaattagctacccactgctcaggtaggcagacagggtaaaatcgcccctgacccaccatatctttcctttctgtgataactgttagagtaaagaaacttgaggcttttggagatcaaatggacccccagacaccttcttgacaactccattttaatgtatattatggacttagtgcccttggaagacctctaaggattatctgagccatttctgtggagagagaagccagagtcttagaaattcattgtctggagacttttgctccagctttaagtttgttttgattccagactatcaagaatttgaggctggccagagaaagacctgacatttcattctgaacgtgctaccaactggcaaaaggaaaagttacttaaacttttaaaatgctatgtatgaattttcagtggtttgaaacaccagtttttatacctttgtgacagatt

SEQ ID NO: 54845 - DNA, 791 bp, Homo sapiens
tgaacaagcatctactcctgcagggctgaattccacagctaaaaagtaatctcatattttttttcattgtactttcaaataagatattttaccatattgtgtcttttggttatatgttcctttgaaaaaaaatgaagaccataagaaaatttactgcaatggtttccacttgaaatgagggaaaaaagaaagtatgattgaggatacattggaagcttcaattatacttgtaaaatggtgttattaatctaagtgtgagtaaaaaggtgttaattgtctatacattttggttgactgaaatattttttaaatgyagtgcttaaaagaaaaaaaaatgtaagtcaaaattagctacccactgctcaggtaggcagacagggtaaaatcgcccctgacccaccatatctttcctttctgtgataactgttagagtaaagaaacttgaggcttttggagatcaaatggacccccagacaccttcttgacaactccattttaatgtatattatggacttagtgcccttggaagacctctaaggattatctgagccatttctgtggagagagaagccagagtcttagaaattcattgtctggagacttttgctccagctttaagtttgttttgattccagactatcaagaatttgaggctggccagagaaagacctgacatttcattctgaacgtgctaccaactggcaaaaggaaaagttacttaaacttttaaaatgctatgtatgaattttcagtggtttgaaacaccagtttttatacctttgtgacagatt

SEQ ID NO: 54846 - DNA, 647 bp, Homo sapiens
tggatctggagttggatatgtctggttctgaagccttcatcaccactccagagacatctgggacaaactgcactccgatacaaatgccttaggactatagaagatcaaagagaaactgttccacgggcagttcacaacttgcagactaaagtgaatctctggacttctaaaatggaataatttagtaagtcacatgcaaatggcaggaggaagggaaggctgatcctcacwaagacaatgaacaagcattctctgtctcttctagaacaagttaacattagttagttctgcccaactgttaccaaaaggaatcagttataacttcatttatctatgatatgacatatacaacaaaatttaagctttctgaataagagacacaaactcaaaaaacaagacgattttcccctaaatattcaattgaaattttcagaaacagtgcttttattctaaacattcaaaacagtcttaaatattacttaccggtgattaaacttatgaccaaaggaaatccagtccttttcaattaatacctacacaagaaagaatacaaatatcttggagagaagcaaacgaaaaataagagaccacacaaccaataatgttgaggaattcagaggcacttgcagaagtccccatcctcgagt

SEQ ID NO: 54847 - DNA, 647 bp, Homo sapiens
tggatctggagttggatatgtctggttctgaagccttcatcaccactccagagacatctgggacaaactgcactccgatacaaatgccttaggactatagaagatcaaagagaaactgttccacgggcagttcacaacttgcagactaaagtgaatctctggacttctaaaatggaataatttagtaagtcacatgcaaatggcaggaggaagggaaggctgatcctcactaagacaatgaacaagcattctctgtctcttctagaacaagttaacattagttagttctgcccaactgttaccaaaaggaatcagttataacttcatttatctatgatatgacatatacaacaaaatttaagctttctgaataagagacacaaactcaaaaaacaagacgattttcccctaaatattcaattgaaattttcagaaacagtgcttttattctaaacattcaaarcagtcttaaatattacttaccggtgattaaacttatgaccaaaggaaatccagtccttttcaattaatacctacacaagaaagaatacaaatatcttggagagaagcaaacgaaaaataagagaccacacaaccaataatgttgaggaattcagaggcacttgcagaagtccccatcctcgagt

SEQ ID NO: 54848 - DNA, 586 bp, Homo sapiens
tgggcatggtggtacacacatgcaatcccagatacccagggggctgaggcaggagaatcacttgaacccgacaggcagagtttgcagtgcactgagattacaccactgcactccagcccgggcgacagtgaaactccatctcgaaaaaaaaaagaaatattagttaaggacagctgccaccagacaatcttagattccatcagaagggttagatggggatggtaacacatttaaatgacgagaatttgagaacacacacaccagacctcactaaagcagtgagacaccaactacaaaatgaagcaatttagggacaacaactatttcaaattatcttctggtttagaacagctagttttaaatgaggaactatactggaactgttatatactgtggaatgtggtcgataaattaaaacacgcatattaaacagactacatttttggtattttgtagttagattttcttaataaactaaagatatgatctaaatggaatttttcmttgaatcagtaattgctaacatgtggttttcaattgtgtgcagaacagtaagtagtctcagtgcttttgtgcacctatacat

SEQ ID NO: 54849 - DNA, 3005 bp, Homo sapiens
caccgagaagaaccatggtaataagagatacaggaagtttacctaaaacaccggtttgataaaaaaaaatttaatcagatcatgctgtttcctggagttcactcacagctgacttggggtgagggaagaatttgcatttctgacgagatcccaggtgatgttgaggctgctgttcgggggcctcgcttgagaagctccggtgcagagtggacgccttagtctgtttagggagccgcctaacaaactgtatccccagcctcagggcctcagcctttctgcctttccttccagggtggacccgaactccccggtgctcttggaggacccagtcctttgtgccttggcaaaaaagcacaagcgaaccccagccctgattgccctgcgctaccagctacagcgtggggttgtggtcctggccaagagctacaatgagcagcgcatcagacagaacgtgcaggtgaggagcggggctgtgggcctcaggtctcctgcacagtgtccttcacacgtgtgcttcttgtaaggctctcaggacagccttgggccagctccatttccctgtatttcctatgcatgaactctttgtgtacgtcataagggtttcttctactctagcacaggagaggcaacagaggtggagagaaataggatgggatcaaaactacagatttgggttagcgttaagtcagtgatatccatatccctctgctggggccatgtccttttctttattttttataatgaagcattgattagatgttctttagtctccaactcatggcggatttttcttcttgtatgtttatgtagtataaattccttatatttattctcttagaattttatctttgcgaagtgcttgtttaactctgcctttttttttttggcgaggtggttgtgtgtctttatttttatgtgtaggagaccatatttataccaataccttaggatataagacaaacccacttaatatagaggcttaatgcaaaagcatttattgagctcaaggttccatggttagaagattagcctgrgctcagcctaaactcagtccattccttctgttcctggctgggctctcatgtgtgttcagggcagtgaggcagctctgcttcaggatgtccctggggcatctgtgtgagcgcccccctctcccatgcagttctttatcctccagccatccagcccagggttcacctcagcacagggcatgaccccaaggcagtgagtggacatgtgcaaagccttttcaggtctaggctcagagctgccaaccattgcttctgggaaattctatcacctaatgcaagttacaggacaggtcagactcaaggggtggggaaaaagacaccacctcttgttggaaggagctggaaattcatataaccaagcaagtggatacagggacatgtgattgttagagggcatgttcctaattaatctatcatttatacgatatgtgtgaaataacatattaatagttatatgtatgaatatgaatatatataaattgatatactatttcatatattcttaagaatacatccaagtctctaaagaattaatatccagaatacatgcatatatatgttttctaattagttatatacagatatatgaaatatacatcatatatgatatatattataaaacctatgtcatatatatgacatatatcatgtatatgtatatgtgtcactatttgctaaaacattaagtaaaatcagtgtagaaatccataggatactctgaaataatgatacagagaatgagaaagaaagtaaaaaatgacaatgaaacaattgatgaatctaggtaatggcatttactatattattttaaaaatatttttagacattagaaaacccacaaaactaaaaggaaatattatgaaataactgtggaaattatcagtatttatacatatgtgtatgttctctaattcatctagtatatatagatatatgacatatgtgttatataatatatatgttagattaactagaaaccatacatatatatgtatttattctggatattaattctttagagacttaaatgtattcttgaaataacatctcccaaattttacctgtgttgtcatattctctgtggttatgttttcacaaacaaaagtttctatccttcatgtagactaatttttcatgcctctttcttgtggttggtgagtgttgtgtcttatcctatattgggaatatcacaatatattactgtgttatcttacaaaattgttaatattctttccttataaatttggttaattctaatgggattgactttttaaatactgtatgagataaggatccaaatatgcatatctaatttttgaatttttagcaaaatttcccaccaacatttattgaaaagttcatatttgctcacataacttgatttttttacctgtaacatatatgaaatgtccatgagcaattatctggcctctcttccatcttcagttaacttatttacttttctgtactatgatgttaaaaagtaagtttcacttccagtatggtacaaatatttttctaacttcttcatttatttaataatatcttagctattcttgactaatgtgttatttaaaactttgaatcatcttattaacttccacaagcaaataaatgtttagtctcttgttgacattgtaataagcctccagatcaatgtggagagaactaaatgtttgacaatattgagatttccaatgcatgatcataatatgaatttcccacttattaatagccttttaataaatatataattaatttcataactttctctgttactgatgattttaatagtttttgatgacttttcatttttgttttatggattttctaatatatagaaatattaaaagaataatgcaacaaatcttcttacctacattcatcaagtgttacattgctgtcattttttactctctttctctcattttctgtattactccttcagtttccctatggatttatacacttatt

SEQ ID NO: 54850 - DNA, 3005 bp, Homo sapiens
caccgagaagaaccatggtaataagagatacaggaagtttacctaaaacaccggtttgataaaaaaaaatttaatcagatcatgctgtttcctggagttcactcacagctgacttggggtgagggaagaatttgcatttctgacgagatcccaggtgatgttgaggctgctgttcgggggcctcgcttgagaagctccggtgcagagtggacgccttagtctgtttagggagccgcctaacaaactgtatccccagcctcagggcctcagcctttctgcctttccttccagggtggacccgaactccccggtgctcttggaggacccagtcctttgtgccttggcaaaaaagcacaagcgaaccccagccctgattgccctgcgctaccagctacagcgtggggttgtggtcctggccaagagctacaatgagcagcgcatcagacagaacgtgcaggtgaggagcggggctgtgggcctcaggtctcctgcacagtgtccttcacacgtgtgcttcttgtaaggctctcaggacagccttgggccagctccatttccctgtatttcctatgcatgaactctttgtgtacgtcataagggtttcttctactctagcacaggagaggcaacagaggtggagagaaataggatgggatcaaaactacagatttgggttagcgttaagtcagtgatatccatatccctctgctggggccatgtccttttctttattttttataatgaagcattgattagatgttctttagtctccaactcatggcggatttttcttcttgtatgtttatgtagtataaattccttatatttattctcttagaattttatctttgcgaagtgcttgtttaactctgcctttttttttttggcgaggtggttgtgtgtctttatttttatgtgtaggagaccatatttataccaataccttaggatataagacaaacccacttaatatagaggcttaatgcaaaagcatttattgagctcaaggttccatggttagaagattagcctgggctcagcctaaactcagtccattccttctgttcctggctgggctctcatgtgtgttcagggcagtgaggcagctctgcttcaggatgtccctggggcatctgtgtgagcgcccccctctcccatgcagttctttatcctccagccatccagcccagggttcacctcagcacagggcatgaccccaaggcagtgagtggacatgtgcaaagccttttcaggtctaggctcagagctgccaaccattgcttctgggaaattctatcacctaatgcaagttacaggacaggtcagactcaaggggtggggaaaaagacaccacctcttgttggaaggagctggaaattcatataaccaagcaagtggatacagggacatgtgattgttagagggcatgttcctaattaatctatcatttatacgatatgtgtgaaataacatattaatagttatatgtatgaatatgaatatatataaattgatatactatttcatatattcttaagaatacatccaagtctctaaagaattaatatccagaatacatgcatatatatgttttctaattagttatatacagatatatgaaatatacatcatatatgatatatattataaaacctatgtcatatatatgacatatatcatgtatatgtatatgtgtcactatttgctaaaacattaagtaaaatcagtgtagaaatccataggatactctgaaataatgatacagagaatgagaaagaaagtaaaaaatgacaatgaaacaattgatgaatctaggtaatggcatttactatattattttaaaaatatttttagacattagaaaacccacaaaactaaaaggaaatattatgaaataactgtggaaattatcagtatttatacatatgtgtatgttctctaattcatctagtatatatagatatatgacatatgtgttatataatatatatgttagattaactagaaaccatacatatatatgtatttattctggatattaattctttagagacttaaatgtattcttgaaataacatctcccaaattttacctgtgttgtcatattctctgtggttatgttttcacaaacaaaagtttctatccttcatgtagactaatttttcatgcctctttcttgtggttggtgagtgttgtgtcttatcctatattgggaatatcacaatatattactgtgttatcttacaaaattgttaatattctttccttataaatttggttaattctaatgggattgactttttaaatactgtatgagataaggatccaaatatgcatatctaatttttgaatttttagcaaaatttcccaccaacatttattgaaaagttcatatttgctcacataacttgatttttttacctgtaacatatatgaaatgtccatgagcaattatctggcctctcttccatcttcagttaacttatttacttttctgtactatgatgttaaaaagtaagtttcacttccagtatggtacaaatatttttctaacttcttcatttatttaataatatcttagctattcttgactaatgtgttatttaaaactttgaatcatcttattaacttccacaagcaaataaatgtttagtctcttgttgacattgtaataagcctccagatcaatgtggagagaactaaatgtttgacaatattgagatttccaatgcatgatcataatatgaatttcccacttattaatagccttttaataaatatataattaatttcataactttctctgttactgatgattttaatagtttttgatracttttcatttttgttttatggattttctaatatatagaaatattaaaagaataatgcaacaaatcttcttacctacattcatcaagtgttacattgctgtcattttttactctctttctctcattttctgtattactccttcagtttccctatggatttatacacttatt

SEQ ID NO: 54851 - DNA, 839 bp, Homo sapiens
gcacaaagtaagctctgtttcttcttcagcttcctctgagatattctcttcatctgcagtgttgtgcagtttcaaaatattttatctgggaatggatttctgcttatttttgactggttttcattgaccacttgggtgtttagagaggtctttcataaattttggaaacgtatcaatcttttaagtattgtctctgcaccctactgtctgatgaacttggttgttcccaattggcaatgatgtaatctaaaaataattaaagttttctattactttgataggtgtttgaattccagttgacttcagaggagatgaaagccatagatggcctaaacagaaatgtgcgatatttgacccttgatatgtaagtgattttggagatggatgtcctaatttattttcagaggaggaaygtaagatgggtgttgagagtgacctccacgccaggggcacagaggccaatgtgagacagaggtgagacaggagctttctggaagtctcctcctggattcactccagagctctgttctctggcagggagagtggccctgggtcagcatgggtcaacctgtgcctctgctctcgtgactccaaggaactttccagagcagccaagatcattgctgaatctgcaccttccatgtaggcctgctgtttgtgctactgtctagtgtacacactgtggatattgcccatgtggtcgcattagatgtttccaaatctgtgcttctatcttggttcttcccaacctgctcaatgtcttaccagatcaaaggcagttccgtcaatcttgtgggccaggttccaattcccacctctttcacatggaattgcttgct

SEQ ID NO: 54852 - DNA, 839 bp, Homo sapiens
gcacaaagtaagctctgtttcttcttcagcttcctctgagatattctcttcatctgcagtgttgtgcagtttcaaaatattttatctgggaatggatttctgcttatttttgactggttttcattgaccacttgggtgtttagagaggtctttcataaattttggaaacgtatcaatcttttaagtattgtctctgcaccctactgtctgatgaacttggttgttcccaattggcaatgatgtaatctaaaaataattaaagttttctattactttgataggtgtttgaattccagttgacttcagaggagatgaaagccatagatggcctaaacagaaatgtgcgatatttgacccttgatatgtaagtgattttggagatggatgtcctaatttattttcagaggaggaatgtaagatgggtgttgagagtgacctccacrccaggggcacagaggccaatgtgagacagaggtgagacaggagctttctggaagtctcctcctggattcactccagagctctgttctctggcagggagagtggccctgggtcagcatgggtcaacctgtgcctctgctctcgtgactccaaggaactttccagagcagccaagatcattgctgaatctgcaccttccatgtaggcctgctgtttgtgctactgtctagtgtacacactgtggatattgcccatgtggtcgcattagatgtttccaaatctgtgcttctatcttggttcttcccaacctgctcaatgtcttaccagatcaaaggcagttccgtcaatcttgtgggccaggttccaattcccacctctttcacatggaattgcttgct

SEQ ID NO: 54853 - DNA, 839 bp, Homo sapiens
gcacaaagtaagctctgtttcttcttcagcttcctctgagatattctcttcatctgcagtgttgtgcagtttcaaaatattttatctgggaatggatttctgcttatttttgactggttttcattgaccacttgggtgtttagagaggtctttcataaattttggaaacgtatcaatcttttaagtattgtctctgcaccctactgtctgatgaacttggttgttcccaattggcaatgatgtaatctaaaaataattaaagttttctattactttgataggtgtttgaattccagttgacttcagaggagatgaaagccatagatggcctaaacagaaatgtgcgatatttgacccttgatatgtaagtgattttggagatggatgtcctaatttattttcagaggaggaatgtaagatgggtgttgagagtgacctccacgccaggggcacagaggccaaygtgagacagaggtgagacaggagctttctggaagtctcctcctggattcactccagagctctgttctctggcagggagagtggccctgggtcagcatgggtcaacctgtgcctctgctctcgtgactccaaggaactttccagagcagccaagatcattgctgaatctgcaccttccatgtaggcctgctgtttgtgctactgtctagtgtacacactgtggatattgcccatgtggtcgcattagatgtttccaaatctgtgcttctatcttggttcttcccaacctgctcaatgtcttaccagatcaaaggcagttccgtcaatcttgtgggccaggttccaattcccacctctttcacatggaattgcttgct

SEQ ID NO: 54854 - DNA, 839 bp, Homo sapiens
gcacaaagtaagctctgtttcttcttcagcttcctctgagatattctcttcatctgcagtgttgtgcagtttcaaaatattttatctgggaatggatttctgcttatttttgactggttttcattgaccacttgggtgtttagagaggtctttcataaattttggaaacgtatcaatcttttaagtattgtctctgcaccctactgtctgatgaacttggttgttcccaattggcaatgatgtaatctaaaaataattaaagttttctattactttgataggtgtttgaattccagttgacttcagaggagatgaaagccatagatggcctaaacagaaatgtgcgatatttgacccttgatatgtaagtgattttggagatggatgtcctaatttattttcagaggaggaatgtaagatgggtgttgagagtgacctccacgccaggggcacagaggccaatgtgagacagaggtgagacaggagctttctggaagtctcctcctggattcactccagagctctgttctctggcagggagagtggccytgggtcagcatgggtcaacctgtgcctctgctctcgtgactccaaggaactttccagagcagccaagatcattgctgaatctgcaccttccatgtaggcctgctgtttgtgctactgtctagtgtacacactgtggatattgcccatgtggtcgcattagatgtttccaaatctgtgcttctatcttggttcttcccaacctgctcaatgtcttaccagatcaaaggcagttccgtcaatcttgtgggccaggttccaattcccacctctttcacatggaattgcttgct

SEQ ID NO: 54855 - DNA, 839 bp, Homo sapiens
gcacaaagtaagctctgtttcttcttcagcttcctctgagatattctcttcatctgcagtgttgtgcagtttcaaaatattttatctgggaatggatttctgcttatttttgactggttttcattgaccacttgggtgtttagagaggtctttcataaattttggaaacgtatcaatcttttaagtattgtctctgcaccctactgtctgatgaacttggttgttcccaattggcaatgatgtaatctaaaaataattaaagttttctattactttgataggtgtttgaattccagttgacttcagaggagatgaaagccatagatggcctaaacagaaatgtgcgatatttgacccttgatatgtaagtgattttggagatggatgtcctaatttattttcagaggaggaatgtaagatgggtgttgagagtgacctccacgccaggggcacagaggccaatgtgagacagaggtgagacaggagctttctggaagtctcctcctggattcactccagagctctgttctctggcagggagagtggccckgggtcagcatgggtcaacctgtgcctctgctctcgtgactccaaggaactttccagagcagccaagatcattgctgaatctgcaccttccatgtaggcctgctgtttgtgctactgtctagtgtacacactgtggatattgcccatgtggtcgcattagatgtttccaaatctgtgcttctatcttggttcttcccaacctgctcaatgtcttaccagatcaaaggcagttccgtcaatcttgtgggccaggttccaattcccacctctttcacatggaattgcttgct

SEQ ID NO: 54856 - DNA, 629 bp, Homo sapiens
tatttactaaaacattaagtaaaataagtgaagaaatccataggacactctgaaatagtgatacagagaacgagagaataaaaaatgacaataatgaaacaattgatgaatctaggtaatggcattcattaaattattttaaaaatatttttggacattagagaattcacaaaacaaaaatgaaaagttatgaaagactgtggaaattatcagtatttatacatatgtgtatgttctctaattcatctagtatatatagatatatatgatatatgacatatgtgttatataatatatatgttagattaactagaaaccatacatatatatgtatttattctggatattaattctttagagacttgaatgtattcttgaaataacatctcccaaattttatctgcgttgycatattctctgtggttatgttttcacaaacaaaagtttctatccttcatgtagactaatttttcatgcctctttcttgtggttggtgtgtgttgtgtcttatcctatattgggaatatcacaatattttactgtgttatcttacaaaattgttaatattctttccttataaatttggttaattctaatgggtatgacttttaaaatattatgtgaaataa

SEQ ID NO: 54857 - DNA, 629 bp, Homo sapiens
tatttactaaaacattaagtaaaataagtgaagaaatccataggacactctgaaatagtgatacagagaacgagagaataaaaaatgacaataatgaaacaattgatgaatctaggtaatggcattcattaaattattttaaaaatatttttggacattagagaattcacaaaacaaaaatgaaaagttatgaaagactgtggaaattatcagtatttatacatatgtgtatgttctctaattcatctagtatatatagatatatatgatatatgacatatgtgttatataatatatatgttagattaactagaaaccatacatatatatgtatttattctggatattaattctttagagacttgaatgtattcttgaaataacatctcccaaattttatctgcgttgccatattctctgtggttatgttttcacaaacaaaagtttctatccttcatgtagactaatttttcatgcctctttcttgtggttggtgtgtgttgtgtcttatcctatattgggaatatcacaatattttactgtgttatcttacaaaattgttaatattctttccttataaatttggttaattctaatgggtwtgacttttaaaatattatgtgaaataa

SEQ ID NO: 54858 - DNA, 629 bp, Homo sapiens
atccacccaccttggcttctcaaagtgctgggattacaggtgtgagccaccacatctggctaatgttattttttgtttcactgttgactcaatgtttcaacttgtggaacttccaatagtatttcttattgttcccttggagatataaaaagttcccagtaaatagatgtgtgctcacatctttacttagagaccatggaatactttatctcctttctcatttcatgkttggataaactgaagtccacatgattatgtctgaatattattcattctttcgttctatattctgatcagcttcaggtagctgaagttaacgttttccactttggagagtgagttgccttgggtttatagtaagtgacaaaaacaacaatctctctgttacataagaaggaaaactattagcaaatttcctaatccttggtcagagagataacctgttcttcacattagagaaggcctccaaactggctatcagttattcttttgcatattttgcctaattcttcttttagcaggcattttaatgggggaatgaagaattccatcaaatatctggaaatgcctgccacctgcaaactttgtgtgaaatttcccgtacatttccactctcctttctggatcct

SEQ ID NO: 54859 - DNA, 629 bp, Homo sapiens
atccacccaccttggcttctcaaagtgctgggattacaggtgtgagccaccacatctggctaatgttattttttgtttcactgttgactcaatgtttcaacttgtggaacttccaatagtatttcttattgttcccttggagatataaaaagttcccagtaaatagatgtgtgctcacatctttacttagagaccatggaatactttatctcctttctcatttcatggttggataaactgaagtccacatgattatgtctgaatattattcattctttcgttctatattctgatcagcttcaggtagctgaagttaacgttttccactttggagagtgagttgccttgggtttatagtaagtgacaaaaacaacaatctctctgttacataagaaggaaaactattagcaaatttcctaatccttggtcagagagataacctgttcttcacattagagaaggcctccaaactggctatcagttattcttttgcatattttgcctaattcttcttttagcaggcattttaatgggggaatgaagaattccatcaaatatctggaaatgcctgcyacctgcaaactttgtgtgaaatttcccgtacatttccactctcctttctggatcct

SEQ ID NO: 54860 - DNA, 520 bp, Homo sapiens
tggtatagagtgtgtcctgggtaccctactttaaaaaatctcctctggtaattcagatgctcatccaggcttgagaagtctggatttaaaataccaggtcaggggatgaccactggaataggtagccaaggtrgtgtggaggcagggctgcccctagaacgtgtgggcacttgtctatgtaagcaatgtgggtcactcaaaatcagcatgcggaggccattctagctgcccaaccttgcgtagtcccaccaaagaaatacttagtcagctagccgactaagagattagactactatgctggaaactctgattttcatggctgggacagtaggaattagttctccttgaaaattccagactctttgtacaaattacccttaatttcagctgaattggtgtagcataattcaggggtcaccttgtgctcccctctgaattagaaggctgaatctcagtggtcaacaatggggaagattcttttttttttttttttttttttttttacgggcactctttcttt

SEQ ID NO: 54861 - DNA, 1218 bp, Homo sapiens
tgcataaatggtgctgacctatctctagaagacttttcaccatgttgttcttttttttttaattggtttccactcagttctaatcattaagtactgaatttgtcatggtaacaagacccagttggacaaccatgtatgcaggtgccggctggcctgtcagatagctgtgggctctggacataagtgtgaactagccctcaagccaagcgtggggcaccaggctggtgggtaagcacagggcgctgcctcctgctactctggcctggcctctgtgaggtgttagcaccaccatgagctagggctgagccaacagtgctgtctcaggagcagcagcgcacgcccggggccacgtggtgtggaggggaaggccgcagccaccgctcataggaagagctccatgaatgttcatcttggccccacttcaaaaaatatcaaactcacaatggaggcagatttgggtctctcttgatgtcattaattacaaactaaatttgcactaaaataaaaaggtgttagactatcaaagaggggcctccgatccgtgtcacctgctcagggatggccactccaccctgagagcatggaggcatgtggatgccagggtcactgctgggcccatccccaccgggaagagcatagccacaaacttggtttcacgcagctgcagcaaggcgcatccctgagagcagtcctgatgggcccaccgcagccccctcgcccgggcagcatccacacccaccgcggcccctaagccccagctgcacccacaccagcacagagggcatccaggaggagccgccccttccctctcaccaggcttaggatgctcccacccatccccagcttggttcttgctttctgccctttcctgctgcctggcactcaacagagggacaatccgcagggacttgtgtagctgagtctgcggtgtacgggagccatcagccgagcacagctgagcaaagacagttgcctgccgygtacatgccagcaaacagtgcctgggtggagagaggagcccagggctgcagcccaccctggcaacagctcccctcctgggcaccgccagcccccatcatcatctcctgggcaccccagtctctctggctgtggtccaggcacacgtgccacgtgggggagactatacaggggcaggctgtgggggtggcctctgtgtggtgccaagaggaagccgggaagccaagctcccatgctcca

SEQ ID NO: 54862 - DNA, 1095 bp, Homo sapiens
tttagaccacacgttgggggtgatactgcctgaggtatgaagataggatttgtctgataggcagatgtaaaggctggaaattacctgcatgctaaaaagcaaaacagagattccaggttcccatggtggagggaagcacagaatctagtaagacaaacctcccagaaactcaccgcagcaaccaagttgaagagaggaacaaccacaggcctcgaacttcaggagcccatggtcagggagaaacagaagattcgggtgcagcagggcatggctcccaacagaggcgtgaggatgatgtgaggctggggtcttaggggctccagctcccctgctaatttggagagatgggggctagaggcagccctaggaaaggatgggaaggagctgcagccccccagcactacgagtctcggtcctgggtggctggcgagccctggggcactgtgctgagggcaccgtgggcctacactcgtggccaagcggcggcccctgggtggcctacactcgtggccaagcggcggcccytgggtgctcctctctgctgccatcaccgccttctgcctggctttgtgtcctctcccatcccctgctgggctccatcctgcacaggcccttcccatgacccactccccttcaacccatgtctgctgctgaccccccagcctagcctggggtcccatccttcctgctggcccttctgcctcccgttgcctcctcagcccaccctggtttcccaggcctgcgaccggcttcggactcagcgaggctcacattcaggagtaaagctgaggacctgcactcagagctgggcattttaaaaatcatctttatgaagttgatcagaccaaaaaaaaaaaaaaaaaagacaaagaacttgcttgcatcacaaacatcctagtgtccaccatccctcttcagaaatgagatctgacaatgcactccacatcccagaggcccccgaggtgagagtggcagtcctgaatttggtgttaacattctttgcgtgggtttgtacttctaatgcctaggcttattcctccaagtgatacagatcacactctgcagtagcacaggagatatagagacctattacct

SEQ ID NO: 54863 - DNA, 702 bp, Homo sapiens
tggctgttgaccagctgcaaggtctaggcacatccattactttttctgagctgtctttttctcagctgacccctaggaaccttccagttctctcaagctctgattcatcactggctgtctaagtcactcagacaagtagggaggggcccttgcagagtgaacagggctggggcttgtgtcctattgttgcaggtcagggaaagcgggatggttgtagcaccgactggcttcccagcaacagcttgtccactaagctgatttcctgtgcctggctttgtcttctgtgtggcctaaccccctctttgcgttggcgtggaacacactcctaacttggctggctttagggcaggggtcctcacctagccgacatggggctcctcccagatgtgacatgtcaataattgaagtcctcctctgcttcgaggatgagagtttatgccgggggctatttcaaacaaaatgtgctaacaggaagttgaacttttcttttgccgctgaactaaccagtaaaatgatgacagatgacatgtgttctatcaaccaggtaatgtcaaagataaactagggacagagcatgggccttgacgtcctctaggctgtgttcaaagatsagcctcctcatttgccagttgtgtgacgtgaggtagatgatctgacctgatcctcagtttcctcatccgtgaaatgggtgaacacataccc

SEQ ID NO: 54864 - DNA, 1850 bp, Homo sapiens
atcctagttattttatttgtgaatatgacttatttctttatgtgctctgagggtagttggtgctacctgacttcatgttgattgtatcctgccatgtgactatcttctttcattgcctatggcagcttttccagttgattctcttataaaccatatcatccttaaataattatcctttccaatttgttctttcctttgactaactacatgggctaggacctatagaacaatgttaaattatagttgcaagagtaggcatttgtttagtttttgaacttaatttgaaataagataatttatcaagttaaggaagcatccacctattcccatttaactgagttttaaaacaacgttgaattttaccaaaacgcctattaagcatcgatgagagatcatataattttttttcttttgatctactgatacgtagaattaaatagttacctaaaatttgaacctccttactttcccaaaacaaacctcacttggtcatggtatattagccttttaacaagcagtaaggttctgtttgttactattttacttaggattttgcactgacattcagaaatgagaatgatcttgaatttattatgttttatccttgtaagattttgatatattatgttcatttcaaaataaaaatttgcacatttcttctccatgcactagaatatttaaaatggtattaacagttacctgagttacctgttccttaaaagttcctgaagtttccctgtgaagccatcttagtccggtggctttggtggggttaactctgtcctctatttcttccacaataatttttcacttttagtaattttattttcttcaaaaaccatccactttctgtgcaaatttatttgcacagagttcagcaaagaagtctctcatctttttgatttgtctattatttctcacttatacctactttgtatatttatgctttttctcttctttcttgattagctaagctaataaggacctatcctgttgctacgtgttagaacgtgggaatcaggagggcaaaaagcttttaataccaaaaggatcaggtcctgatgctagaaatatgcatcctatgtcagaaagttggccccagaccagttaggaagccacctacaccttctcaccaggtaacgcctggaaggatccacagaacaaagtgtcaccatcaccaccaccacctccccatcccacaggcccagtatgttcagagctcaaccacacactgggtctcacttggtctcaataaaaggtaggtaggggcattaccccctacagggtcacaataggaaaaagacttagtcaaaagaaaatgagtgctctgtggggagccagcagacctggttcttgctctactcgtggggacctcagagcctgcacatctaacatgaggagactggatctgtacactgtacgagtgaaggtttctttagacaccaaggaagatttggaatagctcgtggatggacaactgcaaaacgcagaggcctaaagtgtgtggcctccatgaagggcttacaaatgccctgagcagatagacggaatgagaataaaacccagagtgaactgccttgacagtgggggtctatttctttcacacagtgctttatcatttttctttctttttttttttttttttgaatcaacacacatcattttgggaagawtaaccaattcaaaaacaatcttcactatatacactgggacaacagcaagtggtgaatgagtctcttcccccttctctgtcccccacagggaaatatgtttgggagccctactctctgcccagtaattccacttctagaagttatcctgagagaacaaccacaggtgagctcaaagac

SEQ ID NO: 54865 - DNA, 1581 bp, Homo sapiens
ggatcccagccctgctgattcatccactcactccatggcaagacagccactgacagctctgtcctggggcccacccgggcctggcctctgtgcaggctagcactcagyatgcttagtgccacactcggcccaggagaaatgacccagccctgggctcagagaccccacagtgggtggatggaaaacagtcatttaaatacaactgtgaagggtgctgtggaggaggggctcgaggtccccagtgtgggatggggtggtcatggaacgtttccctatctaagtgggaaaagtgagagccaccaggaaaatggcgggggtggggggggagaggaattatgcaaagacccagaaggatgaagaagactgttggattagaggaggttaaagacacagacaggcttggacatggtggctcatgcctgtaatcccagcactttgggaggccaagacaggaggatcacttgaggccaggagttcaagaccaacctgggaaacacagtgagaccctatctctacaaaaaaaaaaaaaattaaaaaaaattagccgggcatggtggtgcacagttgtagtcccatctactcaggagactgaggtgggaggatcgcttgagcccaggaggtggaggctgcagtgagctatgattgcaccactgcactccagcctgggcaacacagcaagatcctgtttgtaaaaacaaaacaaaacaaaacaaaaaacccagcttgagatggccagggatttccagaggccctaggcagaccgccttggagagtaagggagaccctgaagagctcccatggaagggccagcagcctggggctggagatgccacctggatggattcctccagctgtgtggactaggggacagggtgaggagataatggcctggactacatggaaggacgtcgccctgagccattgaaaagggctgtggggtccatgaccactcctggctttcccttgactatgatggagacagtagcttccagtgtaaaatgtgagctcagttcctgactcgtgtctagcgggtggtgcctggtctttggctggcgatgctccatgtcacctatgcccagaaactgggccatgccctttgtgaggacctgcccacaacgtcgtcgttcccgcagggtcccctgggaaccgggctgcccgagacccggccctgccggggttccctgcgccccagaccggaacccccagggctttggtcgttcccacagccgtcccgcgggccccctccacggtgcgtcgcctgggccccagcggtcgctaggctgcagcctggggctcccggccatcccgggcgctggcggcggtggaggcagcagggcggatggcggagcccggccgcccgtgggcccaggcgcgtagtgcgtacagagccagcgaggtgctgcggcgcggcacgggccgccggcgggatccggggccgcaatccaatgggccgggccaggaagacgcccgagccccgggccggatggctcgcctgcgcggccagctccgggccgaagcggcttcgcggtccgaggtgccgcggctgctgaagctggtggagcgtgcgggggccggggcggc

SEQ ID NO: 54866 - DNA, 1581 bp, Homo sapiens
ggatcccagccctgctgattcatccactcactccatggcaagacagccactgacagctctgtcctggggcccacccgggcctggcctctgtgcaggctagcactcagtatgcttagtgccacactcggcccaggagaaatgacccagccctgggctcagagaccccacagtgggtggatggaaaacagtcatttaaatacaactgtgaagggtgctgtggaggaggggctcgaggtccccagtgtgggatggggtggtcatggaacgtttccctatctaagtgggaaaagtgagagccaccaggaaaatggcgggggtggggggggagaggaattatgcaaagacccagaaggatgaagaagactgttggattagaggaggttaaagacacagacaggcttggacatggtggctcatgcctgtaatcccagcactttgggaggccaagacaggaggatcacttgaggccaggagttcaagaccaacctgggaaacacagtgagaccctatctctacaaaaaaaaaaaaaattaaaaaaaattagccgggcatggtggtgcacagttgtagtcccatctactcaggagactgaggtgggaggatcgcttgagcccaggaggtggaggctgcagtgagctatgattgcaccactgcactccagcctgggcaacacagcaagatcctgtttgtaaaaacaaaacaaaacaaaacaaaaaacccagcttgagatggccagggatttccagaggccctaggcagaccgccttggagagtaagggagaccctgaagagctcccatggaagggccagcagcctggggctggagatgccacctggatggattcctccagctgtgtggactaggggacagggtgaggagataatggcctggactacatggaaggacgtcgccctgagccattgaaaagggctgtggggtccatgaccactcctggctttcccttkactatgatggagacagtagcttccagtgtaaaatgtgagctcagttcctgactcgtgtctagcgggtggtgcctggtctttggctggcgatgctccatgtcacctatgcccagaaactgggccatgccctttgtgaggacctgcccacaacgtcgtcgttcccgcagggtcccctgggaaccgggctgcccgagacccggccctgccggggttccctgcgccccagaccggaacccccagggctttggtcgttcccacagccgtcccgcgggccccctccacggtgcgtcgcctgggccccagcggtcgctaggctgcagcctggggctcccggccatcccgggcgctggcggcggtggaggcagcagggcggatggcggagcccggccgcccgtgggcccaggcgcgtagtgcgtacagagccagcgaggtgctgcggcgcggcacgggccgccggcgggatccggggccgcaatccaatgggccgggccaggaagacgcccgagccccgggccggatggctcgcctgcgcggccagctccgggccgaagcggcttcgcggtccgaggtgccgcggctgctgaagctggtggagcgtgcgggggccggggcggc

SEQ ID NO: 54867 - DNA, 639 bp, Homo sapiens
cccagagggacagaagtgggggggcgtctcctagcaatgggggcctcaccctgctgtgccaagccagggtgttcacagtcagttctatttactgagagcctgctctgtgccaggcacattgggatagggggatgctgttggcacggagctcctgggggtggatgcattgggggtgggtacaaccaatgtgagagacaccctggcaggagactgtgggatcttggacaacgagtacctgcccaagacctagggagtcagggagggctycctggaggaggtgacagctgagccaagagctgaaggatgacaaagggttaagtggtgacaggggaaggggtgagaatgcgaaggggcacaagagggctaggcctggaggtgggcacggtgcccaggaggtgagggcttcctgggagaccatgggtgttggctccagtgaggtctccggtacttgcgcaagtgtgagagtagatgtggtgctgggtaccacggagcagggaaagtggggagcgaatccccaccctcgcagagcttaaaagcaggggtggacccagcaagtctgtgcaaactgtccagtatggactgagtgtccagtgctcaggaacattcccgggccctcatagcactgtggcactcaggtgc

SEQ ID NO: 54868 - DNA, 639 bp, Homo sapiens
cccagagggacagaagtgggggggcgtctcctagcaatgggggcctcaccctgctgtgccaagccagggtgttcacagtcagttctatttactgagagcctgctctgtgccaggcacattgggatagggggatgctgttggcacggagctcctgggggtggatgcattgggggtgggtacaaccaatgtgagagacaccctggcaggagactgtgggatcttggacaacgagtacctgcccaagacctagggagtcagggagggctccctggrggaggtgacagctgagccaagagctgaaggatgacaaagggttaagtggtgacaggggaaggggtgagaatgcgaaggggcacaagagggctaggcctggaggtgggcacggtgcccaggaggtgagggcttcctgggagaccatgggtgttggctccagtgaggtctccggtacttgcgcaagtgtgagagtagatgtggtgctgggtaccacggagcagggaaagtggggagcgaatccccaccctcgcagagcttaaaagcaggggtggacccagcaagtctgtgcaaactgtccagtatggactgagtgtccagtgctcaggaacattcccgggccctcatagcactgtggcactcaggtgc

SEQ ID NO: 54869 - DNA, 623 bp, Homo sapiens
atcgcctttgctattctgtcttccccggacgggtgttcgagagcaagtgagttctgactcgagctgctttttcatgaagggggaggtggcctggcagacagacagcagttccagtcccaaggaaagatgcagaagtcaagatgttggtcactttggtccaggcagggaagtgggagctccaaggccctttgagggtaggggagtgagcagagtgatggggaagccaagaccactygctgctcccctgctcaggcaggtgcctgaggttccagtgataagaggacacctggtccaaccaggactgtggacagctctccagggtcagggacaacccaggcccgggaggaaggcagggctgggcgaggacctcggccctggacccgcacgtaccttgataatgtggtgccgagagaagccctttggaagctccttaatgtagcaccagtacgtggtctcctggctggggatctggatattgggagcttggacctccatggtgcacgcgtctgagggcaactccggttcggggatattgggcttcaggagctgcaccctctgcagccccatctgcaggcccgagccgttgatggcctccagtgaccggaacggctcctccaggatcc

SEQ ID NO: 54870 - DNA, 648 bp, Homo sapiens
aagggtccgctgggggcaggatcgcccattgagaacctcagtgcatgaccaccctgcttgtttgcagggctgtaagccatgtagtggcagcgggggccgggcctccagagccctccagcgctcatgctggaggagatgtcgccctgcatgacggatgttacccagatggagctcagagaggctggatgggccaggctgctcagggccgcccggctaaagaaacccagaaagcccccgatatgtgtcagtgacacrgatgtggccttcaggagggggtgggcgggtgcacggccgcgtttggaggcagctccctgtctctccttcctgtatgttcgtctggggtttgggtggggaaatgctaaggaaggttggggaggagcgaggtcctggcctgcagagggactggaggtcctgggggacaaatctgggttctgttagcagataaacaatctggcgatgactgtcagggaggaggcggccagaaactagggagatcccggcggctctgctctcacctcccctctccagaggctgcacaggggcaggaagcagggccggctgtgtctagcttgcttcctgcctctgtggtgcaaagctgcctgctgggaccagagagggtgggcactcagagagagcagcacagctgga

SEQ ID NO: 54871 - DNA, 648 bp, Homo sapiens
aagggtccgctgggggcaggatcgcccattgagaacctcagtgcatgaccaccctgcttgtttgcagggctgtaagccatgtagtggcagcgggggccgggcctccagagccctccagcgctcatgctggaggagatgtcgccctgcatgacggatgttacccagatggagctcagagaggctggatgggccaggctgctcagggccgcccggctaaagaaacccagaaagcccccgatatgtgtcagtgacacagatgtggccttcaggagggggtgggcgggtgcacggccgcgtttggaggcagctccctgtctctccttcctgtatgttcgtctggggtttgggtggggaaatgctaaggaaggttggggaggagcgaggtcctggcctgcagagggactggaggtcctgggggacaaatctgggttctgttagcagataaacaatctggcgatgactgtcagggaggaggcggccagaaactagggagatcccrgcggctctgctctcacctcccctctccagaggctgcacaggggcaggaagcagggccggctgtgtctagcttgcttcctgcctctgtggtgcaaagctgcctgctgggaccagagagggtgggcactcagagagagcagcacagctgga

SEQ ID NO: 54872 - DNA, 645 bp, Homo sapiens
ataaatacaaccagataatcatgaagagacagacttccctgatgcttcaggagttttcaaaaatccatttgctttcagggtttaaatgagcaataaatcccgtgtcatgctaaggcccaagctgacttatacccttctctgtgcatgtggagataactccaacagtggcggaaggtattacttatgcagccaggaaaaaaaaaaaaccacaggcgactgttagctgagcacagccccgtgcccacagcaagttctgtgcgtgagcctttcccagcttcacaatagctgtgggaggtgggagaacaggcagcgggtgaggtcatccacccagcgtccccaaggtggtgaggcacagcctagcacctatctcttaggccacttctgcaccttgcacaaatgaaaagaagaagcaccattcagagagagagaaaaagtgtgtgcatgtgtgtgcttctgcgtgcatatgtgtacatgtgtgtgyatgtgtgcgtgtgtgtgtgcattgtgtttgtgtgtgtctatatatggtgaaagatgctggtgcaacagagagagggaagtatttttttcagtttctgagacagcatcacctggccttgccatgctaaaagctgaccctgctcactccaccctcaggtatgggtg

SEQ ID NO: 54873 - DNA, 645 bp, Homo sapiens
ataaatacaaccagataatcatgaagagacagacttccctgatgcttcaggagttttcaaaaatccatttgctttcagggtttaaatgagcaataaatcccgtgtcatgctaaggcccaagctgacttatacccttctctgtgcatgtggagataactccaacagtggcggaaggtattacttatgcagccaggaaaaaaaaaaaaccacaggcgactgttagctgagcacagccccgtgcccacagcaagttctgtgcgtgagcctttcccagcttcacaatagctgtgggaggtgggagaacaggcagcgggtgaggtcatccacccagcgtccccaaggtggtgaggcacagcctagcacctatctcttaggccacttctgcaccttgcacaaatgaaaagaagaagcaccattcagagagagagaaaaagtgtgtgcatgtgtgtgcttctgcgtgcatatgtgtacatgtgtgtgcrtgtgtgcgtgtgtgtgtgcattgtgtttgtgtgtgtctatatatggtgaaagatgctggtgcaacagagagagggaagtatttttttcagtttctgagacagcatcacctggccttgccatgctaaaagctgaccctgctcactccaccctcaggtatgggtg

SEQ ID NO: 54874 - DNA, 645 bp, Homo sapiens
ataaatacaaccagataatcatgaagagacagacttccctgatgcttcaggagttttcaaaaatccatttgctttcagggtttaaatgagcaataaatcccgtgtcatgctaaggcccaagctgacttatacccttctctgtgcatgtggagataactccaacagtggcggaaggtattacttatgcagccaggaaaaaaaaaaaaccacaggcgactgttagctgagcacagccccgtgcccacagcaagttctgtgcgtgagcctttcccagcttcacaatagctgtgggaggtgggagaacaggcagcgggtgaggtcatccacccagcgtccccaaggtggtgaggcacagcctagcacctatctcttaggccacttctgcaccttgcacaaatgaaaagaagaagcaccattcagagagagagaaaaagtgtgtgcatgtgtgtgcttctgcgtgcatatgtgtacatgtgtgtgcatgtgtgcgtgtgtgtgtgcattgtgtktgtgtgtgtctatatatggtgaaagatgctggtgcaacagagagagggaagtatttttttcagtttctgagacagcatcacctggccttgccatgctaaaagctgaccctgctcactccaccctcaggtatgggtg

SEQ ID NO: 54875 - DNA, 645 bp, Homo sapiens
ataaatacaaccagataatcatgaagagacagacttccctgatgcttcaggagttttcaaaaatccatttgctttcagggtttaaatgagcaataaatcccgtgtcatgctaaggcccaagctgacttatacccttctctgtgcatgtggagataactccaacagtggcggaaggtattacttatgcagccaggaaaaaaaaaaaaccacaggcgactgttagctgagcacagccccgtgcccacagcaagttctgtgcgtgagcctttcccagcttcacaatagctgtgggaggtgggagaacaggcagcgggtgaggtcatccacccagcgtccccaaggtggtgaggcacagcctagcacctatctcttaggccacttctgcaccttgcacaaatgaaaagaagaagcaccattcagagagagagaaaaagtgtgtgcatgtgtgtgcttctgcgtgcatatgtgtacatgtgtgtgcatgtgtgcgtgtgtgtgtgcattgtgttygtgtgtgtctatatatggtgaaagatgctggtgcaacagagagagggaagtatttttttcagtttctgagacagcatcacctggccttgccatgctaaaagctgaccctgctcactccaccctcaggtatgggtg

SEQ ID NO: 54876 - DNA, 689 bp, Homo sapiens
ggctcttatgatgaaggagggatcacctcgcccctcccccgggactagtggcatagtggacactcgacagctatcgcctttgctattctgtcttccccggacgggtgttcgagagcaagtgagttctgactcgagctgctttttcatgaagggggaggtggcctggcagacagacagcagttccagtcccaaggaaagatgcagaagtcaagatgttggtcactttggtccaggcagggaagtgggagctccaaggccctttgagggtaggggagtgagcagagtgatggggaagccaagaccactygctgctcccctgctcaggcaggtgcctgaggttccagtgataagaggacacctggtccaaccaggactgtggacagctctccagggtcagggacaacccaggcccgggaggaaggcagggctgggcgaggacctcggccctggacccgcacgtaccttgataatgtggtgccgagagaagccctttggaagctccttaatgtagcaccagtacgtggtctcctggctggggatctggatattgggagcttggacctccatggtgcacgcgtctgagggcaactccggttcggggatattgggcttcaggagctgcaccctctgcagccccatctgcaggcccgagccgttgatggcctccagtgaccggaacggctcctcca

SEQ ID NO: 54877 - DNA, 1733 bp, Homo sapiens
cctctaaaatcacatagcaccactctgccatcctctgttggttgaggctgtcaccaagggccacccagcttcaatgggaggagacatagatcctgcctcttgctgggggagtggcaaggtctagaagagcatgtgaaatgggagatatctttgtggccatcttcagaaaatacaacctgtcacattatctgaacctcagtatccttacacgttgtgttcmttcttaagttggccaggaagagctattacttttagaaatagagggccggtcatggtggctcacgcctgtaatcccagcactttgggaggccgaggtgggcagatcacctgaggtcaggagttcgagaccaggctggccaacatggtgagaccctgtctctactaaaaatacaaaaagttagccaggcatggtggtgcatgcctataatcccagctactcaggaggctgaggcaggagaatcacctgaacccaagaggcggaggttgcagtgagccaagatcacaccactgcactccagcctgggcaacagagtgagactctgtctcaaaaaaaaagaaagaaataggaagttattataatgaaaggaggtaatatagtttaaaacgagactaaattcagccacttgtaacttctaaaagataatggaataataaagctccatgctgttctcttccactagagtctgtgatagtagagacactaatgagccttagataataaacggaagctaagtagaaggtagagagttacattttgtgcatgataaagtgggagaggagaactggatttagagaaggggtagtgcccacgcaaggagacttgagaaagcagaagttgagatatgcatgaagccaagtgatgatactgtaggcttcatctgccaaccccatgctctcaacaaaatacgctacattcaccataccttgcatgtggaggtgctttttgaggagtgaagaaattctggaaaaggcactgaacttcatgttttatcagtgttaagcagaagaaagaggacaggaacaggaggtgagatggcaatgagactgggttcccaattggaatgggaatttggatcccaatgggaccttgagaaaataagatactccaccacacccacaaagagaaatgcataacaatggagaagttgggcccaatccttctgcaatccacccccagcctcagagaagagagccctcaggtatgatgtgggtcactcaagaaacactgtgcttttgcaggaaagtagcccagggtgcatggggtcccagttgtcccaagccagggatgtgtatctggtgacctcaggatctctggtcaagcaagctgcctagtcattgttcagcccacattaagcctccccaaagagaggatttgattggatctgctaggcatcactcagcatggagaaaaattgatgtcacatcacatcaagaagacctagattcctcctgtctcacccttgtgcagctgcttctaacttatgcacctatcctcatatgattcccaccagctggggagatcaggcttactctcattaactggtctattattgagcttgggtaactagaaggggtttgtgaggtggtggggtagttggggctataaaactccatggacaatcccagcaggttgaaggacaaccataaaagtggggaaagaattccagccggcagcacagcacctggtatataaattagaccttgtcactcccctgcttaaaaccttccaatga

SEQ ID NO: 54878 - DNA, 1733 bp, Homo sapiens
cctctaaaatcacatagcaccactctgccatcctctgttggttgaggctgtcaccaagggccacccagcttcaatgggaggagacatagatcctgcctcttgctgggggagtggcaaggtctagaagagcatgtgaaatgggagatatctttgtggccatcttcagaaaatacaacctgtcacattatctgaacctcagtatccttacacgttgtgttccttcttaagttggccaggaagagctattacttttagaaatagagggccggtcatggtggctcacgcctgtaatcccagcactttgggaggccgaggtgggcagatcacctgaggtcaggagttcragaccaggctggccaacatggtgagaccctgtctctactaaaaatacaaaaagttagccaggcatggtggtgcatgcctataatcccagctactcaggaggctgaggcaggagaatcacctgaacccaagaggcggaggttgcagtgagccaagatcacaccactgcactccagcctgggcaacagagtgagactctgtctcaaaaaaaaagaaagaaataggaagttattataatgaaaggaggtaatatagtttaaaacgagactaaattcagccacttgtaacttctaaaagataatggaataataaagctccatgctgttctcttccactagagtctgtgatagtagagacactaatgagccttagataataaacggaagctaagtagaaggtagagagttacattttgtgcatgataaagtgggagaggagaactggatttagagaaggggtagtgcccacgcaaggagacttgagaaagcagaagttgagatatgcatgaagccaagtgatgatactgtaggcttcatctgccaaccccatgctctcaacaaaatacgctacattcaccataccttgcatgtggaggtgctttttgaggagtgaagaaattctggaaaaggcactgaacttcatgttttatcagtgttaagcagaagaaagaggacaggaacaggaggtgagatggcaatgagactgggttcccaattggaatgggaatttggatcccaatgggaccttgagaaaataagatactccaccacacccacaaagagaaatgcataacaatggagaagttgggcccaatccttctgcaatccacccccagcctcagagaagagagccctcaggtatgatgtgggtcactcaagaaacactgtgcttttgcaggaaagtagcccagggtgcatggggtcccagttgtcccaagccagggatgtgtatctggtgacctcaggatctctggtcaagcaagctgcctagtcattgttcagcccacattaagcctccccaaagagaggatttgattggatctgctaggcatcactcagcatggagaaaaattgatgtcacatcacatcaagaagacctagattcctcctgtctcacccttgtgcagctgcttctaacttatgcacctatcctcatatgattcccaccagctggggagatcaggcttactctcattaactggtctattattgagcttgggtaactagaaggggtttgtgaggtggtggggtagttggggctataaaactccatggacaatcccagcaggttgaaggacaaccataaaagtggggaaagaattccagccggcagcacagcacctggtatataaattagaccttgtcactcccctgcttaaaaccttccaatga

SEQ ID NO: 54879 - DNA, 1733 bp, Homo sapiens
cctctaaaatcacatagcaccactctgccatcctctgttggttgaggctgtcaccaagggccacccagcttcaatgggaggagacatagatcctgcctcttgctgggggagtggcaaggtctagaagagcatgtgaaatgggagatatctttgtggccatcttcagaaaatacaacctgtcacattatctgaacctcagtatccttacacgttgtgttccttcttaagttggccaggaagagctattacttttagaaatagagggccggtcatggtggctcacgcctgtaatcccagcactttgggaggccgaggtgggcagatcacctgaggtcaggagttcgagaccaggctggccaacatggtgagaccctgtctctactaaaaatacaaaaagttagccaggcatggtggtgcatgcctataatcccagctactcaggaggctgaggcaggagaatcacctgaacccaagaggcggaggttgcagtgagccaagatcacaccactgcactccagcctgggcaacagagtgagactctgtctcaaaaaaaaagaaagaaataggaagttattataatgaaaggaggtaatayagtttaaaacgagactaaattcagccacttgtaacttctaaaagataatggaataataaagctccatgctgttctcttccactagagtctgtgatagtagagacactaatgagccttagataataaacggaagctaagtagaaggtagagagttacattttgtgcatgataaagtgggagaggagaactggatttagagaaggggtagtgcccacgcaaggagacttgagaaagcagaagttgagatatgcatgaagccaagtgatgatactgtaggcttcatctgccaaccccatgctctcaacaaaatacgctacattcaccataccttgcatgtggaggtgctttttgaggagtgaagaaattctggaaaaggcactgaacttcatgttttatcagtgttaagcagaagaaagaggacaggaacaggaggtgagatggcaatgagactgggttcccaattggaatgggaatttggatcccaatgggaccttgagaaaataagatactccaccacacccacaaagagaaatgcataacaatggagaagttgggcccaatccttctgcaatccacccccagcctcagagaagagagccctcaggtatgatgtgggtcactcaagaaacactgtgcttttgcaggaaagtagcccagggtgcatggggtcccagttgtcccaagccagggatgtgtatctggtgacctcaggatctctggtcaagcaagctgcctagtcattgttcagcccacattaagcctccccaaagagaggatttgattggatctgctaggcatcactcagcatggagaaaaattgatgtcacatcacatcaagaagacctagattcctcctgtctcacccttgtgcagctgcttctaacttatgcacctatcctcatatgattcccaccagctggggagatcaggcttactctcattaactggtctattattgagcttgggtaactagaaggggtttgtgaggtggtggggtagttggggctataaaactccatggacaatcccagcaggttgaaggacaaccataaaagtggggaaagaattccagccggcagcacagcacctggtatataaattagaccttgtcactcccctgcttaaaaccttccaatga

SEQ ID NO: 54880 - DNA, 1060 bp, Homo sapiens
cccattggataayagtggtaaagccacagtcatctaagaaaataccaaagtacattgtcttagagccagaaaggggattaattttcaacatggagatttgcagcagtccacattccaattcctaaacatgactcaactcccttctttgtggacttgttctttaattaggaatctctgcaaacactttgaagctgagccgtttcccagccatcccagcccagtgcctgtccctgctagctccccagtcgccccaacccacagtctcctcagagcaccagactggattttgatcaagcaaattgaaatgtatgtttcccactgtgaagtaaacagccatccccctaccacatctttatccctgaagccaattagtggcatggctgccttcccaagcagaacaggagagcatctctgttcatctcttctttggatgttttagggatgctgtaggcccggatcatagcctgtctaggcctccagaaaatctgggatccttccctgggcaagtgacttcaggagatttcttggacagccctgccttttcagtttgcagacaccttcccacaggtgcctccgtggttaagagtgtagggtttgggctaggtgcagtggctcacacctgtaatcccagcattttgggaggcccaggaggatggatcacttgaggtcaggggtttgagaccagcctggccaacatggtgaaaccccatctctactaaaaatacaaaaattagccaggcgtggtggtgcacacctgtaatcccatctacttgggaggctgaggcaggtaaatcgcttgaacccaggaggcagaggttgcagtgagtcgcgatcaggccactgcacttcagcctgggtgacagagcaagaccccatctcaaaaaaagaataaaaaggagtgtggggtttggagcctgatcaacttgggttcaaatcttgattcttccatatacttgtcctgttactttggggaagtcatttagcctgtctgagctttactttcctcatttctaaaaggggaagaagaatattctaaacctcatgatgctttattcattcc

SEQ ID NO: 54881 - DNA, 1060 bp, Homo sapiens
cccattggataatagtggtaaagccacagtcatctaagaaaataccaaagtacaytgtcttagagccagaaaggggattaattttcaacatggagatttgcagcagtccacattccaattcctaaacatgactcaactcccttctttgtggacttgttctttaattaggaatctctgcaaacactttgaagctgagccgtttcccagccatcccagcccagtgcctgtccctgctagctccccagtcgccccaacccacagtctcctcagagcaccagactggattttgatcaagcaaattgaaatgtatgtttcccactgtgaagtaaacagccatccccctaccacatctttatccctgaagccaattagtggcatggctgccttcccaagcagaacaggagagcatctctgttcatctcttctttggatgttttagggatgctgtaggcccggatcatagcctgtctaggcctccagaaaatctgggatccttccctgggcaagtgacttcaggagatttcttggacagccctgccttttcagtttgcagacaccttcccacaggtgcctccgtggttaagagtgtagggtttgggctaggtgcagtggctcacacctgtaatcccagcattttgggaggcccaggaggatggatcacttgaggtcaggggtttgagaccagcctggccaacatggtgaaaccccatctctactaaaaatacaaaaattagccaggcgtggtggtgcacacctgtaatcccatctacttgggaggctgaggcaggtaaatcgcttgaacccaggaggcagaggttgcagtgagtcgcgatcaggccactgcacttcagcctgggtgacagagcaagaccccatctcaaaaaaagaataaaaaggagtgtggggtttggagcctgatcaacttgggttcaaatcttgattcttccatatacttgtcctgttactttggggaagtcatttagcctgtctgagctttactttcctcatttctaaaaggggaagaagaatattctaaacctcatgatgctttattcattcc

SEQ ID NO: 54882 - DNA, 1060 bp, Homo sapiens
cccattggataatagtggtaaagccacagtcatctaagaaaataccaaagtacattgtcttagagccagaaaggggattaattttcaacatggagatttgcagcagtccacattccaattcctaaacatgactcaactcccttctttgtggacttgttctttaattaggaatctctgcaaacactttgaagctgagccgtttcccagccatcccagcccagtgcctgtccctgctagctccccagtcgccccaacccacagtctcctcagagcaccagactggattttgatcaagcaaattgaaatgtatgtttcccactgtgaagtaaacagccatccccctaccacatctttatccctgaagccaattagtggcatggctgccttcccaagcagaacaggagagcatctctgttcatctcttctttggatgttttagggatgctgtaggccyggatcatagcctgtctaggcctccagaaaatctgggatccttccctgggcaagtgacttcaggagatttcttggacagccctgccttttcagtttgcagacaccttcccacaggtgcctccgtggttaagagtgtagggtttgggctaggtgcagtggctcacacctgtaatcccagcattttgggaggcccaggaggatggatcacttgaggtcaggggtttgagaccagcctggccaacatggtgaaaccccatctctactaaaaatacaaaaattagccaggcgtggtggtgcacacctgtaatcccatctacttgggaggctgaggcaggtaaatcgcttgaacccaggaggcagaggttgcagtgagtcgcgatcaggccactgcacttcagcctgggtgacagagcaagaccccatctcaaaaaaagaataaaaaggagtgtggggtttggagcctgatcaacttgggttcaaatcttgattcttccatatacttgtcctgttactttggggaagtcatttagcctgtctgagctttactttcctcatttctaaaaggggaagaagaatattctaaacctcatgatgctttattcattcc

SEQ ID NO: 54883 - DNA, 1060 bp, Homo sapiens
cccattggataatagtggtaaagccacagtcatctaagaaaataccaaagtacattgtcttagagccagaaaggggattaattttcaacatggagatttgcagcagtccacattccaattcctaaacatgactcaactcccttctttgtggacttgttctttaattaggaatctctgcaaacactttgaagctgagccgtttcccagccatcccagcccagtgcctgtccctgctagctccccagtcgccccaacccacagtctcctcagagcaccagactggattttgatcaagcaaattgaaatgtatgtttcccactgtgaagtaaacagccatccccctaccacatctttatccctgaagccaattagtggcatggctgccttcccaagcagaacaggagagcatctctgttcatctcttctttggatgttttagggatgctgtaggcccggatcatagcctgtctaggcctccagaaaatctgggatccttccctgggcaagtgacttcaggagatttcttggacagccctgccttttcagtttgcagacaccttcccacaggtgcctccgtggttaagagtgtagggtttgggctrggtgcagtggctcacacctgtaatcccagcattttgggaggcccaggaggatggatcacttgaggtcaggggtttgagaccagcctggccaacatggtgaaaccccatctctactaaaaatacaaaaattagccaggcgtggtggtgcacacctgtaatcccatctacttgggaggctgaggcaggtaaatcgcttgaacccaggaggcagaggttgcagtgagtcgcgatcaggccactgcacttcagcctgggtgacagagcaagaccccatctcaaaaaaagaataaaaaggagtgtggggtttggagcctgatcaacttgggttcaaatcttgattcttccatatacttgtcctgttactttggggaagtcatttagcctgtctgagctttactttcctcatttctaaaaggggaagaagaatattctaaacctcatgatgctttattcattcc

SEQ ID NO: 54884 - DNA, 1060 bp, Homo sapiens
cccattggataatagtggtaaagccacagtcatctaagaaaataccaaagtacattgtcttagagccagaaaggggattaattttcaacatggagatttgcagcagtccacattccaattcctaaacatgactcaactcccttctttgtggacttgttctttaattaggaatctctgcaaacactttgaagctgagccgtttcccagccatcccagcccagtgcctgtccctgctagctccccagtcgccccaacccacagtctcctcagagcaccagactggattttgatcaagcaaattgaaatgtatgtttcccactgtgaagtaaacagccatccccctaccacatctttatccctgaagccaattagtggcatggctgccttcccaagcagaacaggagagcatctctgttcatctcttctttggatgttttagggatgctgtaggcccggatcatagcctgtctaggcctccagaaaatctgggatccttccctgggcaagtgacttcaggagatttcttggacagccctgccttttcagtttgcagacaccttcccacaggtgcctccgtggttaagagtgtagggtttgggctaggtgcagtggctcacacctgtaatcccagcattttgggaggcccaggaggatggatcacttgaggtcaggggtttgagaccagcctggccaacatggtgaaaccccatctctactaaaaatacaaaaattagccaggcgtggtggygcacacctgtaatcccatctacttgggaggctgaggcaggtaaatcgcttgaacccaggaggcagaggttgcagtgagtcgcgatcaggccactgcacttcagcctgggtgacagagcaagaccccatctcaaaaaaagaataaaaaggagtgtggggtttggagcctgatcaacttgggttcaaatcttgattcttccatatacttgtcctgttactttggggaagtcatttagcctgtctgagctttactttcctcatttctaaaaggggaagaagaatattctaaacctcatgatgctttattcattcc

SEQ ID NO: 54885 - DNA, 670 bp, Homo sapiens
ctgataatttctactatgcactgccatgccaatgcgggtatcatttcaccatcatgatatgtgacgcaggttttgcaggtgagtttgaggatgaagctcagagatggcacaaagctcatccaaagccacacagcagagcagggcttccaatcctgtctgactctcaggtttgcgctcccagtcactccttcctgcaaactcctagcaggaagactctttatgactcttcataaagagtcaaaggtgattttatcctcacggtgcccttctaagttcagggtgcaagtatctcaatgacctccagttcacaggagggcycctgtgtgtggtggggaggcagagccgcagaatgacttgtggaaggctacacaccccagtggggaggacctttcccctgctccaggctagggagacccggggactcccaggagcagcagagccacaggacacacctgccaaggcatgtggaaggtgggccaccctggagtggggagagaaaggcaaagaggggctgtgcttattttggcagttggggcttggcaccaccccaggcaggacagtaattcagcaactggctgattcacccaccgcagggctcccctgcactggctgcctgcccgccggcccctattaccagcccactgagtcacgcaggttgccaagaagctga

SEQ ID NO: 54886 - DNA, 755 bp, Homo sapiens
tggtgcatcacattattctagcttccatactagttgttttatttgtttgttttctcctttgttggcatttggtttcaaattcatatgtcaggtctctataatgtaggaatttatttaaaagtgtcttttttgtccattttgatggggcttctaggagacataagaacctcctctgcttgcaacacatttcaaaattacacactaatgtagaacatctgtatttaatcctggtttttagttaattgacaagctctartaagagaattaacttctccattctgggctgattttacatcaggtataggaatataccctaggtgaaagtttgtaccagtaatatgaattattaggtaataacctccacctttatgatttaggtgttattcatcaggaaatagtgttaaatcaggagtctcaatgaaagtattacttaagggatatacaaaatatgttgctaatctacataaaacagatgtgaacacactcttagtatccagccatgtttcctctcaaccacacagtaactttgacttcacttgggacttgttctaattttcaaattagttacttattaatcttaatgcttctagatattatgtgtgactattttagcagagagtgaagaaagacaacctaggctgactacacaatgaggaaaatcacaacctgatgaaacaggaagcctctggaagtgaatggctccaggattgaataatttgacagctcatgtgcccaagaagtttcttttctcaatt

SEQ ID NO: 54887 - DNA, 755 bp, Homo sapiens
tggtgcatcacattattctagcttccatactagttgttttatttgtttgttttctcctttgttggcatttggtttcaaattcatatgtcaggtctctataatgtaggaatttatttaaaagtgtcttttttgtccattttgatggggcttctaggagacataagaacctcctctgcttgcaacacatttcaaaattacacactaatgtagaacatctgtatttaatcctggtttttagttaattgacaagctctagtaagagaattaacttctccattctgggctgattttacatcaggtataggaatataccctaggtgaaagtttgtaccagtaatatgaattattaggtaataacctccacctttatgatttaggtgttattcatcargaaatagtgttaaatcaggagtctcaatgaaagtattacttaagggatatacaaaatatgttgctaatctacataaaacagatgtgaacacactcttagtatccagccatgtttcctctcaaccacacagtaactttgacttcacttgggacttgttctaattttcaaattagttacttattaatcttaatgcttctagatattatgtgtgactattttagcagagagtgaagaaagacaacctaggctgactacacaatgaggaaaatcacaacctgatgaaacaggaagcctctggaagtgaatggctccaggattgaataatttgacagctcatgtgcccaagaagtttcttttctcaatt

SEQ ID NO: 54888 - DNA, 755 bp, Homo sapiens
tggtgcatcacattattctagcttccatactagttgttttatttgtttgttttctcctttgttggcatttggtttcaaattcatatgtcaggtctctataatgtaggaatttatttaaaagtgtcttttttgtccattttgatggggcttctaggagacataagaacctcctctgcttgcaacacatttcaaaattacacactaatgtagaacatctgtatttaatcctggtttttagttaattgacaagctctagtaagagaattaacttctccattctgggctgattttacatcaggtataggaatataccctaggtgaaagtttgtaccagtaatatgaattattaggtaataacctccacctttatgatttaggtgttattcatcaggaaatagtgttaaatcaggagtctcaatgaaagtattacttaagggatatacaaaatatgttgctaatctacataaaacagatgtgaacacactcttagtatccagccatgtttcctstcaaccacacagtaactttgacttcacttgggacttgttctaattttcaaattagttacttattaatcttaatgcttctagatattatgtgtgactattttagcagagagtgaagaaagacaacctaggctgactacacaatgaggaaaatcacaacctgatgaaacaggaagcctctggaagtgaatggctccaggattgaataatttgacagctcatgtgcccaagaagtttcttttctcaatt

SEQ ID NO: 54889 - DNA, 755 bp, Homo sapiens
tggtgcatcacattattctagcttccatactagttgttttatttgtttgttttctcctttgttggcatttggtttcaaattcatatgtcaggtctctataatgtaggaatttatttaaaagtgtcttttttgtccattttgatggggcttctaggagacataagaacctcctctgcttgcaacacatttcaaaattacacactaatgtagaacatctgtatttaatcctggtttttagttaattgacaagctctagtaagagaattaacttctccattctgggctgattttacatcaggtataggaatataccctaggtgaaagtttgtaccagtaatatgaattattaggtaataacctccacctttatgatttaggtgttattcatcaggaaatagtgttaaatcaggagtctcaatgaaagtattacttaagggatatacaaaatatgttgctaatctacataaaacagatgtgaacacactcttagtatccagccatgtttcctctcaaccacacagtaactttgacttcacttgggacttgttctaattttcaaattagttacttattaatcttaatgcttctagatattatgtgtgactattttagcagagagtgaagaaagacaacctaggctgactacacaatgaggaaaatcacaacctgatgaaacaggaagcctctggaagtgartggctccaggattgaataatttgacagctcatgtgcccaagaagtttcttttctcaatt

SEQ ID NO: 54890 - DNA, 738 bp, Homo sapiens
tatatcagttatttcttaattatcttagttatttcatattgtattcacaaaccataacattgccctttaccatgtacatataaacaaccataatttgtaaatttgcaataaattttttattgtaaytttttatatttatcccagattataatctttttcttcacttccagatctcactggattgtctcaagggccccatccacaccactgagccctgatgaaaggctctaggctgtggccgggagaggcagtctcttcttccagagcacactctgtttgagggggagatgtcatctctgcccttgaggagccccagctgatgggggagcttttgcccttaggaagctctcagtctgatggggaagacgctgtccctgccctcaggaggctcttggtctgagaggggagacataattcattctctctgagtgccctcagtctgatgggggagacaccgtccctgccctcaagaggctccaagtctgatgggggaatattggctctgtcctcaggagtccggtctaaggagggtgtctcagccccactcctgagggtaaggattccatggccacagtctggacagtgggccagtcacgcttgacagtgggcatgttgccagcaggaccctttgggatgtgtctgagcctggaggtgagtggcacgggggctggcaaggctagggtggaggcaagcaggttccgctgtctgccgccttcacacctttctccttccacatgc

SEQ ID NO: 54891 - DNA, 738 bp, Homo sapiens
tatatcagttatttcttaattatcttagttatttcatattgtattcacaaaccataacattgccctttaccatgtacatataaacaaccataatttgtaaatttgcaataaattttttattgtaattttttatatttatcccagattataatctttttcttcacttccagatctcactggattgtctcaagggccccatccacaccactgasccctgatgaaaggctctaggctgtggccgggagaggcagtctcttcttccagagcacactctgtttgagggggagatgtcatctctgcccttgaggagccccagctgatgggggagcttttgcccttaggaagctctcagtctgatggggaagacgctgtccctgccctcaggaggctcttggtctgagaggggagacataattcattctctctgagtgccctcagtctgatgggggagacaccgtccctgccctcaagaggctccaagtctgatgggggaatattggctctgtcctcaggagtccggtctaaggagggtgtctcagccccactcctgagggtaaggattccatggccacagtctggacagtgggccagtcacgcttgacagtgggcatgttgccagcaggaccctttgggatgtgtctgagcctggaggtgagtggcacgggggctggcaaggctagggtggaggcaagcaggttccgctgtctgccgccttcacacctttctccttccacatgc

SEQ ID NO: 54892 - DNA, 738 bp, Homo sapiens
tatatcagttatttcttaattatcttagttatttcatattgtattcacaaaccataacattgccctttaccatgtacatataaacaaccataatttgtaaatttgcaataaattttttattgtaattttttatatttatcccagattataatctttttcttcacttccagatctcactggattgtctcaagggccccatccacaccactgagccctgatgaaaggctctaggctgtggccrggagaggcagtctcttcttccagagcacactctgtttgagggggagatgtcatctctgcccttgaggagccccagctgatgggggagcttttgcccttaggaagctctcagtctgatggggaagacgctgtccctgccctcaggaggctcttggtctgagaggggagacataattcattctctctgagtgccctcagtctgatgggggagacaccgtccctgccctcaagaggctccaagtctgatgggggaatattggctctgtcctcaggagtccggtctaaggagggtgtctcagccccactcctgagggtaaggattccatggccacagtctggacagtgggccagtcacgcttgacagtgggcatgttgccagcaggaccctttgggatgtgtctgagcctggaggtgagtggcacgggggctggcaaggctagggtggaggcaagcaggttccgctgtctgccgccttcacacctttctccttccacatgc

SEQ ID NO: 54893 - DNA, 1273 bp, Homo sapiens
gatccacccacctctgcttccctaagtgctcggattacaagcgtgagccactgtgcccagcagaccctctactatttcagcctatcggagactgccaagacatgggtgtgttccttttgggaagcatcgaatctggcgtgagaggttgagctttgtggaggtcayataacttgtctcaatcctgtgtcacattgggtgaagtttgagtctcagtctgtctgaaaacttgaaggcatgcatcttcccggagagaacatctttcgctttgcaagggaacatcaattttcctcagtgactgctgtgatttttatcctgaaagagttggatcacttttctttccttcccaccagtgatttatagacagggagagcaggccttttcctgtaggtctctgactgtttatctttttcggttgggccctgacaatactctggctgggatgttcatgttggctggggtgtcagggggccagatgccagacctgcagcccaggggtgcctgggggagggataaggaggccagagattccagcccaaagctaatgggctgatgtccaagtggaaagtgtattttcattgaggaagtgtaggcattagaggaccctggattactgtgtgattgtgctgtcaatactgctgtatcgagtccgtgagggctccacaatacggggaaacacttaactcactgctgctgcttattgagaagccaatagcaatttacttgctgacacttgacatcaaatccattcccagaggtggagctctgcaaaccaccatggtgtccctccccttcccgggccccctctcttaacttgggtgtctgcccatgtgtgagtcctgcatgggctggtggctgccgccgcattgggaaggacttggggcagggcggtgcagggcggtcgttgtggggaggggaacgttcctgtttaactttcatagctgacatgacattttcttctcctcccaattgctctcatactcatcttctttcaacaagtgctaaatgaccctcccttcgttccccctgcggtgtaagtcttctgcatgtgggaactttctcctctccataaaaaagttagatccttataatggatacatgcggagatcatatgtgggagagggctgaggaatgtctcgtctccaggaggcaggcggtgtctaaggggcagtcaaggccgaggggtattgtgttggggagtagagagcttcccatacaaggtgcagggccttcctgggcccaccttctgggggacatgtagccgctgagctgtggg

SEQ ID NO: 54894 - DNA, 1273 bp, Homo sapiens
gatccacccacctctgcttccctaagtgctcggattacaagcgtgagccactgtgcccagcagaccctctactatttcagcctatcggagactgccaagacatgggtgtgttccttttgggaagcatcgaatctggcgtgagaggttgagctttgtggaggtcacataacttgtctcaatcctgtgtcacattgggtgaagtttgagtctcagtctgtctgaaaacttgaaggcatgcatcttcccggagagaacatctttcgctttgcaagggaacatcaattttcctcagtgacygctgtgatttttatcctgaaagagttggatcacttttctttccttcccaccagtgatttatagacagggagagcaggccttttcctgtaggtctctgactgtttatctttttcggttgggccctgacaatactctggctgggatgttcatgttggctggggtgtcagggggccagatgccagacctgcagcccaggggtgcctgggggagggataaggaggccagagattccagcccaaagctaatgggctgatgtccaagtggaaagtgtattttcattgaggaagtgtaggcattagaggaccctggattactgtgtgattgtgctgtcaatactgctgtatcgagtccgtgagggctccacaatacggggaaacacttaactcactgctgctgcttattgagaagccaatagcaatttacttgctgacacttgacatcaaatccattcccagaggtggagctctgcaaaccaccatggtgtccctccccttcccgggccccctctcttaacttgggtgtctgcccatgtgtgagtcctgcatgggctggtggctgccgccgcattgggaaggacttggggcagggcggtgcagggcggtcgttgtggggaggggaacgttcctgtttaactttcatagctgacatgacattttcttctcctcccaattgctctcatactcatcttctttcaacaagtgctaaatgaccctcccttcgttccccctgcggtgtaagtcttctgcatgtgggaactttctcctctccataaaaaagttagatccttataatggatacatgcggagatcatatgtgggagagggctgaggaatgtctcgtctccaggaggcaggcggtgtctaaggggcagtcaaggccgaggggtattgtgttggggagtagagagcttcccatacaaggtgcagggccttcctgggcccaccttctgggggacatgtagccgctgagctgtggg

SEQ ID NO: 54895 - DNA, 1128 bp, Homo sapiens
atactttaacataaaaataaaaacatatttattacttttagttgtgttcacttgattcccctgaatattttggggagattttaaatatttaaggtattcaattaaatagaaatattatctagaaaaagaaaggatgcctttgtcttgtcatttggaatagttatacctcatttcttcttgtattggctccaactttcagaaaaatgttaaatgacagagatgacggttactattactcttgccctggctttcaggagaacacttctgaagtctcaacattaagaatgaaggtgatgattggtttgagagattcttttaccatgtaaagtatcttcccattcctattctactaataattttattggacatggatgctgtatctgggcagtgtattgggcacagcgttttttgggggaggcagcaaagttagtatcagggcaataaaagaaaatttgcacagagtaaacagctgacaaacttctacctgatttgagttgtctgttattctctttctatcacttacctctgattctctttaggtcaataatcttaaaaaagagaataattttaattattgagcctatcatttatttaatgaagttttagattacctaatgccacgctgagtaacagcagaactgaaacttttaaccttctcttcttacaattagctttcttttaaaaaatacagtaaatttgtgaactactccctataggtcagtggctcttaatagaaaatgtgctccccattcctgacatattatttgactttcacagaagcatgacatattaactctcaatccaattaactgctcaactccagattgagctgttattgtcttacccaatctctggaactattttttagggatataactacagccttaatattaaaataagctactctcatagtggatgcaataacagatgctgcaaactaactccctaatatcgatttattccttaatttttttttattaacggaaggccgtttttctgagagctgcccaactacaatgyttgcctccccagacctacttgcagcacttgtcagatgctgctatttacaatttatttgtcagaactcactgttttcaggaatatttctgaaaagggtatggacaatgg

SEQ ID NO: 54896 - DNA, 629 bp, Homo sapiens
tcctgcctcagcctcctgagtagttgggaatagttccaaaactattggaaatagaggcatgagccackgtacccagccttttcttacatttatctctttcctttaaccaatatggctccatccaaattaactttctgttgaattctatttcaagttgcagaatttagttttttgtgctttatacataataggtatacagtaatatttgtgaaatacatctataatgttagggaaactagttattcttttctgttttgtatttgttgaatatgttatatcaatagaatcaataaacaatttcatccactaatatggttattgccattttaattagaataattacaacttcttcccattctctccaaaataaaataaaaatcaaagccttgagtgtctcactaaaaaatctgtaccatgttgttgagtcaaggaagacaaaatgacttggaatattttgcattatgacctggaaactgcatttatatctttttcctgccatgtgcatatgatcactgccttaaggttcaactttagttttggcttgaagtcagaccattgcgttagctctctaatcaaaacgtctgggatacagcaagaccagtacatagttttaaatatagggttgtata

SEQ ID NO: 54897 - DNA, 629 bp, Homo sapiens
tcctgcctcagcctcctgagtagttgggaatagttccaaaactattggaaatagaggcatgagccactgtacccagccttttcttacatttatctctttcctttaaccaatatggctccatccaaattaactttctgttgaattctatttcaagttgcagaatttagttttttgtgctttatacataataggtatacagtaatatttgtgaaatacatctataatgttagggaaactagttattcttttctgttttgtatttgttgaatatgttatatcaatagaatcaataaacaatttcatccactaatatggttattgccattttaattagaataattacaacttcttcccattctctccaaaataaaataaaaatcaaagccttgagtgtctcactaaaaaatctgtaccatgttgttgagtcaaggaagacaaaatgacttggaatattttgcattatgacctggaaactgcrtttatatctttttcctgccatgtgcatatgatcactgccttaaggttcaactttagttttggcttgaagtcagaccattgcgttagctctctaatcaaaacgtctgggatacagcaagaccagtacatagttttaaatatagggttgtata

SEQ ID NO: 54898 - DNA, 767 bp, Homo sapiens
gttcttattaagcatatatttttaagaaaaaaaatcatcaaataacatatacagaacatatacatatacatatacagaacagtgacttcctaaattagttctgaatcttaagagccaattttccccctacaatttatgttttgaaaaaaagagactaggcatgatggctcatgcctgtactcccagcactttgggaggctgagacaggaggcttgcttgaggccaggagttcgagattagccctggcaacataacaagacctcctctctataaaaaaattwaaaaaaaaaatagctgggcatggtgtctggtgcctgtaatcccagccactctggaggctgaggtgggaggaggatcacataagtgcaggagttggagtgctgcagtgagctatgaatgtgccactgtactccagctgggaaatagaataaaaccctatcttaaaaaaaaaaaaaagacaaatttactgaaaaggcagtacaatgatcatttcaattcatttgccttatctctcttttatcttaatctgtatctttattattttgactcacctacttgagtgtaagttgtagacatgacacgaccctaactactttggcatgtattttccaaaaactaggagggtcgcctgtctaatcacaatcctattagcacaagaaatttaactttgataatatcttctaatatacagtatagattcagatttctccaattattccaagaatatcctttaggctattttgtgtttataatacatgtttttggat

SEQ ID NO: 54899 - DNA, 767 bp, Homo sapiens
gttcttattaagcatatatttttaagaaaaaaaatcatcaaataacatatacagaacatatacatatacatatacagaacagtgacttcctaaattagttctgaatcttaagagccaattttccccctacaatttatgttttgaaaaaaagagactaggcatgatggctcatgcctgtactcccagcactttgggaggctgagacaggaggcttgcttgaggccaggagttcgagattagccctggcaacataacaagacctcctctctataaaaaaatttaaaaaaaaaatagctgggcatggtgtctggtgcctgtaatcccagccactctggaggctgaggtgggaggaggatsacataagtgcaggagttggagtgctgcagtgagctatgaatgtgccactgtactccagctgggaaatagaataaaaccctatcttaaaaaaaaaaaaaagacaaatttactgaaaaggcagtacaatgatcatttcaattcatttgccttatctctcttttatcttaatctgtatctttattattttgactcacctacttgagtgtaagttgtagacatgacacgaccctaactactttggcatgtattttccaaaaactaggagggtcgcctgtctaatcacaatcctattagcacaagaaatttaactttgataatatcttctaatatacagtatagattcagatttctccaattattccaagaatatcctttaggctattttgtgtttataatacatgtttttggat

SEQ ID NO: 54900 - DNA, 767 bp, Homo sapiens
gttcttattaagcatatatttttaagaaaaaaaatcatcaaataacatatacagaacatatacatatacatatacagaacagtgacttcctaaattagttctgaatcttaagagccaattttccccctacaatttatgttttgaaaaaaagagactaggcatgatggctcatgcctgtactcccagcactttgggaggctgagacaggaggcttgcttgaggccaggagttcgagattagccctggcaacataacaagacctcctctctataaaaaaatttaaaaaaaaaatagctgggcatggtgtctggtgcctgtaatcccagccactctggaggctgaggtgggaggaggatcacataagtgcaggagttggagtgctgcagtgagctatgaatgtgccactgtactccagctgggaaatagaataaaaccctatcttaaaaaaaaaaaaaagacaaatttactgaaaaggcagtacaatgatcatttcaattcatttgccttatctctcttttatcttaatctgtatctttattattttgactcacctacttgagkgtaagttgtagacatgacacgaccctaactactttggcatgtattttccaaaaactaggagggtcgcctgtctaatcacaatcctattagcacaagaaatttaactttgataatatcttctaatatacagtatagattcagatttctccaattattccaagaatatcctttaggctattttgtgtttataatacatgtttttggat

SEQ ID NO: 54901 - DNA, 1210 bp, Homo sapiens
ctgagaagccaggccagaaaagtaaccccagagttcgctgtgcaggggagacacagagctctctttatctgtcaggatggcaggaggggacagggtcagggcgctgagggtcagatgtcggtgttgggggccaaggccccgagagatctcaggacaggtggtcaggtgtctaaggtaaaacagctccccgtgcagatcaggacatagtggaaaacaccctgacccctctgcctggcatagaccttcagacacagagcccctgaacaagggcaccccaacacctcatcatatactgaggtcaggggctccccaggtggacaccaggactctgaccccctgcccctcatccaccccgcaggtcagcccaaggctgccccctcggtcactctgttcccgccctcctctgaggagcttcaagccaacaaggccacactggtgtgtctcataagtgacttctacccgggagccgtgacagtggcctggaaggcagatagcagccccgtcaaggcgggagtggagaccaccacaccctccaaacaaagcaacaacaagtacgcggccagcagctacctgagcctgacgcctgagcagtggaagtcccacaraagctacagctgccaggtcacgcatgaagggagcaccgtggagaagacagtggcccctacagaatgttcataggttctcaaccctcaccccccaccacgggagactagagctgcaggatcccaggggaggggtctctcctcccaccccaaggcatcaagcccttctccctgcactcaataaaccctcaataaatattctcattgtcaatcagaaatcttgttttatctcattttttcttttctcacatataattcctagccttccctgggttctcaatttatggtggagggaattctgcacccagtgggaaagtcacccaagggaggaggcttacagcctccccgagtcatctctctggaaggtccttcctcttccagtcaccccttccccaactctccaccatacccctgagcctccagcctggcctcagctcagaccagtcccacaccctcctcaattttacttctcaataaagacctgatcatgtaaaacccagtttccaatgtgtcgtctgtgtctggtcatgtgcctgtgctgaagggtcactgctctgggacaggaggcagtttcaggtgagatcccatgtccccgtcaccccacaccc

SEQ ID NO: 54902 - DNA, 1210 bp, Homo sapiens
ctgagaagccaggccagaaaagtaaccccagagttcgctgtgcaggggagacacagagctctctttatctgtcaggatggcaggaggggacagggtcagggcgctgagggtcagatgtcggtgttgggggccaaggccccgagagatctcaggacaggtggtcaggtgtctaaggtaaaacagctccccgtgcagatcaggacatagtggaaaacaccctgacccctctgcctggcatagaccttcagacacagagcccctgaacaagggcaccccaacacctcatcatatactgaggtcaggggctccccaggtggacaccaggactctgaccccctgcccctcatccaccccgcaggtcagcccaaggctgccccctcggtcactctgttcccgccctcctctgaggagcttcaagccaacaaggccacactggtgtgtctcataagtgacttctacccgggagccgtgacagtggcctggaaggcagatagcagccccgtcaaggcgggagtggagaccaccacaccctccaaacaaagcaacaacaagtacgcggccagcagctacctgagcctgacgcctgagcagtggaagtcccacaaaagctacagctgccaggtcacgcatgaagggagcaccgtggagaagacagtggcccctacagaatgttcataggttctmaaccctcaccccccaccacgggagactagagctgcaggatcccaggggaggggtctctcctcccaccccaaggcatcaagcccttctccctgcactcaataaaccctcaataaatattctcattgtcaatcagaaatcttgttttatctcattttttcttttctcacatataattcctagccttccctgggttctcaatttatggtggagggaattctgcacccagtgggaaagtcacccaagggaggaggcttacagcctccccgagtcatctctctggaaggtccttcctcttccagtcaccccttccccaactctccaccatacccctgagcctccagcctggcctcagctcagaccagtcccacaccctcctcaattttacttctcaataaagacctgatcatgtaaaacccagtttccaatgtgtcgtctgtgtctggtcatgtgcctgtgctgaagggtcactgctctgggacaggaggcagtttcaggtgagatcccatgtccccgtcaccccacaccc

SEQ ID NO: 54903 - DNA, 526 bp, Homo sapiens
acaggcaggtcaagttttcatgggactcagctaccttagacccctccccaccagggcctactccctccctcaatcatgtggttcagcccctccatgtgcacctacaccctgatgtcagagacacaatcatcccagggtccctgacagcgagtgaggtggccttgggagatgcacttcccagccctcctcatcagtcttgggcactgtcaggccccttcttggtgcctccagcacatcagcggtgtggcaggtgccttcaccagagctgctgggtggccaggccaggcctgagacagagcctgcaagggcagagaactctagggccatagtggggcagagaaggggttcctcttggagcctaatcatagaacccctgcctcaagtcacaacctacaagttagaaggaaacttaagggtcctgattcccaccaccctgtctggccccayttcatagatgtgaacgctgagacccctatagcaaagaggaccgctttgatctccaccttctcaatggccctgctgggta

SEQ ID NO: 54904 - DNA, 672 bp, Homo sapiens
ggatccaaattgttaacgtgaccccccactgctcatggggatgaagaaaaagatctggggtgattggaaccttacaaagcagggacacagatgctttatgtctttcgaaggtctagttgtaaaaacaagacccgaaagcagcctctcggtcttttcactgctggccagcaaaactgggagaggactatgttgtgatgtccccaggatatccttcatgattgccaccaagatctgctgggataggtgcccaagacctggaaggaacactaaactagagacccagggatgcacacaccttgcatgttctcacaatgaggctaaaccagactcatcaccgragaaatgccagccaacagcctgtggacatggatgcagattgactattccagcccctcagtgaacaagctccaagtgtgtttccttgtaaagcagttatacaggtcaaaaatcacttcatcacaaatgaaatacggtcaaactaccacaaaacacagggctaaaatatctcatcaccggagggtgccagagaccaccaaatataatccagattcaaggcagtccatgtgaaaattgcccaccaggtggcggaaatgcagggagacggccagcatgtacagataatttgtttcccgggtccacacattatctgatgagagtgaatctgaccctaga

SEQ ID NO: 54905 - DNA, 1020 bp, Homo sapiens
tggggaaacaattcacatctttctcaatctgacctcaagacagctcagagtgggtgacatttgtcccatactgcaaacgaggaaagcagagaagggggaggaagcacagcctggcagcgggactggggctgggcagctgcacggcagggccctcaggaccctggagcctgcaccccaccccactgcaagtgactgcttggagcccaggcactactgtggcctctgcaagtgcctcacaggcctttctggagcagagcaaggcacacataaccacacatgacccctgagctcccacctgaggcccgccaggtctccagaaacatcccagccacgtgtccccgcagccacccacgtgtgctgtgggttaggctcgcaccaccccagacctggggagggcactccgagtgtctttacgrggaagcactaccgcggctgctgagggacacggggcagaggaaggaaccatgcaaagggacggaccttgggctgctgtgccagcaatcccgcctcagcccctgaaccccacccaagcatgccagtgcccacctgctcctgcagctccgccagcctggtggcccgctcctcctccgagtccgagctgcctgagtccgaagagctctcctcactgctacggctgctctcagcgcccttgctcaccatgggggccgcgggggcaggcagcgccggtgcctccacgggctcatctggcatcttggcaaacctcatctcaaacacgtcctgcggcagaacagaggctgccctgaagacatgggtgcccatggggctgccccttggtgtgggccctcagggtttctgaggtgcccctgaggcagcacccacagctgttacgaaggtggggctaggaggagacagggtcccgcctgcctggggggctgtggttgcttccagcttgcccaccctccctccccaggcaattcctgcggacaggcctgggaagaggggacacaggagctggcccacagctcccttcagcaactccatgagccctctctagaagat

SEQ ID NO: 54906 - DNA, 1020 bp, Homo sapiens
tggggaaacaattcacatctttctcaatctgacctcaagacagctcagagtgggtgacatttgtcccatactgcaaacgaggaaagcagagaagggggaggaagcacagcctggcagcgggactggggctgggcagctgcacggcagggccctcaggaccctggagcctgcaccccaccccactgcaagtgactgcttggagcccaggcactactgtggcctctgcaagtgcctcacaggcctttctggagcagagcaaggcacacataaccacacatgacccctgagctcccacctgaggcccgccaggtctccagaaacatcccagccacgtgtccccgcagccacccacgtgtgctgtgggttaggctcgcaccaccccagacctggggagggcactccgagtgtctttacggggaagcactaccgcggctgctgagggacacggggcagaggaaggaaccatgcaaagggacggaccttgggctgctgtgccagcaatcccgcctcagcccctgaaccccacccaagcatgccagtgcccacctgctcctgcagctccgccagcctggtggcccgctcctcctccgagtccgagctgcctgagtccgaagagctctcctcactgctacggctgctctcagcgcccttgctcaccatgggggccgcgggggcaggcagcgccggtgcctccacgggctcatctggcatcttggcaaacctcatctcaaacacgtcctgcggcagaacagaggctgccctgaagacatggrtgcccatggggctgccccttggtgtgggccctcagggtttctgaggtgcccctgaggcagcacccacagctgttacgaaggtggggctaggaggagacagggtcccgcctgcctggggggctgtggttgcttccagcttgcccaccctccctccccaggcaattcctgcggacaggcctgggaagaggggacacaggagctggcccacagctcccttcagcaactccatgagccctctctagaagat

SEQ ID NO: 54907 - DNA, 659 bp, Homo sapiens
ggatccttcatctccacatacgcagggagatcccacccagccctgggggaggagggcgtggccttcgtctcgttctgttctgcattcctcccaaaagcgctsgtgcaaagctccacagagagctcctcttgaaagccagttcgtggccttcctgcagggctgccagctccccgaggtcgttccctttctagctctcctgcccccacgtccccgtatgcccccactccccgcagcatgactcactgccccactcaaggaagccaccaggagctggactccaggcccagcctggccagacccagccacagagaaaaaccacacggctttgtcttatgtccacagctgcagaatgcaagctccttcccaaggcccagtgtccctctgggtgggagatgcccccttttaggcccacagggcaaggctaagaggagctcctgccttgtctgaggacgaaggctgcattcatgaaagtataacctcaaaaagagggaggtgactgtctcctgccactcagtgccgatcatgccacaccggaatgctactccacccttcacccccgacgagctgccaggaccctgtcacaaagcccttcagcagcttcctcgtgccctcgcttaataaaagaaaaattctaaatccttcctttggcctggaagccc

SEQ ID NO: 54908 - DNA, 659 bp, Homo sapiens
ggatccttcatctccacatacgcagggagatcccacccagccctgggggaggagggcgtggccttcgtctcgttctgttctgcattcctcccaaaagcgctcrtgcaaagctccacagagagctcctcttgaaagccagttcgtggccttcctgcagggctgccagctccccgaggtcgttccctttctagctctcctgcccccacgtccccgtatgcccccactccccgcagcatgactcactgccccactcaaggaagccaccaggagctggactccaggcccagcctggccagacccagccacagagaaaaaccacacggctttgtcttatgtccacagctgcagaatgcaagctccttcccaaggcccagtgtccctctgggtgggagatgcccccttttaggcccacagggcaaggctaagaggagctcctgccttgtctgaggacgaaggctgcattcatgaaagtataacctcaaaaagagggaggtgactgtctcctgccactcagtgccgatcatgccacaccggaatgctactccacccttcacccccgacgagctgccaggaccctgtcacaaagcccttcagcagcttcctcgtgccctcgcttaataaaagaaaaattctaaatccttcctttggcctggaagccc

SEQ ID NO: 54909 - DNA, 757 bp, Homo sapiens
cgtgaaaactatcagccaataccactttgtatacccaactgtgcaaaattgcttacagcttgtctgctacctactaattcttgcttttattttctaagtccaagacatccaggagacattttcttttgcaaattatttcccttgttttattttgaattatattatacagacagggaagtgcatacaatctatacaagctgttgtttaaggaacacttttaaagaaagcacccctgtaacaaccattcagtctaagaaacagagcctcgtcagactcccaatttccttctatattgtcctcccagagactaatctttgttctgacattttgttaattatatcattgctttttaaagatatttttrtctcttataaaaagcatcactaaacaatgtagtttagattatcctgctcttgaacttaacattgagggaatcatatcaatgtgttcttttatgtctgactccttttactcaatgtgttgtttgtaagcttcatcctgatgttatgagtagcactggggagggtgagaaggacagctttatattacctgcatcactgcccccaacttcaggcagcacggcatggagagagatacccttcacttggggaaaggagagaaaagtaagcactgcactttgccttggatgccaacactgggcctgccacagtaaaacccaacactgggctcaccataacctaagactccaggccggtccctctggactgaacctataggactaccctagtccaaggct

SEQ ID NO: 54910 - DNA, 1406 bp, Homo sapiens
tgcttaaatggatatcgcgaagtagtgtaaattgaagttcatgtaaatgaaagaaacatgttcttatcttcaatcaaacatttttctatccagtgttagccttgggcaatagtttttaccagggcgatttcatcccccagggtacatttgataaagtctagagacatttttgattttcacaacttgcagtgggggagggtgagtacagggatcgcccaagtgggcggaagccaggaatgcttcttaacatctagcaatgcagaggacagctacccacaacaaagaataattaaaatttcaatagttctgagattgagacacactgggctacagaatgtttgayctcttttgagaccaagagtctggaagaccaccttgcacataaaaatctaaaattctacatagaactgagaggactcagctgcgtgtacactgtcagaagaacaagaagccatgaacccataaaaggcgttgactaatcctttagcagattgaaaatgatccctcccaaatcaccaacagacctcagaagctgattaaaatctgtagtgagggaatcattgcatcctggagaaatctatggtaacttgctgaggatgaagcattgcaaaatccagccaggagctacctgaaaaatggggctgaatctgcagaatgttaacaagtgcatttaacaaatggttttctactctttctccacttactcccttctcttcctcctctccaaattcagagggctggggatgccgggagataatcaaagtggaaggtaagacggggtggaagaaaaggaaaagaaaaatcatctttgaatcttgttcgctacaccctggatgggaggaaggtgaggaaaaagaagggtcagggtcgggggccgcggaggggaggatcttgcgcctatggccccttttcttcctccaaacccttctctgtatccatctctggcttttccttgtgagattcacagaataaaatatcagaggagagggaaattagagattttcttacccagtatttccccaaatatgaaacaaactacttgtggcacagagacgaatgtagatgatttgcggcatgaagtggtatttgagagaactatttgatggcaattatcaagaatttttgaccttctttttccctctgcctgaaatgctcttccccagatctttatatatactgacttctcatctttcaggttttagctcaaaagcctccaagagatctttcctgagcaccttagcaaaagcagtgcaacacttccatacacatacacaaccctctggatttcattaccttagtttgctttctttgtagcacttcccactatctgaaatcttattatttatttacttattttgttgcccatcttcccttcccttgccctctaagaatcaagtaccataaag

SEQ ID NO: 54911 - DNA, 1008 bp, Homo sapiens
gagagaaaaaacaaggaacaataacagaggattatgttcaaacatcagtgaagggtgctattattggaggttcattaaaataactttaaatgggtttttctaagttgttctcaatgccatcttttattgtggcaaggagctgttcacagagcattgtttgaaactgtattgaaatacactagatttggtgtattgttgcagggaacaagagtcatttcttttttaatgttcgcctggttgtgtgttgcttttgctttaaaacacccaaatggctctctgttgccccagtctcgtatctattgctccttggcatatatggcttttgaggtcttccagtgctagatctctgtcctcttcctagctttagctcctgactccaagaacagcattcctgggcttctttcagtccctcaaacatgcagtgccttgttttcccttgcctgcttcatctgtgcagagccatgcacctgggatgcccgaagccctttcctatgctctcaccagccccctgatccccaccgtgccttgccttttccccctcatcaaatcagtagaacatcaaccgctcagggaggctcttgttgattcctgagtagatatctgctactgtcccatcaagaaattcatcacaggctgtaataacatgttcaatctcatgcctgtctttttgactactttaagattgtgactttctctgtgtcaaatcccagtgcctagcayagggtttagcacattataggtgctcaggaattcttactgaatgagtgaatggccatagaacaagatgctgtaacacagtgtgctgtggaacataaaggagtcttttgggatatatattagagtgcatggtgtttttcttatgtacagcagggtatcgcaaataaattggttgttgtgtaagttactaccctatttataaaggactataatttggctgctgattttgcaaactgtcatggcatcgtgtggttttgcagtgtgtgctgggagagggtgctggtgaaggat

SEQ ID NO: 54912 - DNA, 960 bp, Homo sapiens
tgagacaggtcatctttaccttggaatatttaatactgtgtgttcctagagacatatcaccattgtcatgtatctttagttctttctctcccaaataatggactttacaatttgtttggtggtaatacacttgtataaatagaagaacaatttacagagcaaaattcatattagaacaaataaatagtagaaagggccaatgaaccatagggtgctgatagttcattaagaaggtttcttcatgaaggattggctgaaattagctattttaaagaaatacagagatgaggcttaaaaatccaccacttggaattactgttgtttttgatgtggttttcactggtattatgagacaagctatcatttgtgtatgaggacaagtattgggagaatrtatacacacacgcgcacacacacacacacacacacacacacacacacacacacacacacctttttataaaactgaacccttctgatatggtttggctctctccccacccaaatctcatcttgaattataactcccacaattcccatgtgttgtgggagaaacctggtgggaggtgattgaattatgggggcaggtctttcctgcgctgttctcatgatagtgaatgagtctcacgagatctggtcgttttaaaaatgggagtttccctgcacaacctctctctttgcttgccaccatccatgtaagacatgacttgctcctccttgccttctgccatggttgtgaggcctccctagccatgtggaactgtaagtccattaaacctctttttctttccagtctcaggtatgtctttatcagcagctattatgaaaacagactaacacagtaaatatatatatctatcctattagttctgtccctctatagaaccctgaataatacaccttcttaccctcatctctacattttaattgttgataggtaaagtttttcaaaaaaatgtc

SEQ ID NO: 54913 - DNA, 960 bp, Homo sapiens
tgagacaggtcatctttaccttggaatatttaatactgtgtgttcctagagacatatcaccattgtcatgtatctttagttctttctctcccaaataatggactttacaatttgtttggtggtaatacacttgtataaatagaagaacaatttacagagcaaaattcatattagaacaaataaatagtagaaagggccaatgaaccatagggtgctgatagttcattaagaaggtttcttcatgaaggattggctgaaattagctattttaaagaaatacagagatgaggcttaaaaatccaccacttggaattactgttgtttttgatgtggttttcactggtattatgagacaagctatcatttgtgtatgaggacaagtattgggagaatatatacacacacgcrcacacacacacacacacacacacacacacacacacacacacacacctttttataaaactgaacccttctgatatggtttggctctctccccacccaaatctcatcttgaattataactcccacaattcccatgtgttgtgggagaaacctggtgggaggtgattgaattatgggggcaggtctttcctgcgctgttctcatgatagtgaatgagtctcacgagatctggtcgttttaaaaatgggagtttccctgcacaacctctctctttgcttgccaccatccatgtaagacatgacttgctcctccttgccttctgccatggttgtgaggcctccctagccatgtggaactgtaagtccattaaacctctttttctttccagtctcaggtatgtctttatcagcagctattatgaaaacagactaacacagtaaatatatatatctatcctattagttctgtccctctatagaaccctgaataatacaccttcttaccctcatctctacattttaattgttgataggtaaagtttttcaaaaaaatgtc

SEQ ID NO: 54914 - DNA, 960 bp, Homo sapiens
tgagacaggtcatctttaccttggaatatttaatactgtgtgttcctagagacatatcaccattgtcatgtatctttagttctttctctcccaaataatggactttacaatttgtttggtggtaatacacttgtataaatagaagaacaatttacagagcaaaattcatattagaacaaataaatagtagaaagggccaatgaaccatagggtgctgatagttcattaagaaggtttcttcatgaaggattggctgaaattagctattttaaagaaatacagagatgaggcttaaaaatccaccacttggaattactgttgtttttgatgtggttttcactggtattatgagacaagctatcatttgtgtatgaggacaagtattgggagaatatatacacacacgcgcacacacacacacacacacacacacacacacacacacacacacacctttttataaaactgaacccttctgatatggtttggctctctccccacccaaatctcatcttgaattataactcccacaattcccatgtgttgtgggagaaacctggtgggaggtgattgaattatgggggcaggtctttcctgcgctgttctcatgatagtgaatgagtctcacgagatctggtsgttttaaaaatgggagtttccctgcacaacctctctctttgcttgccaccatccatgtaagacatgacttgctcctccttgccttctgccatggttgtgaggcctccctagccatgtggaactgtaagtccattaaacctctttttctttccagtctcaggtatgtctttatcagcagctattatgaaaacagactaacacagtaaatatatatatctatcctattagttctgtccctctatagaaccctgaataatacaccttcttaccctcatctctacattttaattgttgataggtaaagtttttcaaaaaaatgtc

SEQ ID NO: 54915 - DNA, 1459 bp, Homo sapiens
aggaattaactggaacagccatttctaatgtgggagcagaaggtagggaggagaagtgcatctcacctatacccctcacacatttccctcgagctatggaaatcaccagaagaaaacttcatgcattggagaggaaagattttgtgtcagtattgggccatctggtatctaagaacatccgtgccttgacctgaaagcaaattcagatatttggctggatgctttgcacacttgtctgcatgagagtaggaacccaaccctgcttgatttcaatgagcttctgtgctagctgcctggtgatgcccaggcctcatttatgcttcgtagaacactggggtgaaactgctcaacaatggactcattctctctgagacacacctgctactttttctacagctccattttgtagagttttcttctactttctttattgcaacatgttcttctatttgcctgccttttaacactgaatacgttcattatctcagacacattttttcctggagttattcctttattcttcctgagaaactctagccccaggcacattcagatgaactatatatgaccatttgcaggatcttttggaagaaattcttgcatggggtaggataatagtctaaacctcaggtctgcaaactatgtcaagcctgtgggctggatcctatccactgtgggtgtttgtaaataaagttttattggaacacagccatgtccatttagtaacctatygtctgtagcagctacagtggcagaattgagtatttgagacagattgtatggcccacaaagtcaaaaatatttagggtctggcccattagagaaaaagtttgctaattcctggtctatacccatagttctcagacctggctgcaagctagaatctttaaaaacttgctgcttggacctcaccccaagagattttgatagaactggccttgggtgggaccaggcttttttttttaagcttcccaggtgatccccagggttgaaatccactgggctagacagagtgtgaatggcccttgtagcagcaggaatatgactttgtttattatcctagttcctaggagttactcaaagtctacattgaaagtctttctgggtggctaggaaagaggcagcgttatctctggtgagaaagtgctgatccaccctgagttcttggattaggtggtggtgaagcttgaccttatcagccatcagccttgccagcattccttctgaggctccaagcctgtctcacaatgactcttccattggtgctctgtttttttttttttgtttttttgtttttttgttgttgttgttgttgagacaggatcttgctctgttgcccaggctggagtgtggtagtgtgatcttggctcactgcagcctcaacctcccgggctcaggcgattctcctacctcagcctcttgagtagctgaaactccagatgtgcgccaccatacctag

SEQ ID NO: 54916 - DNA, 619 bp, Homo sapiens
caggccaactctggccccctgtctgtttttttaaataaagttttattggcatgcagccacatccrtttgctcacaggcggcctgtggctgctccctctctataatggcagagagttgagtcattgcaacagatcggatggctcctagggctgaaaatatctgccatctggtcctttacacaaaggtttgcttgccgaccatgttgggcttagtggaggggtgtaagggatggtcttacatgagtgtgcttccagcacagggagcatggaacccagtggcagtctgtctggatgttttcaaagaggcttctttgtaatagttcgcgattatcttgcaacatgatatccatctccccatccctagtgtggttaacttggggaagtttgctttgtccaagtagagggggctgtagcttgttcacagcccaagaatgcaggagcacgcaggatgctggagcaccagcttttctgacttgttagtgatagcctgggttagggaaggttgtccttggaccacatgggctgggcatgcccctcaattcatggaaagtgactcagaaaagttcaaggtttcaccaagactaagaggtgaggaggaagttctttcagaacataagggt

SEQ ID NO: 54917 - DNA, 2122 bp, Homo sapiens
tggcacagggcatctggctttctttgtggctgccaggatgccaagcggacccaacactcccttgaatgattttttgtgtctagtactcatttttttcacttgttgtacaagaggcatcttaagtcaaaatctaacccttartacattgtaccacattgttgattactgcaacctttcagtcattattcaacaaatcatttcttgtactgcactattgattagttattataaaaccctgaattcaactgtacagtattggttctttttgccaaagggactctaaattagaaaataattttgatggctgggcgtggtggctcacgcctgtaatcccagcactttgggaggccgaggcaggcggatcacgaggtcaggagatcgagaccatcctggctaacacggtgaaaccccgtttctactaaaaatacaaaaaaaaaaaatgagccaggcatggtggcgggcgcctgtagtcccagctactcaggaggctgaggcaggagaatgttgtgaacctgggaggcggggcttgcagtgagccaagatcgcgccactgcactccagcctgggcgacagtgcatgactccgtctcaaaaaaaaaaaaaaaaagaaaataattttgtcaaatactattgtcacagctattaatggggcatcccaagatgaatagtttcttgctaccaaataccttttataaatattgcgtttagaattgagtctagagattcatcttgacttggggggaaaggtctattaaaaggactttatattccattttgctttggtctggtcttggcacgggagtgtggattttgctaaaaaaaccaaacagagccagctgttttcttccagagagccaccttgactatcagtgtgggtgtcagataacagcctttgtggtgagaagtttattgtatttacttgggcggtggtctctagtatttgcagtgcttcattggcatagtgtctcacttctgcaagagaagttatccacgaccatgggtcatttactgtctgtcaggcgagacatttataaaccaatgtcctttgtgttctgccctgagcaatgacccctcatgggactgagctttgatggagaaaggaaaaagtggtgtgttgtgtttggtcactttccgcttgagtggcagttacctggtaaaatttaaggtggaggagtatgcatgtcttgtgtttaagcaaagactggatgacccttattaggaatgttgcagaaggaattccagcattagataaaggttgaactagatgacctttgaggttgtttcagctgctgagtttttatgatgctttaaaatcccttaggagaaaagctgcagtgtagaccattggctgtgaatcccaagcttgaaattgttggaaaatgatgctcaaatcaaatcacattaaattcactttaaagtttagaaatatatgacttaacaatattttgtctgttgttggttggggtaaaggggagaataggaggaagattattgcaacataaaatacaacaaaccatgaaaacagcatcatacatcaaaattaaaatttttttctcaaaaaattaaaaggattgggaatgactgacctatatattgccttatttttctttttgtctcatttgtgagctcaacaactccagcgtattaattactgttgcctcctattgtcattttaatggcaccttatataaatagaggcagtgaagctagttgctactctcccaacacaccccattttttgcatttctgacgtagtgcagggacccttctccatttggttattggcctgcttgttacagaagtcagttaactattcttcaggtcagaagtgagatgttagcattctcacaatgaagaatatatggtattctccctcttatctactcactttctgtgtgtttttaaaataaaacctaagcatcttctttgttcatagcataatggaataaatattacagtctttgaacacattcttcgtgaaatcacttgcagcaatttctagtgtttggtttgtactagacatctcccactcacgtagacatgaaaataatacgaagcggaagaaactacaaatgaaaaaagaaaaccagaaagagtgtttacaaattcagagaagaatctaa

SEQ ID NO: 54918 - DNA, 476 bp, Homo sapiens
ctgaaagaaggaggggaaaggtattggacttatatccttgayagaattgtagactgagtcactataatttctttgaagagaatcacataaagagattagctgtctagtagaggaattaggtttgtgtctctccagagagaaggtctaagagcaaatcagtaaaggctataggagatcaatttataaggaggagctttttttttttttttttttttcaacataatctcagctcactgcaacattgacctcccaggctcaagtgatcctcccacctcaacctccggactggctgggactacaagcatgtgccaccatgcctggctaatttttgtgtcttttgtagagatgggggttcgccatgttgcccaggctggtctcgaactcctgacttcaagtaatccagccacctcagcctcccaaagtgctaggattacaggcatgagccaccacacccagcccaggaggagctttttaac

SEQ ID NO: 54919 - DNA, 1497 bp, Homo sapiens
ccccaatccaagggagtcccacctcttgctagcagtcagaggcactcttttttaatttgccaaattgttctaaaactaaatatacaagtaccatataatccaataattgcactctcgagtacttatctcaaagctttgaaaacttacgttcaccaaagacctgtatatgaatgttcatgatgtctttattcgtaataaacaaaagcaaccgaaatattcttcggcaggtgaatggttaaacacgctgtagtctatccatacaccatacactggaatacttttcagcagtaaaaaggaacaaactattgataaatgcagcaacttagatagctcttaagggaattatgctgagtgaaaagagccaaactgtttttattttattttttttttctggagaaagggtcttgctctggtgcccaggctggagtgcagtgacgtgatcagcctcaaactcctgggctcaggtgatcctcccacctcagcctcccaaagtgctaggattataggaataagccaccacacctagcctaaaagagccaatattaaaaagttatatactatatgatttcatttatataacattcttgaaatgaaaaattctaaagatggagaacagattactgattgttcatcagggtaggagtggatgtaggatagcgacacagccttagtgatggaacagttctatattttgattatagtggtggttacatgaacctatacattacaaaagctgcacagaactatacatacacacacatgcaagaacacatcaaacaggtgaaatgtgaataagctctgtggattggcctaatgccaatttcctggttttggtgttgtgctatagttaggcaggatgttatcactgggggaaacagagtgaacatatatatatatataaatatatatatatatacacacacacacacacacacacacatatatacatatatatatacacatatatatatrtgtgtatatatagatatacattttttttttgagacagagtcttgctcttttgcccaggctgtagtgcagtggcacgatctcggttcaccgcgaactctgtctcccaggttcaagcaattctcctgcctcagcctcccaagtagctgggattacaggcacccagctaatttttgtatttttagtagaggcagggtttcaccatgttagccaggctgttctagaactcctgacctcgtgacctatacattttttataacttcctatgggtctataatttttttcaaaataaatcatgaaaaaaccattttctaagtaatcataaaccacatttaatagtccattcttgaaatttgtctgggattaacacaaagctaaggccagttttcctgtacctccccatttcttcttacctgttggtttgtgatacaatttggatctgtatccccaccaaatctgatgttgcattgtaattgcccatgttggaggtgggacctggtggcaggagactggatcatcagggtggat

SEQ ID NO: 54920 - DNA, 1497 bp, Homo sapiens
ccccaatccaagggagtcccacctcttgctagcagtcagaggcactcttttttaatttgccaaattgttctaaaactaaatatacaagtaccatataatccaataattgcactctcgagtacttatctcaaagctttgaaaacttacgttcaccaaagacctgtatatgaatgttcatgatgtctttattcgtaataaacaaaagcaaccgaaatattcttcggcaggtgaatggttaaacacgctgtagtctatccatacaccatacactggaatacttttcagcagtaaaaaggaacaaactattgataaatgcagcaacttagatagctcttaagggaattatgctgagtgaaaagagccaaactgtttttattttattttttttttctggagaaagggtcttgctctggtgcccaggctggagtgcagtgacgtgatcagcctcaaactcctgggctcaggtgatcctcccacctcagcctcccaaagtgctaggattataggaataagccaccacacctagcctaaaagagccaatattaaaaagttatatactatatgatttcatttatataacattcttgaaatgaaaaattctaaagatggagaacagattactgattgttcatcagggtaggagtggatgtaggatagcgacacagccttagtgatggaacagttctatattttgattatagtggtggttacatgaacctatacattacaaaagctgcacagaactatacatacacacacatgcaagaacacatcaaacaggtgaaatgtgaataagctctgtggattggcctaatgccaatttcctggttttggtgttgtgctatagttaggcaggatgttatcactgggggaaacagagtgaacatatatatatatataaatatatatatatatacacacacacacacacacacacacatatatacatatatatatacacatatatatatgtgtgtatatatagatatacattttttttttgagacagagtcttgctcttttgcccaggctgtagtgcagtggcacgatctcggttcaccgcgaactctgtctcccaggttcaagcaattctcctgcctcagcctcccaagtagctgggattacaggcacccagctaatttttgtatttttagtagaggcagggtttcaccatgttagccaggctgttctagaactcctgacctcgtgacctatacattttttataacttcctatgggtctataatttttttcaaaataaatcatgaaaaaaccattttctaagtaatcataaaccacatttaatagtccattcttgaaatttgtctgggattaacacaaagctaaggccagttttcctgtacctccccatttcttcttacctgttggtttgtgatacaatttggatctgtatccccaccaaatctgatgttgcattgtaattgcccatgttggaggtgggrcctggtggcaggagactggatcatcagggtggat

SEQ ID NO: 54921 - DNA, 1323 bp, Homo sapiens
gtgacaaagttgcaccataattttatacaaatttaataaaacaaaataaagatttctctgagaaaggtaaaacatttgaggttttctattatttataaccagtggaattgcatttatcagcttcttttccaagatcgcatggggcctaggtgtgtataagtgggtactcctgccccctccgcctggatgtatgtgcagcatttcattctggggtcctgttgcctccctgggtacttccagaagcccgaacctaagcctttcgactttattcgcatacctccctcacatttctctctttccaccaggagttggaattagggaggggcaggagattgtatttttatctggggtraagtcttttctcccattaccttgacctagacaggttgttttttccatagtcaacatcacaatctattgataaagttttgggaacaaaatcaagaatttcttaccttctatatacctaccctaaagcagtgagcacaaaacaaaaattcatgaaaacgtacctgtgatatcaaaattttgttatagcatgactaccatgaactctaggtctccaactagccccattctctagcagagacaggataattttgacacattctgggaggaattggtgaatgacatggaaggaagagcagatgaatggatagatggcaggcaaccccagatcagagagcagggaggcagaggggagagttctaccaacaaacctggaaaatgtctgccatcaccattatagtcctggaagtcccagtcagacacagagctcagaatgggcccttttgacatttgagctgttgtgaaccactaccaccaggatagtcagacccatggaacagctggccagctactatacagactcaccccacacatttcatgaaccatgaaataacccaccccacagttaaagtattagatttttctaaacttacttctcccattttttatggtagataattactgtagatattactgtgcatggttgaatggaggggatgtaaaaaggaaaatacagaaataaaataaatatgtgtttttatctcaaatgatatcctactggaaggaaaagaaaggaaggaaatcgggtactactgggtcatctaagtatgatagtgacaacctggactggggctttggctatggggcacagtgaagtggatctattccaagagttattttggagttggcatcaacagaacctgaggctggttagatgcagtgtgtgagaggaaggatgggccaaagggaatccccaggtttctggcatgggcatctgggcagatgatgatgtcattgactgaaacaggacatgca

SEQ ID NO: 54922 - DNA, 1323 bp, Homo sapiens
gtgacaaagttgcaccataattttatacaaatttaataaaacaaaataaagatttctctgagaaaggtaaaacatttgaggttttctattatttataaccagtggaattgcatttatcagcttcttttccaagatcgcatggggcctaggtgtgtataagtgggtactcctgccccctccgcctggatgtatgtgcagcatttcattctggggtcctgttgcctccctgggtacttccagaagcccgaacctaagcctttcgactttattcgcatacctccctcacatttctctctttccaccaggagttggaattagggaggggcaggagattgtatttttatctggggtaaagtcttttctcccattaccttgacctagacaggttgttttttccatagtcaacatcacaatctattgataaagttttgggaacaaaatcaagaatttcttaccttctatatacctaccctaaagcagtgagcacaaaacaaaaattcatgaaaacgtacctgtgatatcaaaattttgttatagcatgactaccatgaactctaggtctccaactagccccattctctagcagagacaggataattttgacacattctgggaggaattggtgaatgacatggaaggaagagcagatgaatggatagatggcaggcaaccccagatcagagagcagggaggcagaggggagagttctaccaacaaacctggaaaatgtctgccatcaccattatagtcctggaagtcccagtcagacacagagctcagaatgggcccttttgacatttgagctgttgtgaaccactaccaccaggatagtcagacccatggaacagctggccagctactayacagactcaccccacacatttcatgaaccatgaaataacccaccccacagttaaagtattagatttttctaaacttacttctcccattttttatggtagataattactgtagatattactgtgcatggttgaatggaggggatgtaaaaaggaaaatacagaaataaaataaatatgtgtttttatctcaaatgatatcctactggaaggaaaagaaaggaaggaaatcgggtactactgggtcatctaagtatgatagtgacaacctggactggggctttggctatggggcacagtgaagtggatctattccaagagttattttggagttggcatcaacagaacctgaggctggttagatgcagtgtgtgagaggaaggatgggccaaagggaatccccaggtttctggcatgggcatctgggcagatgatgatgtcattgactgaaacaggacatgca

SEQ ID NO: 54923 - DNA, 1323 bp, Homo sapiens
gtgacaaagttgcaccataattttatacaaatttaataaaacaaaataaagatttctctgagaaaggtaaaacatttgaggttttctattatttataaccagtggaattgcatttatcagcttcttttccaagatcgcatggggcctaggtgtgtataagtgggtactcctgccccctccgcctggatgtatgtgcagcatttcattctggggtcctgttgcctccctgggtacttccagaagcccgaacctaagcctttcgactttattcgcatacctccctcacatttctctctttccaccaggagttggaattagggaggggcaggagattgtatttttatctggggtaaagtcttttctcccattaccttgacctagacaggttgttttttccatagtcaacatcacaatctattgataaagttttgggaacaaaatcaagaatttcttaccttctatatacctaccctaaagcagtgagcacaaaacaaaaattcatgaaaacgtacctgtgatatcaaaattttgttatagcatgactaccatgaactctaggtctccaactagccccattctctagcagagacaggataattttgacacattctgggaggaattggtgaatgacatggaaggaagagcagatgaatggatagatggcaggcaaccccagatcagagagcagggaggcagaggggagagttctaccaacaaacctggaaaatgtctgccatcaccattatagtcctggaagtcccagtcagacacagagctcagaatgggcccttttgacatttgagctgttgtgaaccactaccaccaggatagtcagacccatggaacagctggccagctactatacagactcaccccacacatttcatgaaccatgaaataacccaccccacagttaaagtattagatwtttctaaacttacttctcccattttttatggtagataattactgtagatattactgtgcatggttgaatggaggggatgtaaaaaggaaaatacagaaataaaataaatatgtgtttttatctcaaatgatatcctactggaaggaaaagaaaggaaggaaatcgggtactactgggtcatctaagtatgatagtgacaacctggactggggctttggctatggggcacagtgaagtggatctattccaagagttattttggagttggcatcaacagaacctgaggctggttagatgcagtgtgtgagaggaaggatgggccaaagggaatccccaggtttctggcatgggcatctgggcagatgatgatgtcattgactgaaacaggacatgca

SEQ ID NO: 54924 - DNA, 1323 bp, Homo sapiens
gtgacaaagttgcaccataattttatacaaatttaataaaacaaaataaagatttctctgagaaaggtaaaacatttgaggttttctattatttataaccagtggaattgcatttatcagcttcttttccaagatcgcatggggcctaggtgtgtataagtgggtactcctgccccctccgcctggatgtatgtgcagcatttcattctggggtcctgttgcctccctgggtacttccagaagcccgaacctaagcctttcgactttattcgcatacctccctcacatttctctctttccaccaggagttggaattagggaggggcaggagattgtatttttatctggggtaaagtcttttctcccattaccttgacctagacaggttgttttttccatagtcaacatcacaatctattgataaagttttgggaacaaaatcaagaatttcttaccttctatatacctaccctaaagcagtgagcacaaaacaaaaattcatgaaaacgtacctgtgatatcaaaattttgttatagcatgactaccatgaactctaggtctccaactagccccattctctagcagagacaggataattttgacacattctgggaggaattggtgaatgacatggaaggaagagcagatgaatggatagatggcaggcaaccccagatcagagagcagggaggcagaggggagagttctaccaacaaacctggaaaatgtctgccatcaccattatagtcctggaagtcccagtcagacacagagctcagaatgggcccttttgacatttgagctgttgtgaaccactaccaccaggatagtcagacccatggaacagctggccagctactatacagactcaccccacacatttcatgaaccatgaaataacccaccccacagttaaagtattagatttttctaaacttacttctcccattttttatggtagataattactgtagatattactgtgcatggttgaatggaggggatgtaaaaaggaaaatacagaaataaaataaatatgtgtttttatctcaaatgatatcctactggaaggaaaagaaaggaaggaaatcgggtactactgggtcatctaagtatgatagtgacaacctggactggggctttggctatggggcacagtgaagtggatctattccaagagttattttggagttggcatcaacagaacctgaggctggttagatgyagtgtgtgagaggaaggatgggccaaagggaatccccaggtttctggcatgggcatctgggcagatgatgatgtcattgactgaaacaggacatgca

SEQ ID NO: 54925 - DNA, 2128 bp, Homo sapiens
cagtgatcagttcagaggatgctttcatattggagttaaagagggtattcttacttagggtatatataaacaaagcattctgagagaggataactgaggattatctaaggatgagattgtgcagagtttaattctgattgaggacatttctaaactagttcaattaagagagcattaacttaaagggaaaattatattaaaattgaatagctaaccttcgggcacactatgcaaggtgctaatttacatctattaaaaaggcagttgtattggagccaattaaagctatttctagagaattcatcacagaggttaaaagtgtattatttatttcacacattttctttaataagaatttaattcatttaatattacctatgcttattttgctacatttttaaaatgtacatttttatctayaagctttaagattctaaattctttatataaatcttttagaatctaaagtacaggtaaaaattatacatttataagattaccaaattttcagtcattcctatcagacactaggtttatcctggcacttgctgtcagcaaattctcagagccaaagtaaaacattgatttgttttaaggaatggaggatggataaaagtgaagtatagcttttaaaaaagtgaattattaaaaaaaattattttatccagtttcaggtaatttcactattaaaaaaaggaagccccaatgaaataagtgattttaaagatgttggcccttcaaatggactccctttccagttttcccatttctgccaaaagtgtcattgttttcccagtccacaggctcgacaccttagagatttctttgccttgcccattccttacttactgatattcagcttgtgtacagttattactcattttctttctctattttcagagccactatctggtctaggacatggatgctgcacatggataatggcatggcttctgcactgatcctctggctccctgtctctcaacacttcagttatttctcaccagataagaattttctgggaatgcatgactactcagttggagagtgctcaaaggctttctgttgacagtgctgtggtttgaatgctccctcaaaaactcatgttaaaatttaattgtgacaataagaggtaggatctttaacaagtgattaggttatgagggctctgccttcatgaatgaattaacgaattattgtgggattagttatctcaggagtgagttccttatgaaaggatgtttatcccccatcctcttgctgtctttcacactcacttgcacttctgccatggaatgacacagcacaaaggtgctcacacccttgggctttccagcctccagaaccataagccaaataaactatcctgtataagttacccagtctgtagcattctattatagcagcagaaaatggactaagacagctggtcatacaaaaccaagctgagaagctgggctttggtttcttccattgtaaaatggccatgctagtcttaaggggtagttttcaaacacttgagcagcacaaaacataaaacagatgaaaaatagagccactcatattaaagtacacaaaggaaccaacctacccactcccaccattgccccttcctcatctaaaggacttgtagtttcagggttgccagatcttccatttttcaaaagaagctagaattctgactcttccttttaaaatctagagatttttttaaatgttggtaaccgtgatggtgaattgtatgtgtcacctagacaatggcggcaagttgtttagtcaaacactgatctagatgttgctgtgaaggtattctgtagatgtggttagcatctaaaattggctgactttaagcaaaggagattatcctcaataatgtggagaggcctcatccaatcagttaaaggccttgagagcagaacactgaggtttccagagaagagggaataaagaattctgacttaaggctgtaacacaaaaatcctatctgaatttctagctggttgatttgccccacagatttcaaacttgccagctttcacaatcacatgaaccaattccttaaaaataattctttctctctctctctctaaatacacacacatgtatatgtatgtattctctatgtgta

SEQ ID NO: 54926 - DNA, 2128 bp, Homo sapiens
cagtgatcagttcagaggatgctttcatattggagttaaagagggtattcttacttagggtatatataaacaaagcattctgagagaggataactgaggattatctaaggatgagattgtgcagagtttaattctgattgaggacatttctaaactagttcaattaagagagcattaacttaaagggaaaattatattaaaattgaatagctaaccttcgggcacactatgcaaggtgctaatttacatctattaaaaaggcagttgtattggagccaattaaagctatttctagagaattcatcacagaggttaaaagtgtattatttatttcacacattttctttaataagaatttaattcatttaatattacctatgcttattttgctacatttttaaaatgtacatttttatctataagctttaagattctaaattctttatataaatcttttagaatctaaagtacaggtaaaaattatacatttataagattaccaaattttcagtcattcctatcagacactaggtttatcctggcacttgctgtcagcaaattctcasagccaaagtaaaacattgatttgttttaaggaatggaggatggataaaagtgaagtatagcttttaaaaaagtgaattattaaaaaaaattattttatccagtttcaggtaatttcactattaaaaaaaggaagccccaatgaaataagtgattttaaagatgttggcccttcaaatggactccctttccagttttcccatttctgccaaaagtgtcattgttttcccagtccacaggctcgacaccttagagatttctttgccttgcccattccttacttactgatattcagcttgtgtacagttattactcattttctttctctattttcagagccactatctggtctaggacatggatgctgcacatggataatggcatggcttctgcactgatcctctggctccctgtctctcaacacttcagttatttctcaccagataagaattttctgggaatgcatgactactcagttggagagtgctcaaaggctttctgttgacagtgctgtggtttgaatgctccctcaaaaactcatgttaaaatttaattgtgacaataagaggtaggatctttaacaagtgattaggttatgagggctctgccttcatgaatgaattaacgaattattgtgggattagttatctcaggagtgagttccttatgaaaggatgtttatcccccatcctcttgctgtctttcacactcacttgcacttctgccatggaatgacacagcacaaaggtgctcacacccttgggctttccagcctccagaaccataagccaaataaactatcctgtataagttacccagtctgtagcattctattatagcagcagaaaatggactaagacagctggtcatacaaaaccaagctgagaagctgggctttggtttcttccattgtaaaatggccatgctagtcttaaggggtagttttcaaacacttgagcagcacaaaacataaaacagatgaaaaatagagccactcatattaaagtacacaaaggaaccaacctacccactcccaccattgccccttcctcatctaaaggacttgtagtttcagggttgccagatcttccatttttcaaaagaagctagaattctgactcttccttttaaaatctagagatttttttaaatgttggtaaccgtgatggtgaattgtatgtgtcacctagacaatggcggcaagttgtttagtcaaacactgatctagatgttgctgtgaaggtattctgtagatgtggttagcatctaaaattggctgactttaagcaaaggagattatcctcaataatgtggagaggcctcatccaatcagttaaaggccttgagagcagaacactgaggtttccagagaagagggaataaagaattctgacttaaggctgtaacacaaaaatcctatctgaatttctagctggttgatttgccccacagatttcaaacttgccagctttcacaatcacatgaaccaattccttaaaaataattctttctctctctctctctaaatacacacacatgtatatgtatgtattctctatgtgta

SEQ ID NO: 54927 - DNA, 2128 bp, Homo sapiens
cagtgatcagttcagaggatgctttcatattggagttaaagagggtattcttacttagggtatatataaacaaagcattctgagagaggataactgaggattatctaaggatgagattgtgcagagtttaattctgattgaggacatttctaaactagttcaattaagagagcattaacttaaagggaaaattatattaaaattgaatagctaaccttcgggcacactatgcaaggtgctaatttacatctattaaaaaggcagttgtattggagccaattaaagctatttctagagaattcatcacagaggttaaaagtgtattatttatttcacacattttctttaataagaatttaattcatttaatattacctatgcttattttgctacatttttaaaatgtacatttttatctataagctttaagattctaaattctttatataaatcttttagaatctaaagtacaggtaaaaattatacatttataagattaccaaattttcagtcattcctatcagacactaggtttatcctggcacttgctgtcagcaaattctcagagccaaagtaaaacattgatttgttttaaggaatggaggatggataaaagtgaagtatagcttttaaaaaagtgaattattaaaaaaaattattttatccagtttcaggtaatttyactattaaaaaaaggaagccccaatgaaataagtgattttaaagatgttggcccttcaaatggactccctttccagttttcccatttctgccaaaagtgtcattgttttcccagtccacaggctcgacaccttagagatttctttgccttgcccattccttacttactgatattcagcttgtgtacagttattactcattttctttctctattttcagagccactatctggtctaggacatggatgctgcacatggataatggcatggcttctgcactgatcctctggctccctgtctctcaacacttcagttatttctcaccagataagaattttctgggaatgcatgactactcagttggagagtgctcaaaggctttctgttgacagtgctgtggtttgaatgctccctcaaaaactcatgttaaaatttaattgtgacaataagaggtaggatctttaacaagtgattaggttatgagggctctgccttcatgaatgaattaacgaattattgtgggattagttatctcaggagtgagttccttatgaaaggatgtttatcccccatcctcttgctgtctttcacactcacttgcacttctgccatggaatgacacagcacaaaggtgctcacacccttgggctttccagcctccagaaccataagccaaataaactatcctgtataagttacccagtctgtagcattctattatagcagcagaaaatggactaagacagctggtcatacaaaaccaagctgagaagctgggctttggtttcttccattgtaaaatggccatgctagtcttaaggggtagttttcaaacacttgagcagcacaaaacataaaacagatgaaaaatagagccactcatattaaagtacacaaaggaaccaacctacccactcccaccattgccccttcctcatctaaaggacttgtagtttcagggttgccagatcttccatttttcaaaagaagctagaattctgactcttccttttaaaatctagagatttttttaaatgttggtaaccgtgatggtgaattgtatgtgtcacctagacaatggcggcaagttgtttagtcaaacactgatctagatgttgctgtgaaggtattctgtagatgtggttagcatctaaaattggctgactttaagcaaaggagattatcctcaataatgtggagaggcctcatccaatcagttaaaggccttgagagcagaacactgaggtttccagagaagagggaataaagaattctgacttaaggctgtaacacaaaaatcctatctgaatttctagctggttgatttgccccacagatttcaaacttgccagctttcacaatcacatgaaccaattccttaaaaataattctttctctctctctctctaaatacacacacatgtatatgtatgtattctctatgtgta

SEQ ID NO: 54928 - DNA, 1985 bp, Homo sapiens
ccaagcagtctaaaaggatactgctatttaaaactagtttgactataagtatgaaggccagcagaattacacacacacattcacacagaaacacacacacacacacacacacagagtcatgtgctgcagaacaacgtttcagccaatgacaaactgcatagtccacagaggttccataagtttgcaatggagctgcaaatatcctattgcccagtgactttatagatgtccaaacatcataggacaatgtgttactcacgggtgtgtggtgatgctggtgctgccagttgataaagtctagcacatacaattgtgtatagtatataatacttgataatgataataaacaactatgctactgatttatgtatttactgtattacactttttaatcattattttagagtgtactccttcttggagtacaaaaagttaagtgtagaacagcctgaggcagatccttcaggaggtattccagaagaagcatacaggaagtgagagctccctgtatataacattactgtaatgttatataataaaaaatggtaacaatctgctttaagctaaacccttatcacacttcctttctaaaactcaaaagctttttggaatcaaacatcccacctgagcattaagacggtactatgctgcaggcttccaaccttagataatgattgatctttctgaaaccgtgagttaggaatctcattcttgtttgtgatcacttcttgatatttgccctgatcaaacacttcctcatgtgcgggagaatttgcagttctattggagatacttgtatgttttgtggacatatagaagatagcttttggtgattttacatgactctaaattcaaaagttcaaaaactcagaaattccttaattagtaatatatgagtatatggctctttcaggcatttgaatgtttcagccatagaagcaccaacaatagcagggataggacaaaaaataatagtttcaaaaagtttgatccattcagtatctgaatgaaatgtattcaggaagaactctggtaattagcagaaaagaatgtgcttactgctcattcattcaatgaattgatatttaatttaatgactactatatgtctggcactatgtcaagtgggtaaataaaaatataaatattttctctacttgtggaattaagggtctattgaggatgaggaagtgatagatttttgtctaataaccatactaataaatatataattacaaacccagataagtgatatcaaataagaaatgctctataaaatctcrctcgaatgaagatgatctggatagtggctgatccagatgaggcatggtgagagatgaagacagtacagcgagccagttctcaaggaaggctcaaggacgagaatcatagaaacttccaaggcttcaggagaagccagtctggaacagacatttttacaacttaagaataacaaatcttccacagaaaaataacctgactcccatgaagaatcaaactaccatggtagacatttagccaaatatggatatgatagacaatctaaaatattataaaataagcttttcaaaataatttttaaagacagataagcaggaatgaaaatgttaatgtatgatagaatgctatggtcacacacagggaaactagaaaaaaagaccaaacaaaatgtaaatgttaattaaagaaaaaaataatttaatggaagagttaaacagattaggaactgctgaaatggtattagtaagcaagatgttgaagatgaagaaatcactcagtatatgtcaaaggcagcatagagagatggaattgaaaatatgattttattagccaggatcctccagagaaacagaagcaatatgatctctctctctctctctctcgatagatagatatagtatatatatatatatagatatatagtatagatatatagatatatagtatatatatagatatatagtatagatatatagatatatagta

SEQ ID NO: 54929 - DNA, 658 bp, Homo sapiens
gggagtccatcccggcccagcacccccagcatccccgtgtatggcccccctgcacctccttgtctcatccccgaagatccgtccccctggcccctcagtgtccatgtcttgagcttaataaatgtgcatttggttttttcctctgttctgtctgtgtgttctcatctgtggggcacggtgtgggtaggggtgcagaactgaacctggggtagctctcccctgcgtgcccggagtcgccccctcttcattctcctcccccagtgccccgagatgccccccttcaatcccttctccttcctcaacacctccgsatttgtcctttcccttcctccagcgaccccagaatagagccctcccgtttctccccctgctctctcagaggcgtccactcaccctagacctgcctgccccatccccgttcccaccctctcccaccactatgccctcacccctgccccccgtcgccctcagcgattccccctcctgctcccaccccgggctctgaagccaggaaacccaagaggaaatgactgagcccgtctgggtccccgcccgctcgcgctcccctggccacaccctccgcctggacgcagcagccaccgccgcgtccctctctccacgaggctgccggcttaggacccccagctccgacgtaagt

SEQ ID NO: 54930 - DNA, 630 bp, Homo sapiens
cagaagcaggaatgacctataaagtcattgaacaaaatgaaaaatyatctttagggtttggaaaattgaaatgaaaagcaaaaatagttacaaagctgcatctcaagcatcaggcaaaagagctactacacacatttcagtctgactaaaccagttacatgcatgacttaggccctgtccagcagtactacgtagactatgtgaaactgctgactaccaagaattcaaagcatgtgctattttaaaaggcccgatctactactcttcaatgctaactccttaatgctgtaaggtacaagaacagatgctggattctaaactctgatgtggagcacagtcattgacattttgcttgcaaccgtttcatttggaaatcaacaaaatggataaattttcactaagtttttataaagaagttacccttaatagaatcctttacttgaaaaccagtgatgctaacataaaacaaagacatcactcaaatgccaggttagaaaactaccttgcagtccttaacagagggactgtgctatatattaaatctcattgtatgtggcatggattgttaaaattatttaatgatatcattaaattgccaattcactgatagtagaattgcaataagtaatt

SEQ ID NO: 54931 - DNA, 707 bp, Homo sapiens
cttggagtcagagctgagaaaaaagttaggattcattttggaggaaaacgcagtagcagcagtgacgcccaacatcctggcaagattgttccagaggcccagtgttccagagctccctcggtccccacgctttttcaaacctgttccttctgcctcctgttgattctgtgagtaccagatttccttccaataaatcccactagaggcgttgtcagcaccagatttccttccagtaagtcccaccagagatgatgcctgctgcatgcaaccagaaccctcaacgacacaaggcgaccctctgtgaagagaggggtttgtgttttacgagtccactgggttcttgctttcctcagccctcttagggcttgcaaaactttgggataagaggatctgagctcctgccagagcccttgwtgctctgctcctgacatttcatgagaggactgtggctcctccatctgccacctcaggaagaccgctaaggctggctcgggtggagagtgaaggcagggagtggacaggaccatttcactccatccttctcagctccaaagggcatcctcctgctgcccatagcagaaggcacaaagcaattaccactttgactttgaattgaatgggccaatgactgcaagatgcacaattattttatataccactgagaaagacgattactgctattaaactataacacatcatcaatttta

SEQ ID NO: 54932 - DNA, 721 bp, Homo sapiens
atatactacatgctaatattgaaaaaaccttcactttctggtctagaaacatctggccagagtaaagaaaacatacatttctcatcgtacagagcrctcctgttaacactctaggccacatcagatctctcctaaggctctaacatgacagtacttggaaagtttacttcctgaaggaatgtcacccaaggcattgcaaatgggaggaaatgaaagaaaatattcaaaatgagaggggaagtcagagaatagtactgtttaagcagctgtttctgaaacttgtaagagcactgatatgtaatatatgcatagtaaatatgtattgaattgagttgatgtggatcagtcagcttgcatggaaggacagagatgaggaagagaacaaggaccttctcagagatactcaggtgggagtctgtggataccttcagcagtttgatgtttggagacaaggaggcttgactgatcggtgtttccatgcatttttcttcctaaaaacctttaatggctccctatttcctagattagctcagcatttaagacccactaccatctgaccctaacttaattctccagtattgctcagagcagagcagcctttgactcaattgtgtgtaaaataggccaagtttgttgtcagaacccacccctccaccatcttccttatcttcagtcttagatctttcaggcccttgttatccaagatttctcagaaagtcat

SEQ ID NO: 54933 - DNA, 982 bp, Homo sapiens
gcacatgcctacacacacacacacacacacacacacacacacacacacacacacacasagcaaaaaattcagaacaattgaagatgcaattcttggctgcttggaaaataaggagggactcctctgtttttcagactcaaatcccttctgctatctacttccgcttttagacaattccattctctattcttctgctttctctattaagtcttcccaatgtgcaaatctgcagtttcctttggtgggaaccttgcttgtgaaaaagaaaatcagagtcacagagatagagatgtcatgatatttaacttttaggagtgactgtagatctgtcccaaaggaaggcagacactcaaggtcttcacatactagaattgttattgtgttatgttaactagtttaaaaaagagtaaaataaatagaaaccatttagaagcactattttcgctgtaaggaaattgttcctaaggacagagtggtaccttccatacctaagagtcatcatctctgactattaatgttagagctgttgtcacatcaatcactgcatatataggtcatcccactaatattagtacatgttctctagcattccttttattaacaggatcaaatattgttaattctatctctttgtatacccttcttttgcacatctccctttattctctccatttcccacctcctttttttttttcggttaaggccaccttggctttttatgcagcacctggtcattgttccctacctctaacctctttccacgcctactcttgctacaaacaacactgtctgatcaatcctcttcaaacaacttgttcatatcaatttcctggtggaaacatttgatagtttctatgacatgcagactaaaagctgagttccttggcctagtcttcaagtcctctaaggtctggccccaatatgtgcttcctgtttaaatgtcctctactgtgttcacccccgcacaagcatgcacatacac

SEQ ID NO: 54934 - DNA, 982 bp, Homo sapiens
gcacatgcctacacacacacacacacacacacacacacacacacacacacacacacagagcaaaaaattcagaacaattgaagatgcaattcttggctgcttggaaaataaggagggactcctctgtttttcagactcaaatcccttctgctatctacttccgcttttagacaattccattctctattcttctgctttctctattaagtcttcccaatgtgcaaatctgcagtttcctttggtgggaaccttgcttgtgaaaaagaaaatcagagtcacagagatagagatgtcatgatatttaacttttaggagtgactgtagatctgtcccaaaggaaggcagacactcaaggtcttcacatactagaattgttattgtgttatgttaactagtttaaaaaagagtaaaataaatagaaaccatttagaagcactattttcgctgtaaggaaattgttcctaaggacagagtggtaccttccatacctaagagtcatcatctctgactattaatgttagagctgttgtcacatcaatcactgcatatataggtcatcccactaatattagtacatgttctctagcattccttttattaacaggatcaaatattgttaattctatctctttgtatacccttcttttgcacatctccctttattctctccatttcccacctcctttttttttttcggttaaggccaccttggctttttatgcagcacctggtcattgttccctacctctaacctctttccacrcctactcttgctacaaacaacactgtctgatcaatcctcttcaaacaacttgttcatatcaatttcctggtggaaacatttgatagtttctatgacatgcagactaaaagctgagttccttggcctagtcttcaagtcctctaaggtctggccccaatatgtgcttcctgtttaaatgtcctctactgtgttcacccccgcacaagcatgcacatacac

SEQ ID NO: 54935 - DNA, 624 bp, Homo sapiens
actatagattttgtttatatagttctttcctattggggatattttgtatgcatattcatgaatgtgtatgtttttccattattaacaatgttatgattaaccctctggtagctaaatattatgtgcatccttaattatttaatgaagaaaattactataagtgtaattattaggatgaaagctctgcatgtttttttgatttccaatacacgtggccaaattgtttctgaagggcttacaagttcccactttcacatgatgtatatgagaaagtctatttcttcacacccttttcagcattgagaattacaattctttgtagcttatcaatttgataggttgagggattactgttttaatttctttgattaataatgcatatagttttattatttatttcttctttatgtggttgtcagttcaagctagttcaaacctgagtcttcaaaaatacacacacacacacacgcagccccacacaccggcacacactcacacatattgytccatgcctctcccatcctgtacttgtatgtagtttttttttaatatgggctagagtgcagaaacttacattttcctcattgtaatcattttgttaaattcagccaaatgtttcagctt

SEQ ID NO: 54936 - DNA, 692 bp, Homo sapiens
taatcataaaatctcctgcatatttataaaatgaaaattaaaactgaaaggaagcagaagaaaaatcagcatgtaaaatgccatgaagggaaacacctgctgggaaaacagaaatgtaaaaaagatctaataggcttccttcataattttacccagaaaagtggtaatatttagaaataaaaatgtgaaaaggcagtagcatttcaatgtttttaacacatttaaaggctctgctccatggtcaacatatcaagaatctaaaaacctgtaataaacttttgttttttaatatcaatttcaaaatacattttattctattttttagttgttttattttaattagtgaaattttaggaataaattttaatgttatcaactttaaattttatgtcttcatgatgtaattctcccaaagatgrcatttacattttagccagatgcttcattttgttgcatatcactgaaaacttagaaatcataaatgcactaaccttttactcctaaagcatgcacacaggcactctttaataattcaaggacctttctataatgatgaagtcatactgatgaactcaacaggaaaatactaatacgattaaacaaagcttaaataattcattgtagaaacgaggcataatagagcaagaaaaataaattctagctgctcaaaatatttcactttttcttacacc

SEQ ID NO: 54937 - DNA, 604 bp, Homo sapiens
tcgtcagtcccaagaaagctgattcctaagccagccattggcaaggctgagaagcaacctactgaaaatttataactgaatgtcaaggaccctagccatcttttctcacttccttcacatagttctggccaacagattatcctgcagwgaaaaccatagttgacaggctgaaccatataaatcaagctttccaaaaacttttcagtgtctttctcccagatatggatgggcaggcagccaaggatctccatatagttgatggaatataataagaaaagtagaggccaaaacaaactaatggaaaaacagctaggaagaaataaagactatgaagaagaaaagaattaatatcttcaaaaaaagatagcaaaatattatagcatattacagccattaaacaagaactgggtactacaaattttttaaaaagtagcaaaggccaaaaataaattggacagtaaaaatatcatagtttaaaaggaaactttaggctgggcacagtggcctaaagtggaatcccagcactttgggagactaaagcaggagaatcactgagtccaggagttcgagaccagcttgggcaacatagcaagaccttgtttcc

SEQ ID NO: 54938 - DNA, 661 bp, Homo sapiens
tgagtttatctcaaggttttgctctttctgccaagcatttagagtgatccctttgtattatttatgctattagtatttgtatagactactgactattttggcttggctttttcatttcacttctcatacttgtcagttgtctaattaggtgagttgattagtttgtcatttctagttgtctcaaatgtggcatcagattcccwttcaacctttccagaagtactttaattaattgacatcttatgcccttccacactaaacgtcatcaaattttttctttgtttgtagattccctttagaatattcatgtagttggtgctgatcttttctacgtaagttctatctgtggctccttgtttaaaaagcagcaaaaagggctgctaagattctaaaatataaagcgttttatttttctttattctgtgatctctatctcaacttgttatggtgtttatttgctctttaatgtcattctaggtaaagaaaaattagcattttaaattattcatataaatgttactgttcatctttatattatgcaaggccagttttaaaggcagagataagaacgttgaactcatatgtggaattactgaattacacaattcctattttgtggctcctatgtgcatatgtattttgtacttaccagaacagtggc

SEQ ID NO: 54939 - DNA, 661 bp, Homo sapiens
tgagtttatctcaaggttttgctctttctgccaagcatttagagtgatccctttgtattatttatgctattagtatttgtatagactactgactattttggcttggctttttcatttcacttctcatacttgtcagttgtctaattaggtgagttgattagtttgtcatttctagttgtctcaaatgtggcatcagattcccattcaacctttccagaagtactttaattaattgacatcttatgcccttccacactaaacgtcatcaaattttttctttgtttgtagattccctttagaatattcatgtagttggtgctgatcttttctacgtaagttctatctgtggctccttgtttaaaaagcagcaaaaagggctgctaagattctaaaatataaagcgttttatttttctttattctgkgatctctatctcaacttgttatggtgtttatttgctctttaatgtcattctaggtaaagaaaaattagcattttaaattattcatataaatgttactgttcatctttatattatgcaaggccagttttaaaggcagagataagaacgttgaactcatatgtggaattactgaattacacaattcctattttgtggctcctatgtgcatatgtattttgtacttaccagaacagtggc

SEQ ID NO: 54940 - DNA, 661 bp, Homo sapiens
tgagtttatctcaaggttttgctctttctgccaagcatttagagtgatccctttgtattatttatgctattagtatttgtatagactactgactattttggcttggctttttcatttcacttctcatacttgtcagttgtctaattaggtgagttgattagtttgtcatttctagttgtctcaaatgtggcatcagattcccattcaacctttccagaagtactttaattaattgacatcttatgcccttccacactaaacgtcatcaaattttttctttgtttgtagattccctttagaatattcatgtagttggtgctgatcttttctacgtaagttctatctgtggctccttgtttaaaaagcagcaaaaagggctgctaagattctaaaatataaagcgttttatttttctttattctgtgatctctatctcaacttgttatggtgtttatttgctctttaatgtcattctaggtaaagaaaaattagcattttaaattattcatatraatgttactgttcatctttatattatgcaaggccagttttaaaggcagagataagaacgttgaactcatatgtggaattactgaattacacaattcctattttgtggctcctatgtgcatatgtattttgtacttaccagaacagtggc

SEQ ID NO: 54941 - DNA, 1246 bp, Homo sapiens
cagtttaactttaatttctgacaaagtagattttgatgtgaaaatacatgtttagaaatttgtagcaaacatcatacttagtgttaagcttctagaagcattctcatttaagaagcaaataacaatgcctgcactcaacatttctattcaatattgkcctaacatcccagtcattataatagggcaaaacaaagaagtaagaatggtaagaattaaaaaggaagagataggttgggagcgggagcattgcttcatgcctgtaatcctagcactttgagaggctgaggctggtggatcatttgagcccaggaggtcaagaccagcctggcaacatgtcgaagtgctgtctttacaaaagaatacaaaaaattagctgagtgtggcggtggtatgtgcctgtgagctgagctactcaggaggctgaggtgtgaggatcacttgaggctgggaggtcaaggctcacgtgagaggttgaagctacagtgagccatgttttcaccactgcactccagcttgggtgacagagggagactctgtctcaaaaaaaaaaaaaaaaaaaaggaaaagacaaaatattttttcttaggcaatataattatcatataattagataatatgcacactattacaactaatatgaatgctaaattgttagatatgaacccaacatactcaactcaacggctttcttttacaataaccctttagacaatataatagaaaaaactaatttttaagctacaaaatattaaaggcatgtaatactgaatatcacaaaaatctctaagaatttatgtaggaattacaaaaattcttgataacataaaagaagctcgtatgtaaaggaagactacatcgtgttaatttaaatgtagactcaatattgcagtgatataaactctaggcaagtaatcaatatatttcaatgctagttcaataaaaatctaagcagagtgtttcatggaactaaaacagcggtttctaaagttaatgtagaagagcaaacgggcaaaaatagtaaggaaaatctaaggaagaacaagttgggaggggcaagtcctagcagataacaaaacttggaaagctttggaaattaagacagtgtgtattatgcagaggcagacaaataggcaaacagaacagaatagagagccagaaaaataatccttttattgatatgtgacagagatgactttataagccagtgagctaagcaataaatgctgatggagaaattcataattca

SEQ ID NO: 54942 - DNA, 522 bp, Homo sapiens
agcacagagaactctcttggcactatgtttataatttaaaaggtatatcacattttgttaggractatttaatctattaactataaattcaagcaatgcaccatttcataaaatccaatagaagtattttgaaatatcaatcaggattttttccaaaaaaatggatgaatttaaaagtatattttaatggttttgaaaggtttaagagttgatatttggagaacagatgatgttgaagtcatatttagcgccctaaatttgtgcaactcataaaaaatgtttttaatttataaaaatgtacactctgaagtaacgctaatataaatgaatttagtatttaccaataaaatattttgaccacttttagttttgcatttatcagtatgtattgatgttttgattaaactattaaatattattaaatattattcatttttaattgaacaataatttattaaatacctgataagtgtctcacatattgaaaagttaaacaggtctgatataaatttttcttcacga

SEQ ID NO: 54943 - DNA, 999 bp, Homo sapiens
tagtgaaagtgttaagtagagcagtggtccccaacctttttagcaccagggactggttttgtggaagacattttttccacagacctggtccctaacctttttagcaccagggactggtttcgtggaagayattttttccacagacctgtggtggggtcgggaggatggtttcaggatggaactgtttcacctcagatcatcaggcattagattctcataaggagcactcagcctagatccctcgcatgtgcagttcacaatggggttcacgttcctatgagaatctaatgccgccgctgatctgacaggaggtggagcttaggaagtaatgctcgctggccgctgctcacctcctgctgtgtggtccagtttctaacaggccatggaccagtctggtctatggcctggggctttgggacccctacagtagagaaccctgattacctctcatttctcattggtcatttctagaataaggaagcactattctagtcacctttaaaaggggaaaacaggccaggtgcggtggttcatgcctgtaatcccagcactttgggaggctgaggcaggcagatcacgaggtcgggagctcgagaccatcctggctaatgtagtgaaaccaagtctccactaaaaatacaaaaaaatgagcctggcatggtggcgggggcctgtggtcccagctacttgggaggctgaggcaggagaatggcgtgaacccaggaggcagagcttgcagtgagccgagattgcgccactgcactccagcccgggcgacagaacgagattccgtctcaaaaaaaaaaaaaaaaaaaaaaaaaaaaaaaaaaaaaaaaaaaaaaaaaaagggaaaacaggatacctgagaagaactaaaataccattccaggatttctcctgaaaccatatcgtttccataaacttcacagcttaagctccatatgaaaagaaattgagaagactgaaatttaggcacctgtgttgggaggatctgaacct

SEQ ID NO: 54944 - DNA, 999 bp, Homo sapiens
tagtgaaagtgttaagtagagcagtggtccccaacctttttagcaccagggactggttttgtggaagacattttttccacagacctggtccctaacctttttagcaccagggactggtttcgtggaagatattttttccacagacctgtggtggggtcgggaggatggtttcaggatgraactgtttcacctcagatcatcaggcattagattctcataaggagcactcagcctagatccctcgcatgtgcagttcacaatggggttcacgttcctatgagaatctaatgccgccgctgatctgacaggaggtggagcttaggaagtaatgctcgctggccgctgctcacctcctgctgtgtggtccagtttctaacaggccatggaccagtctggtctatggcctggggctttgggacccctacagtagagaaccctgattacctctcatttctcattggtcatttctagaataaggaagcactattctagtcacctttaaaaggggaaaacaggccaggtgcggtggttcatgcctgtaatcccagcactttgggaggctgaggcaggcagatcacgaggtcgggagctcgagaccatcctggctaatgtagtgaaaccaagtctccactaaaaatacaaaaaaatgagcctggcatggtggcgggggcctgtggtcccagctacttgggaggctgaggcaggagaatggcgtgaacccaggaggcagagcttgcagtgagccgagattgcgccactgcactccagcccgggcgacagaacgagattccgtctcaaaaaaaaaaaaaaaaaaaaaaaaaaaaaaaaaaaaaaaaaaaaaaaaaaagggaaaacaggatacctgagaagaactaaaataccattccaggatttctcctgaaaccatatcgtttccataaacttcacagcttaagctccatatgaaaagaaattgagaagactgaaatttaggcacctgtgttgggaggatctgaacct

SEQ ID NO: 54945 - DNA, 999 bp, Homo sapiens
tagtgaaagtgttaagtagagcagtggtccccaacctttttagcaccagggactggttttgtggaagacattttttccacagacctggtccctaacctttttagcaccagggactggtttcgtggaagatattttttccacagacctgtggtggggtcgggaggatggtttcaggatggaactgtttcacctcagatcatcaggcattagattctcataaggagcactcagcctagatccctcgcatgtgcagttcacaatggggttcacgttcctatgagaatctaatgccgccgctgatctgacaggaggtggagcttaggaagtaatgctcgctggccgctgctcacctcctgctgtgtggtccagtttctaacaggccatggaccagtctggtctatggccyggggctttgggacccctacagtagagaaccctgattacctctcatttctcattggtcatttctagaataaggaagcactattctagtcacctttaaaaggggaaaacaggccaggtgcggtggttcatgcctgtaatcccagcactttgggaggctgaggcaggcagatcacgaggtcgggagctcgagaccatcctggctaatgtagtgaaaccaagtctccactaaaaatacaaaaaaatgagcctggcatggtggcgggggcctgtggtcccagctacttgggaggctgaggcaggagaatggcgtgaacccaggaggcagagcttgcagtgagccgagattgcgccactgcactccagcccgggcgacagaacgagattccgtctcaaaaaaaaaaaaaaaaaaaaaaaaaaaaaaaaaaaaaaaaaaaaaaaaaaagggaaaacaggatacctgagaagaactaaaataccattccaggatttctcctgaaaccatatcgtttccataaacttcacagcttaagctccatatgaaaagaaattgagaagactgaaatttaggcacctgtgttgggaggatctgaacct

SEQ ID NO: 54946 - DNA, 999 bp, Homo sapiens
tagtgaaagtgttaagtagagcagtggtccccaacctttttagcaccagggactggttttgtggaagacattttttccacagacctggtccctaacctttttagcaccagggactggtttcgtggaagatattttttccacagacctgtggtggggtcgggaggatggtttcaggatggaactgtttcacctcagatcatcaggcattagattctcataaggagcactcagcctagatccctcgcatgtgcagttcacaatggggttcacgttcctatgagaatctaatgccgccgctgatctgacaggaggtggagcttaggaagtaatgctcgctggccgctgctcacctcctgctgtgtggtccagtttctaacaggccatggaccagtctggtctatggcctggggcttkgggacccctacagtagagaaccctgattacctctcatttctcattggtcatttctagaataaggaagcactattctagtcacctttaaaaggggaaaacaggccaggtgcggtggttcatgcctgtaatcccagcactttgggaggctgaggcaggcagatcacgaggtcgggagctcgagaccatcctggctaatgtagtgaaaccaagtctccactaaaaatacaaaaaaatgagcctggcatggtggcgggggcctgtggtcccagctacttgggaggctgaggcaggagaatggcgtgaacccaggaggcagagcttgcagtgagccgagattgcgccactgcactccagcccgggcgacagaacgagattccgtctcaaaaaaaaaaaaaaaaaaaaaaaaaaaaaaaaaaaaaaaaaaaaaaaaaaagggaaaacaggatacctgagaagaactaaaataccattccaggatttctcctgaaaccatatcgtttccataaacttcacagcttaagctccatatgaaaagaaattgagaagactgaaatttaggcacctgtgttgggaggatctgaacct

SEQ ID NO: 54947 - DNA, 549 bp, Homo sapiens
gagtgattgctgttgccctgtttcctgctgctttgttgttctgcctgtcctagtctcctttgaagtgggaaagcattttctctcataggcaagtcacactgcattgccgaagtccagctttctgcagactggcagtcgcacacacatttggaatgcacacagcggctgcctcctgatgtttgtatcatagtcgtattgtcaaagagtagccgattttagagttcttttggatcataaactggaaatactgatggaagcacacaagtggagagaagttgacrtggaaagggtcttccttctcattgctgcccgtttgtacatgggactgattctgttgtgttcaccagagaaagcttgaggccatggcgagatactgcatgtttgctgttccacaaagcagtggcttagctgccatcttgcttttctttggacaacaggaagtgaaccttaaggaagagagaattctgttctaaaactccaaaatctggcttttttttttcttttgttttggtttggttttggaaaactaattaattagacttgtgtggg

SEQ ID NO: 54948 - DNA, 549 bp, Homo sapiens
gagtgattgctgttgccctgtttcctgctgctttgttgttctgcctgtcctagtctcctttgaagtgggaaagcattttctctcataggcaagtcacactgcattgccgaagtccagctttctgcagactggcagtcgcacacacatttggaatgcacacagcggctgcctcctgatgtttgtatcatagtcgtattgtcaaagagtagccgattttagagttcttttggatcataaactggaaatactgatggaagcacacaagtggagagaagttgacatggaaagggtcttccttctcattgctgcccgtttgtacatgggactgattctgtygtgttcaccagagaaagcttgaggccatggcgagatactgcatgtttgctgttccacaaagcagtggcttagctgccatcttgcttttctttggacaacaggaagtgaaccttaaggaagagagaattctgttctaaaactccaaaatctggcttttttttttcttttgttttggtttggttttggaaaactaattaattagacttgtgtggg

SEQ ID NO: 54949 - DNA, 617 bp, Homo sapiens
cagatcccagcctgagacctgccatgtctcccagccctccagcacagagctcagcccaagtcccctctctctgcaggtcccctgaagaccttgccaaagtgtgagatcrccctggagaaactcaagaatgacatggcggtggtgagtgggatgctggggacccctgggggatcggggctccctcaagagctcctgggggcaccactggaggggccttcatggtcaggctgggtgggggctgggcctgatctgagaccctgcccaccaggcctcttccaggccaggtttgctgtgctgggcgggaacgtgggagaagtcaccctctgtctgtggcccccgtgggtgcctctgccacccggtccagagacagcagggactctggggaggacaaggctgtgggggtggggattatacccaggatcggccaacattgtctgcacaagggtggaggctaagagagaggcctcgggaatctggctgtgagtgaggactggccagaggtaggaaggccccctaaatggagaaccctcaggtcccgggcttctgaccgtgcccatcctaccgccagcccgctgcccctggtgccgctgaccaaacagcagtacctatgccagcag

SEQ ID NO: 54950 - DNA, 738 bp, Homo sapiens
tgggtggctcctgagtgcaggccctgctcgcctctgtccctgcatctctctttctgccaacaaccccctggctgaaggcctccccaggcctgcagagatttgaaggtctggagttcatcttttgttttctaggtgtaaaaacaggccagtgtgtggtgttcaatgggacccacaggacctgtgagatctggagttggtgcccmgtggagagtggcgttgtgccctcgtaagtgtccccacaatcccctaccccaactggcgcagggccccaggcctggcagaggctgtcacctcccttccacctgcaggaggcccctgctggcccaggcccagaacttcacactgttcatcaaaaacacagtcaccttcagcaagttcaacttctctaagtaagcagagtgggtctcatctgccccaagaccctccttgtcccctacctcatctgacctttcccactcctcccaggtccaatgccttggagacctgggaccccacctattttaagcactgccgctatgaaccacaattcagcccctactgtcccgtgttccgcattggggacctcgtggccaaggctggagggaccttcgaggacctggcgttgctggtgggtcccaagttgggggcagggttcctagagggctctgggagagggtcccgggcccacccaccggtggaaaagctatgtgctatgtgcagggtggctctgtaggcatcagagttcactgggattgtgac

SEQ ID NO: 54951 - DNA, 738 bp, Homo sapiens
tgggtggctcctgagtgcaggccctgctcgcctctgtccctgcatctctctttctgccaacaaccccctggctgaaggcctccccaggcctgcagagatttgaaggtctggagttcatcttttgttttctaggtgtaaaaacaggccagtgtgtggtgttcaatgggacccacaggacctgtgagatctggagttggtgccccgtggagagtggcgttgtgccctcgtaagtgtcyccacaatcccctaccccaactggcgcagggccccaggcctggcagaggctgtcacctcccttccacctgcaggaggcccctgctggcccaggcccagaacttcacactgttcatcaaaaacacagtcaccttcagcaagttcaacttctctaagtaagcagagtgggtctcatctgccccaagaccctccttgtcccctacctcatctgacctttcccactcctcccaggtccaatgccttggagacctgggaccccacctattttaagcactgccgctatgaaccacaattcagcccctactgtcccgtgttccgcattggggacctcgtggccaaggctggagggaccttcgaggacctggcgttgctggtgggtcccaagttgggggcagggttcctagagggctctgggagagggtcccgggcccacccaccggtggaaaagctatgtgctatgtgcagggtggctctgtaggcatcagagttcactgggattgtgac

SEQ ID NO: 54952 - DNA, 1216 bp, Homo sapiens
ctcccaaaatactgggattacaggtgtgagccactgcacccggccttttttttttttttcttcttttgagacagggtctcactttgtcgcccaggctggatgtagtggcagaatcatggctcactgcagccttgactgcccaggcccaagccatcctcccacctcagcctcccaagtggctgggactacaggcttgcaccaccacaccaaggtgaagtgttgttttgtttgttttttgtagagacagttttgccatgttgcccaggcagtgatcctcctgcttcagcccccacaaagtgttgggatcacaggcgtgagccgctacgcccggccactttcttacctaaaatacctgcacaccctacttggagaccctagggtgaggggagtggggaacaggagaacctgacagtagagggtacatgtaaggaggagagggacaagcttgctgtgtggtggggtgctccagggctgggggtgcctagggatccacctctctcccaggctgtggaattatcctccccgcactcactgcttctctaaccttggctatctcctgctgcctttggggtgtctgatgggcttgagggacctcccagctgctctaggtcatctcaccgcagccatgtgccccatttggtactgtcaaagctgctggaatattatcgtctttccagaactatccctggggcaatatcaggacctcaggctgcccggggctcagagccctcctgggtcttcctggggcccctggtccacatgcatctccactaagcctgagggcccttcgggagaggcagcacttttagcctgcccttggttttagcttttgctctacgaagatcttgtgatttctgccccaccatggggcagcaggaacctcaagcacagtgcctgcrgcaaagggagccacaatggacttgccccaggtcaggcctgcacttgccttgtgtcagggtatctccccaagttgctggcctcagtccctacactgacctgtttccccagctttatctctggcaccccaaactcagcagccccgaccccacttcccaagcaccccctgtgcctggctctgtgcctgtcatggtgtcctggcagcagtctgggagagtatttcagttacctgcggtgtcctgggaaggctggagcagaggggtccactcactgattgccaaggtcacagaacaggacttgcattgtgcactggaggccc

SEQ ID NO: 54953 - DNA, 621 bp, Homo sapiens
cccgtgatgagaaactgaggccaagttggggggcagggcttatccaggccattgccagggccacacctggcaggatggaagccttgggaggagccctgtgggctgagggtgggctgaggtggcactaaagtgggcagccttcgtgcagtggggcaggcagatggtgctggggctcacggcagagtcagtggagggagccgggccaagctgggctcagcaccagagcctcacaggcatcatagcctggcccagggmagagccagggccgacagtggcttgcgttgacagccccttcccaggcctggaggagcaggtggtcagggcagggactcacagccacagtgaggtcagggccagcttcctggaggaggttgggatgtgctggtgggggccagtgtgaggacgcaggtccaggcagagtggagacggcagagctctgctgaggcctggggcccagccgaaggcaagagaggcaggggagccctttcctgctgtggagccggccgtggacagttgcaggtgctgaggctggagccaggctgtattttcagggtggggtagcggctgcttcctctcctcagccaggcccacctgcctcctgggccctgagggtcagcatgg

SEQ ID NO: 54954 - DNA, 621 bp, Homo sapiens
cccgtgatgagaaactgaggccaagttggggggcagggcttatccaggccattgccagggccacacctggcaggatggaagccttgggaggagccctgtgggctgagggtgggctgaggtggcactaaagtgggcagccttcgtgcagtggggcaggcagatggtgctggggctcacggcagagtcagtggagggagccgggccaagctgggctcagcaccagagcctcacaggcatcatagcctggcccagggcagagccagggcygacagtggcttgcgttgacagccccttcccaggcctggaggagcaggtggtcagggcagggactcacagccacagtgaggtcagggccagcttcctggaggaggttgggatgtgctggtgggggccagtgtgaggacgcaggtccaggcagagtggagacggcagagctctgctgaggcctggggcccagccgaaggcaagagaggcaggggagccctttcctgctgtggagccggccgtggacagttgcaggtgctgaggctggagccaggctgtattttcagggtggggtagcggctgcttcctctcctcagccaggcccacctgcctcctgggccctgagggtcagcatgg

SEQ ID NO: 54955 - DNA, 2548 bp, Homo sapiens
gaactcctggcctcaagtgatctgtccacctcagcctcccaaagtgctgggattacagatgtgagccaccacacctggcctaaaatgtcatatattttgaactgactgacttctccaaaaacttatggttattagttgagagagaaaacttgagagaaagtttccctgcacttggatgagaggagagcggaacagcctgcatctctggtgctggggagtatcaaataaggggaattgggagaaggatggaggcaacagcgtagctctttgcctttcaaaattaaaatgggatgctgctttatattacaaatctaaggaattagaagagcagcaaactaagcaactaagtttgttctccttgcataaactttaaaaagccagcttaaaagttctcaagcttaaaattcgaaaaatgaaaacaaatgcatggcatgacagaggggataattcctgcacttttggaaatgttctcatgttttcttcatttcatcctatgaatgaaaatgccgtcaaaggggaataaggctattcgcagagtgctcatcaccacggtaaccactgagcatctgtaccctttagtatcttcattttgattataataaatgagttacgaatctatatctggggccctagttatatatttgccatatgttcacaccacatgcacacacacacacacacacacacacacacacacacactcacatatatggtgactaagactaagagtcagcctaaaagaagaatgatttggagcgggagctcttggagggaatggtaggaaaataacagggatccactcagtctcattttctactaaatttcaataatgagaagtgtgctcagcaaatgtttgttgactatatgaataaatgaaatggtgcatttaaccagaattgcatatttaaatatggtggtagtgtgtacaatattagaggaaggaaatgcaggcaacaaggagaaggcttctgcgatgatccatgacactctgatattgccattctgtgcaaagttgctcacattttgacattcatgatcatttttaattccccaaaacaagcaactgaactttcaacttccttttattaccataaaatagatgcaatagataccctcaccccattcctcacccaccccccaattagctttacctggtgcctaatccacagcccatcccagactcaccctatccctccttagacttctctgtatcttttacccgatccttccaggtgtccaaacagtgtcatccggtgtcctgacatgcggccccaatggactgatccagggtggaaaggaagagtgagaagaaatcagacagaagaattcaggagatgtggcaacagagtggatgtagcagaagggacatagagagtgcctaaagatgagtctttggtcagcatgtgatgaaaagaatgaagacactggggaagtggggagcagaagcggatgtgggcccaggaggaagaaggtaggtttggactggggcatgctgaggtcagtagcaacatcaaagtcctgagcaccctcatattgttgcagattccagagagcagagatggcaaaaagatgcatggaagagagacacagcagggtcgggttctggcctcaggagccaagggggaagtgcctgaggagacccccaaatgaggcctgtgtcaatgaggtctttaggggactggtttccatgtatgccaggccatactccctggattcccagcattgagaagaccaaacacttctacacatttattactgaagccccctgcaagctgaaggcggaggaagtggccaatctcctaagccgtgtgtggctgaggcagttgtcagagctgtgatgagggaaatgctcattattcttctatccctcacttggccaaataaagaacttcttagaattcttcccctgtgacaaaacggggctgtgatttggaaagcctcaggcaagtttgctagggccgcggtaaccaagcaccacagactgggtggcttcaaaactggacggcttcaacagaaagttattgttgctcagttctggaagccagaagtccaaaatcaaggtacttgcagggtcagttcgatctgagggctgcgagggaaggatctgttgtagacctctctcctaggtttgcaggcattggtcctgatgttcacagggcatccttcctgtgccttcacatcatcttctctctgaatgtatctctgggtccaaatttccctattttaaaataaggaaatcagtcctattgggttagcaccccgcccctcactttaacttgattacctctgtaaagaccctacctccaaataagatcacattctgcgtactgagggctaggacctcaacatctgaattcagggtgggtggatgcacaattcattccataacattaagaaggaagggataagtgcccaaggaatcacatgctcgcttggggagagttccaagcgtgcasagctggtggtcatagcctagcctcaggccttcggaaatcccctgaatctggttttcccagttctcataatctcatttcaccaaaatacggca

SEQ ID NO: 54956 - DNA, 3641 bp, Homo sapiens
ctccactagcctgtgggttgattcttgggcaaactgccaatgtctctaagcctcaatttgttcacatggagccaagtgagccccatgtgtatgaaagggctttgtacccactaaaagcctgaaaatttgaggtgcagttattttgaaaatacacaattgatggcctataaatagaacaggtgagttaagtggaacattgacaaccatatggaagtttatacagtgccacgagaaaagcttgatttttttgttaaagctcagcagcggttaaatcaactgctaaaggaacagccccttcccagaatgttttctctttttttgagacagagtctcgctctgtcatccaggctggagtgcagtggcacgttctcagctcacggcaacttccgcctcccaggttcaagtgattcttctgcttcagcctcccgagtagccgggattacagccacatgccaccacatctggctaattttggtatttttagtagagacgggtttcaccatgttggccatgctggtctcgccctcccaacgtgctgggattagaggcgtgagccaccgcaccaacccctcagaatgttttcttgatggggttgctggcacttgctcttctgccactgcggtagggtagaaaagccctgtgactctgagggattccctttctttctcttccagatgtttcctctgggatccacactctgggtcctttcatatctctggaaataaattgtccccttcaaattcaaagcaccaaaacatactgcaagttcccacagttcaggctgcaactacttttaatcagttctaagaaatctcagggaaccaagttcatcagttccgtgacttcagaataagtcacctaatctctcttggctgcagcttccttacaaggaaaacgatatacctcaaattctgagtcacatgagcttggcagaaatgtaaacagagtttccactgtttcctatctctctatccttttctggttagttccatgaacttccacccctagacacaggctgaaatccacctcaccctcagcaaccttggattttgaagaaggtggggcctgagttgttttgagttctcagttgcaaagtgctgttctcaggccagccctggcctacctgcctagagctattgttagtaaattcttgcttagtgaagagacaaaggaaaaatgcatgtctgaatggattagcttgatcactcattcaacaaatatttactgagtgtgtctattatttaccatggcttacagttctctaaggaggtgatccacctgttaagtggaggtggagggggtaggggaggcttccctgaggaagtgagacctgaaggaagaagaggaatagtcaagaaagccagtccacagccctgcagtgggaaagaaggaagtaatgaatgcatggatggatggatggatggatggatggatggatggatggatggatgaaaaaatgaatgattgaataaacgaaaggacagaccaatgaataagcggtccggcctcccccttggttactggcacgctaccctcattggatttctttctcaattagcacatcctattgccaggcacatgtgatgacattcaatcctataaagcagttatgagtcctggacacctaccactgtgatgagaagagactcctgcagcacttacacaaacatttccagggttcctactggttggaaagcactcattatccaaatgaagggcggagaaatctcagactttttctacttcagaggagccattcctttcagcttttcacattcacccccattttttctagttaatagcttccatttcagccctctccattgtcaacatcattgaaacatctcatatgggctacagaattttcattttttgggtttggttttgcgttctgggtgtgtgtatgtgtggtggttttcggttttttgtgtgtttttttgcaataaaatccagtaaataccatatagacttcaactgtgtctttctttcatggtaaaaaaatactcaagggagataagttcactacgtagaaagaagaaaaacttttgctattcctgagaaggggagaaggagggaaaaacaaaaacccctgtaaatgtcactagtgactaactccatctatttttggaaggccctagggggttttagggctttccatgcaatagattaaatagtaacattcctctgaaaaggaatgtgcagccttgctccctggagtgctcacctgcaacagctgtcattaagggcccaaaaggcgagtggagttgatggggcccacagcgcacaaagcttccatcttcacctccaccagctctcagggaccatagaacattggcgtcttttaagcccatgagtcaagtgtgtcccttgtctgctaggtttccccaggccactgtggacatgtgactgtgcctttttagcacctgcttcttctgtcatgaactccatgcatacctgacttaagacagcagacctctcaggtcagatgcccaggttcattcccatgagcttgccctgagccctatcaaatcaatgtgtctccaaagaaatataccgctgtcaaaatttagaaagctcgttattgttaaaaaaaaaaaaaaatcacatttgtattatgctggtatttgttggaggaggagtggacaaaacagcaaagaaatatgacctggctgtggtgtttaagtactaccatgtttaaaaggacttatacttggaactttgttttttcccataccaggttgaaggtgttaggttaaaaataagtttttacaacggtggttcattatatgaatctctctacttttgtgtaacttcatgctggaaattttccacgataaatggttacaaaaagaaagataagtaacacagcatttcacatgccacaggatccttgctgctttacttcccttcttcggctccactaagactcctcaactagcaacctctgaaagatgagcttccagctgtgttatgccttaacacctggaatcccggatgttgccaccggaatcccaactcatttcatttcagttgcttagaagcagggctcaattttttacatcttaacattttaccaatacttccataaaggaactctgtcctcaccatgatagaaattaaaggttctattaaagtttttgtctaagaagaaaattacatattaacaggcattctggtgttatttttaccctttayttaaaaggttaaggttctaaggacattaaaaaattgcaatagtattattgggagtaaatttcattcccatgtttaggaaacatgaattagcaaatgatgatgtcatagttgaattttgcaatacaattaaggattttataactaccttaagtctaaaccacaatacatataaggcatggaaaataaattctataaatgtcattgtcacaaataaaaaatccattgaacatttacaaagttaataataattcataatgtgcttatgaataatcatgaaggtgaagtatattagcttaagaacttcttaagaattgttataaaaattccacattccatctacaccacttctggttagcaggggtattctactcctaattaaaaacgcttctcttagcagatgttttctaatacacccaaggccagaacaagttggcttccccttccct

SEQ ID NO: 54957 - DNA, 3641 bp, Homo sapiens
ctccactagcctgtgggttgattcttgggcaaactgccaatgtctctaagcctcaatttgttcacatggagccaagtgagccccatgtgtatgaaagggctttgtacccactaaaagcctgaaaatttgaggtgcagttattttgaaaatacacaattgatggcctataaatagaacaggtgagttaagtggaacattgacaaccatatggaagtttatacagtgccacgagaaaagcttgatttttttgttaaagctcagcagcggttaaatcaactgctaaaggaacagccccttcccagaatgttttctctttttttgagacagagtctcgctctgtcatccaggctggagtgcagtggcacgttctcagctcacggcaacttccgcctcccaggttcaagtgattcttctgcttcagcctcccgagtagccgggattacagccacatgccaccacatctggctaattttggtatttttagtagagacgggtttcaccatgttggccatgctggtctcgccctcccaacgtgctgggattagaggcgtgagccaccgcaccaacccctcagaatgttttcttgatggggttgctggcacttgctcttctgccactgcggtagggtagaaaagccctgtgactctgagggattccctttctttctcttccagatgtttcctctgggatccacactctgggtcctttcatatctctggaaataaattgtccccttcaaattcaaagcaccaaaacatactgcaagttcccacagttcaggctgcaactacttttaatcagttctaagaaatctcagggaaccaagttcatcagttccgtgacttcagaataagtcacctaatctctcttggctgcagcttccttacaaggaaaacgatatacctcaaattctgagtcacatgagcttggcagaaatgtaaacagagtttccactgtttcctatctctctatccttttctggttagttccatgaacttccacccctagacacaggctgaaatccacctcaccctcagcaaccttggattttgaagaaggtggggcctgagttgttttgagttctcagttgcaaagtgctgttctcaggccagccctggcctacctgcctagagctattgttagtaaattcttgcttagtgaagagacaaaggaaaaatgcatgtctgaatggattagcttgatcactcattcaacaaatatttactgagtgtgtctattatttaccatggcttacagttctctaaggaggtgatccacctgttaagtggaggtggagggggtaggggaggcttccctgaggaagtgagacctgaaggaagaagaggaatagtcaagaaagccagtccacagccctgcagtgggaaagaaggaagtaatgaatgcatggatggatggatggatggatggatggatggatggatggatggatgaaaaaatgaatgattgaataaacgaaaggacagaccaatgaataagcggtccggcctcccccttggttactggcacgctaccctcattggatttctttctcaattagcacatcctattgccaggcacatgtgatgacattcaatcctataaagcagttatgagtcctggacacctaccactgtgatgagaagagactcctgcagcacttacacaaacatttccagggttcctactggttggaaagcactcattatccaaatgaagggcggagaaatctcagactttttctacttcagaggagccattcctttcagcttttcacattcacccccattttttctagttaatagcttccatttcagccctctccattgtcaacatcattgaaacatctcatatgggctacagaattttcattttttgggtttggttttgcgttctgggtgtgtgtatgtgtggtggttttcggttttttgtgtgtttttttgcaataaaatccagtaaataccatatagacttcaactgtgtctttctttcatggtaaaaaaatactcaagggagataagttcactacgtagaaagaagaaaaacttttgctattcctgagaaggggagaaggagggaaaaacaaaaacccctgtaaatgtcactagtgactaactccatctatttttggaaggccctagggggttttagggctttccatgcaatagattaaatagtaacattcctctgaaaaggaatgtgcagccttgctccctggagtgctcacctgcaacagctgtcattaagggcccaaaaggcgagtggagttgatggggcccacagcgcacaaagcttccatcttcacctccaccagctctcagggaccatagaacattggcgtcttttaagcccatgagtcaagtgtgtcccttgtctgctaggtttccccaggccactgtggacatgtgactgtgcctttttagcacctgcttcttctgtcatgaactccatgcatacctgacttaagacagcagacctctcaggtcagatgcccaggttcattcccatgagcttgccctgagccctatcaaatcaatgtgtctccaaagaaatataccgctgtcaaaatttagaaagctcgttattgttaaaaaaaaaaaaaaatcacatttgtattatgctggtatttgttggaggaggagtggacaaaacagcaaagaaatatgacctggctgtggtgtttaagtactaccatgtttaaaaggacttatacttggaactttgttttttcccataccaggttgaaggtgttaggttaaaaataagtttttacaacggtggttcattatatgaatctctctacttttgtgtaacttcatgctggaaattttccacgataaatggttacaaaaagaaagataagtaacacagcatttcacatgccacaggatccttgctgctttacttcccttcttcggctccactaagactcctcaactagcaacctctgaaagatgagcttccagctgtgttatgccttaacacctggaatcccggatgttgccaccggaatcccaactcatttcatttcagttgcttagaagcagggctcaattttttacatcttaacattttaccaatacttccataaaggaactctgtcctcaccatgatagaaattaaaggttctattaaagtttttgtctaagaagaaaattacatattaacaggcattctggtgttatttttaccctttatttaaaaggttaaggttctaaggacattaaaaaattgcaatagtattattgggagtaaatttcattcccatgtttaggaaacatgaattagcaaatgatgatgtcatagttgaattttgcaatacaattaaggattttataactaccttaagtctaaaycacaatacatataaggcatggaaaataaattctataaatgtcattgtcacaaataaaaaatccattgaacatttacaaagttaataataattcataatgtgcttatgaataatcatgaaggtgaagtatattagcttaagaacttcttaagaattgttataaaaattccacattccatctacaccacttctggttagcaggggtattctactcctaattaaaaacgcttctcttagcagatgttttctaatacacccaaggccagaacaagttggcttccccttccct

SEQ ID NO: 54958 - DNA, 766 bp, Homo sapiens
tttggagattttttaaagatgtcttttgaagtaaatgaaaattctctttcatgaggccccaccagggcaaaaaacttctgctgccagcatgtacttggggctgctttccaaaaactacaataaaatccataatcttagaaatggtgataacttttatttgatgtttgaaamtatgggacgggtatagggaagataaacccaacctaccatatatgagaagatcagttctctaacaggaaaactgtagtctaatatagcacataagtaagaccacataaataattaaaaccaagtactcaatcattttcacaggtactcagttcatgtctacttaatgccactagaataaatatgtcctagatataaatgcaaagcctgtcttctcaaccaaactgaagatgtagtgatttatatactttataatataacctgataataagaaatacttaatttcttttaaaactacccaaatttgtaggcttaaaccatgtggaaaagagagaatttcagataagaacttacttgaagcagcaataaacaaagaacaaaacatcagagaaactcttaattacttttgaataaaatgtgggtcctcgcaaaagactaaaaaaatttattccttcaacatcatagatactgacagcaacatcttattcaataaaagatttgcttttccaactcagccagaacaccagtttcttcttcctcaatttaaacaaactaaataggcttggtgattaacctaggagaactgttccgtataaga

SEQ ID NO: 54959 - DNA, 693 bp, Homo sapiens
attgctggagatctagtgtgattttttttttttgagtgttaaagaaccctgttttgtcacactaccagagttggttttctagttccttctcatttgggtaggctctgtcagagggagggtctagggctgatggctgttgttcggattcttttgtcccacggggtgttcccttaatgtagtactctcccccttttcctatggatgtggcttcctgagagctgagctgcagtgattgttatctctcttctggatctagccaaccagcaagtctatcaggctctgggctggtcctgggggttgtctgcacagagtcctgtgatgtgaatcttctgggggtctcttaactrtggataccagcacagtatttgaggtgtctcccttttctgcaggaacaattcactttcttcagagggtctgcgggtcctctcgggtctcccgatttattcctgcaatctttctggagcaaaaattcatgatgcgagcctctacacactactctgtccacccaagtcagagctgcaatctagtcctgcctcttatctgccatgatccaccttactccctcaatctcatttagctttctgttttacacatttgaaattatttatttatgactaagcacattatatctagcttataattagtgattttaaaacttccattttttggctatagaatgtttcataaaataaa

SEQ ID NO: 54960 - DNA, 1697 bp, Homo sapiens
ggagtcttgctctgtcgcccaggctggagtgcggtggcacgatattggctcactgcaagctaagcctcccgggctcacgccattctcctgcctcagcctccagagtagctgggactacaggcgctggccaccacgcccggctaatttttttggtatttttaatagagatggggtttctccatgttggtcaggctggtctccatctcctgacttcttgatccacccgcctcggcctcccaaagtgctgggattacagacatgagccgccgcacccggcctacatttttcttaaaacttaagcagcaaacatgsgggcgcgcgcacacacacacacaaacacacacacacacacacacacacacacacacacacacacacacacactctctctctctctctctctctgtctctgtttctccctctacctctgtttaatatttaagtgaaagtctgtgtaaaatgtattccacatttttctgctttcttacacacagtatgctgaagagagtatgaacaaacttttctccatgctttgagatctctggaactgtttgcttcatctctaaattgccccaagctgttaggaattagtatgtcttccttcacgtattctttgtttcttatatttcttgttaatgtcaatttgtctatcaatattggccagtcttttttactttccctaggtggccatttctaatcctttatgaattaagaaaccagataagcaagcttttaaagatcggatccaaactgcacagttctgcctgaagacctcagtgaccccctgaataaactgcccaatatttgatgttctgattttgtggcaggccttttggatgctcagagtttttttatttccttactgttagtctctcttttcggcagttgcaattgccatgtgagtgcccataggattgagtcagcttttcctacgtttgatcttgaaggaaagaaacagggacattgcaacttttatccttttatttcctttgattggtattaatttgacttgaaaaaacaggtttttttttgttagtgtcactaaattatttttggtttactgaaacagtcaagctgattcctggataggtcctaaattcactaatgagaaacttcttagctaatcaatggttatgaagtattatttctctcatgatacctaaataatatcaacaataaaaaaatctgtctctactcattgacccaaagaccctcaggtcaaagctgggtatattttgttgcttcactattcaaaacagtctttatttgtttcattattaataacaaaataaatatttttagagggtaaataaagtcttttgtgatgactttgtaatgctgacagtgactaactattattaatatctttaaaatgatgatgttagtgaaacccaacagttggttatcttactggaaggtcttgtaatagcaagaattttcctatattcagttccattttggagaacacaatgcaatgcgcagtatgtctcagtgcaagagaacatataataattcctgtgctttaatgggattgcaccatattcttttaaataataacactgccttttcttaaagaaaagatgctagtattagtgttcttaagccccagctaaaacatgttgatgctaacatgaaaaatgtcggcacagaccgtgtcattcattctttttactttctaacctgagtcaatgaccata

SEQ ID NO: 54961 - DNA, 1697 bp, Homo sapiens
ggagtcttgctctgtcgcccaggctggagtgcggtggcacgatattggctcactgcaagctaagcctcccgggctcacgccattctcctgcctcagcctccagagtagctgggactacaggcgctggccaccacgcccggctaatttttttggtatttttaatagagatggggtttctccatgttggtcaggctggtctccatctcctgacttcttgatccacccgcctcggcctcccaaagtgctgggattacagacatgagccgccgcacccggcctacatttttcttaaaacttaagcagcaaacatgggggcgcgcgcacacacacacacaaacacacacacacacacacacacacacacacacacacacacacacacwctctctctctctctctctctctgtctctgtttctccctctacctctgtttaatatttaagtgaaagtctgtgtaaaatgtattccacatttttctgctttcttacacacagtatgctgaagagagtatgaacaaacttttctccatgctttgagatctctggaactgtttgcttcatctctaaattgccccaagctgttaggaattagtatgtcttccttcacgtattctttgtttcttatatttcttgttaatgtcaatttgtctatcaatattggccagtcttttttactttccctaggtggccatttctaatcctttatgaattaagaaaccagataagcaagcttttaaagatcggatccaaactgcacagttctgcctgaagacctcagtgaccccctgaataaactgcccaatatttgatgttctgattttgtggcaggccttttggatgctcagagtttttttatttccttactgttagtctctcttttcggcagttgcaattgccatgtgagtgcccataggattgagtcagcttttcctacgtttgatcttgaaggaaagaaacagggacattgcaacttttatccttttatttcctttgattggtattaatttgacttgaaaaaacaggtttttttttgttagtgtcactaaattatttttggtttactgaaacagtcaagctgattcctggataggtcctaaattcactaatgagaaacttcttagctaatcaatggttatgaagtattatttctctcatgatacctaaataatatcaacaataaaaaaatctgtctctactcattgacccaaagaccctcaggtcaaagctgggtatattttgttgcttcactattcaaaacagtctttatttgtttcattattaataacaaaataaatatttttagagggtaaataaagtcttttgtgatgactttgtaatgctgacagtgactaactattattaatatctttaaaatgatgatgttagtgaaacccaacagttggttatcttactggaaggtcttgtaatagcaagaattttcctatattcagttccattttggagaacacaatgcaatgcgcagtatgtctcagtgcaagagaacatataataattcctgtgctttaatgggattgcaccatattcttttaaataataacactgccttttcttaaagaaaagatgctagtattagtgttcttaagccccagctaaaacatgttgatgctaacatgaaaaatgtcggcacagaccgtgtcattcattctttttactttctaacctgagtcaatgaccata

SEQ ID NO: 54962 - DNA, 1697 bp, Homo sapiens
ggagtcttgctctgtcgcccaggctggagtgcggtggcacgatattggctcactgcaagctaagcctcccgggctcacgccattctcctgcctcagcctccagagtagctgggactacaggcgctggccaccacgcccggctaatttttttggtatttttaatagagatggggtttctccatgttggtcaggctggtctccatctcctgacttcttgatccacccgcctcggcctcccaaagtgctgggattacagacatgagccgccgcacccggcctacatttttcttaaaacttaagcagcaaacatgggggcgcgcgcacacacacacacaaacacacacacacacacacacacacacacacacacacacacacacacacwctctctctctctctctctctgtctctgtttctccctctacctctgtttaatatttaagtgaaagtctgtgtaaaatgtattccacatttttctgctttcttacacacagtatgctgaagagagtatgaacaaacttttctccatgctttgagatctctggaactgtttgcttcatctctaaattgccccaagctgttaggaattagtatgtcttccttcacgtattctttgtttcttatatttcttgttaatgtcaatttgtctatcaatattggccagtcttttttactttccctaggtggccatttctaatcctttatgaattaagaaaccagataagcaagcttttaaagatcggatccaaactgcacagttctgcctgaagacctcagtgaccccctgaataaactgcccaatatttgatgttctgattttgtggcaggccttttggatgctcagagtttttttatttccttactgttagtctctcttttcggcagttgcaattgccatgtgagtgcccataggattgagtcagcttttcctacgtttgatcttgaaggaaagaaacagggacattgcaacttttatccttttatttcctttgattggtattaatttgacttgaaaaaacaggtttttttttgttagtgtcactaaattatttttggtttactgaaacagtcaagctgattcctggataggtcctaaattcactaatgagaaacttcttagctaatcaatggttatgaagtattatttctctcatgatacctaaataatatcaacaataaaaaaatctgtctctactcattgacccaaagaccctcaggtcaaagctgggtatattttgttgcttcactattcaaaacagtctttatttgtttcattattaataacaaaataaatatttttagagggtaaataaagtcttttgtgatgactttgtaatgctgacagtgactaactattattaatatctttaaaatgatgatgttagtgaaacccaacagttggttatcttactggaaggtcttgtaatagcaagaattttcctatattcagttccattttggagaacacaatgcaatgcgcagtatgtctcagtgcaagagaacatataataattcctgtgctttaatgggattgcaccatattcttttaaataataacactgccttttcttaaagaaaagatgctagtattagtgttcttaagccccagctaaaacatgttgatgctaacatgaaaaatgtcggcacagaccgtgtcattcattctttttactttctaacctgagtcaatgaccata

SEQ ID NO: 54963 - DNA, 1697 bp, Homo sapiens
ggagtcttgctctgtcgcccaggctggagtgcggtggcacgatattggctcactgcaagctaagcctcccgggctcacgccattctcctgcctcagcctccagagtagctgggactacaggcgctggccaccacgcccggctaatttttttggtatttttaatagagatggggtttctccatgttggtcaggctggtctccatctcctgacttcttgatccacccgcctcggcctcccaaagtgctgggattacagacatgagccgccgcacccggcctacatttttcttaaaacttaagcagcaaacatgggggcgcgcgcacacacacacacaaacacacacacacacacacacacacacacacacacacacacacacacactctctctctctctctctctctgtctctgtttctccctctacctctgtttaatatttaagtgaaagtctgtgtaaaatgtattccacatttttctgctttcttacacacagtatgctgaagagagtatgaacaaacttttctccatgctttgagatctctggaactgtttgcttcatytctaaattgccccaagctgttaggaattagtatgtcttccttcacgtattctttgtttcttatatttcttgttaatgtcaatttgtctatcaatattggccagtcttttttactttccctaggtggccatttctaatcctttatgaattaagaaaccagataagcaagcttttaaagatcggatccaaactgcacagttctgcctgaagacctcagtgaccccctgaataaactgcccaatatttgatgttctgattttgtggcaggccttttggatgctcagagtttttttatttccttactgttagtctctcttttcggcagttgcaattgccatgtgagtgcccataggattgagtcagcttttcctacgtttgatcttgaaggaaagaaacagggacattgcaacttttatccttttatttcctttgattggtattaatttgacttgaaaaaacaggtttttttttgttagtgtcactaaattatttttggtttactgaaacagtcaagctgattcctggataggtcctaaattcactaatgagaaacttcttagctaatcaatggttatgaagtattatttctctcatgatacctaaataatatcaacaataaaaaaatctgtctctactcattgacccaaagaccctcaggtcaaagctgggtatattttgttgcttcactattcaaaacagtctttatttgtttcattattaataacaaaataaatatttttagagggtaaataaagtcttttgtgatgactttgtaatgctgacagtgactaactattattaatatctttaaaatgatgatgttagtgaaacccaacagttggttatcttactggaaggtcttgtaatagcaagaattttcctatattcagttccattttggagaacacaatgcaatgcgcagtatgtctcagtgcaagagaacatataataattcctgtgctttaatgggattgcaccatattcttttaaataataacactgccttttcttaaagaaaagatgctagtattagtgttcttaagccccagctaaaacatgttgatgctaacatgaaaaatgtcggcacagaccgtgtcattcattctttttactttctaacctgagtcaatgaccata

SEQ ID NO: 54964 - DNA, 2437 bp, Homo sapiens
aggttccccaggaacaagatacaggtgattttatgactgagataaacacgtggttactcctgttcctcaaatagctcaagtcaaagtcatgctttaagatgcagcaggttcttttgcataacaagataccaccctctgcttgctatctcatgcagggttcttagaaataagaacctaggacacatttttctaaagccagtatttagatcacctgttgggaaggctttctaaactacaarggctgggcgcagtggctcatacctgtaatcccagcattttgggaggccaaggagggaggatcatttgagcctaggagttccagaccagcctgggaaacacagtgaggccctatctctccaaaaataaaaaacaaaacaaaattagccaggtgtaatggcacgcacctgtgccattgggaggctgaggtgggagggtcgcttgaacctgagaggttaaagctacagtgagcagtgaaggcaccaccacattccagcctggacaacagaccaagatcctatctcaggaagaaaaaaaaaaactaaactacaatgtacccccatctccttgcatctagaaagtctagtatgagcacctctttcctcattgaaaatcaccatcatgatagcttactattactagaagaagtatgttttgaaaaagtccacagaaatttgatagtgaggtaaggttgaaagccaccaatgtgtctgaaataatacaaaatacttgtatattagataatttgaatatggggcaaagagttcctgcttaaaatatagttgagaaaaccattcttccaatagacactttaaggccatcactggaatcaggtaactggtgtttaactttttgcctcaaccaattggaaatttgcagctaatgtcatgcacattccgagccaatgtgttcctttaaggggctgtcatatttttttccttcctccctgtgtgtggatttctattttctatttctattctgacagcctttgcagttgtgttttttcttttatcttatgatgccttgatcgcttttggaaacaggcagaatataaattacaaattaatagcatgaagctggcagggaaggtaggtactcgggtttctttcttggccacagctatcaaaatgcattttcagaacaacatgcgggaaactactagaagacttagcaagtgcctctttaaggaatgggcccttggaagcagctaccatcagagaaatccctgctctgccctgctaacaaagcctcacaactctccacaaaagatatctttctcaaggctcaaagggcaggtcaagcctccaggaggaaggtacccaggcagataaaagacgtatgttgtaaagctaattcccagctcagggcagagctgtatatctgacactccccctcttattgggatgatgatgtggctcattcattgcgtaggttttaggcttcctctggaggagagaactttgagccatcagataagagttgtgagcttgtcttcttgtaacaggaatgtttctgcctccttcaaacctcctcttagaaagcctgtagagagaagtgtctccaaaaaaggcaagttgagtttgcctctgggatcctgaaatcaaccggcaaaaacgggataaaacagtaggggacgggggaccttcattacaagaaaacgtaggatggaccacatgggtggcaggtggagagggccctccagagcttactgcacagaaaccagcccccctcctggcataaagtcatgctcatggccagcctttcctgggctgcagggcacctctcctctcagtaaggagcactctgggctcacacagagctttaaaaatatctctccacccactgaaatttgattaatcagccaagtgctcacccatgtgtcacagtggtggcagagatatatgtgatggtgacatgacgggtacaagggaagcacacaggatctcatctcacagggagcaggattcagtacatgaaagtgaatggcatgggctgtgcagccaggtggcagcttgaatcccaggtccagcagatgctggttatgtaaccttggacaaggttatttaacttctggatttttcacgtttgcaaaaatgtagttagtaacagtacctgggccgggtgtgttgactcacatctgtaatcccagcactttggcaggctgaggaaggaggattgcttgaggccaggagtttgagatcagcctgggcaacacagcaagacctcgtctttgctaaaaatttaaaaattagctaggtgtggtgttgtgcacttgtagcctcagctactcgggaggctgagatggcaggattgcttgagcccagaagtgtgaggctgcagtgagctatgatcgtgccactgcactccagccggggcaacagaatgacagtctgtctttaaaattttttaaataaataaataaaaattaatagtatatgca

SEQ ID NO: 54965 - DNA, 2437 bp, Homo sapiens
aggttccccaggaacaagatacaggtgattttatgactgagataaacacgtggttactcctgttcctcaaatagctcaagtcaaagtcatgctttaagatgcagcaggttcttttgcataacaagataccaccctctgcttgctatctcatgcagggttcttagaaataagaacctaggacacatttttctaaagccagtatttagatcacctgttgggaaggctttctaaactacaaaggctgggygcagtggctcatacctgtaatcccagcattttgggaggccaaggagggaggatcatttgagcctaggagttccagaccagcctgggaaacacagtgaggccctatctctccaaaaataaaaaacaaaacaaaattagccaggtgtaatggcacgcacctgtgccattgggaggctgaggtgggagggtcgcttgaacctgagaggttaaagctacagtgagcagtgaaggcaccaccacattccagcctggacaacagaccaagatcctatctcaggaagaaaaaaaaaaactaaactacaatgtacccccatctccttgcatctagaaagtctagtatgagcacctctttcctcattgaaaatcaccatcatgatagcttactattactagaagaagtatgttttgaaaaagtccacagaaatttgatagtgaggtaaggttgaaagccaccaatgtgtctgaaataatacaaaatacttgtatattagataatttgaatatggggcaaagagttcctgcttaaaatatagttgagaaaaccattcttccaatagacactttaaggccatcactggaatcaggtaactggtgtttaactttttgcctcaaccaattggaaatttgcagctaatgtcatgcacattccgagccaatgtgttcctttaaggggctgtcatatttttttccttcctccctgtgtgtggatttctattttctatttctattctgacagcctttgcagttgtgttttttcttttatcttatgatgccttgatcgcttttggaaacaggcagaatataaattacaaattaatagcatgaagctggcagggaaggtaggtactcgggtttctttcttggccacagctatcaaaatgcattttcagaacaacatgcgggaaactactagaagacttagcaagtgcctctttaaggaatgggcccttggaagcagctaccatcagagaaatccctgctctgccctgctaacaaagcctcacaactctccacaaaagatatctttctcaaggctcaaagggcaggtcaagcctccaggaggaaggtacccaggcagataaaagacgtatgttgtaaagctaattcccagctcagggcagagctgtatatctgacactccccctcttattgggatgatgatgtggctcattcattgcgtaggttttaggcttcctctggaggagagaactttgagccatcagataagagttgtgagcttgtcttcttgtaacaggaatgtttctgcctccttcaaacctcctcttagaaagcctgtagagagaagtgtctccaaaaaaggcaagttgagtttgcctctgggatcctgaaatcaaccggcaaaaacgggataaaacagtaggggacgggggaccttcattacaagaaaacgtaggatggaccacatgggtggcaggtggagagggccctccagagcttactgcacagaaaccagcccccctcctggcataaagtcatgctcatggccagcctttcctgggctgcagggcacctctcctctcagtaaggagcactctgggctcacacagagctttaaaaatatctctccacccactgaaatttgattaatcagccaagtgctcacccatgtgtcacagtggtggcagagatatatgtgatggtgacatgacgggtacaagggaagcacacaggatctcatctcacagggagcaggattcagtacatgaaagtgaatggcatgggctgtgcagccaggtggcagcttgaatcccaggtccagcagatgctggttatgtaaccttggacaaggttatttaacttctggatttttcacgtttgcaaaaatgtagttagtaacagtacctgggccgggtgtgttgactcacatctgtaatcccagcactttggcaggctgaggaaggaggattgcttgaggccaggagtttgagatcagcctgggcaacacagcaagacctcgtctttgctaaaaatttaaaaattagctaggtgtggtgttgtgcacttgtagcctcagctactcgggaggctgagatggcaggattgcttgagcccagaagtgtgaggctgcagtgagctatgatcgtgccactgcactccagccggggcaacagaatgacagtctgtctttaaaattttttaaataaataaataaaaattaatagtatatgca

SEQ ID NO: 54966 - DNA, 396 bp, Homo sapiens
cacatggtctctgtagcagctactcaactctgctgttgcagtgtgaaaacagccatagacaatacatgaatgaataagtgtaatagggttccaataaagctttgtttgcaaaaacaggtggaaggctasatttgtgctgtgggccagtttgccagcccctgctatggaagaaaccacatgagcttagtcttccaggtgtagatcttgataaggcagtatagtgggtaagagataaccacaatttcttttttacactcttgacttcaaatggtagctctctgcatctttaccttaaacctggttgagttaatggctgctttaaccaatagaatatactagaaataacaatgtgcccatttctggttcagagaatggcagattttttttttttttttt

SEQ ID NO: 54967 - DNA, 1896 bp, Homo sapiens
agttgggatttgtaattatagagtagcaagatatttggatcctagaactcaacatcaaggccagatggcatggcttggaacaccctggttccctcctttgaaaggggaaaaaggcagaaagcctgccgttctagggttccctgaccagtcaggtcacttaccctcctggctgctgggacccctagatttttacgagaaacaagggaagctgtgaggtgggagatggaggaggtgaagctcactgataccattatatatcattaatctcatgggcagcctttgaaataacactaaactgaagtcaatgtaatcgtgcccaattctaggttgtcctctttccttgccttgcctggactggcctttgtggtctgtcctagctcacatgggattcagacaacagtagatccaacccagaggcgtaatgaaggaggatcctaatgaggtaactgtgtggcaggcctaagaacaagcagtccaatttgcttcaggaggataaagaactccaggagggagggaattcgggggcaattagtatccaagggatttaatagtattcctgagaatgtcgaattatttaagaagatgacaaagaagacgtcctgaaaaacaaggaggagtcagaggaagaaaagtgaaaaaaaaaatgcattcataataggtaacatttatgtagcacaaactacagacaaggagccactctaagcacttgatgtttattagctccctaatcctcataacaattcagagacaggcactattattatacccattttatagataacggaactggggcacagagaggattaggaagaacttgccaaaggcctaaacttagtgagtggcagagccaggatcaaatcctggcagtctggctccagcacctgagtgccacgaaccactacctgagaccggaagcacaataccctacctcgctgtgctggggacaatatttgaacacaacaataagtccaggcgtggtggctcacgcctgtaatcccaacgctttgggaggccgaggtggatggatgacttgaggccaggagttccagaccaggctggccagtatggtgaaaccccgtctctactataaatacaaaaattagccaggaaaggtggtgcatgcctgtagtcccagctacttgggaggctgaggcaggagaatcacttgtaccaggaggcagaggctgcagtgagctgagatcacaccactgcactacagcctgggcaatagagtgagactctgtcttggaaaaaaaaaaaacaaaaacaaaacacaacaatgaaagcactgtttattgattttcatcttttagaataaacataacccccaaatcattgtgttttcaaaacacaatgttctggcaatgtaaaattaaaggacaagtggcaaagttgggaacaggaaaaatagaaaaagtgaggmaaaaggtaagggtgctggcatcttaatcgtacaaaataaggaattgagagatactgtctctaatttgtttgcacacttatttcccgtctccctacaaccctgatgtcagccccacaggagcagagaccttgttcatcttgtttgctgttatatttccagccccctacaggaatacaaggcatgtacctgaaggcactcaatagatatttgtggaacgatgaatgaatgaatgaatgaatgaatgaatgaatgaatgaatgaatgaatggaataataagattctgagaatagcatttaaatttataaaagtaacaaagaggaaataaaaatactgaaagaattttattaagaaggagctatgggaggtgtgaacaatggaagtcatctaaatcgtcacctatcatagcagaaagtcaaacagaatctatatttgataaattaggaaatggatataggcatatcatcgtccctca

SEQ ID NO: 54968 - DNA, 1117 bp, Homo sapiens
gacaggacttgtrgctaggctttacaagctgtctttggtttgaaggtggggtttcaccagggacccgcccctgtctgcctaggatctgtctgcctcttgccactatcagtaggagggtaggggatgggtgctttctggtccagtctaccctcactgttccagaatgtaataagattgtaccaatactcccttaaccttgttttctcccttaactaaaaactttcttaaaattaaaccagatgagattataggtaatagcatattcgattttgcctaattccttccagccaaactgcaagtgtgcagcatataagatctgaaacctgagctgagaataaagccaacatttttatgttagtaattattgctgacttgttttttagcttttagtattctaggcagctctgctgctttgtgtggctgctatttttagtcatcttttatctacgatttctcccatcttaacacgtcggtttttcatttccacagttgaggagctcaggtatgtcattcttcctgcagaaggacatgggctgtatttgtatgtgtgaaaagaccagcgatgccacccgccctcttgttttggttgccttaatgatgattgtggattgttatagaactgatgggtctgcagactctggatcaataagagagatggtcaaaatgaccaaactggccaggttgtcttgctgctcattcaccctattccaaaatggccaaaaactcgatgatggctggggcaaaaggacactttgaaggttgtaaactgtaaaaattccctgccccaaatcagcatgggtcttgggccattcattctcactggaggattgaagtacttgagaaaaacaattgtgatttcaaatgctgaggctagaaaccctcctaaagagggcctttgttgttgttgatcacccaattagacatgaaaaaccaggctgcagggcagaacacttcaaagaagaaagcagaacaaagaaaaggctacattgctctgcacagagaaaagaaaaagaagattcggccacccagaggagtctgagcttcctggcaggaggctggaggaaggagagaaagcaatggctggccaggtgttcctgggggcaggaatatttgggaa

SEQ ID NO: 54969 - DNA, 862 bp, Homo sapiens
ttgtcacaagcatccttctcacgaccctgcctcactccaaaaggggtatcaggtaggtgagcagaaacgccccttcctgaatgcctgtccttgtcccaccacaaggatraggatgcctgctcagagggcacagggagaagccaatggcatagggtgcacagcagcgagggccaagggacaaggagtggggggcccccacctgcccagcgtgacctgctgaccacagctcctcagcggcgggacaaagcctgcccatggggccctcagtggccaccctggatgcaaacacggttaatggtcaggcccagcctgtcccctcctgcgcacaaactcagggcagagcagagagcttacatccaccaagacccagacaaaagaaagccccaagaacacccttaaaggcagccaaaccctggagctgcctcgggcccatcgatgggagcacaagaggtgaatcctgctacgggcaccgtggccgtctacgcgaccgcagcaaagaggaacatggacgactcacagacgcagagacggggggtccatgctgtgtggtgatgttcacctgcagctcagggacaaaccctacctacggtgacagatgtcaggaggggtgaagggtgagggagggagggcctgttagctggagcgggtctcagggatgcctgctgctgctgctggaaacattctgcacaggggttcgggtggaggttctgggagtgtcacccgtgcacacttgtcagcatgctctccaggtcctgcatttgaggtgcctgtaccccagtggaaagatgacggacagagctgctcaaccactgccctggaccgcattctgcagggtgccttagaaggcccaggaggaaagggg

SEQ ID NO: 54970 - DNA, 575 bp, Homo sapiens
cagagccagcctggtgggggctggggactctggaaggggtgctcagggaggggccgggctctggggcccagaaggccttggaaggtagtccaggcgggtcccggaacaagtgttgcatgagcaccaaatggctcagagctcccgaaacctggcgtgcctgtgagagccgttgagaccccttttcaaggccctgcctgacagcccacaaaagacattcaaatgagagacaaatatttggggccccaaggttgagcccagcccagcctctcaggcccagcccaagctgctcccaggctctcatttgggtaytaattgcatttcgtttagagatttgcatgcttatcacgcgggtggtggccagccgtgggggcctggccagcctggacagaatcccaaggctcgtaggcaaatgccaggaggagggggtgggcagaggacccaggagcctcccgaatggtatcaggagagcaagcctgggctaggctgcgggccatcagcgtgggccctgggccacgacctggcatccatgtggacctgagcacgacaacaggacaagcagagaaaaaagtggatcc

SEQ ID NO: 54971 - DNA, 575 bp, Homo sapiens
cagagccagcctggtgggggctggggactctggaaggggtgctcagggaggggccgggctctggggcccagaaggccttggaaggtagtccaggcgggtcccggaacaagtgttgcatgagcaccaaatggctcagagctcccgaaacctggcgtgcctgtgagagccgttgagaccccttttcaaggccctgcctgacagcccacaaaagacattcaaatgagagacaaatatttggggccccaaggttgagcccagcccagcctctcaggcccagcccaagctgctcccaggctctcatttgggtattaattgcatttcgtttagagatttgcatgcttatcacgcgggtggtggccagccgtgggggcctggccagcctggacagaatcccaaggctcgtaggcaaatgccaggaggagggggtgggcagaggacccaggagcctcccgaatggtatcaggagagcaagcctgggctaggctgcrggccatcagcgtgggccctgggccacgacctggcatccatgtggacctgagcacgacaacaggacaagcagagaaaaaagtggatcc

SEQ ID NO: 54972 - DNA, 767 bp, Homo sapiens
tgcatgaagaaaagaacagtcttctaaacaactcttaggtttaagaagaatgaaaacagtgatcatgggcctttcgaaaatcaacagccaaaaaactttataacctcaaacaaattcctccgaaacaagaaactctgaacaaaagtgaacaaagcattcaactctaggagatcaggaaaacaaaacccgaaatatgtgtgaaagaagtaataagggctaattaatgatgaggaggagagaaattaacaaggcagaaaagtgaactgttaactaagttgatataatgaaaaactgctgttttttaaaagaccaacaaaataggcgcatttaaataagaaagaagacacatttttaaaataccagaaagggtgaaaggtgacttaagtacaaatatgtaaaagattaaaaacaggatgttcatttatgaccacgatggagtaacarggactgaatttactgctctcctcccgccccctccaaaacaacaataacaacaaaaaggatcaaattcaggaaacaacagttttcaatacactgcacatacgacaacaaaggacagtagtcctcaagagatggcaaacaggtgaacggggccctacagcttcccagctgctcccctgagtttcccaaccatggcccagaaggaggtacctgggcagagcccagtggagtacttggaggaggagacagagctcagagccaaggaggcccaggcagctgggttctcaggacagaggagtggattggagagagctgcatagagggag

SEQ ID NO: 54973 - DNA, 1534 bp, Homo sapiens
cagaggggctgagcccccagaagagggctgtggctttgaggactggcacaggagtcttaccagggtggtgagctsggccaggtccgtgtttcggcctcacgtttcctgtccactgaggggtggtctggctcatttgaggtctgggtcacagtgtgggtggccgaggtcaagacagctgccagggttccccgggctcgtctggggcagctgcggcccatgccccatgcttctgtgtgtttatggctctgatcgtggagccacaattctggaggggagggggccatacaggggccacaggacagaacgcagctggggcctgctctccaggaagggaagggggtgcaagaagatagatgccccagccgggctcacctatggcctgtcccagccccaggcagcatcccccacacacatggtccttgtctggcccgtgcgcccagctgcccttcaggggtcagttctcagggccttgcctgaccccaggcaggggactggggcttcctcctgggcctctggtccccatctgcccctcccagtgggtcttgacttctggcatcatctgtgtcaggcctggtggccatggaggtggcctgggtgaaggagctctgaatatgaagtcagtgtccttgggccgcccttgggcaagccactttaacttcctgggcctcagtttccttttctgtgaagggagcaccaagatccaggggctgcatgggtgggaatggccaggtgtgtgcaaagactcttcctcctcacctgcgtgcctcctgccgtgccccgttgcccaggctggtcctccaggacgtgggacttgctcgaagctgtcctgggtgtggatggagtggctttggtgccagggcccgggccctgagcaggaggggcggctgcacatcccgtctcctgccctccaccctcagggcccaccagagccgaatgggcttcaaccttgggctccctgtccaacaaagtcctgctggcagcctagacagtggcaaaggccaaaggccccaagctgttggcaccggaaacgtcgaggtgagagccgggggcccagagcccagcccggcccattcacccattccccctgtccctccccacagggccactgaggtgtcctgaacacagggtcagggtgactcatgtggtgcccctgcggatgggaaggcagaggacagaggagggaagggaccagccacatgcccttggtggtgccctgtggccacagacccgggcccagagctgaaagtggggtgcccctccacctccccaactcttgccccagggagtcctggctgccacttccctgggatgctcatgcgggcaggaggcgtggaccgggcttcagggatgaatgtggagcttgagggctattaattacgttctcctcgagggctgagagccactttgccttaaccctccccctgtgccctgacgagtctgcttcgggaataattcatgctcaaattaagtacagcagtgtggggtgcagcctcgtcctcacagtctgccccaccctggagccactaccctccct

SEQ ID NO: 54974 - DNA, 1534 bp, Homo sapiens
cagaggggctgagcccccagaagagggctgtggctttgaggactggcacaggagtcttaccagggtggtgagctgggccaggtccgtgtttcggcctcacgtttcctgtccactgaggggtggtctggctcatttgaggtctgggtcacagtgtgggtggccgaggtcaagacagctgccagggttccccgggctcgtctggggcagctgckgcccatgccccatgcttctgtgtgtttatggctctgatcgtggagccacaattctggaggggagggggccatacaggggccacaggacagaacgcagctggggcctgctctccaggaagggaagggggtgcaagaagatagatgccccagccgggctcacctatggcctgtcccagccccaggcagcatcccccacacacatggtccttgtctggcccgtgcgcccagctgcccttcaggggtcagttctcagggccttgcctgaccccaggcaggggactggggcttcctcctgggcctctggtccccatctgcccctcccagtgggtcttgacttctggcatcatctgtgtcaggcctggtggccatggaggtggcctgggtgaaggagctctgaatatgaagtcagtgtccttgggccgcccttgggcaagccactttaacttcctgggcctcagtttccttttctgtgaagggagcaccaagatccaggggctgcatgggtgggaatggccaggtgtgtgcaaagactcttcctcctcacctgcgtgcctcctgccgtgccccgttgcccaggctggtcctccaggacgtgggacttgctcgaagctgtcctgggtgtggatggagtggctttggtgccagggcccgggccctgagcaggaggggcggctgcacatcccgtctcctgccctccaccctcagggcccaccagagccgaatgggcttcaaccttgggctccctgtccaacaaagtcctgctggcagcctagacagtggcaaaggccaaaggccccaagctgttggcaccggaaacgtcgaggtgagagccgggggcccagagcccagcccggcccattcacccattccccctgtccctccccacagggccactgaggtgtcctgaacacagggtcagggtgactcatgtggtgcccctgcggatgggaaggcagaggacagaggagggaagggaccagccacatgcccttggtggtgccctgtggccacagacccgggcccagagctgaaagtggggtgcccctccacctccccaactcttgccccagggagtcctggctgccacttccctgggatgctcatgcgggcaggaggcgtggaccgggcttcagggatgaatgtggagcttgagggctattaattacgttctcctcgagggctgagagccactttgccttaaccctccccctgtgccctgacgagtctgcttcgggaataattcatgctcaaattaagtacagcagtgtggggtgcagcctcgtcctcacagtctgccccaccctggagccactaccctccct

SEQ ID NO: 54975 - DNA, 1534 bp, Homo sapiens
cagaggggctgagcccccagaagagggctgtggctttgaggactggcacaggagtcttaccagggtggtgagctgggccaggtccgtgtttcggcctcacgtttcctgtccactgaggggtggtctggctcatttgaggtctgggtcacagtgtgggtggccgaggtcaagacagctgccagggttccccgggctcgtctggggcagctgcggcccatgccccatgcttctgtgtgtttatggctctgatcgtggagccacaattctggaggggagggggccatacaggggccacaggacagaacgcagctgggrcctgctctccaggaagggaagggggtgcaagaagatagatgccccagccgggctcacctatggcctgtcccagccccaggcagcatcccccacacacatggtccttgtctggcccgtgcgcccagctgcccttcaggggtcagttctcagggccttgcctgaccccaggcaggggactggggcttcctcctgggcctctggtccccatctgcccctcccagtgggtcttgacttctggcatcatctgtgtcaggcctggtggccatggaggtggcctgggtgaaggagctctgaatatgaagtcagtgtccttgggccgcccttgggcaagccactttaacttcctgggcctcagtttccttttctgtgaagggagcaccaagatccaggggctgcatgggtgggaatggccaggtgtgtgcaaagactcttcctcctcacctgcgtgcctcctgccgtgccccgttgcccaggctggtcctccaggacgtgggacttgctcgaagctgtcctgggtgtggatggagtggctttggtgccagggcccgggccctgagcaggaggggcggctgcacatcccgtctcctgccctccaccctcagggcccaccagagccgaatgggcttcaaccttgggctccctgtccaacaaagtcctgctggcagcctagacagtggcaaaggccaaaggccccaagctgttggcaccggaaacgtcgaggtgagagccgggggcccagagcccagcccggcccattcacccattccccctgtccctccccacagggccactgaggtgtcctgaacacagggtcagggtgactcatgtggtgcccctgcggatgggaaggcagaggacagaggagggaagggaccagccacatgcccttggtggtgccctgtggccacagacccgggcccagagctgaaagtggggtgcccctccacctccccaactcttgccccagggagtcctggctgccacttccctgggatgctcatgcgggcaggaggcgtggaccgggcttcagggatgaatgtggagcttgagggctattaattacgttctcctcgagggctgagagccactttgccttaaccctccccctgtgccctgacgagtctgcttcgggaataattcatgctcaaattaagtacagcagtgtggggtgcagcctcgtcctcacagtctgccccaccctggagccactaccctccct

SEQ ID NO: 54976 - DNA, 973 bp, Homo sapiens
gcatatatgtaccatatggtacaataatagtactccatatggaatactactccactaaagaagactctagattgggagaaatgtaggggtgatgccttcaaagtgaaacttggtctcacccttcttatgctatttttatttagttttttggtccacagttccactattatggtagtattagtactaccataatagtactccatatggagtaccattcagccataaaaaagggtaagattcagttatttgcaacaacatgaaagaacagaggatctttatgttaagtgaaataagccaggcacagacagacaaacattgcgtgttctcacttatttgtgggatctaaaaatcaaaacaattgaaatcatggacatagagagtagaaggatggttaccagaagccgggaagtgtagtaggaggctgggatcaggggaagatggggatagttaatgggtaaaaaatactagaaacatgtatgaaacctactatctagtagcacaattggatgactatagtcaataataactaattgcatatcataaaataaagagtgtaattggattgtttgtaactcaaaggataaatgcttgagggtatagatatcccattctctattatgtgcttatttcacattgcatgcctatagaaacacttctcatttatcacataaacatatacacctactatgtacccacaaatttttttttaaatttctaaaaaaaaaaaaawaatattaggtcttacaattacccattagtaaaaataaaggctagaaaactaaacaaatatttatttatttgtatttcctttgataagcattagtaaatggatttagctatattctgtagggaagagagagaaacaaatatttggaaagcagccaaattattgatacagtatcaatttttttatgtgtctttcttccttctttccttcttccttccttccattcttctgttctttttaaattgt

SEQ ID NO: 54977 - DNA, 973 bp, Homo sapiens
gcatatatgtaccatatggtacaataatagtactccatatggaatactactccactaaagaagactctagattgggagaaatgtaggggtgatgccttcaaagtgaaacttggtctcacccttcttatgctatttttatttagttttttggtccacagttccactattatggtagtattagtactaccataatagtactccatatggagtaccattcagccataaaaaagggtaagattcagttatttgcaacaacatgaaagaacagaggatctttatgttaagtgaaataagccaggcacagacagacaaacattgcgtgttctcacttatttgtgggatctaaaaatcaaaacaattgaaatcatggacatagagagtagaaggatggttaccagaagccgggaagtgtagtaggaggctgggatcaggggaagatggggatagttaatgggtaaaaaatactagaaacatgtatgaaacctactatctagtagcacaattggatgactatagtcaataataactaattgcatatcataaaataaagagtgtaattggattgtttgtaactcaaaggataaatgcttgagggtatagatatcccattctctattatgtgcttatttcacattgcatgcctatagaaacacttctcatttatcacataaacatatacacctactatgtacccacaaatttttttttaaatttctaaaaaaaaaaaaaawatattaggtcttacaattacccattagtaaaaataaaggctagaaaactaaacaaatatttatttatttgtatttcctttgataagcattagtaaatggatttagctatattctgtagggaagagagagaaacaaatatttggaaagcagccaaattattgatacagtatcaatttttttatgtgtctttcttccttctttccttcttccttccttccattcttctgttctttttaaattgt

SEQ ID NO: 54978 - DNA, 973 bp, Homo sapiens
gcatatatgtaccatatggtacaataatagtactccatatggaatactactccactaaagaagactctagattgggagaaatgtaggggtgatgccttcaaagtgaaacttggtctcacccttcttatgctatttttatttagttttttggtccacagttccactattatggtagtattagtactaccataatagtactccatatggagtaccattcagccataaaaaagggtaagattcagttatttgcaacaacatgaaagaacagaggatctttatgttaagtgaaataagccaggcacagacagacaaacattgcgtgttctcacttatttgtgggatctaaaaatcaaaacaattgaaatcatggacatagagagtagaaggatggttaccagaagccgggaagtgtagtaggaggctgggatcaggggaagatggggatagttaatgggtaaaaaatactagaaacatgtatgaaacctactatctagtagcacaattggatgactatagtcaataataactaattgcatatcataaaataaagagtgtaattggattgtttgtaactcaaaggataaatgcttgagggtatagatatcccattctctattatgtgcttatttcacattgcatgcctatagaaacacttctcatttatcacataaacatatacacctactatgtacccacaaatttttttttaaatttctaaaaaaaaaaaaaaaatattaggtcttacaattacccattagtaaaaataaaggctagaaaactaaacaaatatttatttatttgtatttcctttgataagcattagtaaatggatttagctatattctgtagggargagagagaaacaaatatttggaaagcagccaaattattgatacagtatcaatttttttatgtgtctttcttccttctttccttcttccttccttccattcttctgttctttttaaattgt

SEQ ID NO: 54979 - DNA, 973 bp, Homo sapiens
gcatatatgtaccatatggtacaataatagtactccatatggaatactactccactaaagaagactctagattgggagaaatgtaggggtgatgccttcaaagtgaaacttggtctcacccttcttatgctatttttatttagttttttggtccacagttccactattatggtagtattagtactaccataatagtactccatatggagtaccattcagccataaaaaagggtaagattcagttatttgcaacaacatgaaagaacagaggatctttatgttaagtgaaataagccaggcacagacagacaaacattgcgtgttctcacttatttgtgggatctaaaaatcaaaacaattgaaatcatggacatagagagtagaaggatggttaccagaagccgggaagtgtagtaggaggctgggatcaggggaagatggggatagttaatgggtaaaaaatactagaaacatgtatgaaacctactatctagtagcacaattggatgactatagtcaataataactaattgcatatcataaaataaagagtgtaattggattgtttgtaactcaaaggataaatgcttgagggtatagatatcccattctctattatgtgcttatttcacattgcatgcctatagaaacacttctcatttatcacataaacatatacacctactatgtacccacaaatttttttttaaatttctaaaaaaaaaaaaaaaatattaggtcttacaattacccattagtaaaaataaaggctagaaaactaaacaaatatttatttatttgtatttcctttgataagcattagtaaatggatttagctatattctgtagggaagagagagaaayaaatatttggaaagcagccaaattattgatacagtatcaatttttttatgtgtctttcttccttctttccttcttccttccttccattcttctgttctttttaaattgt

SEQ ID NO: 54980 - DNA, 973 bp, Homo sapiens
gcatatatgtaccatatggtacaataatagtactccatatggaatactactccactaaagaagactctagattgggagaaatgtaggggtgatgccttcaaagtgaaacttggtctcacccttcttatgctatttttatttagttttttggtccacagttccactattatggtagtattagtactaccataatagtactccatatggagtaccattcagccataaaaaagggtaagattcagttatttgcaacaacatgaaagaacagaggatctttatgttaagtgaaataagccaggcacagacagacaaacattgcgtgttctcacttatttgtgggatctaaaaatcaaaacaattgaaatcatggacatagagagtagaaggatggttaccagaagccgggaagtgtagtaggaggctgggatcaggggaagatggggatagttaatgggtaaaaaatactagaaacatgtatgaaacctactatctagtagcacaattggatgactatagtcaataataactaattgcatatcataaaataaagagtgtaattggattgtttgtaactcaaaggataaatgcttgagggtatagatatcccattctctattatgtgcttatttcacattgcatgcctatagaaacacttctcatttatcacataaacatatacacctactatgtacccacaaatttttttttaaatttctaaaaaaaaaaaaaaaatattaggtcttacaattacccattagtaaaaataaaggctagaaaactaaacaaatatttatttatttgtatttcctttgataagcattagtaaatggatttagctatattctgtagggaagagagagaaacaaatatttggaaagcagmcaaattattgatacagtatcaatttttttatgtgtctttcttccttctttccttcttccttccttccattcttctgttctttttaaattgt

SEQ ID NO: 54981 - DNA, 1263 bp, Homo sapiens
cctcagtgctaagaaaattaattgtatagctctaggtcattgacctgtagtagttttacaacctgaaacagatcatgtccctgtccctgtaggtcttgtggttaacagagaagtaatagtagtcttcaaggagtttagacctttacatgatttcatggggaaaaattagaataagtatctgcaggtatttgggacattcctttgttttcttgttcaagaatgaaacaaccaaaaatcaagagaaatttatcttttccatgtaatcatgtgataaatactatagaataaaggcaactgggccttctccagtatggaaatttcccggtactagatgtagtattgtatgcaatgatgtacagtcttccgcagatttaccaccacaactatccacacctaaccccagtatacagaacaagtattcccccctcattgaatttatcactattgcaattaattcatggagtactttcttcattgaatgtttagtgtctgtttcctcctgtttgtccacaaactccrtaattcctattatctacttgcaaagcttagcacatggtagttgttctgtaaatgtttctggaacaaaagaagggaagaagagtaaaaaggaaaaaagagaactctgaccataaaacatgacatataattaaaagaaaagactctctaatattcagcaaatacagagcagctagactaacatttaagcactttgaaaccgtcagttgacaaatttaagccataaccactgacagtttctcatttcctgagaaaatgtaagacacaaattcttagcctgctttaaaccttaaaaggtcccaaaacatccttttcaattgtcccatatcaaatctgcctcccttaactggtgctgtcttggctgcctggttactgagctgtaatctcctcataccccattttctgagaagccctagctaagttacaatgattgcctgtataaattaatctccactgcaataacaaaggcaatcccgtcagcagttgacattctggcttttaattcactgaacaactttttgtttgttaatcaaagctgcatctcatcccattgaggatgtgatttgtctctgcttctctgggtcgtggtgtcccttacgccagtgctgctcaaaatgtgatccctgggctagcattagcaccttctgggaactcattagaaatacaggcctttatgctcagtctattgaaacagaatatctggcaacgagtccaaggactctgttttaacaagttcttcagaagatt

SEQ ID NO: 54982 - DNA, 1263 bp, Homo sapiens
cctcagtgctaagaaaattaattgtatagctctaggtcattgacctgtagtagttttacaacctgaaacagatcatgtccctgtccctgtaggtcttgtggttaacagagaagtaatagtagtcttcaaggagtttagacctttacatgatttcatggggaaaaattagaataagtatctgcaggtatttgggacattcctttgttttcttgttcaagaatgaaacaaccaaaaatcaagagaaatttatcttttccatgtaatcatgtgataaatactatagaataaaggcaactgggccttctccagtatggaaatttcccggtactagatgtagtattgtatgcaatgatgtacagtcttccgcagatttaccaccacaactatccacacctaaccccagtatacagaacaagtattcccccctcattgaatttatcactattgcaattaattcatggagtactttcttcattgaatgtttagtgtctgtttcctcctgtttgtccacaaactccataattcctattatctacttgcaaagcttagcacatggtagttgttctgtaaatgtttctggaacaaaagaagggaagaagagtaaaaaggaaaaaagagaactctgaccataaaacatgacatataattaaaagaaaagactctctaatattcagcaaatacagagcagctagactaacatttaagcactttgaaaccgtcagttgrcaaatttaagccataaccactgacagtttctcatttcctgagaaaatgtaagacacaaattcttagcctgctttaaaccttaaaaggtcccaaaacatccttttcaattgtcccatatcaaatctgcctcccttaactggtgctgtcttggctgcctggttactgagctgtaatctcctcataccccattttctgagaagccctagctaagttacaatgattgcctgtataaattaatctccactgcaataacaaaggcaatcccgtcagcagttgacattctggcttttaattcactgaacaactttttgtttgttaatcaaagctgcatctcatcccattgaggatgtgatttgtctctgcttctctgggtcgtggtgtcccttacgccagtgctgctcaaaatgtgatccctgggctagcattagcaccttctgggaactcattagaaatacaggcctttatgctcagtctattgaaacagaatatctggcaacgagtccaaggactctgttttaacaagttcttcagaagatt

SEQ ID NO: 54983 - DNA, 952 bp, Homo sapiens
atacaaaattacatattttctgcctctttggaaataagctatcttccacccagaatttatatggggtgagcatgggacccagacctgactagtcaatagtacaatcccccagccacaaaggtaagttcagagttgggcatgacacaaggcctttcagaatcctttctggggcctttgcaaccagggctatcaagaaatctcatctatctgctaattgtctacctctgtcctaaccgtagactggaaggacttgaagcaaccaatcaccatcttttccagaaaccttgaaaatgtttcttcaaaagctgaaattattttttaaaaattcactgatatataaacaagatgaaaattatgattgagaatatgtgaaaattttatagcatttatgcagaggaattgtgatacatgttagcagttttctccactcacaatgcagttttaaaactactaatacaatattcggtccaaagcaagcatcaagaaatagaaaatcaccatatgcagatttttgatgaacatataacacatttagtttccattatattgtgatgtgatgagttcattatgtattggtgggaaagaaactatagctagagacaaaaaatggatctcttcagtgagttggaaatcttacaaaaatgtacactgaaacgttgttctamcctcctgaaattcatagaaattagccattcagaaaggaaagtactgtgtaaatttgtaccaattcaaataaaagagtagatttcataaaacaatcaggacaattgacctagactttataaaatagcaacactaaggtcactaaatataagaaactttatctacatctttttactagaagcattctagagttctctatttcatcactttgtgctttttaaaaagatattcttcatctgaaactattccaatgaatataatattttaaatattcaaagtaaaaatgata

SEQ ID NO: 54984 - DNA, 2205 bp, Homo sapiens
tgcatgagaattgcttgaacccggcaggcagagattgcagtgagctgagatggtgccattgcactgcagcctgggtgacaagcaagactttgtctcaaaaaaaaaaaaaaggtgaattaagtagtagttcagctggaaagctgggattcaaactcaaggagccttaatttcgagcctattctccccacatgaaaaggtatccagcactatgaagacaggtatgtgagtggcaaaagagagatgtgggcaacagatggtgctgagttcccaagagggaagatcactgtgtctcagagaagcaagggaaagttgtgtaggcaaatgaggccatgtttccaccatgatgcgaggcagcactagccccaattaagtgagtgttctctatctctccccactatctcagtagtgagcctgtattatattcgatgattatattttggatttttccagtaaaaaaaattgtagaaatttgtttttttcttcacatacaggtacatacctaataccttctattttgcctcttggtctgcaaagcctaaaacatttaatatctggccctttacagaaaacatttgcagaaccgtggtttaaactagggtgtaaaccataaagacatttgttgtttatttaagaaatccacactccacaaagcacacatatttcaaaacatcatgttgtacataataaatatatacaattttgtcaatttaaaagttaattttaagaaaagaagttcagatgtaggtgattccaaggttagttcaggaactcaataatggtgccaaagactcaatttccttttatctttctgcgctatcatttgtagcatttctatttgtttgtttgtttgttgtcttctcatggtcacaaaatggcggtgatagctccaagctttgcagctgatagaaaaaaagaagcttggacaatgcatgtatagatcagagacctctcagcaagtgtggggtagaggctgacaacaaaagaccaggatgagacaattacacaatgctgccaaggccagcacaggtcagagacagactcagagatggatgctgtctcttcatttaatggggaaacagcaaagtttcagtttagaattaataccagtggaaaaacaagaggaaaaattctgaatgtggctgagttaatctccatatgaatagaaattaatctggacatgacagaaattaagttaacaataatgaagtttgcagtctcctctaatagagtgtcagctgcaggagggcagatatcttgtctgccttgttcactactgtggcagatacttcattttgagttgcctactcaaaatgctttcttccttcccccttcttccctcctccgtccctctctatcctcccttcctcctttccttccttccttccttctttccttccttcctcctgtcctcccttcctccctccccctttcttttttttttcctaacacatcttgaagtacctttgagatgtcaatatgcctagtcaaagtacacatttgccgtttcctttgaaaatattggtggccaagtgatgagctgtgagcagtagtggggtggggcttcaggaaatgctctctaaaggaaagaagctcttctgacttgctcttccctctgcccttcttcctccctggaatgtggacctgtttcctggagatgcaacagccctcttgcagccctgggaataaaaactgaatgctgtaccagaggtagagcaggccagtggaaggagcctgggtgctctctctttctctctctctatctatctatatatatgtatattatctatatatatctatatatctataacatactataatatatattatctctatatatctatatatctctatataatatatagatatataatatatattctctctctctctctctctctctctatatatatatatatatatatatatttttttttttttttttttttgagacagggactcattctgtcgcccaggctggagtgcagtgacrtgatcttggctcactgcagccttgaccttccaggatcaaatgatcctcccatttcagcctcctgagtagctgggactacaggcatgcaccaccacgcctggttaatttttgtatttttttgtagagacagggtttcgccatgttgcccagcctggtctcaaactcctatactcaagcaatccacccacctcagcctcccagagtgttgggactac

SEQ ID NO: 54985 - DNA, 2205 bp, Homo sapiens
tgcatgagaattgcttgaacccggcaggcagagattgcagtgagctgagatggtgccattgcactgcagcctgggtgacaagcaagactttgtctcaaaaaaaaaaaaaaggtgaattaagtagtagttcagctggaaagctgggattcaaactcaaggagccttaatttcgagcctattctccccacatgaaaaggtatccagcactatgaagacaggtatgtgagtggcaaaagagagatgtgggcaacagatggtgctgagttcccaagagggaagatcactgtgtctcagagaagcaagggaaagttgtgtaggcaaatgaggccatgtttccaccatgatgcgaggcagcactagccccaattaagtgagtgttctctatctctccccactatctcagtagtgagcctgtattatattcgatgattatattttggatttttccagtaaaaaaaattgtagaaatttgtttttttcttcacatacaggtacatacctaataccttctattttgcctcttggtctgcaaagcctaaaacatttaatatctggccctttacagaaaacatttgcagaaccgtggtttaaactagggtgtaaaccataaagacatttgttgtttatttaagaaatccacactccacaaagcacacatatttcaaaacatcatgttgtacataataaatatatacaattttgtcaatttaaaagttaattttaagaaaagaagttcagatgtaggtgattccaaggttagttcaggaactcaataatggtgccaaagactcaatttccttttatctttctgcgctatcatttgtagcatttctatttgtttgtttgtttgttgtcttctcatggtcacaaaatggcggtgatagctccaagctttgcagctgatagaaaaaaagaagcttggacaatgcatgtatagatcagagacctctcagcaagtgtggggtagaggctgacaacaaaagaccaggatgagacaattacacaatgctgccaaggccagcacaggtcagagacagactcagagatggatgctgtctcttcatttaatggggaaacagcaaagtttcagtttagaattaataccagtggaaaaacaagaggaaaaattctgaatgtggctgagttaatctccatatgaatagaaattaatctggacatgacagaaattaagttaacaataatgaagtttgcagtctcctctaatagagtgtcagctgcaggagggcagatatcttgtctgccttgttcactactgtggcagatacttcattttgagttgcctactcaaaatgctttcttccttcccccttcttccctcctccgtccctctctatcctcccttcctcctttccttccttccttccttctttccttccttcctcctgtcctcccttcctccctccccctttcttttttttttcctaacacatcttgaagtacctttgagatgtcaatatgcctagtcaaagtacacatttgccgtttcctttgaaaatattggtggccaagtgatgagctgtgagcagtagtggggtggggcttcaggaaatgctctctaaaggaaagaagctcttctgacttgctcttccctctgcccttcttcctccctggaatgtggacctgtttcctggagatgcaacagccctcttgcagccctgggaataaaaactgaatgctgtaccagaggtagagcaggccagtggaaggagcctgggtgctctctctttctctctctctatctatctatatatatgtatattatctatatatatctatatatctataacatactataatatatattatctctatatatctatatatctctatataatatatagatatataatatatattctctctctctctctctctctctctatatatatatatatatatatatatttttttttttttttttttttgagacagggactcattctgtcgcccaggctggagtgcagtgacatgatcttggctcactgcagycttgaccttccaggatcaaatgatcctcccatttcagcctcctgagtagctgggactacaggcatgcaccaccacgcctggttaatttttgtatttttttgtagagacagggtttcgccatgttgcccagcctggtctcaaactcctatactcaagcaatccacccacctcagcctcccagagtgttgggactac

SEQ ID NO: 54986 - DNA, 721 bp, Homo sapiens
ggttcaaattaagttctcaagcgctggtggaaggtttagctacaggtcacggagaagatcagggaagcaacaggacacgcggggcaagggagcgtgaggcttaggagcaatyagagggagacaaaaaggttctgctatccgccaaaccttcttcggtctgggccctcccttagcaaacctggggctttatactccctctccaccaatccctgatgaccccggtggtgcctcacaatggacaatgccaagtagcgcccgcatcattccaatgacccctcccccatctcagtctcccacactcctcgcaaggacaggtcctctctggaaccttcacaaacctgatttctggtcctccccaaccagctccctgtccctgcttctgggcgctccttccttcctgagctcccagggttcctcaaggtcacttttggcgacaaaacataaaaaacaaatgatggcaggatggcaggaagaacctcatacccaagcagagtgccaggttttacagcctccgctcagccattcatatcctaagcaacaaaacatcagcaggatgcggaaggtcccgatagtaaaccatctccatcacatccatgtagccatccgtccatcaacctgtatctcaggaacaaatgtagatacattcattttaagcaagcatggtacatttacaaaaattaacctgacttattttgttccagcaaatctcaatatatttgag

SEQ ID NO: 54987 - DNA, 724 bp, Homo sapiens
tgaaacaagaagctatagtgccatcaggaatatagagattgggaagcatgggaatgattcaagtaaacttctgaagaaagcgtacacctccagggtagctaaacaagcagaatgcttgttggggaagcaaaatcatctgaaaacaacctgaatttggaggtaatagaaaaaaaaagttttttwaaaaattttatttaaaatggaaaaatttaatggtaggatgggaaagtagtacttctagcttggttttggattcagacctggatgggaatactaactgttagaacttgagaaaacaatgttagcatctaaaccttagtttagatgaaatgtgaaatgagagaataatagttcatttgtgcccttttgaaagatgtttaaattgtggtaaaacacaacaacatagaattatcgtcttaatcattatagtataattcagtggcattaagtacatccacattggtatgcatctgtccccagaactcttttttcattttataaaactgaaaatccacactcattaaagagtaactccccagttttttccccctcctccagcccctagtagccatcactttactttctgtctgtatgaatttgactactccaggtaccttgtttaagtggaatcatacagtatttgtcattttatgactggcttattttacttagcatagtgtctccaaggttcatccatgttgtagcatgtgtcagaattcccttt

SEQ ID NO: 54988 - DNA, 724 bp, Homo sapiens
tgaaacaagaagctatagtgccatcaggaatatagagattgggaagcatgggaatgattcaagtaaacttctgaagaaagcgtacacctccagggtagctaaacaagcagaatgcttgttggggaagcaaaatcatctgaaaacaacctgaatttggaggtaatagaaaaaaaaagttttttaaaaaattttatttaaaatggaaaaatttaatggtaggatgggaaagtagtacttctagcttggttttggattcagacctggatgggaatactaactgttagaacttgagaaaacaatgttagcatctaaaccttagtttagmtgaaatgtgaaatgagagaataatagttcatttgtgcccttttgaaagatgtttaaattgtggtaaaacacaacaacatagaattatcgtcttaatcattatagtataattcagtggcattaagtacatccacattggtatgcatctgtccccagaactcttttttcattttataaaactgaaaatccacactcattaaagagtaactccccagttttttccccctcctccagcccctagtagccatcactttactttctgtctgtatgaatttgactactccaggtaccttgtttaagtggaatcatacagtatttgtcattttatgactggcttattttacttagcatagtgtctccaaggttcatccatgttgtagcatgtgtcagaattcccttt

SEQ ID NO: 54989 - DNA, 724 bp, Homo sapiens
tgaaacaagaagctatagtgccatcaggaatatagagattgggaagcatgggaatgattcaagtaaacttctgaagaaagcgtacacctccagggtagctaaacaagcagaatgcttgttggggaagcaaaatcatctgaaaacaacctgaatttggaggtaatagaaaaaaaaagttttttaaaaaattttatttaaaatggaaaaatttaatggtaggatgggaaagtagtacttctagcttggttttggattcagacctggatgggaatactaactgttagaacttgagaaaacaatgttagcatctaaaccttagtttagatgaamtgtgaaatgagagaataatagttcatttgtgcccttttgaaagatgtttaaattgtggtaaaacacaacaacatagaattatcgtcttaatcattatagtataattcagtggcattaagtacatccacattggtatgcatctgtccccagaactcttttttcattttataaaactgaaaatccacactcattaaagagtaactccccagttttttccccctcctccagcccctagtagccatcactttactttctgtctgtatgaatttgactactccaggtaccttgtttaagtggaatcatacagtatttgtcattttatgactggcttattttacttagcatagtgtctccaaggttcatccatgttgtagcatgtgtcagaattcccttt

SEQ ID NO: 54990 - DNA, 724 bp, Homo sapiens
tgaaacaagaagctatagtgccatcaggaatatagagattgggaagcatgggaatgattcaagtaaacttctgaagaaagcgtacacctccagggtagctaaacaagcagaatgcttgttggggaagcaaaatcatctgaaaacaacctgaatttggaggtaatagaaaaaaaaagttttttaaaaaattttatttaaaatggaaaaatttaatggtaggatgggaaagtagtacttctagcttggttttggattcagacctggatgggaatactaactgttagaacttgagaaaacaatgttagcatctaaaccttagtttagatgaaatgtgaaatgagagaataatagttcatttgtkcccttttgaaagatgtttaaattgtggtaaaacacaacaacatagaattatcgtcttaatcattatagtataattcagtggcattaagtacatccacattggtatgcatctgtccccagaactcttttttcattttataaaactgaaaatccacactcattaaagagtaactccccagttttttccccctcctccagcccctagtagccatcactttactttctgtctgtatgaatttgactactccaggtaccttgtttaagtggaatcatacagtatttgtcattttatgactggcttattttacttagcatagtgtctccaaggttcatccatgttgtagcatgtgtcagaattcccttt

SEQ ID NO: 54991 - DNA, 1463 bp, Homo sapiens
ctgctggctgcacactgtattctgttaatggcgcctccaggaactcaatgtggatggtgtccctgatgacattcaatcccgccctgtctctggctcctgggacagtgctgggcactgacatgcattgggtgaataatgttgaatggattgtagtttttgggtaccttctatgtgtcaggtactgaagtggctaygaaaacaacaacagctaatattaatagcagctaccatagcttttctatgttccagggtgatactacgacgaagccccatttcgcagatgggaaatgagccactgagagggtaagtggcccaaggtcacacagttggtacatgggggacccaaggttcaagccccaggagtttggctccagagtggacatttctaactactggtaccagattcgcactgcctctctgcagataaaccaagcgtctctgactttatagaacttgtgaacagggggaggcatacatgcagtcagctacttagaatacaagtgtggagtatgagcagcattgccattatatccaacgtgaatgtgtgtacatattgcagtcatactttcaagtgggtgaggacaattgtggaggggcgtgggatgttttgtacaagctgttaatatctgtaagaattgctcttagcctgggctagatagcggtggctcacgcctgtaatcccagcacttcagaaggccgagatgggcggatcccttgaggtcaggagtttgagaccagcctggccaacatggcgaaaccccgtttctactaaaaatgcaaaaattagccgggtgtggtggtgtgcgcctgtaatcccagctactcaggaggctgaggcaggagaattgcttgaacccaggaggtggaggatgagcgagcagagatcacactactgcactgcagcccgggtgacagtgcgagactctgtctccaaaaaaataaataaataaataaataaataaataaataaataaataaataaataattgttcttaacctgggcaacataacaaatattgtttctacaaaaaaaaaaaaaaattagccacgtgtggtggtgtgcacctgtggtctcagctacagaaagctatgatggcaccactgcactccagcctgggtgacagagtgagaccatcttacaaaaagaaaaaaagaattgctcttatgatactggcaagaatgagaatacaagatgctcaaaagtctgacatccacaaactacacacatcaaaattgcccatgccatgatctgctttccactcagagctggtttcagctgggaacctccccgcccccccgcctccccacccccgcccccccagccttcttttgctaacagctgtttttaactaggctattcggttctgctatgtggctgtccaaaaatatattttatttaaggatctgccttgggaatagacaacaatctgaatgttccagcaacttcatttcaacacaaatgc

SEQ ID NO: 54992 - DNA, 1463 bp, Homo sapiens
ctgctggctgcacactgtattctgttaatggcgcctccaggaactcaatgtggatggtgtccctgatgacattcaatcccgccctgtctctggctcctgggacagtgctgggcactgacatgcattgggtgaataatgttgaatggattgtagtttttgggtaccttctatgtgtcaggtactgaagtggctatgaaaacaacaacagctaatattaatagcagctaccatagcttttctatgttccagggtgatactacgaygaagccccatttcgcagatgggaaatgagccactgagagggtaagtggcccaaggtcacacagttggtacatgggggacccaaggttcaagccccaggagtttggctccagagtggacatttctaactactggtaccagattcgcactgcctctctgcagataaaccaagcgtctctgactttatagaacttgtgaacagggggaggcatacatgcagtcagctacttagaatacaagtgtggagtatgagcagcattgccattatatccaacgtgaatgtgtgtacatattgcagtcatactttcaagtgggtgaggacaattgtggaggggcgtgggatgttttgtacaagctgttaatatctgtaagaattgctcttagcctgggctagatagcggtggctcacgcctgtaatcccagcacttcagaaggccgagatgggcggatcccttgaggtcaggagtttgagaccagcctggccaacatggcgaaaccccgtttctactaaaaatgcaaaaattagccgggtgtggtggtgtgcgcctgtaatcccagctactcaggaggctgaggcaggagaattgcttgaacccaggaggtggaggatgagcgagcagagatcacactactgcactgcagcccgggtgacagtgcgagactctgtctccaaaaaaataaataaataaataaataaataaataaataaataaataaataaataattgttcttaacctgggcaacataacaaatattgtttctacaaaaaaaaaaaaaaattagccacgtgtggtggtgtgcacctgtggtctcagctacagaaagctatgatggcaccactgcactccagcctgggtgacagagtgagaccatcttacaaaaagaaaaaaagaattgctcttatgatactggcaagaatgagaatacaagatgctcaaaagtctgacatccacaaactacacacatcaaaattgcccatgccatgatctgctttccactcagagctggtttcagctgggaacctccccgcccccccgcctccccacccccgcccccccagccttcttttgctaacagctgtttttaactaggctattcggttctgctatgtggctgtccaaaaatatattttatttaaggatctgccttgggaatagacaacaatctgaatgttccagcaacttcatttcaacacaaatgc

SEQ ID NO: 54993 - DNA, 1463 bp, Homo sapiens
ctgctggctgcacactgtattctgttaatggcgcctccaggaactcaatgtggatggtgtccctgatgacattcaatcccgccctgtctctggctcctgggacagtgctgggcactgacatgcattgggtgaataatgttgaatggattgtagtttttgggtaccttctatgtgtcaggtactgaagtggctatgaaaacaacaacagctaatattaatagcagctaccatagcttttctatgttccagggtgatactacgacgaagccccatttcgcagatgggaaatgagccactgagagggtaagtggcccaaggtcacacagttggtacatgggggacccaaggttcaagccccaggagtttggctccagagtggacatttctaactactggtaccagattcgcactgcctctctgcagataaaccaarcgtctctgactttatagaacttgtgaacagggggaggcatacatgcagtcagctacttagaatacaagtgtggagtatgagcagcattgccattatatccaacgtgaatgtgtgtacatattgcagtcatactttcaagtgggtgaggacaattgtggaggggcgtgggatgttttgtacaagctgttaatatctgtaagaattgctcttagcctgggctagatagcggtggctcacgcctgtaatcccagcacttcagaaggccgagatgggcggatcccttgaggtcaggagtttgagaccagcctggccaacatggcgaaaccccgtttctactaaaaatgcaaaaattagccgggtgtggtggtgtgcgcctgtaatcccagctactcaggaggctgaggcaggagaattgcttgaacccaggaggtggaggatgagcgagcagagatcacactactgcactgcagcccgggtgacagtgcgagactctgtctccaaaaaaataaataaataaataaataaataaataaataaataaataaataaataattgttcttaacctgggcaacataacaaatattgtttctacaaaaaaaaaaaaaaattagccacgtgtggtggtgtgcacctgtggtctcagctacagaaagctatgatggcaccactgcactccagcctgggtgacagagtgagaccatcttacaaaaagaaaaaaagaattgctcttatgatactggcaagaatgagaatacaagatgctcaaaagtctgacatccacaaactacacacatcaaaattgcccatgccatgatctgctttccactcagagctggtttcagctgggaacctccccgcccccccgcctccccacccccgcccccccagccttcttttgctaacagctgtttttaactaggctattcggttctgctatgtggctgtccaaaaatatattttatttaaggatctgccttgggaatagacaacaatctgaatgttccagcaacttcatttcaacacaaatgc

SEQ ID NO: 54994 - DNA, 1063 bp, Homo sapiens
agcaataatcatgtaattaaatatgaagccattaatacttttaatacactatctttagccagtctgtttatctgaggaggggtcaggtagagtaagggagagaaatacaacatggtaccttgattagagattctttacaaaaacctggaacctgattttgtttcatattaacttcatttgtggagttcagatagtttaatttctttctttcttttttttttttttttttttttgaaacagagtctcgctctgtcgcccaggctggagtgcagtggtgctatcttggctcactgcaacctccgcctcctgggttcaatcgattctcctgcctcagcctcctgagtagctgggactacaggcgcctgccaccacgcccggctaagtttttgtatttttagtagagatggggtttcaccatgttggccaggatggtctcaatctyctgacttccatgatccacctgccttggcctcccaaggtgctgggattacaggcatgagccaccgcgcccagcctagataatttaatttctaaaaagcactttttctgtctgggtgtagtggctcacacctgtaatccccgtactttgggaggctggggccagagcatcgcctgagcccaggagttcaagaccagcctaggcaacatagcgagacccatcctgtctttacaaaataatagaaaaaattagccgggcatgatggtgcatgcctgtagtcctagatacatgggaggctgaggtgggaggatggcttgagcctggaaagtcgaggctgcagtgagccatgattgtgccattgcactccagcctgagtgacagagcaagacctctgtctccaaaaaataaaaaaggcacttttactaaaggtagttttccagaagtataaaactgaaaaaggttagttttcacagttgcaattcagtaatttcaaaatgattttccccaaataactgatcagcagctgccatagctcacaggtgcttaccagagagactgctgcgctactgccaccaccacagttaatatggaggcttttgctgtctacacccggatagatattac

SEQ ID NO: 54995 - DNA, 590 bp, Homo sapiens
aaaagtatgtacaggcagggctcggtggctcacgcctgcaatcccagcactttgggaggctgaagcaggaggatcacttgagccctggagttcaagaccagcctggtcaacatggtaagacctcgtctctacaaaaacaaaacaaaacaaaaatcaaaaaatgtaggcaagcatggtggtgcacacctgtggtcccagctactcaggaggctgaggtgggagtatcacttgagcygagagttggaggctgcaatgagctatgatcaaaccactgcacttcagcctgggcaacagaacgagaccctgtctcttaaaaaaaattaaaagattgtaaagaaaagaaaataggttctaagctatggaaacaatgtcagcactgccaaccttcctcccagtctgtttcctttctgcccccagccctgccagagctgcccctgccttccctgtgccccctgttctggatggagttcaaaggccactgctatcgattcttccctctcaataagacctgggctgaggccgacctctactgttctgagttctctgtgggcaggaagtccgccaagctggcctccatccacaggtaagtg

SEQ ID NO: 54996 - DNA, 590 bp, Homo sapiens
aaaagtatgtacaggcagggctcggtggctcacgcctgcaatcccagcactttgggaggctgaagcaggaggatcacttgagccctggagttcaagaccagcctggtcaacatggtaagacctcgtctctacaaaaacaaaacaaaacaaaaatcaaaaaatgtaggcaagcatggtggtgcacacctgtggtcccagctactcaggaggctgaggtgggagtatcacttgagctgagagttggaggctgcaatgagctatgatcaaaccactgcacttcagcctgggcaacagaacgagaccctgtctcttaaaaaaaattaaargattgtaaagaaaagaaaataggttctaagctatggaaacaatgtcagcactgccaaccttcctcccagtctgtttcctttctgcccccagccctgccagagctgcccctgccttccctgtgccccctgttctggatggagttcaaaggccactgctatcgattcttccctctcaataagacctgggctgaggccgacctctactgttctgagttctctgtgggcaggaagtccgccaagctggcctccatccacaggtaagtg

SEQ ID NO: 54997 - DNA, 590 bp, Homo sapiens
aaaagtatgtacaggcagggctcggtggctcacgcctgcaatcccagcactttgggaggctgaagcaggaggatcacttgagccctggagttcaagaccagcctggtcaacatggtaagacctcgtctctacaaaaacaaaacaaaacaaaaatcaaaaaatgtaggcaagcatggtggtgcacacctgtggtcccagctactcaggaggctgaggtgggagtatcacttgagctgagagttggaggctgcaatgagctatgatcaaaccactgcacttcagcctgggcaacagaacgagaccctgtctcttaaaaaaaattaaaagattgtaaagaaaagaaaataggttctaagctatggaaacaatgtcagcactgccaaccttcctcccagtctgtttcctttctgcccccagccctgccagagctgcccctgccttccctgtgccccctgttctggatggagttcaaaggccactgctatcgattcttccctctcaataagacctgggcygaggccgacctctactgttctgagttctctgtgggcaggaagtccgccaagctggcctccatccacaggtaagtg

SEQ ID NO: 54998 - DNA, 745 bp, Homo sapiens
gggtggtaagtcacagggagaggacatggctgggtggggaggtctcttctacaggggccatttgggcagagaccaaaggaggagtgaaccacatggctacccgagggcagagaattccaggcagaggctggaggcaggagcrcccttctggtgttcaaggtgcagcccgagggtgagggcagccaagtgcaggggtgaggagagaggcatgggaggcaagggtgggtactggggccccataggctgggtggagactttggagctgctgctgggttctgagcaaagggcattttcgagtggaaaggctcagtttggctgtgctgccaaagagttttccaaagtggtcgttcctgtccttgccagcaggtcattgtgtgctttctggagggtgtgcccaggtgtctcctgtggatttaatttgcacttccctaatgattaatgatgtggagcactttgtgcagattcattggccatctgcatatcctctttcaccagatacctacttgagccatttgcccatttttctcttgggctgtctgtggttttcttagtgatttttaggagttctttatatattccaattataaggcctttgtccattttacaaatctcttctcccactctggggctgcctttcaccctctttttttttgttgttttttgttttgttttgtttttgagatggagtcttgctttgtcacccaggctggagtgcagtggcgcaatcttggctcactgcaacctc

SEQ ID NO: 54999 - DNA, 745 bp, Homo sapiens
gggtggtaagtcacagggagaggacatggctgggtggggaggtctcttctacaggggccatttgggcagagaccaaaggaggagtgaaccacatggctacccgagggcagagaattccaggcagaggctggaggcaggagcacccttctggtgttcaaggtgcagcccgagggtgagggcagccaagtgcaggggtgaggagagaggcatgggaggcaagggtgggtactggggcccsataggctgggtggagactttggagctgctgctgggttctgagcaaagggcattttcgagtggaaaggctcagtttggctgtgctgccaaagagttttccaaagtggtcgttcctgtccttgccagcaggtcattgtgtgctttctggagggtgtgcccaggtgtctcctgtggatttaatttgcacttccctaatgattaatgatgtggagcactttgtgcagattcattggccatctgcatatcctctttcaccagatacctacttgagccatttgcccatttttctcttgggctgtctgtggttttcttagtgatttttaggagttctttatatattccaattataaggcctttgtccattttacaaatctcttctcccactctggggctgcctttcaccctctttttttttgttgttttttgttttgttttgtttttgagatggagtcttgctttgtcacccaggctggagtgcagtggcgcaatcttggctcactgcaacctc

SEQ ID NO: 55000 - DNA, 745 bp, Homo sapiens
gggtggtaagtcacagggagaggacatggctgggtggggaggtctcttctacaggggccatttgggcagagaccaaaggaggagtgaaccacatggctacccgagggcagagaattccaggcagaggctggaggcaggagcacccttctggtgttcaaggtgcagcccgagggtgagggcagccaagtgcaggggtgaggagagaggcatgggaggcaagggtgggtactggggccccataggctgggtggagactttggagctgctgctgggttctgagcaaagggcattttcgagtggaaaggctcagtttggctgtgctgccaaagagttttccaaagtggtcgttcctgtccttgccagcaggtcattgtgtgctttctggagggtgtgcccaggtgtctcctgtggatttaatttgcacttccctaatgattaatgatgtggagcactttgtgcagattcattggccatctgcatatcctctttcaccagayacctacttgagccatttgcccatttttctcttgggctgtctgtggttttcttagtgatttttaggagttctttatatattccaattataaggcctttgtccattttacaaatctcttctcccactctggggctgcctttcaccctctttttttttgttgttttttgttttgttttgtttttgagatggagtcttgctttgtcacccaggctggagtgcagtggcgcaatcttggctcactgcaacctc

SEQ ID NO: 55001 - DNA, 897 bp, Homo sapiens
gggcaggagtggggtgtggaggartcatctgtgccaccaatgttcaacctgttatcagtgttccctggtttctactttcttttttttattattattaaaaaatatttttttagagattgggtctcgctatgttgcccaggctggtctcaaactcctggcctcaacaaatcctcccacctcagcctcccaaagtgcttggattacagatgtgtgccaccctgctggccccaggtctctgctctctaagcacatagtaggactgaaattctccagtccttgaaaaggtagacatggccatgtgatttgctttgaccaatgagatgcaagcaggatggtccgtgccacttctaggcaaggactcataccctttcctgccttgacagccatggaaaatcagagatggagcatcctttatccaggtccccaatgaggtcaccatgaagtagagccccccactgacctgctatggacatgtcacgggagtaagaagtcaactagggttgtctgcaacctcccacatctgcagattgctgcagatagctgcaacagcatagcccaggctgccctggctgaggagggcagaaaacagatgattaggtagggacatgttaatctgagatgcctgtgagatccccatgtggagagatccaccaagcggagacagtgactcgtgtccaagtcttctgcctctccgccccgcccaactgtgttctggagagggttttcctcctctatgccccttccaggaccacccagcaagtctccctcaaggtggggcccgggccaagtggagctgcctgggacaaggctggcagaggggggcagagagtgtggccagtggtgtccaaggggctggaggagtggggctttcagcctcccatgccctcttccagaaaa

SEQ ID NO: 55002 - DNA, 851 bp, Homo sapiens
ggatccgaatacaagcagctgcacaatttctttccattcactacaggccatgtttgcttttgaaaattagaaaattacaaaacgaataacaaacacgaatgacaacatgcagagctggcgtagtgagagtgagacaaatagattcatacgttgatgtatgcacracgcgctcttccaggcgtctcagcccatcctggggctggcggcttctccgttgatgtctccagcctgatcacacttctgggctctgagatgtattttgttctctccctgtctacttgacattgcctctgggctgtcacacagacagaacaaacataacccggccaggtctgaatttaagatcgcttccttcccactaaataaacaaacaaaaacctcttcccacctcagtcttctctatctcagtaatgggcacaaccatctcttcaggccaaaaatctaggagttgtccaaaatgcctcttcccctctcactccacatccaatttgtcagcagatcctattggctcttccttcaaacaatatcctgagtccatccagttctctccatcttcccacaaggccgaggcaccatcatctcacctggccccccacctgttaacccttcaatatctgcctgccttcatccattactccccagtcctcaatcagaatgcacttttgttaaatgtaagccacgtcctgtcaccttcctgcttaaacgccctcaaaggcaccccagtgtatttagaataaagtccaaattttatactgcagccaatgaggttctgcacaccagggtccctctctagcaatctgacctctctccttctacaatggccccatcagcctccatggagtacttcaaat

SEQ ID NO: 55003 - DNA, 1239 bp, Homo sapiens
taatttaatgtaaattctgagaagagcaaaacttttgtgtctctgtgcagcttctttaatgggtttgttggagaagggaaagtgtagctattgacttactactgaagaccaaactcctaaagaaggtgacttggagttggtaaatctcagtggggcccatttcttattctgtagatccatttcatgatgtagaaaaagcttcctagtgccgggcgcagtggctcacgcctgtaatcccagcactttgggaggccaaggagggtggatcacgakgtcaggagttcaagaccagcctggccaagatggcgaaaccccatctctagtaaaaatataaaaattagccaggtgtggtggcaggcacctgtaatcacagctactcaggaggctgagacagagaattgcttaaaccggggaggcggaggttgcagtgagccaagatggggccactgcactccagcttgggtgacagagcgagactctgtctaaagaaaaaaaagaaaaaaaaaagaaaaaagaaaaagaaaagaaaaagcttcctagagcaaaccaaagtcttccagaaaaaataagtggtgattgaaagcccctcacccccagaatctcttccccaacattagagatttatctttttcagctatggcctccctgagatgctttctgtctctgtcacattttatttatttatgtatttatttattttagagacagaatcttgcgctgctgcccaggctggagtgcattggtgtgatcatagctcacggtaaccactcctaggctcaagcaacgctcctgcctcagcctcctgcgtaggtaggtaggtaggactacagacatgcacgaccacgccctgccaatatatatatatattttttttttgtagtgatggggtctcgttgcccaggctggtctcaaactgtcaccttttattcattgtggagggaaggtagaatggtgttaaagtaactctcatcaatctcaaagctttccaaatccttttatagcaacttcaaccttgttttcagtatctcagccaaataaaggggaagttttttgttttgtttttttaactaggttaatcattttacggggtattgtgcaaacaggacgatggtttgtttgttatgcttatttctgatctcagaaggagcaaatatcctagctgaagagttctagacaggtaccaagggagcctgggattttgagctgcaagggctgtgtgcagcagtcagaggagatgca

SEQ ID NO: 55004 - DNA, 1239 bp, Homo sapiens
taatttaatgtaaattctgagaagagcaaaacttttgtgtctctgtgcagcttctttaatgggtttgttggagaagggaaagtgtagctattgacttactactgaagaccaaactcctaaagaaggtgacttggagttggtaaatctcagtggggcccatttcttattctgtagatccatttcatgatgtagaaaaagcttcctagtgccgggcgcagtggctcacgcctgtaatcccagcactttgggaggccaaggagggtggatcacgaggtcaggagttcaagaccagcctggccaagatggcgaaaccccatctctagtaaaaatataaaaattagccaggtgtggtggcaggcacctgtaatcacagctactcaggaggctgagacagagaattgcttaaaccggggaggcggaggttgcagtgagccaagatggggccactgcactccagcttgggtgacagagcgagactctgtctaaagaaaaaaaagaaaaaaaaaagaaaaaagaaaaagaaaagaaaaagcttcctagagcaaaccaaagtcttccagaaaaaataagtggtgattgaaagcccctcacccccagaatctcttccccaacattagagatttatctttttcagctatggcctccctgagatgctttctgtctctgtcacattttatttatttatgtatttatttattttagagacagaatcttgcgctgctgcccaggctggagtgcattggtgtgatcatagctcacggtaaccactcctaggctcaagcaacgctcctgcctcagcctcctgcgtaggtaggtaggtaggactacagacatgcacgaccacgccctgccaatatatatatatattttttttttgtagtgatggggtctcgttgcccaggctggtctcaaactgtcaccttttattcattgtggagggaaggtagaatggtgttaaagtaactctcatcaatctcaaagctttccaaatccttttatagcaacttcaaccttgttttcagtatctcagccaaataaaggggaagttttttgttttgtttttttaactaggttaatcattttacggggtattgtgcaaacaggacgatggtttgtttgttatgcttatttctgatctcagaaggagcaaatatcctagctgaagagttctagacaggtaccaagggagcctgggattttgarctgcaagggctgtgtgcagcagtcagaggagatgca

SEQ ID NO: 55005 - DNA, 1173 bp, Homo sapiens
tttcaggtgtcctggacaactcaaggaatcacccatggtgcatttatctcccacacctgttgcccactagtcatcattgtgattatatctggaacccaaccctttcttttatttaatgtggggcaaaatctggccagctggaagattctggacagtgatggagtaaaacaaayagataaaatcagcctgcattactataatcttggctcttcaataaagaatatcctaacaattttctaattcatggggaaattggataatctaatgtaagcagttaaggtttgagatcaatattctttcttttattatttttaaaatgagctggagcaatgaaagggaaaaagctttggactaaagcatgttcaaatatagaacgtatgaaaaatttaaaaacggtaaataaaagagctaaaattacattagaaaagaaaataacctcaaatatggtaaataaatttaaaaatatcagaaatagtaaataaaagtcacttgcaaaaggctgtgtagcctgaacatggaagtacacacaaagtttcctttcagtatcagaacaaatccctcccgttgcacaagtacacagagtgccaaggtagtcatcatatagggaaatgagaccatttagaacacatggaaaagagttgccatgctccaaaatagatcttggaaagtttatcatttccaagtgagtgaataggaaacttgactatttttagcctaattaaaattcaatgtattttttacttgccatttttagaccactctttttctctccacatcattaaaaccatacataccatgggtttctgactaattttcatgtaagtaatcaatgtatggttttgaaattctatttagagccatgttttgctaagagttgtattttgcattttgttagtagaaatcacacctttaaaagagtaaagcagattaggtttttgcatttgactctaatttttatgaatgagatgtcaacctggcaaagcacaatttcccttttgtgtaaatcacaatgcagagtggaatactataagcctgagtacatcccatgacagctgtagaggttaatatttagaataaataagaaaaatcgctatttaattctctttactttctacccatggatctgctgctcaaaggcacacaaaatgcaaaactgaaagacattttatatcc

SEQ ID NO: 55006 - DNA, 1173 bp, Homo sapiens
tttcaggtgtcctggacaactcaaggaatcacccatggtgcatttatctcccacacctgttgcccactagtcatcattgtgattatatctggaacccaaccctttcttttatttaatgtggggcaaaatctggccagctggaagattctggacagtgatggagtaaaacaaatagataaaatcagcctgcattactataatcttggctcttcaataaagaatatcctaacaattttctaattcatggggaaattggataatctaatgtaagcagttaaggtttgagatcaatattctttcttttattatttttaaaatgagctggagcaatgaaagggaaaaagctttggactaaagcatgttcaaatatagaacgtatgaaaaatttaaaaacggtaaataaaagagctaaaattacattagaaaagaaaataacctcaaatatggtaaataaatttaaaaatatcagaaatagtaaataaaagtcacttgcaaaaggctgtgtagcctgaacatggaagtacacacaaagtttcctttcagtatcagaacaaatccctcccgttgcacaagtacacagagtgccaaggtagtcatcatatagggaaatgagaccatttagaacacatggaaaagagttgccatgctccaaaatagatcttggaaagtttatcatttccaagtgagtgaataggaaacttgactatttttagcctaattaaaattcaatgtattttttacttgccatttttagaccactctttttctctccacatcattaaaaccatacataccatgggtttctgactaattttcatgtaagtaatcaatgtatggttttgaaatyctatttagagccatgttttgctaagagttgtattttgcattttgttagtagaaatcacacctttaaaagagtaaagcagattaggtttttgcatttgactctaatttttatgaatgagatgtcaacctggcaaagcacaatttcccttttgtgtaaatcacaatgcagagtggaatactataagcctgagtacatcccatgacagctgtagaggttaatatttagaataaataagaaaaatcgctatttaattctctttactttctacccatggatctgctgctcaaaggcacacaaaatgcaaaactgaaagacattttatatcc

SEQ ID NO: 55007 - DNA, 969 bp, Homo sapiens
tgaaccaagaccaagtccttaaattttctcctccataatccctaaatgctgaggatgaaatgctgaaaaagacctggactccactctccaggagttttacacactgctggaggaggttgggtacctaggtggccaaagcacaggtactcaatgaatgcctgcagaattgaagtagctaaaggagactcccattttctaccttccgatatcacaattattttctttattgatatgcttggtcttgagagtgtgtttgagtcatgcctcagaatgccttgagttttcattaaacttcatgacattttrttttctattttttaaatgcaagggtacatttgcttctcaagcacaataaaaagtcatttaaagacaaatctcataaataaaatggctgataagtctggaggatagtagtgtaagactataataaaatatggctatgaagcaatgaggtcactctcttactcacgaactaatctggaatgatgtaataataataggaactaacaatttgagcacttaatcagttcaagtgctttgtgtgcattatttcacttaatcttcataattcatacatcatttataccaaattatttatgtaacattcgtgtttccatttcacaaatgggaatagagatgctaagaggcccaagtgtcataaaggaaggacagggatttgaagccaggtatacctggcaccagaccggtgctcagtctaagccaccaacttgtcttccacaaaataagatccagagatgttttgagtaagtggaacataatctcaaggcattttgaagaataactcaagctcttcaaatctggatatactggctgtggtatcttgggtaaaacttagtctaaaaaatgtaatgaatcagtgcatacatggcagcaagaggtcaaggtgataatctgtaactataaatttggaatgtgcacttagtaaataagtgtggaagtcttaatgca

SEQ ID NO: 55008 - DNA, 630 bp, Homo sapiens
tgtttgggagtgatgatggtgacaatggaacttccttaaamtcccagtggtttgcttgtttaggaattccttttgctagtaactgatgtcagagcaagatgtttgaatctgggcctctgccccttcatggttttggtttcttggtgactcttcagtggtgctacccatcgttatgggacttgatttggtctctgtctgcatgatggcattggggatgaggcaaggttaagggaccctctgccccaggtactcccaatatgctttataatctggggaaaggagaatgatgtttgccagggacaagtgctttggaaacatctagggaatctggtttctccattctggttgaacatttactggaattgggtgcagtgagttgtcttttgaaatccagagcatgtccagtagcagaaaatggccttttgagtagagctgtgtctttctcctgctccacttttagatggctctgcttggtccatttgttgttgttgctattgttattgttgttgttgttgcaacatcttattgaagccatacttattgttggcaagaagtaaccaatacttccaaattcctgttttctttctaccaagtcccataaagttctaaactcagtgggaataggcacag

SEQ ID NO: 55009 - DNA, 630 bp, Homo sapiens
tgtttgggagtgatgatggtgacaatggaacttccttaaaatcccagtggtttgcttgtttaggaattccttttgctagtaactgatgtcagagcaagatgtttgaatctgggcctctgccccttcatggttttggtttcttggtgactcttcagtggtgctacccatcgttatgggacttgatttggtctctgtctgcatgatggcattggggatgaggcaaggttaagggaccctctgccccaggtactcccaatatgctttataatctggggaaaggagaatgatgtttgcyagggacaagtgctttggaaacatctagggaatctggtttctccattctggttgaacatttactggaattgggtgcagtgagttgtcttttgaaatccagagcatgtccagtagcagaaaatggccttttgagtagagctgtgtctttctcctgctccacttttagatggctctgcttggtccatttgttgttgttgctattgttattgttgttgttgttgcaacatcttattgaagccatacttattgttggcaagaagtaaccaatacttccaaattcctgttttctttctaccaagtcccataaagttctaaactcagtgggaataggcacag

SEQ ID NO: 55010 - DNA, 630 bp, Homo sapiens
tgtttgggagtgatgatggtgacaatggaacttccttaaaatcccagtggtttgcttgtttaggaattccttttgctagtaactgatgtcagagcaagatgtttgaatctgggcctctgccccttcatggttttggtttcttggtgactcttcagtggtgctacccatcgttatgggacttgatttggtctctgtctgcatgatggcattggggatgaggcaaggttaagggaccctctgccccaggtactcccaatatgctttataatctggggaaaggagaatgatgtttgccagggacaagtgctttggaaacatctagggaatctggtttctccattctggttgaacatttactggaattgggtgcagtgagttgycttttgaaatccagagcatgtccagtagcagaaaatggccttttgagtagagctgtgtctttctcctgctccacttttagatggctctgcttggtccatttgttgttgttgctattgttattgttgttgttgttgcaacatcttattgaagccatacttattgttggcaagaagtaaccaatacttccaaattcctgttttctttctaccaagtcccataaagttctaaactcagtgggaataggcacag

SEQ ID NO: 55011 - DNA, 630 bp, Homo sapiens
tgtttgggagtgatgatggtgacaatggaacttccttaaaatcccagtggtttgcttgtttaggaattccttttgctagtaactgatgtcagagcaagatgtttgaatctgggcctctgccccttcatggttttggtttcttggtgactcttcagtggtgctacccatcgttatgggacttgatttggtctctgtctgcatgatggcattggggatgaggcaaggttaagggaccctctgccccaggtactcccaatatgctttataatctggggaaaggagaatgatgtttgccagggacaagtgctttggaaacatctagggaatctggtttctccattctggttgaacatttactggaattgggtgcagtgagttgtcttttgaaatccagagcatgtccagtagcagaaaatggccttttgagtagagctgtgtctttctcctgctccacttttagatggctctgcttggtccatttgttgttgttgctrttgttattgttgttgttgttgcaacatcttattgaagccatacttattgttggcaagaagtaaccaatacttccaaattcctgttttctttctaccaagtcccataaagttctaaactcagtgggaataggcacag

SEQ ID NO: 55012 - DNA, 921 bp, Homo sapiens
tttacctactacatctgtgcatgatttgtgttcttaaaaattatcctttgtaccaaataatacacatactcacatatcctcttgtgtggttcttttttcaagatcagtaattagtttccaattcaaacaggggccatagactctccttttgatttaatttattaatttcattttcttcaacagctacacatttgagagaaataggcatcaattagctatttccaccaggcataaaataggaaacaggctccaatcgtaataggagaaatgaaggtaactcttcactcgggtttttgtctcttagtcagggacagactttgtagacctagactttgtagggtctgaattttatacaatttaaagcattttctttaaraaaagcagcacaaaattagacacaaacatgaatatttagaatgagaaaaagaaatcacaacaaaatacaatttttaaagctgacaaacactaaagcgacaacagagcaaaaagcccaaaataatactaatctcaacatttagctacaatgtttcaacattttttggtcaccttgtcttatgacagtgaatgatattataaaatgtatgtttggtcttcgacctcatttccttgcataaaattcctaaaatccttagaatctccaaagtgttgtcttatatgcaaatgttgacagcttcagggtggggctggttacaaaggcaggattagagggttgggactttcagccacacccctaacctccagggaggggagaggggctgcagatcaagttgatcaccaatggtaagtggtttaatcaatcatgcctacgtaatgaagcttctatagaaaaccaagaggaaaaggtttggagagcttctggatagctgcacacgtggagattcatggagggtggcacatctgggagtgggcatggaagctcca

SEQ ID NO: 55013 - DNA, 746 bp, Homo sapiens
ttttaaagtcaggtggggctgggtgtggtggctcacacctgtaatcccaacactttgggaggccaaggcaggcagatcacttgaggtcaggagtttgagaccagcctggccaacatggtgaracccccatctctactaataatacaaaaattagttgtgtgtaatggtgcatccctttaaacccacctacttgggaggctgagacatgagaatctctggaacctggtagggggaggttgcggtgagctgagatcgcgccactgcactctagcctgggcgacaaactgtgtctcaaaataaataaataaataaataaataaaataagtcagatggctcctaattctttgttttcgttaaaactgaaggaagatggggttaatttgtttctggagagcaggcaattttgtgatttctagcatttaattcactaaattgaacatctattaacaaatgttagcctttcttgacttatttataaaaacaaaaatagaaatagctgattctgaattgtgtattattctggcaataaatgatatttattgatagccatatgagctgcatgggggaaagctttatcttaatttatttctaaaaattttgctttgatcaattttattttgttttggtcaattatatcctaatgagttttagtgataactcagtctggtaaaatatgatactatttagatggtttttttctttggtcacagaaaaaatttatttcagtttacaaacacattttgga

SEQ ID NO: 55014 - DNA, 1039 bp, Homo sapiens
catgtggctagagttttacatattcacgagttaggcaaccctagtatgtagctcctaataagatgtggtatttcctttcactggacacaagcagctcttataggttagtatgataagataatgagaccaggaagggcgcggtggctcacgcctgtaatcccagcactttgggaggcagaggcgggcagatcacaaggtcaggagattgagaccatcctggttaagacagcgaaaccccgtctctactaaaaatacaaaaaattagccgggtgtggtggccggcgcctgtagtcccagctactcgggaggctgaggcaggagaatggcgtgaacccgggaggcggagcttgcagtgagccgagattgtgccactgcactctagcctgggcgacagagcgagactctgtctcaaaaaaaaaaaaaaagataatgagaccagaactaggactatgtaatcacacacatactctatgcagcggaggctgtaacatacaccacatagtcttccttctcttatagagagaagtacacatatgatctatttcattctgctcataaaagtgataaagggagccaaaggactcgaggctccttcccaggtctatgataccttccatcgatcctcaacaaagtagtttcctttctatcctcctttatttcctggtggtaccaagggtatgaactgggatagacagaaagggtttctcaatgacaaattctgcttccatgacataagttctctgcccttgaccacctaaaacttctaattggccaatttctctccttgatgtcttaagagaaaaaaagaaaagtaataaaaattacaagtcagaaggtttatggcccatgtcaagcaacatctttctaagaagatggaatcaatactgatgcaacccatagccatataatataaagcaaagagatggatttccccaagattcatgtaggcctattagtttcatttctgtagttgggcctcatatgtgaaaagtctccaacagggagaactartcatctagagatataatatcctaacttt

SEQ ID NO: 55015 - DNA, 537 bp, Homo sapiens
tgcccactctttgggtctgcactacctttaagagctgtaacactcactgcgaaggtctgtggcttcactcctgaagtcaagcaagaccacgaacccaccggaaggaagacactccagacacatctgaacatctgaaggaactccagacacaccatctttaagaactgtaacactcaccacgagggtctgcagcttcattcttgaagtcagcaagagcaagaacccaccggaaggaaccaattccggacacactacagctcaaggtcatcaccaagatctggtttttcacaaaaaacatttgcaacttctggcayaaatgggttagctacatcagagatacttaaggtacttgttatacatatagattcccaagtcctatctctgatgtactgaggcagaatctctaggtagagacaatagggagctgcatttttaataagatagtcaggtgactcttacatagatttaggcttgaaaatcacaaaccagaagattccatgtgagtcacacacagtgggattaatggaaaataaggaa

SEQ ID NO: 55016 - DNA, 758 bp, Homo sapiens
ggaaagaatcagagtagccagttacgagtctgtggcagagcccctgtagtcccagctgcttgggaggccaaggtgggaggactgcttgagcccagagttcaaggttgcagtgagctatgatcccgccactgcactccagcctaggtcacagagcaaggccctgtctttaaggaaagcgaggtggggaagcagggagatggtgttagggccagtggggagacgtgcacagattcaggtgcagcgtgggaaacaggttcacgcccacaaggcatccaactggaagttggtgctgaaggacgctagcaaatgccaagatgtataaaagtgcaaggcagaaggtcaagagaatgaaagggtgtttctgattgggcataagtgtctcctgagaggggagctgtgggtgaaggaaagggtctcattgcagctggcatggctkaagcacctggccgggatacagatggagtctgcctcccttcgaggtttcaaaggacgaccaggatctctgtcaaatgcaatcccaccaggaaggtagggagagagagcaggcatgtcttctcaagggcccttccaaccactgcaggtttatgtctatgaagctataccagaacattctgtagcaagagcaacagaaaacggatgggcaaaaaaaagaaaagaaatagcagaactggtttaaaatcaggcagtgaatcacccagaacgatgacctgaccaccaagccaccataggaaggagccacggagctgcctcctaggcca

SEQ ID NO: 55017 - DNA, 494 bp, Homo sapiens
tgcccattgctaaagttgaattacatgtgtgttggagcagggattcactgaaatgcagccaaacccacctagagacctgttgaagtgaaaagtaactaacttccccttctgccaagagcaagtaaaaagtattgaatgtttgagagaggrgttcttctgcctaaagtaatacagcacatgatgacagtataaccatggcattgtcctcaaaagaagtctctcaccagccctctataaccatagggtcctgttttgtttggggggttctgtttttatttgtttgtttgtttaaatacataagaactaattttggggaagagatgggataggggaaaataaggagattaaaaagtcacttcacgggctgggcatggtggctcacacctgtaaccccagcactttgggaggccaaggtggtagtatctcttgagcccatgagttcaagaccagctgggcaacatggctatgtttggctgtgtcctcacccaaatctc

SEQ ID NO: 55018 - DNA, 494 bp, Homo sapiens
tgcccattgctaaagttgaattacatgtgtgttggagcagggattcactgaaatgcagccaaacccacctagagacctgttgaagtgaaaagtaactaacttccccttctgccaagagcaagtaaaaagtattgaatgtttgagagaggggttcttctgcctaaagtaatacagcacatgatgacastataaccatggcattgtcctcaaaagaagtctctcaccagccctctataaccatagggtcctgttttgtttggggggttctgtttttatttgtttgtttgtttaaatacataagaactaattttggggaagagatgggataggggaaaataaggagattaaaaagtcacttcacgggctgggcatggtggctcacacctgtaaccccagcactttgggaggccaaggtggtagtatctcttgagcccatgagttcaagaccagctgggcaacatggctatgtttggctgtgtcctcacccaaatctc

SEQ ID NO: 55019 - DNA, 386 bp, Homo sapiens
agctgttctcaccagcctggaggttagcagaccagagtgggtgggcaggaccttggcctggtgcccctggaatcagtgggtggcatgtgttgggatatactggctacaggctcatctcaaagagcaggtagaacagagtcagcagggaactgacaggtggggctgtccccctgaaagcagccrcagaaacagctgccacctatttgcatagctgagcaggaggacatactgtctttgtgggttttgcttctggtctgtttcctgactgggttgataaagggagtcccagctcgttccctgttagccaaaccagcatcctactcacacaccggacactccaggtgctagtccactggtgctggtgttcaggggagttgggggggggg

SEQ ID NO: 55020 - DNA, 386 bp, Homo sapiens
agctgttctcaccagcctggaggttagcagaccagagtgggtgggcaggaccttggcctggtgcccctggaatcagtgggtggcatgtgttgggatatactggctacaggctcatctcaaagagcaggtagaacagagtcagcagggaactgacaggtggggctgtccccctgaaagcagccgcagaaacagctgccacctatttgcatagctgagcaggaggacatactgtctttgtgggttttgcttctggtctgtttcctgactgggttgataaagggagtcccagctcgttccctgttagccaaaccagcatcctrctcacacaccggacactccaggtgctagtccactggtgctggtgttcaggggagttgggggggggg

SEQ ID NO: 55021 - DNA, 1404 bp, Homo sapiens
tgatttaacacacgtttgtaatcaaaaagaccaaattcttgtgaggaagataatgtgtatttaactaaaaagaaatgtgtttaattcttagaagaggtttgtatagttaaaagctggatgcatcttatactgtatgaattttgacattattttggaaggctatattttattaaaagaaataagtttcaacaatatcaaggcattgttactgcattctaggaaatgattgggaaatgggattttagttaaactaaagttatcatttaactaaaaatcccctctacgttaaatggaacagcctagggcaaggacatagatgcataagctgtgggaatgtgtggcccaaaaccctctcatgagcgaacaattatattgcttgcactcacaagttattgcttcttagaaatatagcacttaccaaccacaaatctttaatatagtaaacatagtgtcaactccaaagttgaaagagaggtcagaaatcataaagttaaagttattgcctctggcatcctagctgactaagtaacctgaacaaccctttgagtgaaaaaaagacaacaaaaatgctggaaaaatatttttaaataaaataaatgtaagctaagacccagaggaaaaatacgttgagagatagctttcaatctgatagtatctgacaaatgtgtgaacttgaactttgattttccaactctttcaagacttggggggagaataggcaaagcacaagggtcatccaatttggtatgtctaataggaaatactcccaacataaagctggggttcccagcagctacaccttcaaagtaagaatatactagaaataaatctgctttccttcctctgcaccttcagaataatgcaaagaaatatgtctaattgatctttggcattgagttcaggggcaaaaaaataagtcttctttgaaaacttgtagccaaaacattggtcttacgtgcatctacagcctaaattcctacwacattggtagtttgaaaaatctttatccaagaatttaaagtatccagagctggtagaacttcctgatagcttgcagaagaaaatgaaaatattttctggagaaactcagctaaagcccaatcctttgaaaggaaatcctttgaaaggattttcaaagataaagtctccagaattatgaagtcaaattcaaaaatcactaaacacaaaatggactaacgtgccatatatgaaagccagcaagagcatcagactatggagttaaacctgaaaatactccatatatttgaattactagaataagaatatagaaataagtatagtgataggttttaaaaagaaaagaagcaattaaatatgataaaaataaggaaatataaaaaggagcaaaagacctgagaatatccttactggatttaagaatta

SEQ ID NO: 55022 - DNA, 748 bp, Homo sapiens
taattttagtaatttcttattttagtataaaacttcactacgttgaaaaggttttacaaatattttctaaaacacaggttggaagtaggcctcaatcccagcaccactccagcttcaatgcaaggacacttctttttgtcccattgtggttcctgaacatcttacattggtatgcttttttgtgtgtcaacatttatgttaggatcacagggtatatgtgcaggtttgttacctgagtaaattgtgtgttgctgaagtttggtgtatgaatgatcccatcacccaggcagtgagcataatacccaatagttagtttttcaacccttgctctcctcccrccctaccccctctattagtccccagtgtcagttgctcccatctttatgtccatgtgtactcaatgtttgccttccacttataagtgagaacatgtggtatttggttttctgcccctgcgttaattcacttaggataatgtcttccacctgcatccatgttgctgcaaaggacctgattttattcttctttatggctgtgtagtattccatggtgtatatgtaccacattttcttcatccagttcaccgttgatgggtgtccagattaattgcatgtctttgctattgtgaatagtgctgtgataaacatgtgaatacatatatcttattggtaatatgatttatttttctttgggtatatacccagtaatgggattgctgggttgaattataattctgttttaagttatt

SEQ ID NO: 55023 - DNA, 531 bp, Homo sapiens
tgaggaaacagttttctcaagatgtggaaatggaagtcagaatgcaaagagttgaggagcaagtgcatggtggtgaagccaacctattttttaattaaccagggtcaatgtactttaaaagtcttcagaatgcctgtaagtttcctttactagttccatgtactttcttgttttcccataaaaatctggatttgtggcagaagagaatgaaaaaaattaaaaattaaaagcgctgcktttccttaagcactgacaaaatacaataaaagctgattcttattaagttgtgttctcttttgcttgttttcattacactgctggcattataacagtttgtattctaatattttatgtatagatgtgcaatatttcagatatattgtgagataatatgttactgtgatttggcctgatggctgtatcagcataaacctatttatatagggaaatatctttcctaaattccaaaggattgaccagcaaactaatagcttgaggcattgccattttgtgggtcaaaatgattatata

SEQ ID NO: 55024 - DNA, 805 bp, Homo sapiens
ttaaaattgttttataggggacaatcaaatttgtgagtcctcctgaagccaggctgcccaggaaagccaacataactacaataatgataataattatgtcactttttttgatcacttgcagtcatcctagtgggtaacactttgcattgagttcttttggactggttctttccatctccattctactctcctagttggggacgttgcttttgtttgtttgtttgtttgtttgttttttggtttgattttttttttaagacagagtctcactctgtcacccaggctgaagtgcagtggcacagtctcagctcactgcaacttccgtctcctgagttcaagtgattctcctgcctcagcctcccgagtagctgggactacaggcgtgcagcaccatgcccggctaatttttgtatttttagtagaggcaaggtttcaccatgttggtcaggctagtctcaaattcctgacctcaggtgatccgcccacctctgcctcctaaagtactagtrttataggcgtgagccactgcacccagctaggtggggactttggaaagctcaacacatttcccagactcctagactcttttgtagctaaagcttaggatgtgaactatgtgccaccaattggatgcactcacaccagatttgagaagtagaagtgaggtggaggccattctcgcatctcctttgattgtttctatcggcaagcagggtcctttgcagctggttccagtgtccattctgcagtgtcctggtggaactgcaagagcaagtgcagttttgattccagttttctggtacct

SEQ ID NO: 55025 - DNA, 732 bp, Homo sapiens
ggatgggtgtggccccaatcacagctaccttaggagttctctttccttgatcctggggtgggggtcaaagcttccctctgccaaagaggttcaagcatgcagcaccctccagccctgagtgagcagaaaccggggagtgtctaagtgggtctaagggaggagaccacccctcctattgtcttatgcccgatttctgcctccaaagaaagaagaagtaaaaactaaaaggcagaaatgaaatccacaagcagacagctcggcgccacaccctgggcctggtagttaaagatcgacccctgacctaatcggttatgtcatctatagattacagacattgtatagaaaagcactgtgaaaatccctgtcctgttctgttctaattaccggtgcatgcagcccccagtcacgtaccccctgcttgctcattcgatcacgaccctctcaagcggacccccttagagttgtgagcccttaaaagggacaggaattgctcactcagggagctcggctcttgagacaggagtcttgctgatgctcccggctgaataaaccccttccttctttaacttggtgtctgaggggttttgtctgtggcttgtcctgctacatttcttggttccctgaccaggaagcaaagtgattaacggacagtcgaggcagccccttaggcagcttaggcctgccctgtggagcatccccgcggggractctggccagcttgagcgacacgga

SEQ ID NO: 55026 - DNA, 607 bp, Homo sapiens
tccaggtcactgagtcatccacacacacttgtaggcctcttctgcccttctcatctggccaccaggccatccattatctttgggaatcattccatagatttcttccttcattcattcaacaaaccctgaggtcctactatgcaccagtcacattcctcagcctccttcmcctcctccctcccaccctcagctcctcccctttccccagatcctagtgcccctttgccccagtgaagagggcacacctgggggcactgaggagtcaccgagtccagaggggtgacagacacaggcacaccccaccccagattacctggtgtggcccacggcagcaccggcaggcacctctccggtagaggttgaggaggttctgacacccggccctgggggctcagcaaccccttcccccaccttcagcctctactgggccgcgctgcctggaaaacccagcctgggctcagctgacttcctcttgtgtcatggaaagtgcagtgatggggacaggaaactcccgccagggatctgaggtctgagtggggacaggggcccagaggtttctggacctggaggcccggaggggtgaaaggggcaggggtaacttatgggg

SEQ ID NO: 55027 - DNA, 2034 bp, Homo sapiens
attcaagaatctcatgacacaagccttcatatttctcacaaagaattactctcctcatggatatcctcccagagatgtctggatcaaaggcaacttccaagaaatgcctgaagagctgccctcactgtctaactctgacaaaggatggcagtgaatgtatgttaaaaaaaaaaaaaaggaataaaacccctttacctctcaaacattcccctaccaaaaaataaaactgatcttacagggaagtctgtaaggacataaagcaagaagatacctgtaactgaaggttttcataagttcatagagaaaatcccaaggtgggtcaaattccagcatggctctttataggacaagcaagtgacaacctggtcacaaagttttctcacatcaataacaattatgtagtaacttttcattatgattctcagatagtaagatttctgctctggccaaagactgtccttaatagttatatttggaatgtctttctccagcatgagttctctgatgttgatggaatgccttccacatttccccctggtatgaatccttctgcaatgagtgagaactgagtggtgactgaagggatccttacattcactgtattcacagggcttctctccaaagtgactgctcatgtgttagttaagaaagagctgacaaaaaaaatgaaaagtttcctgacattctttgcaytcgaaggacttcttcctacagtgtgggtcccattatgaatgataaaataacagtgggtaaaggccttgctgtattcattgcagcaatagggttctctcatgtatggaccctttggtgctgcagaaggtgtgacctgcgtttgaaggccttcccacactcgatacacttgtagggcatctccccagtgtggatgacagagtgctgaatgaggtacgtgctccggtgaaaggctttcccacactgggtgcattcatagggcttctccccagtgtgaatccgctggtgctgtatgagttctgagctgcatctgaaggcctttccacatgccatgcaatcatagggcttctctccagtgtggatgatgtaatgttgaattaggtgggctctattgctaaaggctttctcacattctttgcactcaaagggcttttctccagtgtgggtcctattatggcgaataaaagtagaccggtgggtgaaggcctttcgacattgactacactcatagggtttctctccagtgtggattggatggtgctgcatgaggtacgacctgcgtttgaaggccttcccacactcaaggcacttgtatggtttctccccggtgtggatgaggtagtgccgaatgagagttgagctctggctaaaggctttcccacatgcattgcattcatagggtttcattccagtgtgaaccctctgatgtcgaacgagataccacttcctgttaaaacctttcccacactgcttgcatttgtaggggtttgtccctgcatgaatcaaggcgtctttccctggttgctgtgagtcacattcatggagaacatctgctgataaccactcttgtaatgccctggagtgcagaccatcatctgtccccaaaccttcaccttcaaggctcactttcccaagatgggtctccttgtggaggtctgtctccggtgtcactttacctttctgcatttccaaaagcccttcctcatccctagctctccccaacctcgaatcacttgaggttgaagattccagagtcaggcttccccggagaaaggcccgctcagataagactggcgggtaagtggttggctctctggtatgaacttgtgctctgtcacctgaagggcatcaacaaacaaaggaggggtcttttagtgataaaatatagaaaaacacaaaataaccacttcagtaggaaaatgaagatgaaaatagtgcctatgatacttgctgcatttttacatctctaacccaggttaccaaatactgcttacggtccttgtatccttgacaccattaaagggaaaatctggagggcaggctggaccgggggacagaggatcc

SEQ ID NO: 55028 - DNA, 2034 bp, Homo sapiens
attcaagaatctcatgacacaagccttcatatttctcacaaagaattactctcctcatggatatcctcccagagatgtctggatcaaaggcaacttccaagaaatgcctgaagagctgccctcactgtctaactctgacaaaggatggcagtgaatgtatgttaaaaaaaaaaaaaaggaataaaacccctttacctctcaaacattcccctaccaaaaaataaaactgatcttacagggaagtctgtaaggacataaagcaagaagatacctgtaactgaaggttttcataagttcatagagaaaatcccaaggtgggtcaaattccagcatggctctttataggacaagcaagtgacaacctggtcacaaagttttctcacatcaataacaattatgtagtaacttttcattatgattctcagatagtaagatttctgctctggccaaagactgtccttaatagttatatttggaatgtctttctccagcatgagttctctgatgttgatggaatgccttccacatttccccctggtatgaatccttctgcaatgagtgagaactgagtggtgactgaagggatccttacattcactgtattcacagggcttctctccaaagtgactgctcatgtgttagttaagaaagagctgacaaaaaaaatgaaaagtttcctgacattctttgcattcgaaggacttcttcctacagtgtgggtcccattatgaatgataaaataacagtgggtaaaggccttgctgtattcattgcagcaatagggttctctcatgtatggaccctttggtgctgcagaaggtgtgacctgcgtttgaaggccttcccacactcgatacacttgtagggcatctccccagtgtggatgacagagtgctgaatgaggtacgtgctccggtgaaaggctttcccacactgggtgcattcatagggcttctccccagtgtgaatccgctggtgctgtrtgagttctgagctgcatctgaaggcctttccacatgccatgcaatcatagggcttctctccagtgtggatgatgtaatgttgaattaggtgggctctattgctaaaggctttctcacattctttgcactcaaagggcttttctccagtgtgggtcctattatggcgaataaaagtagaccggtgggtgaaggcctttcgacattgactacactcatagggtttctctccagtgtggattggatggtgctgcatgaggtacgacctgcgtttgaaggccttcccacactcaaggcacttgtatggtttctccccggtgtggatgaggtagtgccgaatgagagttgagctctggctaaaggctttcccacatgcattgcattcatagggtttcattccagtgtgaaccctctgatgtcgaacgagataccacttcctgttaaaacctttcccacactgcttgcatttgtaggggtttgtccctgcatgaatcaaggcgtctttccctggttgctgtgagtcacattcatggagaacatctgctgataaccactcttgtaatgccctggagtgcagaccatcatctgtccccaaaccttcaccttcaaggctcactttcccaagatgggtctccttgtggaggtctgtctccggtgtcactttacctttctgcatttccaaaagcccttcctcatccctagctctccccaacctcgaatcacttgaggttgaagattccagagtcaggcttccccggagaaaggcccgctcagataagactggcgggtaagtggttggctctctggtatgaacttgtgctctgtcacctgaagggcatcaacaaacaaaggaggggtcttttagtgataaaatatagaaaaacacaaaataaccacttcagtaggaaaatgaagatgaaaatagtgcctatgatacttgctgcatttttacatctctaacccaggttaccaaatactgcttacggtccttgtatccttgacaccattaaagggaaaatctggagggcaggctggaccgggggacagaggatcc

SEQ ID NO: 55029 - DNA, 1035 bp, Homo sapiens
tggcacttctcctttatgtcatcatgtgaagaaggatgtgtctgcttccctttctgccatgattataagtttccagaggcctccctagccatgctgaactaactgtgagtcaattaaacctctttcctttataaattacccagtctcaggtatgtctttattagcagcatgagaatgggctaatacaccatcctttgctggaacctatgtagtaaaaaaaaacctttaagcaaaatacttaaaatgtaaaataaaagctagatggtagctacctttgattattttctcaaagaacatttgtaatttcattccaaagtctgcttctaagggactagaactcactaatgctattactcaaagcccaacattaactttgaaaataaaataggctttaaaatttttaaaccaggtaaagagagattctacacttaatttttaatgaataccactcctgagaaaaaatttttaaatggaataagaagtggtgagagagaagactggaaatatgatctaaggcatatcacaaaaccacatttgacaccaagttctgtggaacaaactctattctacgtagaaaaggcagccatcctcatgcctgtaatctcagcactttgggaggccgaggcrggcagatcccgaggtcaggagatggagaccatcctggctaacacggtgaaaccccatctctactaaaaatacaaaaaattagctgggcgtggtggtgggtgcctgtagtcccagctactcaggaggctgaggcaggagaatgggcttgaacccaggagggggagcttgcagtgagccgagatggcgccactgcactccagcctgtgcgacgagtgagactccgtctcaaaaaaaaaaaaaaagaaaaggcagccatcaaagattttttcaatgagcaaaagaggaaaagggtgacaacaatgctttaggaatagcagtctgacctttagagaccccaaatccttgattccagttctaggtttaacttaggcatggaaagaaattggtcaactatgaatctcaaatgca

SEQ ID NO: 55030 - DNA, 528 bp, Homo sapiens
aattgtatcaatgttaatttcctgattgtaatacttttactgtagttatataacatgttgatatttgaggaagctagatgaagggcatatgggaattctttatactatttttgcaaattttttgtaaggctaaaattatttaaagttgggcagctagaagtcctaacacccagtccaggactttccactataccaacatcatggactctgtcagtgtgctatcttattaaatggttcttgaatttaaatggaaatatttatttatcatacaacactgaagggtagggagtgtggctataaatgctctcaatgacatctatwagatgttattagactcttcataacatcagccaggtttcctttccattatggattctctaatgatgaaaaagagtgaggtgcttttccacatgatttaccactggttcccaaacttgtctgcatattagaatcacctggagatgggacccaggtaccagtattttttgtatctcttaggtgattccaatatgcagacaagcctggaaa

SEQ ID NO: 55031 - DNA, 1123 bp, Homo sapiens
cataattgtatatatttaattttataatatttagagtctgaacattttgatatatttagaattatatttttaacttaaggagaatgtattccattttaagcttgcatctcattttctcaaagtatgtattatagactttttaaaaaggctattatttttcagaatttaatgttttacttgctacagagcagatgactaagatataggcagataaagagttgctgaggagttactttatgtggmaggcaaaatttgatttaaattttttatgtggaatctaaagatccctttactaaaatagaaaaacacagagggtgccctatattataaatatataaactagtagtcttgtctctaaagtaaaaccttacttttaaatgattgattcagtatattgatatgctatcttccccggaaataattgagagattcttataaggttttccacaaattaataactctagaatttttagataaaaaccatattttaaaattctataaggaacaagtttaatatattttaacaatgtgataactagtggtttattgttagaccaacgaatcagaaatcttaaagagatttttttcacatctacttttatgagaaagggacagcagttctatattaaagatttatctaaagaagcagtcttcagatatgtaataagatagttcagtttctggtcgtatacttaaatgtatgttaaagtaaaagaagcagttttaaatgagtggagaaggataattggactccgtgtcatataattcacatatactattcatctgtgactttttgagcattattttaatggatgttggtgaacacaattgatttcagatttcattattctggaatcttgccattagaatttttcatagtttggtagatttctatggaaattagtagcagcaagaaagaaaggaaggaagaaaaaaagggaaaggagaggagaagagaggagagggaggagaaaggggagcggaggggagggaagagggggaaaaggaaggtgagaagaagagaagggaggagcaggagaggagaggaggaaggaagagatgtaaaatagaagcttttgattggactctgaacaaatgcttaatcttttggattatattcatg

SEQ ID NO: 55032 - DNA, 1123 bp, Homo sapiens
cataattgtatatatttaattttataatatttagagtctgaacattttgatatatttagaattatatttttaacttaaggagaatgtattccattttaagcttgcatctcattttctcaaagtatgtattatagactttttaaaaaggctattatttttcagaatttaatgttttacttgctacagagcagatgactaagatataggcagataaagagttgctgaggagttactttatgtggcaggcaaaatttgatttaaattttttatgtggaatctaaagatccctttactaaaatagaaaaacacagagggtgccctatattataaatatataaactagtagtcttgtctctaaagtaaaaccttacttttaaatgattgattcagtatattgatatgctatcttccccggaaataattgagagattcttataaggttttccacaaattaataactctagaatttttagataaaaaccatattttaaaattctataaggaacaagtttaatatattttaacaatgtgataactagtggtttattgttagaccaacgaatcagaaatcttaaagagatttttttcacatctacttttatgagaaagggacagcagttctatattaaagatttatctaaagaagcagtcttcagatatgtaataagatagttcagtttctggtcgtatacttaaatgtatgttaaagtaaaagaagcagttttaaatgartggagaaggataattggactccgtgtcatataattcacatatactattcatctgtgactttttgagcattattttaatggatgttggtgaacacaattgatttcagatttcattattctggaatcttgccattagaatttttcatagtttggtagatttctatggaaattagtagcagcaagaaagaaaggaaggaagaaaaaaagggaaaggagaggagaagagaggagagggaggagaaaggggagcggaggggagggaagagggggaaaaggaaggtgagaagaagagaagggaggagcaggagaggagaggaggaaggaagagatgtaaaatagaagcttttgattggactctgaacaaatgcttaatcttttggattatattcatg

SEQ ID NO: 55033 - DNA, 1123 bp, Homo sapiens
cataattgtatatatttaattttataatatttagagtctgaacattttgatatatttagaattatatttttaacttaaggagaatgtattccattttaagcttgcatctcattttctcaaagtatgtattatagactttttaaaaaggctattatttttcagaatttaatgttttacttgctacagagcagatgactaagatataggcagataaagagttgctgaggagttactttatgtggcaggcaaaatttgatttaaattttttatgtggaatctaaagatccctttactaaaatagaaaaacacagagggtgccctatattataaatatataaactagtagtcttgtctctaaagtaaaaccttacttttaaatgattgattcagtatattgatatgctatcttccccggaaataattgagagattcttataaggttttccacaaattaataactctagaatttttagataaaaaccatattttaaaattctataaggaacaagtttaatatattttaacaatgtgataactagtggtttattgttagaccaacgaatcagaaatcttaaagagatttttttcacatctacttttatgagaaagggacagcagttctatattaaagatttatctaaagaagcagtcttcagatatgtaataagatagttcagtttctggtcgtatacttaaatgtatgttaaagtaaaagaagcagttttaaatgagtggagaaggataattggactcygtgtcatataattcacatatactattcatctgtgactttttgagcattattttaatggatgttggtgaacacaattgatttcagatttcattattctggaatcttgccattagaatttttcatagtttggtagatttctatggaaattagtagcagcaagaaagaaaggaaggaagaaaaaaagggaaaggagaggagaagagaggagagggaggagaaaggggagcggaggggagggaagagggggaaaaggaaggtgagaagaagagaagggaggagcaggagaggagaggaggaaggaagagatgtaaaatagaagcttttgattggactctgaacaaatgcttaatcttttggattatattcatg

SEQ ID NO: 55034 - DNA, 1123 bp, Homo sapiens
cataattgtatatatttaattttataatatttagagtctgaacattttgatatatttagaattatatttttaacttaaggagaatgtattccattttaagcttgcatctcattttctcaaagtatgtattatagactttttaaaaaggctattatttttcagaatttaatgttttacttgctacagagcagatgactaagatataggcagataaagagttgctgaggagttactttatgtggcaggcaaaatttgatttaaattttttatgtggaatctaaagatccctttactaaaatagaaaaacacagagggtgccctatattataaatatataaactagtagtcttgtctctaaagtaaaaccttacttttaaatgattgattcagtatattgatatgctatcttccccggaaataattgagagattcttataaggttttccacaaattaataactctagaatttttagataaaaaccatattttaaaattctataaggaacaagtttaatatattttaacaatgtgataactagtggtttattgttagaccaacgaatcagaaatcttaaagagatttttttcacatctacttttatgagaaagggacagcagttctatattaaagatttatctaaagaagcagtcttcagatatgtaataagatagttcagtttctggtcgtatacttaaatgtatgttaaagtaaaagaagcagttttaaatgagtggagaaggataattggactccgtgtcatataattcacatatactattcatctgtgactttttgagcattattttaatggatgttgrtgaacacaattgatttcagatttcattattctggaatcttgccattagaatttttcatagtttggtagatttctatggaaattagtagcagcaagaaagaaaggaaggaagaaaaaaagggaaaggagaggagaagagaggagagggaggagaaaggggagcggaggggagggaagagggggaaaaggaaggtgagaagaagagaagggaggagcaggagaggagaggaggaaggaagagatgtaaaatagaagcttttgattggactctgaacaaatgcttaatcttttggattatattcatg

SEQ ID NO: 55035 - DNA, 1123 bp, Homo sapiens
cataattgtatatatttaattttataatatttagagtctgaacattttgatatatttagaattatatttttaacttaaggagaatgtattccattttaagcttgcatctcattttctcaaagtatgtattatagactttttaaaaaggctattatttttcagaatttaatgttttacttgctacagagcagatgactaagatataggcagataaagagttgctgaggagttactttatgtggcaggcaaaatttgatttaaattttttatgtggaatctaaagatccctttactaaaatagaaaaacacagagggtgccctatattataaatatataaactagtagtcttgtctctaaagtaaaaccttacttttaaatgattgattcagtatattgatatgctatcttccccggaaataattgagagattcttataaggttttccacaaattaataactctagaatttttagataaaaaccatattttaaaattctataaggaacaagtttaatatattttaacaatgtgataactagtggtttattgttagaccaacgaatcagaaatcttaaagagatttttttcacatctacttttatgagaaagggacagcagttctatattaaagatttatctaaagaagcagtcttcagatatgtaataagatagttcagtttctggtcgtatacttaaatgtatgttaaagtaaaagaagcagttttaaatgagtggagaaggataattggactccgtgtcatataattcacatatactattcatctgtgactttttgagcattattttaatggatgttggtgaacacaattgatttcagatttcattattctggaatcttgccattagaatttttcatagtttggtagatttctatggaaattagtagcagcaagaaagaaaggaaggaagaaaaaaagggaaaggagaggagaagagaggagagggaggrgaaaggggagcggaggggagggaagagggggaaaaggaaggtgagaagaagagaagggaggagcaggagaggagaggaggaaggaagagatgtaaaatagaagcttttgattggactctgaacaaatgcttaatcttttggattatattcatg

SEQ ID NO: 55036 - DNA, 1123 bp, Homo sapiens
cataattgtatatatttaattttataatatttagagtctgaacattttgatatatttagaattatatttttaacttaaggagaatgtattccattttaagcttgcatctcattttctcaaagtatgtattatagactttttaaaaaggctattatttttcagaatttaatgttttacttgctacagagcagatgactaagatataggcagataaagagttgctgaggagttactttatgtggcaggcaaaatttgatttaaattttttatgtggaatctaaagatccctttactaaaatagaaaaacacagagggtgccctatattataaatatataaactagtagtcttgtctctaaagtaaaaccttacttttaaatgattgattcagtatattgatatgctatcttccccggaaataattgagagattcttataaggttttccacaaattaataactctagaatttttagataaaaaccatattttaaaattctataaggaacaagtttaatatattttaacaatgtgataactagtggtttattgttagaccaacgaatcagaaatcttaaagagatttttttcacatctacttttatgagaaagggacagcagttctatattaaagatttatctaaagaagcagtcttcagatatgtaataagatagttcagtttctggtcgtatacttaaatgtatgttaaagtaaaagaagcagttttaaatgagtggagaaggataattggactccgtgtcatataattcacatatactattcatctgtgactttttgagcattattttaatggatgttggtgaacacaattgatttcagatttcattattctggaatcttgccattagaatttttcatagtttggtagatttctatggaaattagtagcagcaagaaagaaaggaaggaagaaaaaaagggaaaggagaggagaagagaggagagggaggagaaaggggagcggaggggagggaagagggggaaaaggaaggtgagaagaagagaagggaggagcaggagaggagaggaggaargaagagatgtaaaatagaagcttttgattggactctgaacaaatgcttaatcttttggattatattcatg

SEQ ID NO: 55037 - DNA, 1900 bp, Homo sapiens
tgcctgtctgttatgtaacataaaattaattatctattagctacttgacttgcggccatgaggatcaatctaaaataaaaagacatctgaaatttaggaaacatatgaaaacatttaggaaattgtattactaatactctaggctgaaatgagcttttttggctattaaaaaatcagtagttagagaagaaaaaggtatcataagcaatataagcaagatttaactagtacatctcatgtagagaggccattttgctctgaatataacaatttaatgatgtaatgttaaacctttaaaattgatttcaaaaatacttaaaatgttccaaattaatgtacaaatgtcattttcaagacaatacagcataataccaagagtatggactttagaagaaaaaaatttaaattctggctgtaccattgactagcttagtgactttataagttaatttcttcatttataaaatggaaataatgtcattgggaggggtaggtgaagtgatttatggaaggctttcagcatagtgcttgatcccacaattaattgtaacatcaccatcatttttgttttattattgtatctggtgaattcttgcaagtgcttatgtggtggtacagtaatggttttctaaccaagtaaaaagtaataattttaacaatattataaatttaaggtataaaaactatgtatgcatctacatattgtattttactaccccagaagattagtataaaagtataattttatggggaatagtgatctgtgtatttcagttgtttagtggagctacatgtttattaaccccttcctttctggtttaccctaaggaaatggcatctgctgtagcatcagttatcctcaagtagggaagaatattccctggctgcttgtttttggtcacaccatatcattaatacaattattttagtatttaaaaatgtttaaaagaacttgtgagaatgtatactcataaaatggaagagtggaatacatttaaacacgatattactgccattacatccttttaaaaccctgcaatgaatgtgttacattacaattgttgaaataactgttaagttctgtattttttcaacttggctgttctctccccacccctaaagaaaaaaaaaattgatcaggaataaagaccagatattcatagttattttcataacaaagacctaaggaaggtctgagtagcttgaaattttaaaaatatgaaacatcttttattttttcttactggagatattattcttcattcttccttgcccccctcctcacccaccctcacacataattgttggaagtaactggttactttttaagtagtgttacttcttgctgtggtactgggagaaatttaagctgccctggaatttcttttcccctgcttgggatccccagttgctctgcaaagtgatcgagcttgatggagcctgcacctgtgccccgggaaggaagccgttstaggcagctgtggaatgtctagttcccttcttccccaatgtaactgagagctgcttcaacatctgcacggttcagcaagtttgtcaagtttgtgccaacggctacagaggggatttttctagtaaaggccctaaaggtgtctcagagttagaggttttgtttgattaaatgtctgaaactaggaaggtaacttttttaattaaaacaattgtctctctttcaggacaagaattaagcttattgctttcacttctgtgaaatttgaatataattttgatagaggagttagaacaatggaagagcagtaagcacatttacatactgttgatatttttccagttctgtgcaaagaactatgtatctctgatatctgactggctaaattcccagaattaaataatactacaatttcaacacaattttctgtca

SEQ ID NO: 55038 - DNA, 1900 bp, Homo sapiens
tgcctgtctgttatgtaacataaaattaattatctattagctacttgacttgcggccatgaggatcaatctaaaataaaaagacatctgaaatttaggaaacatatgaaaacatttaggaaattgtattactaatactctaggctgaaatgagcttttttggctattaaaaaatcagtagttagagaagaaaaaggtatcataagcaatataagcaagatttaactagtacatctcatgtagagaggccattttgctctgaatataacaatttaatgatgtaatgttaaacctttaaaattgatttcaaaaatacttaaaatgttccaaattaatgtacaaatgtcattttcaagacaatacagcataataccaagagtatggactttagaagaaaaaaatttaaattctggctgtaccattgactagcttagtgactttataagttaatttcttcatttataaaatggaaataatgtcattgggaggggtaggtgaagtgatttatggaaggctttcagcatagtgcttgatcccacaattaattgtaacatcaccatcatttttgttttattattgtatctggtgaattcttgcaagtgcttatgtggtggtacagtaatggttttctaaccaagtaaaaagtaataattttaacaatattataaatttaaggtataaaaactatgtatgcatctacatattgtattttactaccccagaagattagtataaaagtataattttatggggaatagtgatctgtgtatttcagttgtttagtggagctacatgtttattaaccccttcctttctggtttaccctaaggaaatggcatctgctgtagcatcagttatcctcaagtagggaagaatattccctggctgcttgtttttggtcacaccatatcattaatacaattattttagtatttaaaaatgtttaaaagaacttgtgagaatgtatactcataaaatggaagagtggaatacatttaaacacgatattactgccattacatccttttaaaaccctgcaatgaatgtgttacattacaattgttgaaataactgttaagttctgtattttttcaacttggctgttctctccccacccctaaagaaaaaaaaaattgatcaggaataaagaccagatattcatagttattttcataacaaagacctaaggaaggtctgagtagcttgaaattttaaaaatatgaaacatcttttattttttcttactggagatattattcttcattcttccttgcccccctcctcacccaccctcacacataattgttggaagtaactggttactttttaagtagtgttacttcttgctgtggtactgggagaaatttaagctgccctggaatttcttttcccctgcttgggatccccagttgctctgcaaagtgatcgagcttgatggagcctgcacctgtgccccgggaaggaagccgttgtaggcagctgtggaatgtctagttcccttcttccccaatgtaactgagagctgcttcaacatctgcacsgttcagcaagtttgtcaagtttgtgccaacggctacagaggggatttttctagtaaaggccctaaaggtgtctcagagttagaggttttgtttgattaaatgtctgaaactaggaaggtaacttttttaattaaaacaattgtctctctttcaggacaagaattaagcttattgctttcacttctgtgaaatttgaatataattttgatagaggagttagaacaatggaagagcagtaagcacatttacatactgttgatatttttccagttctgtgcaaagaactatgtatctctgatatctgactggctaaattcccagaattaaataatactacaatttcaacacaattttctgtca

SEQ ID NO: 55039 - DNA, 2480 bp, Homo sapiens
tttgcagataggtgtgctcatgtgactatgctctggcctatggagagtgaatagccaataaaaatctcatgcataattctctatccctcaactctgccatcagtagtcaataagaccatgtctaggacagccttggaagacatatattgaaaataataaaggttcctgaaattcctgtacctacatcattgcctacttcactcccacataactcctcactcctcaccatcaacaggattgaagagaagctaaaaataaatttctgtttttagttactgagctatcagagtttacttcttgtagcagctaatcatagctaattcaattgcagaaatttaaagaaccctttcttattttctgccatgcatcttctttcctccaataatattgcttttatatgggcgactagttcactgcttctgagagttactaccaacaaaatcttaataaaatttacctcttacataaggatattataggaattattgcagcatttttacaaatctttcaggggttcttggagccaagtcttcatataaagtaaaataatgatactaattttactatatactataattttaatgaatactgtgtaatataaatatgaaacaataatttgtagaaacaattgtttccctgaaggaaacatatgaatatatcagaatattatcgtgaaataagaaagcacttggtacaatctatccattttttcttttttatatttataaagctaaaacacttagaaaatactaatgattttctctagtaataaagaaaactaattttttaaatccaatttacttttttaaaatccaaactgtactttttataaaagcagcagagaatttctggctctgatttgtatcttctgttcatccactaaaagtagataacttcctaccctgacctgctcttctaagtccaaaattgtttccctttactggaatatattttccaagggccaatggactcccatactcaggatttttattctcatcataataccaaggccgctatcatgaaacatttatcatggtaaagtctatcttctaaacagctctgaaaaatataaaatgtattgtttatacaaccaaagcaatgttttgtttttaggcctttgttcttattggtctcttatttatgaagcatttatttatttttttctgtctgtcaaaaggtttatcatatctaaggtaccatactatgctataaaacctctcaattggattttatttctccttctgctctctccaaagagcctcaaatcataaagtgacctatcttcccacttatgtaactataaggaccatatagaaattggaaatagctgccatggtagtgtgtgaacacaaggtccacatgaataacacacagtccaggaccaccatgggtggccacactagctgtgcaatgcatacctttgtgggaacaatccatgattgtaatgtagattggagtggtatagcacacaactgcaagttgtggctctgcccagcaccatattgtttggttgtttgatgttctgagtttcattgtccttcactgattccatggatattactggaatcttttttctctattatctagaagtactacatctctgaaaatatctctaataaaccactctttgactataattcctgttgggtctttttctagttttctcacccctttattcctacaaagtctgtttttatatctttcaagacatttattctcttttccccttcatttttaccctttattagccyacattccaggcctcattttctttcctacacagcctagactctttattcaatcattgcaggaacattgtcacagatactccccaccaactccctagttctctatgtttttacattatatactccgcaactcgctaaacctgggccaagtttctctagccagccttggaaatgtagcaagacgcatctcgaccaaaaaaaaaaacaaaaaaacaaaaaaacaaaaaaaacacacacacacacacacacacacaaatagaccaaataggcaatttttgctgtccggggaatgtccaagaggaagacaagcacaggacactcattaacatcacagaaaagaggaacccaagtgagctataaattcatcaaagatggtaagctcaggtaaggaaaatccagcagctatgcggattgatgccactgcccatgtatgggctctggccttctctgggctttcagtaaatgcagcaatcttttctttgttcatggataactcttatctccattcccctcagcattatttcaaacaggtccactcttctcaaaattaacccctgccagatctcctctcagcaggcatcattacttcctacttcacagagaaaatagaggtcatcacccatacattccctcaattcatcactccaaatccaataaattaatctatttttgcaccacgctgtctcatttgcagttttatagaaaggcttgtcctgcctcatattcaaaact

SEQ ID NO: 55040 - DNA, 2480 bp, Homo sapiens
tttgcagataggtgtgctcatgtgactatgctctggcctatggagagtgaatagccaataaaaatctcatgcataattctctatccctcaactctgccatcagtagtcaataagaccatgtctaggacagccttggaagacatatattgaaaataataaaggttcctgaaattcctgtacctacatcattgcctacttcactcccacataactcctcactcctcaccatcaacaggattgaagagaagctaaaaataaatttctgtttttagttactgagctatcagagtttacttcttgtagcagctaatcatagctaattcaattgcagaaatttaaagaaccctttcttattttctgccatgcatcttctttcctccaataatattgcttttatatgggcgactagttcactgcttctgagagttactaccaacaaaatcttaataaaatttacctcttacataaggatattataggaattattgcagcatttttacaaatctttcaggggttcttggagccaagtcttcatataaagtaaaataatgatactaattttactatatactataattttaatgaatactgtgtaatataaatatgaaacaataatttgtagaaacaattgtttccctgaaggaaacatatgaatatatcagaatattatcgtgaaataagaaagcacttggtacaatctatccattttttcttttttatatttataaagctaaaacacttagaaaatactaatgattttctctagtaataaagaaaactaattttttaaatccaatttacttttttaaaatccaaactgtactttttataaaagcagcagagaatttctggctctgatttgtatcttctgttcatccactaaaagtagataacttcctaccctgacctgctcttctaagtccaaaattgtttccctttactggaatatattttccaagggccaatggactcccatactcaggatttttattctcatcataataccaaggccgctatcatgaaacatttatcatggtaaagtctatcttctaaacagctctgaaaaatataaaatgtattgtttatacaaccaaagcaatgttttgtttttaggcctttgttcttattggtctcttatttatgaagcatttatttatttttttctgtctgtcaaaaggtttatcatatctaaggtaccatactatgctataaaacctctcaattggattttatttctccttctgctctctccaaagagcctcaaatcataaagtgacctatcttcccacttatgtaactataaggaccatatagaaattggaaatagctgccatggtagtgtgtgaacacaaggtccacatgaataacacacagtccaggaccaccatgggtggccacactagctgtgcaatgcatacctttgtgggaacaatccatgattgtaatgtagattggagtggtatagcacacaactgcaagttgtggctctgcccagcaccatattgtttggttgtttgatgttctgagtttcattgtccttcactgattccatggatattactggaatcttttttctctattatctagaagtactacatctctgaaaatatctctaataaaccactctttgactataattcctgttgggtctttttctagttttctcacccctttattcctacaaagtctgtttttatatctttcaagacatttattctcttttccccttcatttttaccctttattagcccacattccaggcctcattttctttcctacacagcctagactctttattcaatcattgcaggaacattgtcacagatactccccaccaactccctagttctctatgtttttacattatatactccgcaactcgctaaacctgggccaagtttctctagccagcyttggaaatgtagcaagacgcatctcgaccaaaaaaaaaaacaaaaaaacaaaaaaacaaaaaaaacacacacacacacacacacacacaaatagaccaaataggcaatttttgctgtccggggaatgtccaagaggaagacaagcacaggacactcattaacatcacagaaaagaggaacccaagtgagctataaattcatcaaagatggtaagctcaggtaaggaaaatccagcagctatgcggattgatgccactgcccatgtatgggctctggccttctctgggctttcagtaaatgcagcaatcttttctttgttcatggataactcttatctccattcccctcagcattatttcaaacaggtccactcttctcaaaattaacccctgccagatctcctctcagcaggcatcattacttcctacttcacagagaaaatagaggtcatcacccatacattccctcaattcatcactccaaatccaataaattaatctatttttgcaccacgctgtctcatttgcagttttatagaaaggcttgtcctgcctcatattcaaaact

SEQ ID NO: 55041 - DNA, 2480 bp, Homo sapiens
tttgcagataggtgtgctcatgtgactatgctctggcctatggagagtgaatagccaataaaaatctcatgcataattctctatccctcaactctgccatcagtagtcaataagaccatgtctaggacagccttggaagacatatattgaaaataataaaggttcctgaaattcctgtacctacatcattgcctacttcactcccacataactcctcactcctcaccatcaacaggattgaagagaagctaaaaataaatttctgtttttagttactgagctatcagagtttacttcttgtagcagctaatcatagctaattcaattgcagaaatttaaagaaccctttcttattttctgccatgcatcttctttcctccaataatattgcttttatatgggcgactagttcactgcttctgagagttactaccaacaaaatcttaataaaatttacctcttacataaggatattataggaattattgcagcatttttacaaatctttcaggggttcttggagccaagtcttcatataaagtaaaataatgatactaattttactatatactataattttaatgaatactgtgtaatataaatatgaaacaataatttgtagaaacaattgtttccctgaaggaaacatatgaatatatcagaatattatcgtgaaataagaaagcacttggtacaatctatccattttttcttttttatatttataaagctaaaacacttagaaaatactaatgattttctctagtaataaagaaaactaattttttaaatccaatttacttttttaaaatccaaactgtactttttataaaagcagcagagaatttctggctctgatttgtatcttctgttcatccactaaaagtagataacttcctaccctgacctgctcttctaagtccaaaattgtttccctttactggaatatattttccaagggccaatggactcccatactcaggatttttattctcatcataataccaaggccgctatcatgaaacatttatcatggtaaagtctatcttctaaacagctctgaaaaatataaaatgtattgtttatacaaccaaagcaatgttttgtttttaggcctttgttcttattggtctcttatttatgaagcatttatttatttttttctgtctgtcaaaaggtttatcatatctaaggtaccatactatgctataaaacctctcaattggattttatttctccttctgctctctccaaagagcctcaaatcataaagtgacctatcttcccacttatgtaactataaggaccatatagaaattggaaatagctgccatggtagtgtgtgaacacaaggtccacatgaataacacacagtccaggaccaccatgggtggccacactagctgtgcaatgcatacctttgtgggaacaatccatgattgtaatgtagattggagtggtatagcacacaactgcaagttgtggctctgcccagcaccatattgtttggttgtttgatgttctgagtttcattgtccttcactgattccatggatattactggaatcttttttctctattatctagaagtactacatctctgaaaatatctctaataaaccactctttgactataattcctgttgggtctttttctagttttctcacccctttattcctacaaagtctgtttttatatctttcaagacatttattctcttttccccttcatttttaccctttattagcccacattccaggcctcattttctttcctacacagcctagactctttattcaatcattgcaggaacattgtcacagatactccccaccaactccctagttctctatgtttttacattatatactccgcaactcgctaaacctgggccaagtttctctagccagccttggaaatgtagcaagacgcatctcgaccaaaaaaaaaaacaaaaaaacaaaaaaacaaaaaaaacacacacacacacacacacacacaaatagaccaaataggcaatttttgctgtccggggaatgtccaagaggaagacaagcacaggacactcattaacatcacagaaaagaggaacccaagtgagctataaattcatcaaagatggtaagctcaggtaaggaaaatccagcagctatgcggattgatgccactgcccatgtatgggctctggccttctctgggctttcagtaaatgcagcaatcttttctttgttcatggataactcttatctccattcccctcagcattatttcaaacaggtccactcttctcaaaattaacccctgccagatctcctctcagcaggcatcattacttcctacttcacagagaaaatagaggtcatcacccatacattccctcaattcatcactccaaatccaataaattaatctatttttgcaccacgctgtctcatttkcagttttatagaaaggcttgtcctgcctcatattcaaaact

SEQ ID NO: 55042 - DNA, 571 bp, Homo sapiens
agttgaaaacaatggtaaacatgatttttgcagtcaagttctctgggttctttaaggaccttaattggtttgactctgtgttttgcatcagtcacaaatgatacttcgtgaaccaaattttaatcactacaaaggtgatgtcttaactatgttttagctaatttgtttccttatcagttatttctattccatggttccacaggacatggaatagtccttattgttaatagacaataagtctattaactctgaagcagtctaaggatgtgagaatttgtggcatattaaaactgtctcctaaatgccagatctgattttttatctttgttatatttcgcttttattactccatgcagaatattgycttattgtgtgaatgagcatctgaaattgggggaagaccacgagatggtgaagagggacattttgagaggaaattaactcaatccctaagaggaaatgtgccacattcaatgaatgaaaatatatcattccatttatcctcattcaggaaagagggcattatacacatagtacttttctcaataacgaaatgaaatcataaaagtta

SEQ ID NO: 55043 - DNA, 913 bp, Homo sapiens
atcataactgtgttgttgtaagatgctaagtttggggataatttgttacacagtactaaataactaatacaatatgcaagtaatgtattgagggaaacagaaaaaggcaggaagagcctgtgatgcacgtctgacatctaaaacatgagagagagaagaaaggaaaattgggctggaggggccttggactccagtacagtcctcggagaagttgcccattggaagagtcccacatcttgctggaatgagtctgcctttttacaattgccatgcttagtcattggctgggagcagttgaaggaaccatggtcctgccataaatgaaatgatgaatccacaggggaagcagctggagccccatagcaggagatctgactggtttatttccatgctacagaagagaagcaaaccaatatcataatgttggcaagaaaaaaatagtatctttttaaaaatcattttgcttacaatattattgaaaatcrtatcttgcatgatagcccgtcctcagttgtgctgcccagagtgagcagaaaagcagtaggcaaggcctaagggggacttaatgcagcaggaatgtgagttctatcaccacttatctgcatcgcctcactgacatcacatctgttggattgacaggctctatcgttctgcttataaatctcttgctttaatgaatatggaatctaatctgatttctttctcattcaaaggcatctttttcaagagaaaaaaaattctttgaggacaagaaagagttgaaataaaatgatagagaaaaacccttaactagaggaataatgaaaaaaaaaagggagacagggagaaatatcagcatgtcttttatacatttgaacagttattgagcatatttcaacaagtacaagactgtcttttattttacaaaaagaca

SEQ ID NO: 55044 - DNA, 913 bp, Homo sapiens
atcataactgtgttgttgtaagatgctaagtttggggataatttgttacacagtactaaataactaatacaatatgcaagtaatgtattgagggaaacagaaaaaggcaggaagagcctgtgatgcacgtctgacatctaaaacatgagagagagaagaaaggaaaattgggctggaggggccttggactccagtacagtcctcggagaagttgcccattggaagagtcccacatcttgctggaatgagtctgcctttttacaattgccatgcttagtcattggctgggagcagttgaaggaaccatggtcctgccataaatgaaatgatgaatccacaggggaagcagctggagccccatagcaggagatctgactggtttatttccatgctacagaagagaagcaaaccaatatcataatgttggcaagaaaaaaatagtatctttttaaaaatcattttgcttacaatattattgaaaatcatatcttgcatgatagcccgtcctcagttgtgctgcccagagtgagcagaaaagcagtaggcaaggcctaagggggacttaatgcagcaggaatgtgagttctatcaccacttatctgcatcgcctcactgacatcacatctgttggattgacaggctctatcgttctgcttataaatctcttgctttaatgaatatggaatctaatctgatttctttctcattcaaaggcatctttttcaagagaaaaaaaattctttgaggacaagaaagagttgaaataaaatgatagagaaaaacccttaactagaggaataatgaaaaaaaaaagggagacagggagaaatatcagcatgtcttttatacatttgaayagttattgagcatatttcaacaagtacaagactgtcttttattttacaaaaagaca

SEQ ID NO: 55045 - DNA, 662 bp, Homo sapiens
ttatcttatttcctgtcatgcttcctgggaccatttccaaaatagacaatctgttcccaaatccttttctcagatctgtctttgaaagaatacaagytaagaaaatattgatggcctaaaacaataataataatgccttgtgtaggttaaaatgtaatgagaaacaaaatacacaacaacaatagcataaactttggtggactgacaaatgaaatgttctatgatgtttacattgtctaataaagggtaaaatgggtaaaattatcaactaatattagactttaatgaattaaatctgtatgttttaatcactaaaattacaagtataattgaatgagaatatgtacatcttccaaactaagatattacaaaatactatccaataaggtcaacaaagaaacaaaagaaatatagaacaggcaagaaaaaaacgtaaattgttagatttatgcctaaacatagcaataattacattaagcagaaatggcctaatgcaccaatttaaaggcagagacagtcagactataaagaaaaatacatctatatgctcattacaaaacacactgtctgattctccagaagatagagctgaagccaaaaattatttgcagatccagggagcaaaagtgaaagacaaaggaagtgatgtagagaaggagaaa

SEQ ID NO: 55046 - DNA, 662 bp, Homo sapiens
ttatcttatttcctgtcatgcttcctgggaccatttccaaaatagacaatctgttcccaaatccttttctcagatctgtctttgaaagaatacaagctaagaaaatattgatggcctaaaacaataataataatgccttgtgtaggttaaaatgtaatgagaaacaaaatacacaacaacaatagcataaactttggtggactgacaaatgaaatgttctatgatgtttacattgtctaataaagggtaaaatgggtaaaattatcaactaatattagactttaatgaattaaatctgtatgttttaatcactaaaattacaagtataattgaatgagaatatgtacatcttccaaactaagatattacaaaatactatccaataaggkcaacaaagaaacaaaagaaatatagaacaggcaagaaaaaaacgtaaattgttagatttatgcctaaacatagcaataattacattaagcagaaatggcctaatgcaccaatttaaaggcagagacagtcagactataaagaaaaatacatctatatgctcattacaaaacacactgtctgattctccagaagatagagctgaagccaaaaattatttgcagatccagggagcaaaagtgaaagacaaaggaagtgatgtagagaaggagaaa

SEQ ID NO: 55047 - DNA, 988 bp, Homo sapiens
cctatttacaaatgtcattaagaccaacttatcactgatactttaaaagtaccaactaacaatgaaatgtagaaaacatagagtatttgtatatttatggaaggagctaagaaacgtaattttcactaagctcatataatgtatyacaaaaagcatcaagacatcaaatgacagaccaacttaataaatacagtttccaattctgtgtttctcagcagctggctatagcagcatatatataagtgtaagatagaaagttagatagatggatctataggtctttatgtagatggatggatagatgtatcaaaagacatatacttgtaaaaatatatatttttatatttgaatatttttccattatatctttgactgccattgtattataattaatgcggaggtctatagaggccagtccctggagaaaggctaaaatgactgatgtgctttattaaaaaaaaatgattttctcaccaccaccaccaaacctctcaagctaggcctacgttgatggaaaaaaatctgtattttattgagtttcctctctcctatccataggtgcctcagatgcccagcaggactaaagaatgccttgggtggtgaacatcggcctgccagtttagaggcagttgtttaagctaaaccccagatggaagcattctttctctctctatacatatgaaatttagaatgaggagcagcagacactggagcaattatagtgatgttaacattgggagctacagggtagcctctttagacacacagagaaaagcaaggaaagcggggatgtagagatgaatgaaactgacttgcatagaaaagtcaagaagccaaagtgttgccatacagagagtctctctcccttgcttccttatggttttctaatctctcataaggcttgactcccttcctgtccttggggtctgtaagatatccctgtttctttttaatacattgctcctttttgttccaaactgtctgcgat

SEQ ID NO: 55048 - DNA, 651 bp, Homo sapiens
caggcctgtcaaataaatttaaccaaatatttcaatgggaaaaaaagaataacttatgtcttgtgataatataaccaccatgctttcatgtgtgtatgtgtgtatgggtgtgtgtgtgagactataatttattcaacaaaaaaaattttggcttctttttttctcaaaaaaaaaaatcataaaaacttatctaatgctgaagggtagcaatcatcagttgatcttaaaaggacaccatattctctataaatatttctttctaaagttgtcagttaggtttcatcctgctttatcctttctttaggaaaggatagtgttaaagtgccatcaagtaaaatatgggattttctgctgaggtctttacatcagtgaatktacattttgtaagaataccctaaggggatttcagcttcctgacttaaaaagttaggtggatccatttcagttgtgcacatccagcttcatgctttaacatggccagattgccatggcttcaatttaagtcacaggtttctggtgataatatacatctacatttttacagtggtgcctgaaaatgggagtctataaagaatctgacttgaattattaagaatggaaaacttaaatgtctgaccccaaacaggggtataaattctgctatgttttaat

SEQ ID NO: 55049 - DNA, 651 bp, Homo sapiens
caggcctgtcaaataaatttaaccaaatatttcaatgggaaaaaaagaataacttatgtcttgtgataatataaccaccatgctttcatgtgtgtatgtgtgtatgggtgtgtgtgtgagactataatttattcaacaaaaaaaattttggcttctttttttctcaaaaaaaaaaatcataaaaacttatctaatgctgaagggtagcaatcatcagttgatcttaaaaggacaccatattctctataaatatttctttctaaagttgtcagttaggtttcatcctgctttatcctttctttaggaaaggatagtgttaaagtgccatcaagtaaaatatgggattttctgctgaggtctttacatcagtgaatttacattttgtaagaataccctaaggggatttcarcttcctgacttaaaaagttaggtggatccatttcagttgtgcacatccagcttcatgctttaacatggccagattgccatggcttcaatttaagtcacaggtttctggtgataatatacatctacatttttacagtggtgcctgaaaatgggagtctataaagaatctgacttgaattattaagaatggaaaacttaaatgtctgaccccaaacaggggtataaattctgctatgttttaat

SEQ ID NO: 55050 - DNA, 651 bp, Homo sapiens
caggcctgtcaaataaatttaaccaaatatttcaatgggaaaaaaagaataacttatgtcttgtgataatataaccaccatgctttcatgtgtgtatgtgtgtatgggtgtgtgtgtgagactataatttattcaacaaaaaaaattttggcttctttttttctcaaaaaaaaaaatcataaaaacttatctaatgctgaagggtagcaatcatcagttgatcttaaaaggacaccatattctctataaatatttctttctaaagttgtcagttaggtttcatcctgctttatcctttctttaggaaaggatagtgttaaagtgccatcaagtaaaatatgggattttctgctgaggtctttacatcagtgaatttacattttgtaagaataccctaaggggatttcagcttcctgacttaaaaagttaggtggatcyatttcagttgtgcacatccagcttcatgctttaacatggccagattgccatggcttcaatttaagtcacaggtttctggtgataatatacatctacatttttacagtggtgcctgaaaatgggagtctataaagaatctgacttgaattattaagaatggaaaacttaaatgtctgaccccaaacaggggtataaattctgctatgttttaat

SEQ ID NO: 55051 - DNA, 651 bp, Homo sapiens
caggcctgtcaaataaatttaaccaaatatttcaatgggaaaaaaagaataacttatgtcttgtgataatataaccaccatgctttcatgtgtgtatgtgtgtatgggtgtgtgtgtgagactataatttattcaacaaaaaaaattttggcttctttttttctcaaaaaaaaaaatcataaaaacttatctaatgctgaagggtagcaatcatcagttgatcttaaaaggacaccatattctctataaatatttctttctaaagttgtcagttaggtttcatcctgctttatcctttctttaggaaaggatagtgttaaagtgccatcaagtaaaatatgggattttctgctgaggtctttacatcagtgaatttacattttgtaagaataccctaaggggatttcagcttcctgacttaaaaagttaggtggatccatttcagttgtgcacatccagcttcatgctttaacatggccagattgccatggcttcaatttaagtcacaggtttctggtgataatatacatctacatttttacagtgktgcctgaaaatgggagtctataaagaatctgacttgaattattaagaatggaaaacttaaatgtctgaccccaaacaggggtataaattctgctatgttttaat

SEQ ID NO: 55052 - DNA, 651 bp, Homo sapiens
caggcctgtcaaataaatttaaccaaatatttcaatgggaaaaaaagaataacttatgtcttgtgataatataaccaccatgctttcatgtgtgtatgtgtgtatgggtgtgtgtgtgagactataatttattcaacaaaaaaaattttggcttctttttttctcaaaaaaaaaaatcataaaaacttatctaatgctgaagggtagcaatcatcagttgatcttaaaaggacaccatattctctataaatatttctttctaaagttgtcagttaggtttcatcctgctttatcctttctttaggaaaggatagtgttaaagtgccatcaagtaaaatatgggattttctgctgaggtctttacatcagtgaatttacattttgtaagaataccctaaggggatttcagcttcctgacttaaaaagttaggtggatccatttcagttgtgcacatccagcttcatgctttaacatggccagattgccatggcttcaatttaagtcacaggtttctggtgataatatacatctacatttttacagtggtgcctgaaaatgggagtctataaagaatctgacttgaattattaagaatggaaaacttaaatgtctgaccccaaacaggggkataaattctgctatgttttaat

SEQ ID NO: 55053 - DNA, 650 bp, Homo sapiens
tctcccatgatgcagacggccctctgttcactctcagtgtgttttttcatggcaggtatgagagagagagagagagagagcacaagagcgctttggtgtgttttcttataaaaacactaatctcatcatgaaggctccacctttatgacttcatttaattataattagctctcaaagtctccatctccaactaccaccccattgggaattagggcttcaacatatgaatggcgggggggacacacacattcagtccataccaatcactggttgttgtgtggagagaggtacaagtggcaggaaggagaccagaaagaaggttattgtgttccaagagtaatgacagaaaaaatgttatcacacagcacaatttactcwagagtctaagacaacataaaatgcttttgaatatttccattttatagctgtattttaaaaatcaccttgaacattttgcaattctcaagcattatgtttatgtactatttgtgcaggcaaaaagtggatgtgggaggaaaaggccaagagcaggtcagtcttccttttcagtccctgccggtataacttgtcaggaagcatgacaatattaaatgggtgggaataagagagcagagtggatttaaatccagcctctacgtaaagattttctg

SEQ ID NO: 55054 - DNA, 981 bp, Homo sapiens
ataacatatgtggaaaataccaagtttttgttggtttggataaatcatggtatgtgtgtctgcatgtgtgygcgtgtgtgttgagagtggctggagatgacactataaagatttgaagggcacacatcatgaaaaccttgcaagtcattgaatttagccctaaactcataaaatatgaaaagttatatggtaactaactcagcagtgttttggatccctctaaactagttttttaatggaatgtttccttttcttccttctaaatattttaaaacacaataatactgctttataagacaattatatggtgttcaacagctggccaaactttcagtttcattttactctagagttactatgtgtacttctctgtctatcaacaattcatgagcaaatcagccagtgtcagaaatggacgatgaagaataaatgtggcagaaatattccatataatgacttgttggaactgttgcctttactggtcaccctacttttgacccagacataaattggcaaagacccattgctcaacatttagataagaaccctttttttttttaaatttcaactattagtttagatacagggtatacatgtgcagatttgttacatgggaatattgagtgatgctgaggtttggagcacagatcctgttaccctagtagtgagcatggtaactgataggtagtgttttaacccacccactcccaccctctagtaagccacagcatctagcatctattgttctcatatttatgtccatgtgtgctcagtgcttagttcccacttattagtgataacaggtagtatttggttttctgttcctgtgttaatttgcttaggattatggcctccagctctatacatgttgctgcaagacattatttcattctttttatggctacatagtatttcatggtgtatatatccacagttgctttatccaatgggatgatttcatgtctttgcttgtgtaaatag

SEQ ID NO: 55055 - DNA, 981 bp, Homo sapiens
ataacatatgtggaaaataccaagtttttgttggtttggataaatcatggtatgtgtgtctgcatgtgtgcgygtgtgtgttgagagtggctggagatgacactataaagatttgaagggcacacatcatgaaaaccttgcaagtcattgaatttagccctaaactcataaaatatgaaaagttatatggtaactaactcagcagtgttttggatccctctaaactagttttttaatggaatgtttccttttcttccttctaaatattttaaaacacaataatactgctttataagacaattatatggtgttcaacagctggccaaactttcagtttcattttactctagagttactatgtgtacttctctgtctatcaacaattcatgagcaaatcagccagtgtcagaaatggacgatgaagaataaatgtggcagaaatattccatataatgacttgttggaactgttgcctttactggtcaccctacttttgacccagacataaattggcaaagacccattgctcaacatttagataagaaccctttttttttttaaatttcaactattagtttagatacagggtatacatgtgcagatttgttacatgggaatattgagtgatgctgaggtttggagcacagatcctgttaccctagtagtgagcatggtaactgataggtagtgttttaacccacccactcccaccctctagtaagccacagcatctagcatctattgttctcatatttatgtccatgtgtgctcagtgcttagttcccacttattagtgataacaggtagtatttggttttctgttcctgtgttaatttgcttaggattatggcctccagctctatacatgttgctgcaagacattatttcattctttttatggctacatagtatttcatggtgtatatatccacagttgctttatccaatgggatgatttcatgtctttgcttgtgtaaatag

SEQ ID NO: 55056 - DNA, 981 bp, Homo sapiens
ataacatatgtggaaaataccaagtttttgttggtttggataaatcatggtatgtgtgtctgcatgtgtgcgcgtgtgtgttgagagtggctggagatgacactataaagatttgaagggcacacatcatgaaaaccttgcaagtcattgaatttagccctaaactcataaaatatgaaaagttatatggtaactaactcagcagtgttttggatccctctaaactagttttttaatggaatgtttccttttcttccttctaaatattttaaaacacaataatactgctttataagacaattatatggtgttcaacagctggccaaactttcagtttcattttactctagagttactrtgtgtacttctctgtctatcaacaattcatgagcaaatcagccagtgtcagaaatggacgatgaagaataaatgtggcagaaatattccatataatgacttgttggaactgttgcctttactggtcaccctacttttgacccagacataaattggcaaagacccattgctcaacatttagataagaaccctttttttttttaaatttcaactattagtttagatacagggtatacatgtgcagatttgttacatgggaatattgagtgatgctgaggtttggagcacagatcctgttaccctagtagtgagcatggtaactgataggtagtgttttaacccacccactcccaccctctagtaagccacagcatctagcatctattgttctcatatttatgtccatgtgtgctcagtgcttagttcccacttattagtgataacaggtagtatttggttttctgttcctgtgttaatttgcttaggattatggcctccagctctatacatgttgctgcaagacattatttcattctttttatggctacatagtatttcatggtgtatatatccacagttgctttatccaatgggatgatttcatgtctttgcttgtgtaaatag

SEQ ID NO: 55057 - DNA, 981 bp, Homo sapiens
ataacatatgtggaaaataccaagtttttgttggtttggataaatcatggtatgtgtgtctgcatgtgtgcgcgtgtgtgttgagagtggctggagatgacactataaagatttgaagggcacacatcatgaaaaccttgcaagtcattgaatttagccctaaactcataaaatatgaaaagttatatggtaactaactcagcagtgttttggatccctctaaactagttttttaatggaatgtttccttttcttccttctaaatattttaaaacacaataatactgctttataagacaattatatggtgttcaacagctggccaaactttcagtttcattttactctagagttactatgtgtacttctctgtctatcaacaattcatgagcaaatcagccagtgtcagaaatggacgatgaagaataaatgtggcagaaatattccatataatgacttgttggaactgttgcctttactggtcaccctacttttgacccagacataaattggcaaagacccattgctcaacatttagataagaaccctttttttttttaaatttcaactattagtttagatacagggtatacatgtgcagatttgttacatgggaatattgagtgatgctgaggtttggagcacagatcctgttaccctagtagtgagcatggtaactgataggtagtgttttaacccacccactcccaccctctagtaagccacagcatctagcatctattgttctcatatttatgtccatgtgtgctcagtgcttagttcccacttattagtgataacaggtagtatttggttttctgttcctgtgttaatttgcttaggattatggcctccagctctatacatgttgctgcaagacattatttcattctttttatggctacatagtatttcatggtgtatatatccacagttgctttatccaatgggatgatttcatgtctttgctygtgtaaatag

SEQ ID NO: 55058 - DNA, 917 bp, Homo sapiens
agctgaacagtggaatggcagaatttcaaaacgcctgatggtggcatttgaaggcttccccaccacctacactagacacaagatttgagaggaacaacactttaccagccatttgaccaattaattctttggggataattttcttgtagtagtttaaaataatgcacacaacgcagggatgaggactgatattcatattgggattacacatgaattttaactgggattgtttgagaggcctgaggttcaaaatcctccagataaagcaagcacactaaaagcaataaattctgcaagtactcttttcttttactttgaagactagctaagaggtatctatggtttttgaagctgacatgtctataaggtgtgtcacatgtttttaaccaaaaagcacaataaaaaggtttttcccaaagagacacgtaattgtcttgttgactcatcgaggggtttcagttttcctcatttcactagcccaaatgtggtgaaatgttcactgctgcaacagcaatcaccacagttgtttcctttcttctgtttcatctggcaaacccccatttggcttcaarctcttggccagagtgaaaactttacacattgcacagaagcaccctgattacttccatgaaggcagtgtttggaaaatatttactttaccactgaacatacctggcaccattaaatccaatcaaccaaaatattgggatgatcttaaacattcctgcaagagtccacattctgagtagatgaattatttccaaagttaaaaaagaaaaacctagggaaaatatttcacttttctcttctctgttttcctatactgatcccttgaaggtcaattcatagaaaagggaaatatgtcctctggaaaatagattcttacagcaccaacacttaaagccattctagatgca

SEQ ID NO: 55059 - DNA, 768 bp, Homo sapiens
gtcccaaacggagccgccgccggccctaccagggcactccaggcagggaccggccgctcagggagtaccgcgggtgtaggtccccacagctacccgcctggagcgaggggcgcccgggcaacccttaaattcgcctttgctacgaggaccccacggaggagctggccaggagggagcggccagccgccaccagggcgaaggktttgagggcctggttggttgtgcggcgcgctcggtccccggccctcgaccccacgcacacgcgcgcccagcccgcctttctcatcagctggcaatcaggattcccaggcgcaggcggctggcgacccagccctgtgctccagcctcagaggctctaaccatgagcgctgcaagcctggttgcgctccgtgaatcccagctggggaaaaaactacaagtggcatgaatggaaggcaagttcggtttgggaaaaggcagcctcgcctaagagaccccgcagctccggaacctgggaggcccgcaccgatgtggcctgtcccggggccgcgtgagcctttcagggctccttcctccctttccagctgctactccgggcctcgccttggttacctacggggcccggagactcggcggagaggtacaaggcccaaagagaggcagccacagctcaaggccagggctggaaattagaacggggaggggtaaaagggcatcgactccagtcccattcctgggcctggccacgttggggaagtttatttctcacccgttgggggtaaattaaaa

SEQ ID NO: 55060 - DNA, 1432 bp, Homo sapiens
ctcaccatgatgttaacatttcagcctgctcccttccaggcagacagtcttccagaaagttacccggctccctggctgggcgcggtggctcacgcctgtaatctcagcactttgggaggccgagacgggcaaatcacgaggtcaggagatcgagaccatcccggctaacacaatgaaaccccgtctctactaaaaatataaaaaattagctgggcgtggtggcgggcatctgcagtcccagctactcaggaggctgaaacaggagaatggcgtgaacctgggaggcagagctcgcagtgagccaagatcgcrccactgcactgcagcctgcacgacagagcgagactccgtctcaaaaaaaaccaaaagacccagcaacccgagtcatatcctgatgatatccatgctcctcagtcacgcatcccgtggtgcaggggctgaccccaagaggagctgctgcccccagagggtggggagccgaggcagggcctgggtcagacttaccaggctatgctcccagcccagccctcactagggacccccgagtgcatctctctcctctccaggcctctgtttctccatctgtgcaaccacagtgttggacatggtagtcccaagtgtctgctcgtaactttgccctctctgtgcccccaggtcagggctgcgataagacccggtcacgggtgaccctgcaggagtggaatgaccctcttgaccatgaccttgaggcccagctcatctgccggcacctgctgggcgtggaggccatgctgtggtgagtcccacccaggagagcctgtgcagcctggggaacgtgccaggcttggggctgctccatggtagctggtcacctctcttgtaattggccacatctggggagggcaccaggagtacctctctgcagcacgaggccagctcaggttaggacagaggccccaagggtcagggccatgcctgcttcatgccatgtgctgactgagcccaccttgcaacctgcccagctgttcccctgggcccttggagtacaggcacagcctcagccaattccctgagttccctggccatcttgcttcgtccagtggttctcagccttggcagaagcttaggaaaaacaggatgcttttaaagatcagctttaaaaaacaggatgccaaggccccatcactcagggtctctggagatgtggctggtgccaggatacttcaaggtgatccagtgcttcccatgcgctcagcttcccctgagccaactggagctggagctcattcatctgtcacacccctacactctgcaaggaggaagggtgtggtcctccccattcctcatcgactcttccagggtttatctctgccctcaaaacccacgaaggtggggtgcggtgactcatgcctgttatcccagctctttgggaggtggaggcaggcagattgtt

SEQ ID NO: 55061 - DNA, 1252 bp, Homo sapiens
gggtgcaagcgatccttccgcctcagcctcctaagtagcttggactataggtacatggcactatgtctggctaattttttaaatttctttagagacggggtctcactatgttgctcaggctggtctcgaactcctggtctcaagtgatcctcctgctgggattacaggcgtgagccactgtgcccagctcatgcaacacttatcatcaggattcccgctcagtgctcggaccccaggggccagagatgcccgcggcaaggttctgccctcaaggtgcccactgctttagggggaagacagtgatactaccacatacgagagaaggagaggacacaactgtcagggagatggactgttggagcttcagaggcagcatcttggggaggggtggctttgaagaaggagcaggacacttgggccaggtggaccttggaagggtgccaggcaggaggagcaatgtgttgctgatgggcaggtaggggagggtgagggatggagaggagaccggaagacaccctgtgccatgtggaggggccctgccctctggggcaagaggtcagggaggagggcgctggctgggttcccaggcgcctgcccctgagaggcgcaaatggccctaatggggttattaggtggagcagatgcgtccggctcctgctgtggaggaaatgctcaaatgatcttgaagctaccaggctgggagaggcaggcaggggatggggcagacaggctgccaacctctgtgagataagccctggcctctccagaaccttttcagaacagctatgagccccaaccctggggctgagtgacccaagacagatcactcacactctctgggcctcagtttccccttacataaaaagcaatggttaggccaggtgcagatggctcacacctctaatcctagtgctttgggaggccgaggtgggaggattgcttgagaccaagagttcaagtccagcctgggcaacatagcaacaccccatctctacaaaacataaatacaaaaattaaggccgggcatggtggttaaggccaggcgtggtggctcacacttggaatcccagcattttgggaggcagaagcaggaggatcacctgaggtcaggagtttgagaccaacctggccaacatggtgaaamcccgtctctatacaaaatacaaaaattagccagccatggtggtgcatgcctgtaatccctgctactgtggaggctgaggcaggagaatcacttgaacccaggtgaagg

SEQ ID NO: 55062 - DNA, 1252 bp, Homo sapiens
gggtgcaagcgatccttccgcctcagcctcctaagtagcttggactataggtacatggcactatgtctggctaattttttaaatttctttagagacggggtctcactatgttgctcaggctggtctcgaactcctggtctcaagtgatcctcctgctgggattacaggcgtgagccactgtgcccagctcatgcaacacttatcatcaggattcccgctcagtgctcggaccccaggggccagagatgcccgcggcaaggttctgccctcaaggtgcccactgctttagggggaagacagtgatactaccacatacgagagaaggagaggacacaactgtcagggagatggactgttggagcttcagaggcagcatcttggggaggggtggctttgaagaaggagcaggacacttgggccaggtggaccttggaagggtgccaggcaggaggagcaatgtgttgctgatgggcaggtaggggagggtgagggatggagaggagaccggaagacaccctgtgccatgtggaggggccctgccctctggggcaagaggtcagggaggagggcgctggctgggttcccaggcgcctgcccctgagaggcgcaaatggccctaatggggttattaggtggagcagatgcgtccggctcctgctgtggaggaaatgctcaaatgatcttgaagctaccaggctgggagaggcaggcaggggatggggcagacaggctgccaacctctgtgagataagccctggcctctccagaaccttttcagaacagctatgagccccaaccctggggctgagtgacccaagacagatcactcacactctctgggcctcagtttccccttacataaaaagcaatggttaggccaggtgcagatggctcacacctctaatcctagtgctttgggaggccgaggtgggaggattgcttgagaccaagagttcaagtccagcctgggcaacatagcaacaccccatctctacaaaacataaatacaaaaattaaggccgggcatggtggttaaggccaggcgtggtggctcacacttggaatcccagcattttgggaggcagaagcaggaggatcacctgaggtcaggagtttgagaccaacctggccaacatggtgaaaacccgtctctayacaaaatacaaaaattagccagccatggtggtgcatgcctgtaatccctgctactgtggaggctgaggcaggagaatcacttgaacccaggtgaagg

SEQ ID NO: 55063 - DNA, 566 bp, Homo sapiens
ctgaaatgtcttctaaatataactttatgtcagtttcatccattgttaaatttagtatttcaaaatgcatcactgcgcatgaaaacaattcgtaggtcacrttttctcactttggaagaatcctaagattctcaagaatgcatgatgttggtagagaagtcaaggccaggagcaaatcaaatgagttacttgcccccaaaccgctttgaaagttgttataaaattcttttcaattgttttatattgccaaaatatattacagagttggggtatgggtgcattttttttattctggtaaaaaaacacataaggtttaccatcttaactattttatttatttattgttattattttgagacggagtctcactgtgtctccagcctggagtgctgtggtgccatctggtctcactgcaagctccgcctcctgggttcaagtgattctcctgcctcagcctcccgagtagtgggactacaggtgtgcaccaccacgcccaggtaatctttgtatttttagtagagacggggtttcaccatgttggccaggatggtctccaactactgacc

SEQ ID NO: 55064 - DNA, 566 bp, Homo sapiens
ctgaaatgtcttctaaatataactttatgtcagtttcatccattgttaaatttagtatttcaaaatgcatcactgcgcatgaaaacaattcgtaggtcacgttttctcactttggaagaatcctaagattctcaagaatgcatgatgttggtagagaagtcaaggccaggagcaaatcaaatgagttacttgcccccaaaccgctttgaaagttgttataaaattcttttcaattgttttatatwgccaaaatatattacagagttggggtatgggtgcattttttttattctggtaaaaaaacacataaggtttaccatcttaactattttatttatttattgttattattttgagacggagtctcactgtgtctccagcctggagtgctgtggtgccatctggtctcactgcaagctccgcctcctgggttcaagtgattctcctgcctcagcctcccgagtagtgggactacaggtgtgcaccaccacgcccaggtaatctttgtatttttagtagagacggggtttcaccatgttggccaggatggtctccaactactgacc

SEQ ID NO: 55065 - DNA, 566 bp, Homo sapiens
ctgaaatgtcttctaaatataactttatgtcagtttcatccattgttaaatttagtatttcaaaatgcatcactgcgcatgaaaacaattcgtaggtcacgttttctcactttggaagaatcctaagattctcaagaatgcatgatgttggtagagaagtcaaggccaggagcaaatcaaatgagttacttgcccccaaaccgctttgaaagttgttataaaattcttttcaattgttttatattgccaaaatatattacaragttggggtatgggtgcattttttttattctggtaaaaaaacacataaggtttaccatcttaactattttatttatttattgttattattttgagacggagtctcactgtgtctccagcctggagtgctgtggtgccatctggtctcactgcaagctccgcctcctgggttcaagtgattctcctgcctcagcctcccgagtagtgggactacaggtgtgcaccaccacgcccaggtaatctttgtatttttagtagagacggggtttcaccatgttggccaggatggtctccaactactgacc

SEQ ID NO: 55066 - DNA, 726 bp, Homo sapiens
acttcttgatttctcatactttctaaaatctactatgaccctagcattttctgtctcagtaaattgtaccatcatgtgtccagtatgtgtctccctcttctccaccttctaataatttgaaacatatacctgtacttgaagcataayatagtatcatatcatgtagtataatgtaacataatatattcctcttcttaaatctcaaccacatctttatctattttgggctaacttccagccccacaaaatcacaagtatctccatatttttaaatctaatggacatactttaatgctcattttcactgacttctgtgaattacttgatactgtttaccactcactcatttaaaaaatatgttcccctttaatcttatgtcacaacaataacctaatttaccctcaacctttccagctgtttcttcttggtttggtttgcagacctgtctttccttacttgaccatcaaatatctgaatacttcaagtcttgctctttagctgtcttcttttcttgttctataaccctacacaatgtcattcacatacaaccataaggttactacatacatatagattgctcataaagatttatccacactcctccttcaaggttctaggaatataaccgtgaacaaaacaaattcccttttctcatagtagtaacagcctattaatgcccatatattatattcctattattgtgtaacagatgatcccaaggatcca

SEQ ID NO: 55067 - DNA, 726 bp, Homo sapiens
acttcttgatttctcatactttctaaaatctactatgaccctagcattttctgtctcagtaaattgtaccatcatgtgtccagtatgtgtctccctcttctccaccttctaataatttgaaacatatacctgtacttgaagcataacatagtatcatatcatgtagtataatgtaayataatatattcctcttcttaaatctcaaccacatctttatctattttgggctaacttccagccccacaaaatcacaagtatctccatatttttaaatctaatggacatactttaatgctcattttcactgacttctgtgaattacttgatactgtttaccactcactcatttaaaaaatatgttcccctttaatcttatgtcacaacaataacctaatttaccctcaacctttccagctgtttcttcttggtttggtttgcagacctgtctttccttacttgaccatcaaatatctgaatacttcaagtcttgctctttagctgtcttcttttcttgttctataaccctacacaatgtcattcacatacaaccataaggttactacatacatatagattgctcataaagatttatccacactcctccttcaaggttctaggaatataaccgtgaacaaaacaaattcccttttctcatagtagtaacagcctattaatgcccatatattatattcctattattgtgtaacagatgatcccaaggatcca

SEQ ID NO: 55068 - DNA, 726 bp, Homo sapiens
acttcttgatttctcatactttctaaaatctactatgaccctagcattttctgtctcagtaaattgtaccatcatgtgtccagtatgtgtctccctcttctccaccttctaataatttgaaacatatacctgtacttgaagcataacatagtatcatatcatgtagtataatgtaacataatatattcctcttcttaaatctcaaccacatctttatctattttgggctaacttccagccccacaaaatcacaagtatctccatatttttaaatctaatggacatactttaatgctcattttcactgacttctgtgaattacttgatactgtttaccactcactcatttaaaaaatatgttcccctttaatcttatgtcacaacaataacctaatttaccctcaacctttccagctgtttcttcttggtttggtttgcagacctgtctttccttacttgaccatcaaatatctgaatacttcaagtcttgctctttrgctgtcttcttttcttgttctataaccctacacaatgtcattcacatacaaccataaggttactacatacatatagattgctcataaagatttatccacactcctccttcaaggttctaggaatataaccgtgaacaaaacaaattcccttttctcatagtagtaacagcctattaatgcccatatattatattcctattattgtgtaacagatgatcccaaggatcca

SEQ ID NO: 55069 - DNA, 158 bp, Homo sapiens
acaggaggggggctgttgctgaggcggccatgttggtgaggggtggagaggcgggaccggggttggggagagtggggctcagcatgcgcrtgcgcaattcgcgcgagcgcagtcaacatgtgattgatgagccagtctttttcctgggattcgctttt

SEQ ID NO: 55070 - DNA, 532 bp, Homo sapiens
tctgaagtcaggagttcaaaaccagcctgaccaacatggggaaactccatctctattaaaatacaaaattagccaggcatggtggcacatgcctgtaatcccagttatttgggaggctgaggcaggagaattgcttgaacccaggaggcagaggttgtggtgagtcgagatcacaccattgcactccagcctgaacaagagtgaaactccgtctcaaaaaaraaagaaagaaagaaagaaagttctgtaaaatgtgttctgtagcaaaatctgactgattggcattaacaggaaggaatttcaatagtccatgtgctaattagcaagagctactatctgatgagtgcctgttttactccaaagataagtccatatacaccaatcacagtaccttgctgcctgaatttctaaggctatgaaactgctacctatgaagagtatgaaaattatcttgggctgggcacagcggctcatgcctgtaatccagcactttgggaggccgaggtgggcagactgcttgagcccaggagtt

SEQ ID NO: 55071 - DNA, 1119 bp, Homo sapiens
gaaataataaggaaaatgaagaggaaaaaagaaaatacataaaagtatataagacacatcaaggcagaaaataggagaagcgactgtagtcctcattcccacacctggtcatgaggctatcattggtgttataatttccttcctccagaaaagaagtcattatatgaaaaagacacttgtacacacatgtttatagcagcacaattcgcaattgcaaaaatacggaaccagcccaagtgcccattaaccgagtagatggagaaaatgtggcatagatataccatggaatactactcaccataaaaagaaatgaaataatggcattcacagcaacctggagggagttggagaccattattctaagtgaagtaactcaggaatggaaaatcagacattgtatgttctcacctagaagttggagctaagctatgaggatacaaaagcataagaatgatacaatggactctggggactcagggggaaggttgggaaaggggtgagggataaaagactacacattgggtacagwgtacactgcttgggtgatggttacaccaaaatctcagaaatcaccagtaaagaatttattcatttattcaccacctgttccccaaaaactattgaaattaaaaatgcttttataaataataataatttccttccttcactacctattccaagttcccttgccctcagcaaatacctgagctggtaggagtatgttacttgatagaacaacccaaaagtatgttctaagagatcttagctcttagtggttctgcctgtgtgtaaggctgctatagtgtttcattaactccatgctactgaagacaatactaggtgttcaaaaggttccccaggttccagaaatactcctttcccccatcattgtgtaatatcctctggcccttgatattcaggatcagtcatcctgcccaaaattaccacatcattatcaattcagcttccaatgcaattggaaccattgttgtaccccctgatggaagcatttctcccttgacctctaaaccaccaaagctcgaggtagctggggagggagtcaaattttctcaagtgtaaccataagtataacagtaagacgcaccactcccacttcca

SEQ ID NO: 55072 - DNA, 710 bp, Homo sapiens
ctgcctaatttaactgaaagttatgctttctgtccaatgtccatactggctttggccaggcacagtgtcatgtgactgttgccccagctacttgggatgctaaggcaggaggattgctggcacccaggaattcaagaccaacttgggcaacacastgagaccacatctctaaaaggaaataaagagaaaattggttgctctgtgttgtgttaaggtacccaccacctatgacaaagtaaatggctattttatatttgccatttgaagttgtagctaacattcagtggggaatttgtatcactaagtggtaaataattatttactcaatttttatctgatgtctctgctgaatctaccctactttaaaaaataaaatacataaaattatatagaaaatcctactctttgctacaacattgccattcaaaagaacaaagaacattggttcaactctgacggttttttctaaaaaagtattttttactaagatatccaagtgtattgtaatacatacacagacacatatactaacagatagcagacaaatcagagtatctgatgccaagtttttatagtccaaaataaaatggtgattactacacaccaacactgaaggaaaacatattgcttgaaattttctaaaaggttataatgacttttatctttacaacaaattgaataaagagtctcaacccaattacaggaaacaa

SEQ ID NO: 55073 - DNA, 710 bp, Homo sapiens
ctgcctaatttaactgaaagttatgctttctgtccaatgtccatactggctttggccaggcacagtgtcatgtgactgttgccccagctacttgggatgctaaggcaggaggattgctggcacccaggaattcaagaccaacttgggcaacacagtgagaccacatctctaaaaggaaataaagagaaaattggttgctctgtgttgtgttaaggtacccaccacctatgacaaagtaaatggctattttatatttgccatttgaagttgtagctaacattcagtggggaatttgtatcactaagyggtaaataattatttactcaatttttatctgatgtctctgctgaatctaccctactttaaaaaataaaatacataaaattatatagaaaatcctactctttgctacaacattgccattcaaaagaacaaagaacattggttcaactctgacggttttttctaaaaaagtattttttactaagatatccaagtgtattgtaatacatacacagacacatatactaacagatagcagacaaatcagagtatctgatgccaagtttttatagtccaaaataaaatggtgattactacacaccaacactgaaggaaaacatattgcttgaaattttctaaaaggttataatgacttttatctttacaacaaattgaataaagagtctcaacccaattacaggaaacaa

SEQ ID NO: 55074 - DNA, 520 bp, Homo sapiens
actggattaaaaacaaatttgctaagaggatacatttaattaaagcatagaaggactcaaagtgattgattttatttctctaattttagtaagatataamcatgaaatttgttttgagtgtttcacacagattttctaaataagcaagagaagatacccttggaagggactggatagtaaaagggaacagatgatgaagttttataatttttttcaagataaaatcattacctgcctatttaattgatttattgtgtattaaaaatatatttctaccctcaagtttaccaaagttaaccatcatatattttacattagaaatgtatgaatacttatagctcttcactattcatgtgacttgggtcttatttttttaaatcaccttttatcttagatacagggggtacatttgtaggactgtcacatgaacaaggcaaagaggaactttattgagcaacagaacagctccgaggagacccacgttggatagctctccgcaggcaggtcattccttcaaatg

SEQ ID NO: 55075 - DNA, 860 bp, Homo sapiens
ggatccaggttggaaaaggggccctattttgaactatgtcagtgtagggaatcattgctgggttttgcccatgaccttgtttacagggcctggcacatattaaaactcaggagtygacagggtgcggtggctgatacctgtaatcccagcactttgggaggccgaggtgggtggatcacctgaggtcaggagttggagaccagcctgaccaatatggtgaaaccccgtctcaactaaaaatacaaaaattagccgggcgtggtggcgtgcaactatagtcctagctactagggaggctgagacaggaaaattgcttgaacctgggaggcagaggttgcagtgagctgagatcgcgccactgcactccagcctgggcaacagagcaagactccgtctcaaaaataataataataataataatataaataaaataaataaaattcagtaatcaggcttagcgtggtggctcacacctggaattttagcactttgggaggctgaaatgggagggtcacttgaggccaggaggtcgagaccagcctgggcaacatagcgagagcccatctatgcaaaaaaaaaattttttaaagaaattagccaggcatagtggcacacatctgtagtcccaactacatgggaggctgaggcaggaggatcacttgaggccaggagtttgagaccagcctggcacgtaccaagaccccgttcctacaaaaagaaaaaaattagccaggcctggtggtgcacacctatagtcccagctacctgaaaggctgaggcaggaagatcgcttgagcccaggaattccatgttataatgagctatgattgcaccactgcactccagcctgaataatagag

SEQ ID NO: 55076 - DNA, 647 bp, Homo sapiens
tgtccacatctcagcatgtgatcacttctgagggcagagactgtagtcagctccatccactcacaccacctgaccaggcatcaaagatgtgtttgaggccgggtgtggtagctcacgcctgtaatcccagcactcagggaggccgaggcgggtggatcacctgaggtcaggagttcgagaccagcctggccaacatggtgaaaccccatgtctgctaaaaatacaaaaattagctgggcgtgatggcgtgcgcctgtaatagcagctacttgggaagctgagacaggagaattgcttgracctgggagacggaggttgcagtgagctgagactgcgccactgcactccagcctgggtgacaaagcaagactccgtctcaaaaaataaatgaacaagtaaaaataaattgaattatgttgcggatattgtccggaatctttttcctctgcaaagtctctcatctacctgtatgttggtgaatacaaagcagacgcctgcgaaattttaagttattcccctccaggtggccatttaggtttttcctgattgcacatcactgttaatgaggctatggagtggagaccactcctaagcctcctcgaaatgtgaggacttctccaggagagagtctgaggagtagcaccact

SEQ ID NO: 55077 - DNA, 647 bp, Homo sapiens
tgtccacatctcagcatgtgatcacttctgagggcagagactgtagtcagctccatccactcacaccacctgaccaggcatcaaagatgtgtttgaggccgggtgtggtagctcacgcctgtaatcccagcactcagggaggccgaggcgggtggatcacctgaggtcaggagttcgagaccagcctggccaacatggtgaaaccccatgtctgctaaaaatacaaaaattagctgggcgtgatggcgtgcgcctgtaatagcagctacttgggaagctgagacaggagaattgcttgaacctgggagacggaggttgcagtgagctgagactgcgccactgcactccagcctgggtgacaaagcaagactccgtctcaaaaaataaatgaacaagtaaaaataaattgaattatgttgcggatattgtccggaatctttttcctctgcaaagtctctyatctacctgtatgttggtgaatacaaagcagacgcctgcgaaattttaagttattcccctccaggtggccatttaggtttttcctgattgcacatcactgttaatgaggctatggagtggagaccactcctaagcctcctcgaaatgtgaggacttctccaggagagagtctgaggagtagcaccact

SEQ ID NO: 55078 - DNA, 647 bp, Homo sapiens
tgtccacatctcagcatgtgatcacttctgagggcagagactgtagtcagctccatccactcacaccacctgaccaggcatcaaagatgtgtttgaggccgggtgtggtagctcacgcctgtaatcccagcactcagggaggccgaggcgggtggatcacctgaggtcaggagttcgagaccagcctggccaacatggtgaaaccccatgtctgctaaaaatacaaaaattagctgggcgtgatggcgtgcgcctgtaatagcagctacttgggaagctgagacaggagaattgcttgaacctgggagacggaggttgcagtgagctgagactgcgccactgcactccagcctgggtgacaaagcaagactccgtctcaaaaaataaatgaacaagtaaaaataaattgaattatgttgcggatattgtccggaatctttttcctctgcaaagtctctcatctacctgtatgttggtgaatacaaagcagasgcctgcgaaattttaagttattcccctccaggtggccatttaggtttttcctgattgcacatcactgttaatgaggctatggagtggagaccactcctaagcctcctcgaaatgtgaggacttctccaggagagagtctgaggagtagcaccact

SEQ ID NO: 55079 - DNA, 693 bp, Homo sapiens
ctcagtgttctccctgatgttgccgtacaggactgaggtccttggcatgttcagaaggctgaggctaaacagccccatgcaggaaaggcaggctggtggagtctgggaaaagcaggcatagatctcacctctggggtgctttatttattccgtactttcctccaccaccccaggctgtgggataatgaggcttggctgcttggttttgagtatgaggcagtggagtgggctaataactgtcacagatgatgcctaagtctcactggtgtagcctttagtcacaataaacttcctttctgcttacatcacaatccaatcaaggctttgataggcagtcytcctcatgacagctcagggccaagcctcttcctgtataatggctctgtcttcccctggagccttcagtcctccactgggtcctctatgtcttgccatgagatgaggggaggagacacaccagctcttgaatgtgcctacccaaggtaacccactttacttgcattcacacttcattgagcagaaagcttagtccacagtcccactccgctccagtggaggctgtgacatgtgggatagccgtgtgaccaaggggagtgacgtggatggggggcatggcctcctgtgttccacagttacctccctgccctctggctgctctctggagctcaggatttggtatctgagctcgtacct

SEQ ID NO: 55080 - DNA, 693 bp, Homo sapiens
ctcagtgttctccctgatgttgccgtacaggactgaggtccttggcatgttcagaaggctgaggctaaacagccccatgcaggaaaggcaggctggtggagtctgggaaaagcaggcatagatctcacctctggggtgctttatttattccgtactttcctccaccaccccaggctgtgggataatgaggcttggctgcttggttttgagtatgaggcagtggagtgggctaataactgtcacagatgatgcctaagtctcactggtgtagcctttagtcacaataaacttcctttctgcttacatcacaatccaatcaaggctttgataggcagtcctcctcatgacagctcagggccaagcctcttcctgtataatggctctgtcttcccctggagccttcagtcctccactgggtcctctatgtcttgccatgagatgaggggaggagacacaccagctcttgaatgtgcctacccaaggtaacccactttacttgcattcacacttcattgagcagaaagcttagtccacagtcccactccgctccagtggaggctgtgacatgtgggatagccgtgtgaccaaggggagtgacgtggatggggggcatggcctcctgtgttccacagttacctccytgccctctggctgctctctggagctcaggatttggtatctgagctcgtacct

SEQ ID NO: 55081 - DNA, 530 bp, Homo sapiens
tggctgtactaatttccattcccacccacagtgtacaagggctcacctttctccacatcctttccaatgcttgttattttttgtatttttgacaacaactattctaacaagtgtgaggtaatatcgcattgctaactttttacaaatcgcatatttcttttttctcccctcctcataaggcctgatgtcttcactcatccttgtattcttggcacctagaattgcttagcacatagctgtcaaactgcttcttcagagtttgggtaaagtgggtttgaagcttgtttaatgttaagtaagtctagttgatatatggtgaaattgttgttttcaagcttctttttgcatcatgggtagccaggattccacctgcattgggatgacttgtcccattattgttattrtttaataatacactttctgattatagaagtaatccatgctcattggagaaaatttgggaagtgtgggaaataataaagaaaggagaaacctgggcaatatagtaaaacccagtctctacaagaaat

SEQ ID NO: 55082 - DNA, 746 bp, Homo sapiens
taacaacgttagaaagtgacamagctacggaagaagaaagagcagggaggctaagtgacatggggagaatgggagaactgcagtatcacatggggaggtcagggaatacagtgaggatagattcaagcaaaaatcccattagcagtggtggctcatcactgtaatcccagcactttgggtggccgaggcaggcagagcatgagatcaggagttccagaccagcttggccaacatggtgaaaccctgtctctactaaaaatacaaaaattagccaggtttggtggtgggtgcctgtactcccagttactcgggaggctgaggcaggagaatcacttgaacccgggaggcggaggttgcagtgagccgagatcgcaccactgcactccagcctgggtgacagagcaagactccatcgagaaaaaaaaaaaaaaatcccattgggcgcgatagctcacacctgtaatcccagcactttgggaagctgagaggggaggatccctttgttgtagttttgtaatttttagttgtaagtcacggacttttttacactgatatttgagattctttttggggggctgtcaggggctactttttttttttttcctgacacggaatctcgctctgtcccccaggctggagtgcagtggcaggatctcggctcactgcaagctccacctcccgggttcacgccattcttctgcctcagcctcccgagtagctgggactacaggcacctgccaccacgc

SEQ ID NO: 55083 - DNA, 964 bp, Homo sapiens
tacatgcatggggcatcatcaaaggaaagaagtgtgtaccccaaaagccactgagacctaaaagctgcatacactctttrtaggggagactggaggggagatgtaggcaacttaagggagagtgaataattttggagaaaaatcaatgggctctccaaagaacaggtgatagtccgggtggtgtcaaatttcagtctcttcttctgtgatacagttaatcttttgtgggtaatggattactagggtgcagactcatgacaattgcatttcttctgtctgtagtcagataagggaacatcacagaaagcccctccctgtgctcagaagaaaagaggaatgagaaacaggagagtagagaaggtccgagagacactggttctgaggctgcttctgaagccttccaatctttagttcaaagtactctgcctgccaaggtgtcatgctttcagatattattttctgagtcccaacaaggccatcaggaaattctgtcttcacagaatcatcaacttgttggcttctgtatacatcactgtgatagaactctctgtagcttctagagactggcataactttgagtttgtacattatagtgctattcactcaaataaaagagttaatgtttatagtgctctctctgccaaaaattttgcttgatcttttttcatgcgttatctcatttaatcctaataatcctttgaggataggtactactataagcgaccttctttttcaggcaaagaagccaagcttcagagacattaagtgtgtgaaaggaaaataaaaacttgagatcccaattcattatgccaaaagtaaaacattaagctgaaagctgagtcatgcaagaaaatgcctttccttttgttcctcagtagacagctacagaaaaaagtttaaatatctccacagattcaccttatcttatgtaaagtgcatatatattgagtgtaagactaatgca

SEQ ID NO: 55084 - DNA, 966 bp, Homo sapiens
gtcatgtttttcactttaattactctgacactacgtgatgttaatatttagtcagcaagaattttctcaatgtgtagttttagaggttatgataaattaaggcactgaacgcatgtcagttttcttggcagattcagcttctaaatgagctcccaggtattaacacaaacagagttgatgcgggcatcgtactggtgatactgtgatacaatgtggtaacacattagctatgctgtgaaactgcataacagatgcaaagcaagataagaggctctgaattttaagttaaatattacttccaaatcatctgaagatgacttaaattatgaacagtacaaaattatgtttggrgcagaattcattcattaaacaaatgtttatcaaacatctactaggtgcccagccctatccacaatgcttataaatcaaagttgaaatatcactgtctttctttgcaacacagctcactgtctagcgactaccggggaatcataatatgggcataaatactaactcaggagtctgcaaggtggacaggcaaggtttttcatctaccttgggaaatcaaggagagttttctattagaggtagtatttggactgatgtttggagactgagagtaataccggtaaagtgaagtgtgcatggcttggaactgttaagggcattataagaaagtgaatgatatgcacagaggttagagggatgtgccagttaaagaggatgttaggaatttgctagtagttcaacacggctgaacttcatgctgtgtgtaagatagcagtgaggtatgaagctaaatagttagggtcaaagtacagagggccttatgtgtcaaacaaaggagtttgtcttttattctgtaaatggtagggacacataaagggattttataaaaaataaaaataggtaacatttattaagcacttacaagatgcaggcactacactatgttgtatgtatgca

SEQ ID NO: 55085 - DNA, 732 bp, Homo sapiens
aactcttcagggcagatgttcycccagagtcagcccctgaattttggccccagatgtgcacccccacccccaacctttccttttctgttttgctgtgaatctgtcaatcactgggaactggcagggagaggtaggaagagggagagatttcttcatgctgtgtcaaggcattgagacagacctctccttttcccctgaaccttgtattctactcttcccagatgcatgaaataaagcacaggccagaaatgtctatttaaagagtaaaaatccacagtataaaattatgcagacatagtagacatggggtaatttataacagtgtgcgaagggtgaggggacctcaaggtgccaaaaaggctggtcccaggcttgccaggaggaaccgtcaacaggacacacactcataaagcttttatgcacatacaatgtgtttaaaggcacatatgtgcttttgtgcatgtaattactgcacatacaatacattaaaagataataaaagttaataagataataacaaaacaacaaaaataataataccgaatattatggcacagctgcaaacacctcatagcaactaacagttgtcaatccctgaccacaagaaataagtgctgttagtttcccatttaatatatgaggaaactgaggcatcaagagggaaagtgctggtgagacctgggtagggagttgaatccagtggagccagcagacccaggagctggcaccaga

SEQ ID NO: 55086 - DNA, 732 bp, Homo sapiens
aactcttcagggcagatgttcccccagagtcagcccctgaattttggccccagatgtgcacccccacccccaacctttccttttctgttttgctgtgaatctgtcaaycactgggaactggcagggagaggtaggaagagggagagatttcttcatgctgtgtcaaggcattgagacagacctctccttttcccctgaaccttgtattctactcttcccagatgcatgaaataaagcacaggccagaaatgtctatttaaagagtaaaaatccacagtataaaattatgcagacatagtagacatggggtaatttataacagtgtgcgaagggtgaggggacctcaaggtgccaaaaaggctggtcccaggcttgccaggaggaaccgtcaacaggacacacactcataaagcttttatgcacatacaatgtgtttaaaggcacatatgtgcttttgtgcatgtaattactgcacatacaatacattaaaagataataaaagttaataagataataacaaaacaacaaaaataataataccgaatattatggcacagctgcaaacacctcatagcaactaacagttgtcaatccctgaccacaagaaataagtgctgttagtttcccatttaatatatgaggaaactgaggcatcaagagggaaagtgctggtgagacctgggtagggagttgaatccagtggagccagcagacccaggagctggcaccaga

SEQ ID NO: 55087 - DNA, 732 bp, Homo sapiens
aactcttcagggcagatgttcccccagagtcagcccctgaattttggccccagatgtgcacccccacccccaacctttccttttctgttttgctgtgaatctgtcaatcactgggaactggcagggagaggtaggaagagggagagatttcttcatgctgtgtcaaggcattgagacagacctctccttttcccctgaaccttgtattctactcttcccagatgcatgaaataaagcacaggccagaaatgtctatttaaagagtaaaaatccacagtataaaattatgcagacatagtagacatggggtaatttataacagtgtgmgaagggtgaggggacctcaaggtgccaaaaaggctggtcccaggcttgccaggaggaaccgtcaacaggacacacactcataaagcttttatgcacatacaatgtgtttaaaggcacatatgtgcttttgtgcatgtaattactgcacatacaatacattaaaagataataaaagttaataagataataacaaaacaacaaaaataataataccgaatattatggcacagctgcaaacacctcatagcaactaacagttgtcaatccctgaccacaagaaataagtgctgttagtttcccatttaatatatgaggaaactgaggcatcaagagggaaagtgctggtgagacctgggtagggagttgaatccagtggagccagcagacccaggagctggcaccaga

SEQ ID NO: 55088 - DNA, 732 bp, Homo sapiens
aactcttcagggcagatgttcccccagagtcagcccctgaattttggccccagatgtgcacccccacccccaacctttccttttctgttttgctgtgaatctgtcaatcactgggaactggcagggagaggtaggaagagggagagatttcttcatgctgtgtcaaggcattgagacagacctctccttttcccctgaaccttgtattctactcttcccagatgcatgaaataaagcacaggccagaaatgtctatttaaagagtaaaaatccacagtataaaattatgcagacatagtagacatggggtaatttataacagtgtgcgaagggtgaggggacctcaaggtgccaaaaaggctggtcccaggcttgccaggaggaaccgtcamcaggacacacactcataaagcttttatgcacatacaatgtgtttaaaggcacatatgtgcttttgtgcatgtaattactgcacatacaatacattaaaagataataaaagttaataagataataacaaaacaacaaaaataataataccgaatattatggcacagctgcaaacacctcatagcaactaacagttgtcaatccctgaccacaagaaataagtgctgttagtttcccatttaatatatgaggaaactgaggcatcaagagggaaagtgctggtgagacctgggtagggagttgaatccagtggagccagcagacccaggagctggcaccaga

SEQ ID NO: 55089 - DNA, 966 bp, Homo sapiens
atttttcatataaaataagaacattttgctactaagatttctaaaaataataacaccttgataatagatacatctgatctataaactctgcctttaaactcactatacaacgtgataaaattgcatgaaactaaatccatgtgtgtatacatgcacacaaacacccatacacagagtacttgcaaaactaagaaaatctgaataacatcagtggattatatccatatcctggttgtgaatatagttttgcgagatgttatcagtgagagaaactggataaaggacacatggaatctctgggtatttttttttacaactgtatgtgaattgataattatttccaaacaaaaggttaaatttaaaaaattatgatgcaaaaaataaaatattttgtctcttgtctctctctcttttttgttttgaaggaaatccctccccaaatgtattagtagcagtgttgaaaacgtgtagtccaaaggctatagacgtaatttttgttgctgccttttttcttggtgagtccagtattttgaatacatttgaatttgaaagataataagcgagcagtgcattttcaagttactttcagtcccatcaaatttctccatgtttgttataaatttaggttgtcataaatataagttttctgaaagcattttaagtttgtggatatccttttaaagtaasttttaaaaatcttaaaatttcttttccttttgaaatcctatcacttgctacaatatggatgaaacttgaggacattatactaagtgaaataagccagtcacaaaacgacaaatactctatgattccacttataagaaatatctaaagtagtcaaatttatagaaatagaaaatagaatggcagttgccagggactggagtgagaagaaaatggggagttgctgttcaggcacggagtttcagttttgcaagattaaaaagttctacagaaacattgcgt

SEQ ID NO: 55090 - DNA, 800 bp, Homo sapiens
ttttaataggcacatatatatctgtatatatatttttgtatatattctatatctcccttgttttttaacaggaagacatttatgttgacaaagtctatatttgatcatggccctttatattaagttgtgtctaataatttgttctcataaataatgttgcagtgaacaatgaagatctttgttagagcttataatggtggattcatagcagggattattcagttttgaaaaggtggaaacaaataaaatcccttataaattgtaaggctccgtgagaaaatacaaaaatatttccgtagatagggagagcttgcttctgagaagaaagttgccttgaaaaaaaaagaacttttcggcttaccattcaaaacagtttgggcattgttttgtgtattcaaatataataattaaaacagagataaaagtcgaaggataaaatacagaggtacaacaacgtcatatactaaggaacagcaaactggtataataaaaagagaatagtgcatactataactgcaatctgttgttaaagtacaattaagggcatctggagaaagaaaataataactgaaatagaataaaacatgaaactcaggaggaacacagtgtgggtcaaaagattaagttattttccagcagttatttttgtctctttctagacatttatatttctgatattctttgaacattaaatgacaaacataaaaagtcacatgatattgygttgactatacaactcctgtaattaattcttaaacagagtgctcactttagatttcactattttaagaaaaacttat

SEQ ID NO: 55091 - DNA, 976 bp, Homo sapiens
cctggaatagagcttaattttactttgtctttttgttccatagtatgggagatttttctcaactttattatctattctttcaaacaaatgtttttgtctgtaagagttacttctttctcaatgattgttgtttattctttcctaatatcctgttcttgtttcaagggataaatttttttttttttttttttttgagatagagtctcgctctgtcccccaggcgggagtgcagtggcgcaatctcggctcactgcaagctctgcctctcaagggataaatttttaaattgctctgtgcagcgtcctagaaatgtttttcttctctcctttaaatattttctccagaatctataagatcactcattaggtctctaccacaccctctcaatgatcctgattctccttatgcttggtgatccctgatcgtcagttttaagtaataaaaggactgagaatggtttgttctagtattgtgtccagagttggttccttccggtgggttcctggtctcgctgacttcaagaatgaagaygcagaccttcacggttgagtgttacagctcttaaagatggtgtgtctggagtttgttccttcagatgtgtccggagtttcttccttccggtgggttcatggtcttgctgacttcaagaatgaagccgcggaccttcgcggcgagtgttacagctcttaaaggtggtgcagacccaaagagtgagcagcagcaagatttattgtgaagaatgaaagaacaaagcttccagagggtggaaggggaccctggcagcttgcccctgctggctggggtggccagcttttattcccttatttgtccctgcccacatcctgctgattggtccattttacagagtgcttgattggtccattttacagagtgctaattggtccattttacagagtgctgattggtgcatttacaatcctttagctagacacagagcactgattggtgcgttttt

SEQ ID NO: 55092 - DNA, 628 bp, Homo sapiens
gttatttcaattacagtagtgtacattctcattgcaaaaaaaaacattccaagtaccatgaatatttaaaaaaaaaaaaaattggccgggcgcagtggctcacacctgtaatcccagcactttgggaggccgaggcaggcagatcacttgaagtcaggagttcgagaccagcctggccaacatggtgaaactccatctctactaaaaatacaaaaattagccgggtgtggtggtgcacgcctgtaatcccagctacttgggaggctgaggcaggagaatcgcttgaacctaggaggcagaggttgcagtgagcggagatcgtgccactgcactccagcctgggcgacagagtgagactctgtctcaaaaaaaaaaaaaaagtctccctcccctaatttctttctctagaggtatccactgggaacagtttgtgtatattccaagtaactgctgtcasatttatggagcattctgtatttatccactgagggcagggaacaagactgtttccctaccctggtagaggaaagtggcagtacagaaatctgtttctttcattgtgaacagagtctcacattcccagtcaggaggtcccaggcacccaggtgggacaaggaggaaagctatg

SEQ ID NO: 55093 - DNA, 602 bp, Homo sapiens
gtccccggccactgtctctccaccctctcaggagtggggcgaagaggcccgcgctgggccatttgcacagtggtggaaactgaggcccagggaggcgtggagcctcggtagcaagcctgcctagcagggcgctggaatkcccggtctccgcctcaacctacccggccaccagggagcgcgcggtagggggcgtggtactcgaacaccttctgctcccctggaagctctgccacaaccccaatctcctcttagggcccctacccgttctggagagcagtccttcctctccagcctcagtttcctcaactgctcccggtgtgtgtgtgctggggcagggggcagtggggcgtgggtctgggaacggaactgtgggaggcaaggcagcgggattccccgcgggaaagccgcctattccctcccccgggcggctggagaccctgaaccgaaacaggaggcagacacccccagccgggaagcggccccagcccggatttccctcccgggtgaggccgcagtgactcaccccctccccgctctccccggtttccttgtttgcatttctcctcccggccacgtggcggccagtgcagccactcaccgcc

SEQ ID NO: 55094 - DNA, 602 bp, Homo sapiens
gtccccggccactgtctctccaccctctcaggagtggggcgaagaggcccgcgctgggccatttgcacagtggtggaaactgaggcccagggaggcgtggagcctcggtagcaagcctgcctagcagggcgctggaatgcccggtctccgcctcaacctacccggccaccagggagcgcgcggtagggggcgtggtactcgaacaccttctgctcccctggaagctctgccacaaccccaatctcctcttagggcccctacccgttctggagagcagtccttcctctccagcctcagtttcctcaactgctcccggtgtgtgtgtgctggggcagggggcagtggggcgtgggtctgggaacggaactgtgggaggcaaggcagcgggattccccgcgggaaagccgcctattccctcccccgggcggctggagaccctgaaccgaaacaggaggcagacacccccagccgggaagcggccccagcccggatttccctcccgggtgaggccgcagtgactcaccccctccccgctytccccggtttccttgtttgcatttctcctcccggccacgtggcggccagtgcagccactcaccgcc

SEQ ID NO: 55095 - DNA, 668 bp, Homo sapiens
cttgagcccaagagatcaaggccacagtgagctatgatcacatcactgcattccagcgtgggcaatagagactctctcaaaaaatagggcctggcgcagtggttcatgcctgtaatcccagcactttgggaggccgaggtgggtgaatcacctgaggttgggagttcgagaccagcctgaccaacatggagaaaccccctctctactaaaaatacaaaattagccaggcgtggtggcacatgcctgtaatcccagctactcaggaggctgaggtgggagaattgcttgaacccaggaggcagaggttrtggtgagctgagatcacaccactgcactctagcatgggcaacaagagtgaaactccatctcaaataaataaataaataaaaataaaaaaataaaatatttgtcaaataaaattaaagattgttccaagttcatgctattgttttagctactacaatgtaattgcctctcagagtattaggaatccagtttgaatgtgattttaatatttaaggagataattatggattgagcagaagagaggggagattgtgattctttatttgagctaagttagaaaagggatcaaagaacggatggaaatggcatgaagcccagggtgttggcagagggtagccagagtggccaggctggttggtgca

SEQ ID NO: 55096 - DNA, 523 bp, Homo sapiens
aaaagttatattaccatttggacaaagactctaagataacaaaggaaataacagcgtgatttttgagtcatgataagaggaatttatttttgtttttgatttccactcatgtgattattatattattttggccacaagcaatatataagagaaatgttagctttgagcattatgtaaagtgtaatgaagttcagctctgtataatgtgcttgtttctatattcctgagatctgttggatgtggttttcctcataattactccagcctttgaaatcatgactgyctaagggaaatgtgaacacacttatctatttgtaaaaaattcttacagtgactggcaataaatttcaaaacatccatgcttttctgagcatgtaaataattttaaaataaaatttagaacttctaaatgtttacctataaatatatatacattgtatattttacaatattgtagcttaaagataaatatttttatctgtaaagctatattcatcacatgattccatcataatgtaataca

SEQ ID NO: 55097 - DNA, 530 bp, Homo sapiens
taatgaatgccctactgaatgaataccattatgaacgagcatgaacttgtagccaaatggatctgaggtcaaatcccagacactcagtactgtggcttctgtgacctcagacaagttacttaacctatctgtcagtttcctcatctgtaacctgcccctttggaagtgacagctaaaaattccttgagttcagacaggagattattacaggatcatttaaatagaagtaagaattatacttttgaaaaaacttccagtagttgtttcataactcatcaaaataggtttatccgccctgtaccatatgttatacagtgaagatataaggtacaccattttatagtatggtgcttcagttcagtttgtagaaatgtgtaaaactgagaaccaagccatacccttggctaaacactattcagtaggactctgccacatttctgcctcataatggatttttgtttttttcaatggtttttgatgtgatttccatttcaacatcagtaagagtaagttgcttatackttttaact

SEQ ID NO: 55098 - DNA, 580 bp, Homo sapiens
gtttagaaacaaaacatccatcatcagaactttgcatttagcaatgcttctagttttattttaatgaggaggaaaaaatgcagagagccccctaaattaggcagcactcaaattttctcagggcaaaaacaacaacaaagattaccaccctgtcttggggatgggggagggtgcgcagagtttttaggaatttggttctcagctatgaggaaaggcttctggacttgtccatcacagaaacaacagctgtctgccacttctctcttcttcacacagcccccaactccaaacacgcctctcagaaggacttttgtagcttgcttaagggataatttgcttcagactgaatcaatatatttctaaactcttcaggctcaagtttgccaggatatgataaaaggatatatttatatgtgtgtgtatacatatacattttaaatatataagtaatataaataatgtattctatatatatcttcacacaaatatgaaagtcagctctagaaataacakaatggaattagggagtaagaagcaacatttgcccaagaaggctgtgtgcatgagctgattctttgaa

SEQ ID NO: 55099 - DNA, 1484 bp, Homo sapiens
ccagctggatccgtgttgggaatttgccctcactcttcagggcagtggttttcaaacttgagtgcacaatggaatcacctatctcaaaaccccttatccccgggcaccatcaccagaaagtctcatgtgattggtctaagctatgtctttagattttaaccactgaaaggttaaaaactgccgcagatgattctaatgtgtggctgacgtcaaccttccccatgggtctgggactccgcgatggctgacgggccagcatctcttctgcctggtgtgcaggctggcacagctcgagccagcagctgccttggagtcaggaccaacgttccgctcagttccccagtgcccccacactggatctgacatccacttggctattccgcaccatgccccctgcctgccaagaaatttatggatcagcgagaagctaactgctaaatgaagcagcccccggctcatcctcttcaggagacaccgtgaaaagggaaatggaaagccgtgcatacactgcttgggcagagagatagagaagctcagatctctggcttgggagcaggagtcctgccaactgcccgggggacttctggaaaggagtcatcaccaacaatgtgctggggccagttaaacgtctctaggtagacctgcttaattatggtgacatttagcaaccccacactgggttatttaatgaatatctcctccttcatggctcctaggagaattcactcctctgttcttctcatttatctggctggagttccctgggaagctagtttagtagggcaaaaaggtaagtatttgttgcagaaaaaatatgttttgttttgtttaaatcttgtgaactaatggtcttttttgttgttgttattgttgttttaggaagtagaaaagcttggattctaaggtagtgagccaaactttcaagaagacagctgagaaagcatacctctgatttgcttccagctccaacttctttcttatttttaatccatgccagaaatgccagaagacaagattgcaaggggcactctgaatctgccaagttccatgatgttctgtgactcctaccatggctgatttcaatctaccaacatttaaatagctggctgtcttatccattccatcctcaaacatggacagttttacgtcctctaagagtccccatttacatctcatgaagccaccaggatttaaacaccagaaacgcatgcyacaaaagggtggtgctgtgtctaacaacaacttgggaaaacagatagtaagagactctaagagaccccgggaagcctggaaatagagaaaagccacatcgttgcagaggagagactcaaagataggcatggagagggatgtatagatgccatcatacagagcagggcactaagcttccagaaggcttccagtttcattagcccttttcttctcattagaagaaatctaggaagtgtgaataacacatttaaacatcatttaaaagtgatcca

SEQ ID NO: 55100 - DNA, 1484 bp, Homo sapiens
ccagctggatccgtgttgggaatttgccctcactcttcagggcagtggttttcaaacttgagtgcacaatggaatcacctatctcaaaaccccttatccccgggcaccatcaccagaaagtctcatgtgattggtctaagctatgtctttagattttaaccactgaaaggttaaaaactgccgcagatgattctaatgtgtggctgacgtcaaccttccccatgggtctgggactccgcgatggctgacgggccagcatctcttctgcctggtgtgcaggctggcacagctcgagccagcagctgccttggagtcaggaccaacgttccgctcagttccccagtgcccccacactggatctgacatccacttggctattccgcaccatgccccctgcctgccaagaaatttatggatcagcgagaagctaactgctaaatgaagcagcccccggctcatcctcttcaggagacaccgtgaaaagggaaatggaaagccgtgcatacactgcttgggcagagagatagagaagctcagatctctggcttgggagcaggagtcctgccaactgcccgggggacttctggaaaggagtcatcaccaacaatgtgctggggccagttaaacgtctctaggtagacctgcttaattatggtgacatttagcaaccccacactgggttatttaatgaatatctcctccttcatggctcctaggagaattcactcctctgttcttctcatttatctggctggagttccctgggaagctagtttagtagggcaaaaaggtaagtatttgttgcagaaaaaatatgttttgttttgtttaaatcttgtgaactaatggtcttttttgttgttgttattgttgttttaggaagtagaaaagcttggattctaaggtagtgagccaaactttcaagaagacagctgagaaagcatacctctgatttgcttccagctccaacttctttcttatttttaatccatgccagaaatgccagaagacaagattgcaaggggcactctgaatctgccaagttccatgatgttctgtgactcctaccatggctgatttcaatctaccaacatttaaatagctggctgtcttatccattccatcctcaaacatggacagttttacgtcctctaagagtccccatttacatctcatgaagccaccaggatttaaacaccagaaacgcatgccacaaaagggtggtgctgtgtctaacaacaacttgggaaaacagatagtaagagactctaagagacccygggaagcctggaaatagagaaaagccacatcgttgcagaggagagactcaaagataggcatggagagggatgtatagatgccatcatacagagcagggcactaagcttccagaaggcttccagtttcattagcccttttcttctcattagaagaaatctaggaagtgtgaataacacatttaaacatcatttaaaagtgatcca

SEQ ID NO: 55101 - DNA, 656 bp, Homo sapiens
aatgctgactgctggttgagatgcccacttgtaagcagcttgacactcaagcatgttttcccttaaaacaagatcataaatggcagtttgtttcccaagttgggtgaccaacttatccaggtttgcctaaagcggagcgatttcccaggaggcaagactttcaatgctaagcctaggacagtcctgggacaaccagaatggttggtcaccttgccaggccaacaccccaaaactgatctgcctgcctcagccactgctgcttcatcggaaccctgctctgccaggagccgaagttcctcctgttgtatggctgggcacaacacttgatctctgacagtcacstgagcccccagggacgaatagctctggcttctgcgtggggagataaaataagcatttcctgtctgttacattttatcccttagaccccagtgtgccttatcctatgcctagaaaacacatctttcaaaaacatgatatttttagctctgatcacatgctcttctctgattgttgcccaaaatgaggcccccatgttcagggtggaggtataagcagcaaaagaggatcagatgctgtcatatcccctccacagtccttattctctcatcccaccacccacacatatcaactcagacaacagatgctcactctga

SEQ ID NO: 55102 - DNA, 1166 bp, Homo sapiens
tgcttaccaarctctgcaacctcataatacatttgataggtagtcattaaacaaaataatttttttgcagattgactaacgttgggtttagggctgttctcttttcttttcttttctttttctttttcttttttttttatttgagatggggtctcactctgttgcccaggccggaatgcagtggcacaatctttgctcactgcaacctctgcctcccgggctcaagcaatcctcccacctcaacctccaaagttactgggacaacaggcacgtgataccacaaccagctaattttattttttgtagagatggggtcttactatgttgtccaggctggttctttttctttactctcctacacccctaaagagtttcaacaccagaggctgggtgcagtggctcacacctgaaatcccagcactttgggaggctgaggtgggaagatcgcttgaggctagttcaagaccagcctgggaaaacacagtgagacctccgtcttaaaaaaaaaaaaagttaaaaataagagtttcaacatcagaaaaattctctttttctgctccactctacttcacccccacccaccccacccaggtcaaatctggccaatcacaaatgtcccacagaatgtaaaacaccagaaaacactgacctagactctcctgttgggccgtccctggatagcagggaaacataccactcacgggtggaaactttcacaaacctaatttctatcactattatgggtcaaagtcttacgcatatttctctattgctctagtttttacttatttgagactctagaaggaacgggttgttaaaaaataatatctatttattttcttatttcatttattaaaaaaaaaaatagggctgggtgccatggctcatgcctgtagtcccagcactttgggaggcagaagcagaagaatcacttgacgccaggagtttgagaccagtccgggcaacacagtgagacccccatctctatgaaaatataaaaataaaaggaatatacacactgtttcatggagcaagaagcctcatgtaactaggcagctagcagaggcactaacatccaagaccaatggaaaacttccttcttttcaggggtcgggtccatgaaaccagagaacaagcctcaaacctagctggatcctgggaggcag

SEQ ID NO: 55103 - DNA, 1166 bp, Homo sapiens
tgcttaccaagctctgcaacctmataatacatttgataggtagtcattaaacaaaataatttttttgcagattgactaacgttgggtttagggctgttctcttttcttttcttttctttttctttttcttttttttttatttgagatggggtctcactctgttgcccaggccggaatgcagtggcacaatctttgctcactgcaacctctgcctcccgggctcaagcaatcctcccacctcaacctccaaagttactgggacaacaggcacgtgataccacaaccagctaattttattttttgtagagatggggtcttactatgttgtccaggctggttctttttctttactctcctacacccctaaagagtttcaacaccagaggctgggtgcagtggctcacacctgaaatcccagcactttgggaggctgaggtgggaagatcgcttgaggctagttcaagaccagcctgggaaaacacagtgagacctccgtcttaaaaaaaaaaaaagttaaaaataagagtttcaacatcagaaaaattctctttttctgctccactctacttcacccccacccaccccacccaggtcaaatctggccaatcacaaatgtcccacagaatgtaaaacaccagaaaacactgacctagactctcctgttgggccgtccctggatagcagggaaacataccactcacgggtggaaactttcacaaacctaatttctatcactattatgggtcaaagtcttacgcatatttctctattgctctagtttttacttatttgagactctagaaggaacgggttgttaaaaaataatatctatttattttcttatttcatttattaaaaaaaaaaatagggctgggtgccatggctcatgcctgtagtcccagcactttgggaggcagaagcagaagaatcacttgacgccaggagtttgagaccagtccgggcaacacagtgagacccccatctctatgaaaatataaaaataaaaggaatatacacactgtttcatggagcaagaagcctcatgtaactaggcagctagcagaggcactaacatccaagaccaatggaaaacttccttcttttcaggggtcgggtccatgaaaccagagaacaagcctcaaacctagctggatcctgggaggcag

SEQ ID NO: 55104 - DNA, 1166 bp, Homo sapiens
tgcttaccaagctctgcaacctcataatacatttgataggtagtcattaaacaaaataatttttttgcagattgactaacgttgggtttagggctgttctcttttcttttcttttctttttctttttcttttttttttatttgagatggggtctcactctgttgcccaggccggaatgcagtggcacaatctttgctcactgcaacctctgcctcccgggctcaagcaatcctcccacctcaacctccaaagttactgggacaacaggcacgtgataccacaaccagctaattttattttttgtagagatggggtcttactatgttgtccaggctggttctttttctttactctcctacacccctaaagagtttcaacaccagaggctgggtgcagtggctcacacctgaaatcccagcactttgggaggctgaggtgggaagatcgcttgaggctagttcaagaccagcctgggaaaacacagtgagacctccgtctyaaaaaaaaaaaaagttaaaaataagagtttcaacatcagaaaaattctctttttctgctccactctacttcacccccacccaccccacccaggtcaaatctggccaatcacaaatgtcccacagaatgtaaaacaccagaaaacactgacctagactctcctgttgggccgtccctggatagcagggaaacataccactcacgggtggaaactttcacaaacctaatttctatcactattatgggtcaaagtcttacgcatatttctctattgctctagtttttacttatttgagactctagaaggaacgggttgttaaaaaataatatctatttattttcttatttcatttattaaaaaaaaaaatagggctgggtgccatggctcatgcctgtagtcccagcactttgggaggcagaagcagaagaatcacttgacgccaggagtttgagaccagtccgggcaacacagtgagacccccatctctatgaaaatataaaaataaaaggaatatacacactgtttcatggagcaagaagcctcatgtaactaggcagctagcagaggcactaacatccaagaccaatggaaaacttccttcttttcaggggtcgggtccatgaaaccagagaacaagcctcaaacctagctggatcctgggaggcag

SEQ ID NO: 55105 - DNA, 559 bp, Homo sapiens
gagccaccacacccagccaaaggtaagttctactgtaatttatttgatatgtagttataaagtgttcatattacctatacaattttaattatttgatgaaaatttatagtacacctactgtacattctgataatcaaataatttatacaaggaaaattacaggttaattcccagttacctgggaatgtattattcagattattgccttgtgcaaacttgttttttttaaattaatcactartgattacaacacaggcacaaatgtggaaattaaactcacattaaacaacctaattactattaaaacaatattttataatttagaagataattctatgtattgtactcctaccaggtaataataggtctggggaaaaacctctgattaagaaagtatgcctttgattttattcccctatctttgtcttcttgaattcactgcaaaaagaacccccacagtttccaaaatgtgtagggacagacccatccgaaaccttgacctaattcacatgaagattaaaggatataaatagtctatgtgctcaatttctctcttccc

SEQ ID NO: 55106 - DNA, 559 bp, Homo sapiens
gagccaccacacccagccaaaggtaagttctactgtaatttatttgatatgtagttataaagtgttcatattacctatacaattttaattatttgatgaaaatttatagtacacctactgtacattctgataatcaaataatttatacaaggaaaattacaggttaattcccagttacctgggaatgtattattcagattattgccttgtgcaaacttgttttttttaaattaatcactagtgattacaacacaggcacaaatgtggaaattaaactcacattaaacaacctaattactattaaaacaatattttataatttagaagataattctatgtattgtactcctaccaggtaataataggtctggggaaaaacctctgattaagaaagtmtgcctttgattttattcccctatctttgtcttcttgaattcactgcaaaaagaacccccacagtttccaaaatgtgtagggacagacccatccgaaaccttgacctaattcacatgaagattaaaggatataaatagtctatgtgctcaatttctctcttccc

SEQ ID NO: 55107 - DNA, 821 bp, Homo sapiens
atttttagtagagatggggtttcaccatgttgatcaggctggtcttkaactcctgacctcaagtgatccacccacctcagcctcccaaagtgctgggattacaggtgtgagccactgcacctggcagtgatgtcattccttactaggcttccaaagccactgctgtggccacagcttccatggagacaggcaagctgagcctctatgtggcaccaattcctgcagctgtttgtgttggagggaaaaaaatccaaatggacatcaacagctttcatcaactaaataaccacagaaaatatttatgaagactataaagcaatgattacttttgaattggaaaggaatcactattatttgaaatgtttcttcaaaagtgagcatccggacaggaaccatcatggatgctgaggccatggatgaaggcctactcgggaagatgatatccttgcagtctcaaaacggcaccccacaaaggtgatatcctaatttacaaagggaaaaaggtaccttaatctgaaatctggcaaatgcagcctcaacagaagtgacagaattgaacatcgccaataatgggacacacagacatcacatgcccccagtctgatgcaccacggagtcgtctctgatgtattcttgtcaaaaaatgtttgcctgattctaatcatgaaagaacaattagaaaaaatccaaattgacagatattctgcagaataaatggcctgacctcatcaaaaacatcaatgtcatgaaaaacacaaaacattgcagatagcgtgaaattaaagattacagagatataatttaatgcaagatctctgact

SEQ ID NO: 55108 - DNA, 957 bp, Homo sapiens
tgtcccctgaagctgttattcctcctgttaacaccatgagccctgatccgacaatccatcattattgctggggtgtgagccatgaagcaggggcttgcctctgcccctgctgcgttccccataatccacgacagcactggcatgtggcaggcactcaacagacacgtgttggatgcctgaacacgtaaagcatggaaccctgtgcctggagggcggcatggacacagcctccttgaaataaacaagtgaccaccaggcataaagctcagctgcgactaatgcattcgctctgaggagagagaaggcaaaccctggagaagaggcaggcggtgctgcctcagcattgccagcacccacgccacactccctctgcttctgtcttgggtgggcaagacrgagagacgctgtataccatccacacccgagcttgttaggaaaattattttccagttgctctctctgcttctctacagactgtgccctgtaaattcagggcacatggaggcagcctggggtcagtctctgttgagtcgccctttgctgtgtgggccgagcagcactgccagggacgcaacaaagaacgtaggcttgagcaatgggcggcagagccctgatgactggacctcactgaggacccctagaatccccttttgcttaagtgctccagggagttatccactcagtaaagctcaaggcagcttatgtctcagcctcatgcctggcacctcgagggcctggtctggggacagtgctgcttcaccattccgtccccagcacagaacagggaggggggttggtcctgagcccggccctcggcgtcctccttcatttctaggtggcggcccagggcctgaggatggcccggcctgagctttccccgcctccaggctccgtgcctgcgcctccactttagcacaggggccttcagtgatcccgctgtcaccacaggatctcttt

SEQ ID NO: 55109 - DNA, 957 bp, Homo sapiens
tgtcccctgaagctgttattcctcctgttaacaccatgagccctgatccgacaatccatcattattgctggggtgtgagccatgaagcaggggcttgcctctgcccctgctgcgttccccataatccacgacagcactggcatgtggcaggcactcaacagacacgtgttggatgcctgaacacgtaaagcatggaaccctgtgcctggagggcggcatggacacagcctccttgaaataaacaagtgaccaccaggcataaagctcagctgcgactaatgcattcgctctgaggagagagaaggcaaaccctggagaagaggcaggcggtgctgcctcagcattgccagcacccacgccacactccctctgcttctgtcttgggtgggcaagacggagagacgctgtataccatccacacccgagcttgttaggaaaattattttccagttgctctctctgcttctctacagactgtgccctgtaaattcagggcacatggaggcagcctggggtcagtctctgttgagtcgccctttgctgtgtrggccgagcagcactgccagggacgcaacaaagaacgtaggcttgagcaatgggcggcagagccctgatgactggacctcactgaggacccctagaatccccttttgcttaagtgctccagggagttatccactcagtaaagctcaaggcagcttatgtctcagcctcatgcctggcacctcgagggcctggtctggggacagtgctgcttcaccattccgtccccagcacagaacagggaggggggttggtcctgagcccggccctcggcgtcctccttcatttctaggtggcggcccagggcctgaggatggcccggcctgagctttccccgcctccaggctccgtgcctgcgcctccactttagcacaggggccttcagtgatcccgctgtcaccacaggatctcttt

SEQ ID NO: 55110 - DNA, 590 bp, Homo sapiens
tgggcagtgagagctactggatggataactttgaaatacatctcatagcaccctttagaaaatcctgtgggatcaacacaagttgcccctagtggtgtccaatgtgctaactgtgatagactgaatatttgttcccctccaaagctcttatatagagatctaatcccaatgtgaaggtatttggaagtaggacctctggacggtgagtaggttatgagggtagagccctcttgaacaggattagtgcacctataaaagaggccccagagaactcccttaacatctttctccatgcgaagacacagcaagaagagtagaagctaggtcttgccagacactgaatctgccagtgtcttsattttggacttcccactctccagaactataagaaataaatgctttttgcttaaaccacccagtctatggtgggtttttctcatagcagcctgaatacctaatagacttaccgctcagttgctttctcttattctttcaggctgatattcttcatccttgtaacttttgatcacttttctattgaactgtctgtacacatgcttttattgtaagactgcattgggagaaaccca

SEQ ID NO: 55111 - DNA, 1894 bp, Homo sapiens
gcttgagccatggacaggacattcctgaaggctgaggctgcacattggggggtttggggctggaaaggccggggcaaggtccacagtcacccgcggctgggccgtgcggctgcctctcctgcctccctccctccccatgtgcaccttcccgcgtggggctggccagraaatggggcatttgtctctgtggcccttcctgctgtctgtgccgggctgcccatctggtctttaccactaggtccctttctgcccagcatccactgcacatggttcaggctggccaccaaggctgcactcagagtctcagggactgggtcaacatggccccctgtggtggggttgcctcctgctcgccaggctctggggagcagctgcgcttggcacccaactgctcccggtggagccctttttcccacccagcccagaagctccctgagcacggagactgtcttctttggacctcttctatccccagcagcagacctgggccctgtcccggaactcggagcccagcacataggggcacccagcgatgggccgagagcgttcatgagccccgagtggggccagccccgcctgaaaaggccatcatcacggagacaggagcagggctggcagagagacgaggacaagggcttggaggtgggaggtgggtgctgccgccgggaccagtgagggccagtgaggaccactctctctgcacgtgtcctccggccctgtgcatggagcccggcccactcactgggagcggaagtgattgcattgttctcagatttggtccgtaacagtctccagaaggatcctctacgttctcctccctctacccccagcagcttcaggagtgccgagccacaaggctgcaggagcctgggtccccagtcgcctggaggagaccctgcccacaccatactcagaccaccctcccagaatggtgactgtgcagagatgcacgcatgtcggctgcaccccgccatcttggggtgagtacagtgagggaggaccacacggggggcaggagggaagggggacacctctccacacaggagcgcctgccctgtcctgacacacgtgctgccctggggacaaatcatttcctcgctcccaaccctagtgtctctgtccataaataggggtgggggcagagccacactttagtgctttccaatgctgcgtgctgcaggcaaacacagcgtgcactcagattaaactcagggagacttccctccatggagatggggtgtggcaggtgcaggctggtagagggagggtggctgtgggaggaaggtcccggcctgtgtggccctgctggtctggcagagggagggcggctatggggaggaccctgagggtggaaggtcccagactttgtggccctgctggtctggggaggagctcgttcacaggcagaggctgcgtccccaccttggaccgtggaccttgacccggactggccggcaggaccctccccttgaggggatgtgagagggggtgacggaaggggttgaggtggccctggggaggggctcacggtgtgtggagccaacagtctccgtcttgacgaacatgcaggccctgtcctttccctcacccctcagggtacatatttccagaaagaaatcacttccaattccaagggctccatggaggcggatttttccatctgggcttttctgatgagttttcttggaggaaacttctgcgttaactcacttccctcctctgtgcctcatgcggggacaattaggggaggcagggagacctgaagcccggagccggccgccgggaacccgtttgtccgtgcgcgctcggaaacctggaggcagctccccagttcctgtctcttccccgggcgggtccccacctggcctgtggcgtgactgtgagtcaggggtct

SEQ ID NO: 55112 - DNA, 760 bp, Homo sapiens
ggatcctggattcagtcccagccttatcacttccatctgtgtaaatttaggcaagtcatttaatctctttgaaccttagtggccttgcttgaaaaacagaagtaccaatttccataccagtatcctgtctacctcacgaagctggtgtgaggaccagagatgatgaatggtaaaagtgctctgaaagcagccaagtggtgtctgtgcaaagatgaggtggagttttgtttccagaatcttataaaaaggtagctgaggcctaagctcatgaggtgacttgctcatgatcatgtggggagacagtggcaaagcagggttccagtcttctaattcttggtccagagctcttttcacaaccttttgctaccttagagatcccatctaaaacattcttcaactttggcaaaagcaattccacattccattamaatgagaagcattttggatcacctgcagagtataaatctctgtcatggaatggagtccagctctctacttccaggcagaatgccacctgaaacattctaggcagggagttaactcttactcccccacaaaaatctttccttacagtctctcagtcactgctaactaacctgtgccagaaaggtcatcctggtagctgaaatattctcactgtggcagagcccacatcttctgatcaaacctcagaaacaaaaataaggaatgcaacaccgcaaacattagagaagcagattgaaaacaatgtgtacaggatatggaggaaaactcgttatct

SEQ ID NO: 55113 - DNA, 1387 bp, Homo sapiens
tctgcctgcaggattcctctctgttctgaaccacagaggttgggagcacctgggtggtgaagggagtatgtggaggaagggcctggaggtatttaccccccgccagataaacacctgttggcagaattagccttgatctgacagccccaggaagcttagaaatctgaagatcctgaccatgaaagccatccaaagatggcaaggaccgcctgagaagtagtgagctccctgtcactggggggtatgtaaggacatggttagtgactgcttggcggagatgctggagagaggattcaagccaggaaagaaggtggggtcctgagattctgtgactgggtagagggaagatgcggccagtggggattcattagttcctcctctgagatttctggactcctccttccctggctctctccctgctctacatacggaatttgcctagaagcagctcttggtagaggcctctgggtctccccttggttaggcccacatgggaaaggtgacctcattgttcccttagctgtttacccatcctagggaggggcagatccctggtcccttggaggctcagctccctgtgtctcctgctctgttttagctagccccaattctgctattcaccagctgtgtgactttgggcaaatgactcaccttctctgggctccagcagggctgaggtgggctctggggcctgcttcaggtctggagttgcccaattttggaaggatgagccttgggcttgggggcgaaggctatgcatgattagggcccttcaaagcttagagctcctgggtatcagggtctcctctgccttcttagtaggcagccacaaaaatgtatgagtaatgggcaaggctcctatgccaatgtattttgactcacaaatgaagacagtgtcctgcacatccatggggaagctgagtgggaggtagacactcctccgcttagcagacaccatagctcaccctcccctcaggaacccagtcctccctgcaaggccagagctcccggggctcctttcctccatctcagctgctgcaagcaaacccagtgctggatggctttgacctctgagctcttggcttctggctacggcatttcattgcttgtggcctcaggctggcttctcctcaatcctgctgttcccccacttcacctgggccttrggtccctgagggccagagagatacggggaaggaagtgagtcagggaagtggcattcaggagggagctttgccaagcccgcctgtagtccccagacagggaaatggtcttgaaacactgggcaggcttccagggaggaaggacttggcagggatgaccagctgagccaccccggagtagggccagagcacccggactgtattcagtcctctccattggggca

SEQ ID NO: 55114 - DNA, 836 bp, Homo sapiens
tgtgatttcccatcagaacacacataatgattaataattaagcatttattcagatcattgtttgcttattgtatgcctcccccatcagatcgtcagctgtatcatggcaggggccttgtctgaattcatcgtgacaaattctacacgtagcccatggcctggcacatagtaggcactccataaataggggttgaatgaatacattaatctggtgtgccacaccttgggctaaggtcttggagaacaaagagaaataaatagtccatcccctcaggaagctcacagtctgattagagaaacatatatgtaaaggaatggttatggaacaaaaggaaagtgcaatgtgctttagaaacccagggaaggggaccaggtgtggtggctcacacctgtaatcccagcacttggggaggccaaggtgggaggatcacatgaggccaggagtttgaaatcagcctgggcaacagagtgagacctcgtccctacaaaaaaatttaaaaattagctgggcatggttgttcatgcctgtagttccagctagtcaggaggctgagacaggaggatcaaaggagcccaggagtttgaggctgcagtgagctatgattgtaccactgcagtccagcctgggcaacacagtgaggcaccatctctaaaataaataatactagcaataataataakaagaagaaaaagaagtagtaggagaagaaacccagggcaggggacagaggatgctgcctggggaggccggtgcagtggcactgagggtggagatggatcttgtcaggcagaggacacagggaggcaggggctgtgcattccaggccaaggcacag

SEQ ID NO: 55115 - DNA, 531 bp, Homo sapiens
aaactggagagcttccgggggctggggaagaccaggaccatgatctacatgatgaggcctgtgagatttccaggaaacctcctgccaccgaggtgttccctgacttcccacacctccttgaagacttgcctcccactgacccagtgaccctcactgcctcactgcagcctgtctgygcccctgtcctgggtgggtgggagcagcaggcaggcccatcagaagcagaggtgaggtgagctgaggagtctgaacagaagagcagagatttcagggtcagtggagcaggtggaagctggggcgatggcagctggctggggtcgggcttgggcagagcacgagtgactggtccaagcctctgctcagctctgacgaggcctgtccagcccctcatgccctctctgcaagaggcacatcactgtctgccagagctggctctcaggcctcctgcctggactgctgcagtatcctaattggtttctgtctctaccctccaagccgtccacacgctgccaccactgcagccagattaat

SEQ ID NO: 55116 - DNA, 663 bp, Homo sapiens
catcatccttctccataagcctctcggtggtgtgcaggagagtgaggtgtgcacgtgtccacaagccatcagtacagactcctgagagccccgtggataacatcggggagtgaagagaacagtctccttctccacgcacagtagtagtcggacttttagaattcactgattgagtaaatacatgacatcaaaagctactgtgttttcagcaacttttaaaagaacgtttcattaatttttatttttagcagctttttgggggtatagtttatatgccatgaaatttgcccattataagcgtacctcagctgtgtcttcacatcgagttggtctttattcctagaactctgttgatttgaatataattttagaagacacgttgtgtatccagtccaccgtgtatctggattcacaagcccctcaccatcaccgtggcttggttctgaatcctgactgtctaatattcttggagtcagagggatrtgggattgggccccaccccagctcttcctgccctgtgactttgaacatcatacctgtgcggtccatgttcattttaatctaatccaaggcccgaaaacacggcgagtggcagagtgacagggaggagggtttgccgactcccgctccctggcagaccggacttggaagtacagagtgggg

SEQ ID NO: 55117 - DNA, 663 bp, Homo sapiens
catcatccttctccataagcctctcggtggtgtgcaggagagtgaggtgtgcacgtgtccacaagccatcagtacagactcctgagagccccgtggataacatcggggagtgaagagaacagtctccttctccacgcacagtagtagtcggacttttagaattcactgattgagtaaatacatgacatcaaaagctactgtgttttcagcaacttttaaaagaacgtttcattaatttttatttttagcagctttttgggggtatagtttatatgccatgaaatttgcccattataagcgtacctcagctgtgtcttcacatcgagttggtctttattcctagaactctgttgatttgaatataattttagaagacacgttgtgtatccagtccaccgtgtatctggattcacaagcccctcaccatcaccgtggcttggttctgaatcctgactgtctaatattcttggagtcagagggatgtgggattgggccccaccccagctcttcctgccctgtgactttgaacatcatacctgtgcrgtccatgttcattttaatctaatccaaggcccgaaaacacggcgagtggcagagtgacagggaggagggtttgccgactcccgctccctggcagaccggacttggaagtacagagtgggg

SEQ ID NO: 55118 - DNA, 663 bp, Homo sapiens
catcatccttctccataagcctctcggtggtgtgcaggagagtgaggtgtgcacgtgtccacaagccatcagtacagactcctgagagccccgtggataacatcggggagtgaagagaacagtctccttctccacgcacagtagtagtcggacttttagaattcactgattgagtaaatacatgacatcaaaagctactgtgttttcagcaacttttaaaagaacgtttcattaatttttatttttagcagctttttgggggtatagtttatatgccatgaaatttgcccattataagcgtacctcagctgtgtcttcacatcgagttggtctttattcctagaactctgttgatttgaatataattttagaagacacgttgtgtatccagtccaccgtgtatctggattcacaagcccctcaccatcaccgtggcttggttctgaatcctgactgtctaatattcttggagtcagagggatgtgggattgggccccaccccagctcttcctgccctgtgactttgaacatcatacctgtgcggtccatgytcattttaatctaatccaaggcccgaaaacacggcgagtggcagagtgacagggaggagggtttgccgactcccgctccctggcagaccggacttggaagtacagagtgggg

SEQ ID NO: 55119 - DNA, 663 bp, Homo sapiens
catcatccttctccataagcctctcggtggtgtgcaggagagtgaggtgtgcacgtgtccacaagccatcagtacagactcctgagagccccgtggataacatcggggagtgaagagaacagtctccttctccacgcacagtagtagtcggacttttagaattcactgattgagtaaatacatgacatcaaaagctactgtgttttcagcaacttttaaaagaacgtttcattaatttttatttttagcagctttttgggggtatagtttatatgccatgaaatttgcccattataagcgtacctcagctgtgtcttcacatcgagttggtctttattcctagaactctgttgatttgaatataattttagaagacacgttgtgtatccagtccaccgtgtatctggattcacaagcccctcaccatcaccgtggcttggttctgaatcctgactgtctaatattcttggagtcagagggatgtgggattgggccccaccccagctcttcctgccctgtgactttgaacatcatacctgtgcggtccatgttcattttaatctaatccaaggcccgaaaacacggcgagtggcagagtgacaggsaggagggtttgccgactcccgctccctggcagaccggacttggaagtacagagtgggg

SEQ ID NO: 55120 - DNA, 2405 bp, Homo sapiens
gggagcacagacctggcgtctcgttcacggttgctctcccagacctactcgctactcagtaggggcgcagcagcaccggtgaatggagctggggcaggcgggctgggctggatctgggagatccagaggggtcctcagctgtggagggggagcactggagaggacgtgacctgggacctgggctcaggcacacagtgagttggctaccaagatggggcatcaggaagaagcacaggcttgggtcagatgtgctgagcagtcaggacctgcagggttggaggggcccaaggggcgccctggatgtggcttgacgtgctgcgctgggcacgcatggtggacggagtggtggagcaggcaactggagcctagaacgtgcccggcatgttgcagacgctcaagaaactttctgcagcaaacgaagaggcagatgctgtgggagacactgcccgggctatggtggggtttgggggatcccagctcctgccctctggccctgtgagaacaccctggctacagccccctcggggggacgtggcaaaggcctgaagccccacaatcaagcctggaacaatggccctgaagtgactacaggctagttcttaccctgaagatgcactctcttctgattctgagactcccagcgtggtgaatggtgtcaggtgattgtctgttggctcgttcatccgttcatccatccatccatccatccatccaaaccaaaatcagcaagcatctcttgggtttgggggatgacacaccactgaggcggccggctctctgtctaaatgcaactgtcttttcttttttcttttgagacggagtcctgctctgtcgcccaggctggagtgcaacggcaccatcctgactcactgcaacctccgcctcccaggttcatacgattctcccgtctcagcctcccgagtagctgggattaaagggatccgccactattctcagctaatttttctatttttatagagatggcgtttcaccatgttggccasgctggtctcgctcctgacctcaggtgatccactcactttggcctcccaaagtgctgggatgacaggcgtgagccaccgcgcccggactgtctaaatacaatgtctaataagaaaaggttttaagcacctggaaagcacagaatcacataaaagacacccatctattactacataggtcaaaaaacatcttttctgtttatcccttaagtcaggggtcagcaaacttttgtaaagggtcagaggagatcaggcggaggccaggatctcctctgggacaggctttgagcgtggccctgggggtggagggagtgaccgaaatggaggtctcaccaggggagactctgccctccagggcacactggttgatgtctggggccatttgtgattgtcatgactaagggtgctcctggcataaagtaggcggaggccagcgacactgctcagccccctgcagtgcccaggatggccctaccccagagaaagatcaggtcccacaggtcggcagtgctgagaggcagagaccctgttttagagactgggatggtagaatctcgcccctgttcgccccccgcatctgcacacacaagaacccggagtcaacacagtatggaggtatgtgggatgggagtgggggcgggcagggtgttcctgacactattctccgggtgtgtacaatgtttcaggaaaagaacacccgtacctgtaccaccctgtccacttttttttttttttttgagatagagtctcgttctgtcgcccaggctggagtgcagtggcatgattttggctcactgcaacctctgcctcctgggttcaagcgattctcctgcctcagtctcccaagtagctgggattacaggcgttcaccactaccacctggctaatttttgtatttctagtagcgacggaattttgccatgttggccaggctgatctcgaactcctgacctcaggtgatccacccacctcggcctcccaaagtgctgggattacaggcatgagccaccgcgcctggcccacttttgtcttttgtttgaagttccctgtaataaaagctgcagctcgtacacacatccccccgcgggctggtgctctgcaagctgcgtctctgaccctctcaatgctccatgaggtgactggcattggacctattttacagctatgtaaactgaggctcagaggtctctgctagtcaaaggcagcaacattcgctccagcctggacttgaagggcaaacggcagccccagggcagcccctgggggagggcaaacagcagccccagggcagcccctgggggaggagcaaacttaaggcacattcttcagataaactccagggggtcacttagccaaacgagccctggggcctgcgtttggtcctctggcccctcaggcccacca

SEQ ID NO: 55121 - DNA, 583 bp, Homo sapiens
agcatcattagttgattttatcattgtatcaacatcatagactttacttacacaaacctagatggtagagtttattacacatctaggttgtatggacagctattgctcctaggctataaacctacacagcatgttactgtattgaataatatagtcaattgtaatacaatggcaaatttttgtatatctaaacacatctaaacatagaaaagctataatacagatttttttttagaagwtatatccagaagctgatatgggtgcatcagcgagtgagtggtgaatgaatgtgaaggcctaagacattattgtacactactgtagactttatactactcaatttatttttaaaattttattttattttataaaattttattttattttattttgcactccaacctggacaataagagcaagactctgtctcaaaaaaacaaaacaaaaaaaatttagagttctgaaagatataggatgaagggtggatataatatagaggagcatactaagagaaattaagatgtatcatcaatcaatacagtacttagtctcactctttgttttgtggtttggtttttttttt

SEQ ID NO: 55122 - DNA, 583 bp, Homo sapiens
agcatcattagttgattttatcattgtatcaacatcatagactttacttacacaaacctagatggtagagtttattacacatctaggttgtatggacagctattgctcctaggctataaacctacacagcatgttactgtattgaataatatagtcaattgtaatacaatggcaaatttttgtatatctaaacacatctaaacatagaaaagctataatacagatttttttttagaagatatatccagaagctgatatgggtgcatcagcgagtgagtggtgaatgaatgtgaaggcctaagacattattgtacactactgtagactttatactactcaatttatttttaaaattttattttattttataaaattttattttattttattttgcactccarcctggacaataagagcaagactctgtctcaaaaaaacaaaacaaaaaaaatttagagttctgaaagatataggatgaagggtggatataatatagaggagcatactaagagaaattaagatgtatcatcaatcaatacagtacttagtctcactctttgttttgtggtttggtttttttttt

SEQ ID NO: 55123 - DNA, 583 bp, Homo sapiens
agcatcattagttgattttatcattgtatcaacatcatagactttacttacacaaacctagatggtagagtttattacacatctaggttgtatggacagctattgctcctaggctataaacctacacagcatgttactgtattgaataatatagtcaattgtaatacaatggcaaatttttgtatatctaaacacatctaaacatagaaaagctataatacagatttttttttagaagatatatccagaagctgatatgggtgcatcagcgagtgagtggtgaatgaatgtgaaggcctaagacattattgtacactactgtagactttatactactcaatttatttttaaaattttattttattttataaaattttattttattttattttgcactccaacctggacaataagagcaagactctgtctcaaaaaaacaaaacaaaaaaaatttagagttctgaaagatataggatgaagggtggatataatatagaggagcayactaagagaaattaagatgtatcatcaatcaatacagtacttagtctcactctttgttttgtggtttggtttttttttt

SEQ ID NO: 55124 - DNA, 463 bp, Homo sapiens
cccacagacaaatgacttagcctctctgagctgggctcctcacctgtgaatggcgtgacctcatagggttgctctgaggatgaaatagagtatgacatgcaggtgagtcatctctggtggccacgcggagatcaccagcaaggactaagtgctggcacttcacactcatttaatcctcacacctggccaggcacggtggctcacaccagtaatcccagcactctgggaggctgaggcgggcagatcacctgaggtcagttgaagaccatcctgggcaacacagtgaaaccctgtctctactaaaaatacaaaaattagccaggtgtggtggcacacgcctgtaatcccagctacttaggaggctgaggcaggagaatcgcttgaaaccgggaggcagaggttgcggtgaggmgagatctcaccaccgcactccagcctgggggagagagcgagactccatctc

SEQ ID NO: 55125 - DNA, 645 bp, Homo sapiens
tcagagtgggccctcacctgggactgcctctcacctgcctggtgctgggagggctggggtgtgctggagcccactggccagtgcgggcagggctggaggtgcccaccacacacatctggtggctgcaccacttcacggcattgccttcggggagccagtggccaggcacacccctgctcagtgcccctcacctagtgggtgggacattgtgtataaagggctctaacctcaaggagcggtcagggttcaaacctaggggtatgagcatcgcttctgcgaaagggttttagcatcttttgggtccgggcactgaggctcacgcctgtaatcccagcgcttaagaggccaaggtgggaggattgcttaaggccaggagcttgagacccacctgggcaacacagtgagaccccatttctaaaataaaaaaaaawatatatatatatatatatacacaaaaattagctgagttaggtggttcctgtctgtagtcccagctactcgggaggctgaggtgggaggatctcttgagcctaggagttagagtctgcagtgagctatgattatgccaccgcactccatcctaggtgagaccctgtctcttaaaaaaaatgatacttttggaagagagatttatactttccttca

SEQ ID NO: 55126 - DNA, 611 bp, Homo sapiens
catccctgtccaggagaaagaggcagccgttaactcagagaggagcaggagggccagcaccgtgccaatagagctcctggccccgaccgccggtcagcaggcaatgatgaggacacctgtgagccaccaccactgagacacgtgcacacaggtgatgcaggcacccatgtgtgcacaggggaacatgtacacacaaaggttcacacgtgatggtaaagcccaggtgcccagccacgcgycttcctagctggtatttactgggcacctccacaaagcctccttgtgcctgcctgttctttagggcctgacagctaagagtggtttctacatttttttttcttcttttttttgagatggagtctcgctctgtcgcccaggctggagtgcagtggcacaatctcggctcactgcaagctccacctcccgggttcacgctattctcctgcctcagcctcctgagtagctgggactacaggtgcccgccaccacgcccagctaatttttttgtatttttagtagacacggggtttcactgtgttagccaggagagtctcgatctcctgacctcgtgatccgcccgcctcggcctcgcaaagtgctgggagtaatta

SEQ ID NO: 55127 - DNA, 611 bp, Homo sapiens
catccctgtccaggagaaagaggcagccgttaactcagagaggagcaggagggccagcaccgtgccaatagagctcctggccccgaccgccggtcagcaggcaatgatgaggacacctgtgagccaccaccactgagacacgtgcacacaggtgatgcaggcacccatgtgtgcacaggggaacatgtacacacaaaggttcacacgtgatggtaaagcccaggtgcccagccacgcgtcttcctagctggtrtttactgggcacctccacaaagcctccttgtgcctgcctgttctttagggcctgacagctaagagtggtttctacatttttttttcttcttttttttgagatggagtctcgctctgtcgcccaggctggagtgcagtggcacaatctcggctcactgcaagctccacctcccgggttcacgctattctcctgcctcagcctcctgagtagctgggactacaggtgcccgccaccacgcccagctaatttttttgtatttttagtagacacggggtttcactgtgttagccaggagagtctcgatctcctgacctcgtgatccgcccgcctcggcctcgcaaagtgctgggagtaatta

SEQ ID NO: 55128 - DNA, 611 bp, Homo sapiens
catccctgtccaggagaaagaggcagccgttaactcagagaggagcaggagggccagcaccgtgccaatagagctcctggccccgaccgccggtcagcaggcaatgatgaggacacctgtgagccaccaccactgagacacgtgcacacaggtgatgcaggcacccatgtgtgcacaggggaacatgtacacacaaaggttcacacgtgatggtaaagcccaggtgcccagccacgcgtcttcctagctggtatttactgggcacctccacaaagcctccttgtgcctgcctgttctttagggcctgacagctaagagtggtttctacatttttttttcttcttttttttgagatggagtctcgctctgtcgcccaggctggagtgcagtggcacaatctcggctcactgcaagctccacctcccgggttcacgcyattctcctgcctcagcctcctgagtagctgggactacaggtgcccgccaccacgcccagctaatttttttgtatttttagtagacacggggtttcactgtgttagccaggagagtctcgatctcctgacctcgtgatccgcccgcctcggcctcgcaaagtgctgggagtaatta

SEQ ID NO: 55129 - DNA, 2187 bp, Homo sapiens
atttcattcattgcaaatggttaaaattatcatcatctatgtgggattttatagagtgtggtctggagaggccattgcatgttagatgaagaccagaaccaggactaaatggggccagcggaatctgtcaaaacagaagaccacaaaccacaaaggaaagatgccacacaagaaaagtgagaagggggctgcctcacctactatcagaccatataaaaaccccttgatttaaaacatattaaataagcacaagaaacaacaagtcttctactgtttttgtaaaaaacaaacaaacaaaaaaaatgaattgttggtttatttcatttgctcattttttattggcattctcaagctgtaggtgtcttgacacagagaaaacataattacgtatgtcatttggtaaatttcctttgtcatttataatttttgctgagtatcaaggggatatagtgggactcaaaatatctccacaactaataatgatttttctttcttatggtcccttgtagatcacctgagacttttagaccatttccctcccataatatccacataatttttctctctgtgtgtttattgagaagattmttttctatttctttaaacacaaggcagaaaatagccatactaaaatggagctcaaggctacttgtgcatcgagatttccaaagtggaatttctagatatcatttctgttttctctcaagagaaaaattaattgatattgacaacttgcctggtacccactcctttctagtagtatgattgagcacaaaagaatattggtgtaacatagacccagggggtcatggtatgctccatgtgtgtatacattgtgtgtgtgtgtgtgtgtgtgtgtacatgcatgcacgcatgcctttagagtgagaggaggtttcagagaaagggagctttggctctatgttccaaaaggtaactcatcacacagaggccagaactcaaggcaacagtaacagtagcaaacaaagaagaaatgcattgcaattcatgtgacactgtttgcagccaaattagcaaagtgccaatgcaacaacatctggtcagagggactccttgtgtcttcaatttcagccacttcaaagtcagctctttccccaacatcccctgaaaccatctctcatccctctccttttgctcattcccctgctacactggcttccttgctggccttgaacatgtgcaagaagcacattcctctgagtctctcattaatccttccttctgccttgcacacacttctgcgggccacatggtgacttctgccctgccttcactatggtctctgttcatttgtcacctggtctgctggtattgcatcaatgaccagtaaaaaaatagtaaaaaaaaaaaaacaaaaaaaacccaccccgtccacactttccttcttatttcttttttcctcttcaaagggtttgtcaccatcggataccatatggtgacaccatatggtatttctcttgtttgtttgtattctttctctgtcactgatttgcagcaactttttttttttttccggagtctcgctctgtcacccaggctgaagtgcagtggcatgatcttggctcactgcaacctccacctcccaggttcaagcaattctcccgcctcaacctccagagtagctgggactacaggcgcgtgccaccacatccagctatatatatatatatatatatatatatatatatattttttttttttttttttttttttttgtattttttgtagagatgagaattcaccatattggtcaggctggtctcgagctcctgatgtcaggtgatccacccacctcggcctcccaaaatgctgggattacacgtgtgagccaccccacccagcctgtagtgacttttgttttatagaactaattattcaatgtccagacagtatttgtaacacttcagaattcactttatagtcctcaaatgcctaaaaattttctcatgaatactgcagagttcatgcactcagggaaagactgtgagtgggacaagaattcctaaccagggttgtcaaagggatgccctaacagaggctagattcacacgcaaaatgtagaaattaacttcttgtaaaatggaggttaccagagcctgggagaattgggggaggggggttgttggcaagatgatggtcaatgaatacaaaattacagttaaacta

SEQ ID NO: 55130 - DNA, 1104 bp, Homo sapiens
tgtacttgtactgtaagatagttttctccatacgtgcaatctcatcagctcaggggaagtacaaggcattttccacctgtgcatctcatctctcagttgtctccttattttatggtaggagcctaggggtgtactttagttctgctcctacccaaaactctcactcaggtgctgcagcttcagtgatgtacactgtggtcacccccatgctgaaccccttcatctgcagtctgaggaataaagacataaagagagctctgaatcaattcatcagggtagtgccattcttcaggaagtgacagtgatcccagagctctaagccttggactgagaaattgtgatttgtgaaccagattctggaagtaggacttgtctcttctatttattagctggagtttcaatttctttgattgccactattctatagaatttacacttttctgtggaaaactgctccttgatatccaacagtgttttgttttgtttgttttgttttgtttttgtcattttcctacttttccaaagttattcccaaactaaggtcagaaacaaagtggagattcctattagtctcatagagttgtgagctgtgttagcccaaagaataaattacacttggcaactataaagtcattaatgtaatctttttctttttttttgagacagtttcgctcttgtcacccaggttggagtgcaatggtgccaccttggctcactgcaacccccacctcccaggttcaagcaattcttctgcctcagtctccggagtagctggattcaggtgcctgccatcacgcccggctaattttttgtacttttagtagagacggggtttcaccatgttgaccaggctggtctcaaactcctgacctcagagatccgcccgccttggcctcccaaagtgctgggattacaggcatgagccacygcacccagcctcattcatgtaattttattgtagataaatatctgagaccacagtttttcttttctgagtccaccattctttgctctatcactacttgactgctctacttgacaatgtaaaccttaacacattagtgtgtttacagctcatcgtggcatttcattcttctcattagg

SEQ ID NO: 55131 - DNA, 1548 bp, Homo sapiens
tgctccaaatggacccatctcctgaaaccacaatgctgcttctccttgctgtgaaaaaaaaaaaaaaaaaaaatcccaaagagtgaaccacagactacacagggaatccctctgggatattatgtttccagtccctaagccacagcaggaagttgcctgtagataccaagggagatcattcagctaagatctgaacagtcaggaaaactcccgaggctagagttttgtcyggttcctttctcttccttacaagacataatacggtattgacaaactatggtctgctagtcaaattcagcctactgcttgtttttgtaaataaagttttattggcacacagccacactcatgcattacctattgtctacagctgctttcaagctacaatgcctgagttgagttgttgggacagagattgtacgggccacaaagctcaaaatgtttactcttgggccatttgctgaaaaaatttgctgacccctggagaagagcagacagcacttagcatctgtgggccagacgcagtggctcatgcctgcaatcccaacactttgggaggtgaaggctggagaaccgcttgagcccaggagttcatggccagcctgggcaacatagccagaccctgtctcttttttaaaaattaaaaattagccaggcacggtggcctgtgcctgtagtcctagccactcaagaggctaaagcaggaggatcgcttgaacccaggagtttgaggctgcaatgagctatgatcgtaccactgcactccaacttgggtgacagcgtaaaaccctgtctaaaagaaaagaaaacagcatcttagcacctgatgaccataaaatagttgccaactgtggttgataaaaagcagaaacctaactcacacaaaattaagaatagagtaaaatgctacagtgtgagaatgtcttactatcaatttttctcagtcctgtctgcatcacttataagtatataccatcatgattgtcaattaataataatactagttttaaaaaatgtttgacttgaaatgtgatcttagactccacttgggcctctctgggtctctctcttctcccccaccctgggctctctcttttctaggctttcctgggtctaggctttcttttggacctacctcttgggtttcctgctcagaaaatgtcccttctagtgttcccagtttctacagggtgaggggtgagggtgggtctttcccacttggttctcccgacctctagacacttagatctgatgagatgtgtgggctgcttctcggagcctcttacatccctaaaactaaagcaagctacagtgagcaaactgaaaatgctttctgtacattttatgtcaatgctatgctagccagaggagtgagtgagggaagagagagacggcatggaaaccaagtacatcacacacactcagacacacacacgcacacataacctcgaaaacctcttgtatgcaattgacatatccacaaccccagacagacacagtcacatgcaaactcttcagacatgcaaccacacacacacccacacaaac

SEQ ID NO: 55132 - DNA, 1548 bp, Homo sapiens
tgctccaaatggacccatctcctgaaaccacaatgctgcttctccttgctgtgaaaaaaaaaaaaaaaaaaaatcccaaagagtgaaccacagactacacagggaatccctctgggatattatgtttccagtccctaagccacagcaggaagttgcctgtagataccaagggagatcattcagctaagatctgaacagtcaggaaaactcccgaggctagagttttgtccggttcctttctcttccttacaagacataatacggtattgacaaactatggtctgctagtcaaattcagcctactgcttgtttttgtaaataaagttttattggcacacagccacactcatgcattacctattgtctacagctgctttcaagctacaatgcctgagttgagttgttgggacagagattgtacgggccacaaagctcaaaatrtttactcttgggccatttgctgaaaaaatttgctgacccctggagaagagcagacagcacttagcatctgtgggccagacgcagtggctcatgcctgcaatcccaacactttgggaggtgaaggctggagaaccgcttgagcccaggagttcatggccagcctgggcaacatagccagaccctgtctcttttttaaaaattaaaaattagccaggcacggtggcctgtgcctgtagtcctagccactcaagaggctaaagcaggaggatcgcttgaacccaggagtttgaggctgcaatgagctatgatcgtaccactgcactccaacttgggtgacagcgtaaaaccctgtctaaaagaaaagaaaacagcatcttagcacctgatgaccataaaatagttgccaactgtggttgataaaaagcagaaacctaactcacacaaaattaagaatagagtaaaatgctacagtgtgagaatgtcttactatcaatttttctcagtcctgtctgcatcacttataagtatataccatcatgattgtcaattaataataatactagttttaaaaaatgtttgacttgaaatgtgatcttagactccacttgggcctctctgggtctctctcttctcccccaccctgggctctctcttttctaggctttcctgggtctaggctttcttttggacctacctcttgggtttcctgctcagaaaatgtcccttctagtgttcccagtttctacagggtgaggggtgagggtgggtctttcccacttggttctcccgacctctagacacttagatctgatgagatgtgtgggctgcttctcggagcctcttacatccctaaaactaaagcaagctacagtgagcaaactgaaaatgctttctgtacattttatgtcaatgctatgctagccagaggagtgagtgagggaagagagagacggcatggaaaccaagtacatcacacacactcagacacacacacgcacacataacctcgaaaacctcttgtatgcaattgacatatccacaaccccagacagacacagtcacatgcaaactcttcagacatgcaaccacacacacacccacacaaac

SEQ ID NO: 55133 - DNA, 1548 bp, Homo sapiens
tgctccaaatggacccatctcctgaaaccacaatgctgcttctccttgctgtgaaaaaaaaaaaaaaaaaaaatcccaaagagtgaaccacagactacacagggaatccctctgggatattatgtttccagtccctaagccacagcaggaagttgcctgtagataccaagggagatcattcagctaagatctgaacagtcaggaaaactcccgaggctagagttttgtccggttcctttctcttccttacaagacataatacggtattgacaaactatggtctgctagtcaaattcagcctactgcttgtttttgtaaataaagttttattggcacacagccacactcatgcattacctattgtctacagctgctttcaagctacaatgcctgagttgagttgttgggacagagattgtacgggccacaaagctcaaaatgtttactcttgggccatttgctgaaaaaatttgytgacccctggagaagagcagacagcacttagcatctgtgggccagacgcagtggctcatgcctgcaatcccaacactttgggaggtgaaggctggagaaccgcttgagcccaggagttcatggccagcctgggcaacatagccagaccctgtctcttttttaaaaattaaaaattagccaggcacggtggcctgtgcctgtagtcctagccactcaagaggctaaagcaggaggatcgcttgaacccaggagtttgaggctgcaatgagctatgatcgtaccactgcactccaacttgggtgacagcgtaaaaccctgtctaaaagaaaagaaaacagcatcttagcacctgatgaccataaaatagttgccaactgtggttgataaaaagcagaaacctaactcacacaaaattaagaatagagtaaaatgctacagtgtgagaatgtcttactatcaatttttctcagtcctgtctgcatcacttataagtatataccatcatgattgtcaattaataataatactagttttaaaaaatgtttgacttgaaatgtgatcttagactccacttgggcctctctgggtctctctcttctcccccaccctgggctctctcttttctaggctttcctgggtctaggctttcttttggacctacctcttgggtttcctgctcagaaaatgtcccttctagtgttcccagtttctacagggtgaggggtgagggtgggtctttcccacttggttctcccgacctctagacacttagatctgatgagatgtgtgggctgcttctcggagcctcttacatccctaaaactaaagcaagctacagtgagcaaactgaaaatgctttctgtacattttatgtcaatgctatgctagccagaggagtgagtgagggaagagagagacggcatggaaaccaagtacatcacacacactcagacacacacacgcacacataacctcgaaaacctcttgtatgcaattgacatatccacaaccccagacagacacagtcacatgcaaactcttcagacatgcaaccacacacacacccacacaaac

SEQ ID NO: 55134 - DNA, 1330 bp, Homo sapiens
acacacacacacacacaaatatgcaccaatgcgtgcttccccctccttgccacagggataaaaaggcaaacatgccgacatttgctgacacacacaaagacatacatggccgcacacacggatacacccgctctcagacacgcagcgacctacgcccattttcctggccatacaagcagccgaacgttcctgtacttctgtatctgcatagctcccccaacactccttccatgggagggggatggctggggcttccctgatgcccccttcccccagctttctctctgggtcactctggccacccctctgtccctgcgaagctatagctctctgtccctgctccggcctggtgccctgttttcatggcacttggcattttctctccggctctggccctgcctgattcatgcccactgctggggtgggaggtgtgcccaggtgtgggccgggatggggtagctcatgagatgagctggggctccgtgagatgttttgatgctgggccgagctcagagccgagggctctgccgggaacagggtgctccagtctctctagggcctggaatgtcttgtgtagcctcaagagctcccagacggaggctgcgggagcggagtcaagggctaggctttgccgtcagacagaaatgggttcgagctccagctctacatgttctaatcttgcgacctgaagcacaggattttcctggcctgtaaaatgggcaaaaaccagtgtctatctcttgggctgtacttaggttcaatgtggtgcctggcacatagtgtgtgctccataaatggtaattgttgccaattgttggttgtcaacctcccagaccctcccagctgagagagggatgcctctgaggggtagaagacaggatcgagcacctcccaaccatagatatccaagtggactgcctggaggaggaggaggcaagaggagagtttggaaggatgagagtttgcacatggcccagctcttttacctttggatgggggcctgtaggccaagcagagggtggcacaacttcaagataggggagagatggtgggggagagtrgggggcaggaggggagagacgaggcctccactgttccatgaggaccagataccctggttgggggccctgagtcctggtataagagtatgtgtgcacgcattcatccaaatgtatgtgggacaaagagacccggtgcatctagatgatgacttcagggacgtccccaagctccagaactttctgtgtctgcacctgggcgttgtcacctggacccgccatggagacaggacatatgtgcaggaccctatggtgggcacttggctggatca

SEQ ID NO: 55135 - DNA, 2081 bp, Homo sapiens
ccttttatgtcatatctmtttccttcttactgtgtttcgaaggcctcaagcatggctgctccatagctctaactggagagaccccctcagaagtgggactcccctacccagtgctcaccctttctgcttgctgtgaggaaggtccccaagtggaggaccagagcaggggctccccggtgggtcacttctctgtgacttgatttcccccaggtggcctgtttttgatagagccctttgctgttttttgttgtgtcctttcttagctcttttcttttcatttgggtttctcattttatacttttgcactttgcactgctagggtttgggctctttagtctaaattgatttgggagacaggtaagaaaactaatctcaggtcaactggagagggcagatctggagaattaaatgcctgtgcagtggtgaggggcgttggtcagattccttgcctctgctcagaggtagtgtccatctttttgcctttgtcacttctccccgggtctggctgttgtttgtggctgcgtgtagagcttgtcaggcggagtgctgtgacaggaggctattttaataaactgttgcagtttctcgagccgagctgtgttgcgttggcatccctcgtcaccgctaatggagtgtgcgtggctgggtgtgggccgaaggaggaggctgagcttgctgggggctgggggagaagggagggacgtgtggggtgctggcctcccccttgtctgagagtgctccttcagcagccagacctgggggcatcacaaggtggcagtaccctgggcaccagatccctgccctggaagtactgctggcatggacactttctgagctctctttcttcttatttctattcatagcaccgcaggcccgtgtgtatgtggccggggaggaaaacttccactcgcccctgtgtgctccataggaagaaaaaaaaaaagaaagaaagaaatagaaacagaaaaagagagtgtgcaggcccgagagaaagactgaaaccaaaacacagagagaaggcgcagctgcttccccaaggccttctggggctcccgcccgccagcccgccgggagtcaggcctttatttatttatttttcaggcttaaaaaaaaatttcgagtcttccacaatcccagtcccccccaatgccccaccccacccccagatttgctgggtggctgctgccaaatggacccgagtgggagcctggaatgaaaaattcataactgctggactttgcttgttcattagacgtgaacttgtcgattgggcaaattgtttttggtctccaactgccgggggctctccccaccctccctgctcgcccggttccctcctccccttggacgcagccattggctgctcgtggatgtctctttgccaaataggtggatccttctctctctttctctctctctctctctctctctctctctctctgtctctttctccccccacccctttttactggcttggcacaagcaaatggatggggattgagcctgaaaggagagagagagagggagtttgagagagagaaaaggagcaaaaaaaaaaaacaccccaaaaacccaaccagtgcgcacacacacgcgcacactcacacacacgccccatcccatccacgtcctccctcgatcctcgatctctccctcccccccttcttcctttcctccctccctcgctccctctctctcttttgcacgcgtctgccagcaacggtctgcagccggtcagaactcgtcctcttccccgggaatctgcgagctcccccttttcctccgatcaggcagctcgaagtttacacccctgtgccgctgccaaagccgaaagcctttttcttcagctgccgctttttccctcctgggttttgtttttgtttttgttttgcacgggggtggggtggggtgcgttgttggttgtggggagatggtgggaggctggttttgatttttaaattttgcatttttttctttttttttttttttaaactggaagaggatgcacaggggaagaaattgaaaaaaaaattttgttggcttttgtttacctggcgtgtgtggcagccggctcgctccct

SEQ ID NO: 55136 - DNA, 740 bp, Homo sapiens
accagcagcgtgtgtgtgtggacggcaacgttgtctgtgcgcgtgtgtgtgagtgagtgaggragagagagagagaataggtgtgtgtagaggctcccggtgcctctgtctggctgctgaggctgagatgggagcaagtggctggcgaagctggtggtggcttcaaaccacactttcgtagaacaatcgcaagagaaaattgttggggggagggaggaggaggagaaggcggttttccttgtgcccccccttctaacgctgcttttctccttctctctttccccctcatcccgtcttcccctcctcccgtcctccctcgccccgcatgctcccggcttgccgcctgcaggatgagttccacccgttcatcgaggcactgctgcctcacgtccgcgctttctcctacacctggttcaacctgcaggcgcggaagcgcaagtacttcaagaagcatgaaaagcggatgtcgaaggacgaggagcgggcggtgaaggacgagctgctgggcgagaagcccgagatcaagcagaagtgggcatcccggctgctggccaagctgcgcaaggacatccggcccgagttccgcgaggacttcgtgctgaccatcacgggcaagaagcccccctgctgcgtgctctccaaccccgaccagaagggcaagatccggcggattgactgcctgcgccaggctgacaaggtgtggcggctggacctggtcatggtgattttgtttaagggga

SEQ ID NO: 55137 - DNA, 740 bp, Homo sapiens
accagcagcgtgtgtgtgtggacggcaacgttgtctgtgcgcgtgtgtgtgagtgagtgagggagaragagagagaataggtgtgtgtagaggctcccggtgcctctgtctggctgctgaggctgagatgggagcaagtggctggcgaagctggtggtggcttcaaaccacactttcgtagaacaatcgcaagagaaaattgttggggggagggaggaggaggagaaggcggttttccttgtgcccccccttctaacgctgcttttctccttctctctttccccctcatcccgtcttcccctcctcccgtcctccctcgccccgcatgctcccggcttgccgcctgcaggatgagttccacccgttcatcgaggcactgctgcctcacgtccgcgctttctcctacacctggttcaacctgcaggcgcggaagcgcaagtacttcaagaagcatgaaaagcggatgtcgaaggacgaggagcgggcggtgaaggacgagctgctgggcgagaagcccgagatcaagcagaagtgggcatcccggctgctggccaagctgcgcaaggacatccggcccgagttccgcgaggacttcgtgctgaccatcacgggcaagaagcccccctgctgcgtgctctccaaccccgaccagaagggcaagatccggcggattgactgcctgcgccaggctgacaaggtgtggcggctggacctggtcatggtgattttgtttaagggga

SEQ ID NO: 55138 - DNA, 740 bp, Homo sapiens
accagcagcgtgtgtgtgtggacggcaacgttgtctgtgcgcgtgtgtgtgagtgagtgagggagagagagagagaataggtgtgtgtagaggctcccggtgcctctgtctggctgctgaggctgagatgggagcaagtggctggcgaagctggtggtggcttcaaaccacactttcgtagaacaatcgcaagagaaaattgttggggggagggaggaggagragaaggcggttttccttgtgcccccccttctaacgctgcttttctccttctctctttccccctcatcccgtcttcccctcctcccgtcctccctcgccccgcatgctcccggcttgccgcctgcaggatgagttccacccgttcatcgaggcactgctgcctcacgtccgcgctttctcctacacctggttcaacctgcaggcgcggaagcgcaagtacttcaagaagcatgaaaagcggatgtcgaaggacgaggagcgggcggtgaaggacgagctgctgggcgagaagcccgagatcaagcagaagtgggcatcccggctgctggccaagctgcgcaaggacatccggcccgagttccgcgaggacttcgtgctgaccatcacgggcaagaagcccccctgctgcgtgctctccaaccccgaccagaagggcaagatccggcggattgactgcctgcgccaggctgacaaggtgtggcggctggacctggtcatggtgattttgtttaagggga

SEQ ID NO: 55139 - DNA, 740 bp, Homo sapiens
accagcagcgtgtgtgtgtggacggcaacgttgtctgtgcgcgtgtgtgtgagtgagtgagggagagagagagagaataggtgtgtgtagaggctcccggtgcctctgtctggctgctgaggctgagatgggagcaagtggctggcgaagctggtggtggcttcaaaccacactttcgtagaacaatcgcaagagaaaattgttggggggagggaggaggaggaraaggcggttttccttgtgcccccccttctaacgctgcttttctccttctctctttccccctcatcccgtcttcccctcctcccgtcctccctcgccccgcatgctcccggcttgccgcctgcaggatgagttccacccgttcatcgaggcactgctgcctcacgtccgcgctttctcctacacctggttcaacctgcaggcgcggaagcgcaagtacttcaagaagcatgaaaagcggatgtcgaaggacgaggagcgggcggtgaaggacgagctgctgggcgagaagcccgagatcaagcagaagtgggcatcccggctgctggccaagctgcgcaaggacatccggcccgagttccgcgaggacttcgtgctgaccatcacgggcaagaagcccccctgctgcgtgctctccaaccccgaccagaagggcaagatccggcggattgactgcctgcgccaggctgacaaggtgtggcggctggacctggtcatggtgattttgtttaagggga

SEQ ID NO: 55140 - DNA, 744 bp, Homo sapiens
aagtggcaaggcctcaggatggatgcccacagccctggcactggggagcagagaggctttctcggggcacaggcatggcagggagcagcgttgctgtggaagaggtcttaaacaagcaaacaaacaaaccaaaaaaaaaaaaaactctgtaaaatctccttttccttttgtgttccaagtagttctgcttctcttcgcttttccagttttaccctgcattttgggtcagggtggtttagttctcctcctctgttccttttttcccttaccctttccctttttataatttctttccgcttttgttttcttacaaattgaaacagagatggctggttaatttttagcctccactcagctacgcccaatttactgccgcctttgaaacctaaacgggcggcactctgtgattaagcaaggcagaagtgtgtttacattatgcccaaccaacttgtaatgagagggctaccaaacctttctctctctctctctctctctstgtgtgtgtgtgtgtgtgtgtgtttcctttccaccattccagtattttttccccttcattttccttcttcctctctttatgcgaatttgagagaatgtggcttaacttcaactctcgcaaaggttgtttctccgcgagtgtgtgtctctgtgtctttcttcctgttcattcacaaaaaagaaaagtgattcacaatggctgtggtcacccccttgcctgtttgggaagttgggaggaatgatataact

SEQ ID NO: 55141 - DNA, 876 bp, Homo sapiens
aaactccactcccagaatactgggtccaaatacagaatactaggtccaaaaggctgccatgcggctggccttcctgctgggaaggagtctgtctgtgtgtctgtctgtgtttaggaagggaggttgaggcagggcagggtcagagagcactgccgtggggaggagggtatccatttcctggtgatatccttccattcaaagcgggtatcccagaacaggtggccagggacgggtgagctggggagggccaggaragagatctctgcttgtgtgagaaaggatggccgagctggcctagaaccgctgctagactatctccaaagtttctgcagcaccctgaaggtgaaccagtgccttcagaccttccctgacacctaagccttggtcctaggaaagaaaaaaaaaaatccaaagctaacaaaatacttgagcgaatggaactgtcagcgtcaccctgtcagatccctcctgtgcgcctgcagcggaatccccacgaagtccaggtatttgagtggtggctcttttctttatctaaactctttaatgatggagagcttcccacatagaaagaactcctgtgtacccaccactagtgccagcaatcgccagatcacggccaatctcaattcaaccatcctcccaactgcccacccatgctgagttatttagaagatccaggcattatagcttttcatctgtaaatgtttttgtgcacatctctaaagatacggactcttgaaaaaccaaaccacaataccactattatacccattaaaaattcagcatttttttttagtatcatcagatactggttaatgttcacatttccctaattatcacttaattttttgtttatagtttgtttgaatcaggatc

SEQ ID NO: 55142 - DNA, 632 bp, Homo sapiens
aaatgtgccacttttagttaaatgagttgataaatcccttgttttacttaagctagtctgagttggacctttgtcacttccaaccaagagtgttgctgaatayacacacccttcacagaagcttagagactcccccagttctccccaaaacacagagtcagaaataacctctcacaggtaggatgggtgaggggcatccctttgggaggggcactgtcactaacctgggccacgcacattgacatccatgccatcagcatctgcgtcgccctgtggtggtgtcagtgccatggctggtgccacgcggatgtcagcagcaaccagatggtgttgagtccactgacggcaatccacagcctcctcagcccccatgcctggctcctctacctggaggggcaggcaccctggatctcagatctcaccctttggtgctggggagagccactgccagggatggggctgggcattcctacaggtttctctttaggagatacacacagagccctgggaaatcatttaccatctgtttggtgttttatttgtttttgagacagagtctcgctctgtcccccaggctggagtgcagtggcatgatctcagctcactgcaacccccgcctcccgggttcaagt

SEQ ID NO: 55143 - DNA, 632 bp, Homo sapiens
aaatgtgccacttttagttaaatgagttgataaatcccttgttttacttaagctagtctgagttggacctttgtcacttccaaccaagagtgttgctgaatacacacacccttcacagaagcttagagactcccccagttctccccaaaacacagagtcagaaataacctctcacaggtaggatgggtgaggggcatccctttgggaggggcactgtcactracctgggccacgcacattgacatccatgccatcagcatctgcgtcgccctgtggtggtgtcagtgccatggctggtgccacgcggatgtcagcagcaaccagatggtgttgagtccactgacggcaatccacagcctcctcagcccccatgcctggctcctctacctggaggggcaggcaccctggatctcagatctcaccctttggtgctggggagagccactgccagggatggggctgggcattcctacaggtttctctttaggagatacacacagagccctgggaaatcatttaccatctgtttggtgttttatttgtttttgagacagagtctcgctctgtcccccaggctggagtgcagtggcatgatctcagctcactgcaacccccgcctcccgggttcaagt

SEQ ID NO: 55144 - DNA, 456 bp, Homo sapiens
cactcgcccagcgccgggccctgcactccgagccgcggccgccacccgccccgcagccaacttgggccgaaacttccccgggtcccgcgctccggagcagggcgcgcagcccggcgagatcgacggcggcctcccgagcccgcgcctcgggcccagggcctccctccggatcggccgcaggctgcgcgcccccgaccgtccccgcccgctgagttcgggggtccccggcgcggagcagggagccytccgggcggcaggagggcgcgcagactccgagcgccggggctgcctggccgggctccggtggacacctcggaggctgccccagcatcggggggggggcccgagacgcctcggcgggaccccgggagccgagcacgcccgcccgcgccgccagccccgcgccccggccgcggatgaagagtcggaggcggcggcccgagcggcccgcgcgct

SEQ ID NO: 55145 - DNA, 672 bp, Homo sapiens
tgaaagattttttgtttgctcttcttcaaggtcaagaaaggcagaggactaggctggtctgttctaatttttaattmtaggatggttctgctgctttctggattgccgcagcctggcttctctagcatggagggaagtttttacgtgtggtgatagtccttgtcttctctgaaatagaaaccagtcagtccaaaaaagctctcgtgtcagcgagagctttttctctctggctccttttcaaaccgcctgccatttatctccttcatcttctaaccaggtcttcagagcccatctttgctccagcgctagtcctggatgcagtcctcagagtgtgtggtcgtggtggtagttactggttgttgggtaactccatcaggtctctgaagacacacaacagcagtagatgtaaaagccctctgggcaatgagagcatgtgggagctccacttacgggcagccttggctggtttctgttgagcgtcttcaccgttatctacgagtccagaaacatccagcagagggattgtgcatcgatattgccatcaagatgaaaagacatgctcattttaaatctgagccaccctttaaagtaaaactaaccttctgtccatctctggggcgcagcctgtgtgctcccccaagcagcatgctggaggaaccctgaaaacggatc

SEQ ID NO: 55146 - DNA, 659 bp, Homo sapiens
caaccttcctggggccttctctctctgttttcgcactgtcttcagaaagacagtgcatgtctgtctctgtgttcagatatcccctaaggtcattttcagaggaaccggaagttaggacatcaacatatcattttggggagacacagttgaacctgtaacacccagttatctctcctttactttcagatgtctgtcttttctgggcacagttagtcctctgggctgcctttgccctgcactttttttttycccccaagacggagtttcactcttatcacccaggctggagtacagtggggtgatcttggctcactgcaacctccgcctcctgcatttaagtaatgctcctgcctcagcctccagagtagctaggattacaggcgggcaccaccacacacagcgggtttttgtatttttagtagagacagcgtttcaccatgttggccaggctgggcttgaactcctgacctcatgatctgcctgcctcagcctcccaaagtgctgggattaaaggcgtgagccaccgtgcccagcctgccctgcacttcttttagcaccattagcttctgtcactgggtgtctgtagccgtgctaggtcagccagaactatgtctttatctttccaccctcagggcctagaatagtacatatttcacact

SEQ ID NO: 55147 - DNA, 659 bp, Homo sapiens
caaccttcctggggccttctctctctgttttcgcactgtcttcagaaagacagtgcatgtctgtctctgtgttcagatatcccctaaggtcattttcagaggaaccggaagttaggacatcaacatatcattttggggagacacagttgaacctgtaacacccagttatctctcctttactttcagatgtctgtcttttctgggcacagttagtcctctgggctgcctttgccctgcacttttttttttcccccaagacggagtttcactcttatcacccaggctggagtacagtggggtgatcttggctcactgcaacctccgcctcctgcatttaagtaaygctcctgcctcagcctccagagtagctaggattacaggcgggcaccaccacacacagcgggtttttgtatttttagtagagacagcgtttcaccatgttggccaggctgggcttgaactcctgacctcatgatctgcctgcctcagcctcccaaagtgctgggattaaaggcgtgagccaccgtgcccagcctgccctgcacttcttttagcaccattagcttctgtcactgggtgtctgtagccgtgctaggtcagccagaactatgtctttatctttccaccctcagggcctagaatagtacatatttcacact

SEQ ID NO: 55148 - DNA, 761 bp, Homo sapiens
agctggaatcaagatactgaagcaacaccaccccataaccttttctgtagcttggttgatgtcagttctgctgagactttagggtctgtagccttttcacttagcagcattcctgggttgttttctctgcagctgtatttacaaggtacccagcctcctagctttccccrttgaagagattcttactcatgtgacacagccagagtttggggtgcaccaaggccgcgtggtctaaatcgggcccctcagtgtcctggtcttttagtcagcatttagcagaaggaagattgctaggtctattcttaactctttgatatatttaagaagcactgtgctcattcttgactcagagcatctagattctttcttttctttttcttgccctgtcttatggtgccaagcatctagattttttttttttttttttttttttttttgcctgttttaagatggaatctcagctgggtgtggtggctcacacctgtaatctcaacattttaggaggccgaggcaggaggatcccttgaggccaggagttcaagaccagcctgggcaacatagttagaccgcacctctaaaaaagaaaaagaaaagagaaatacaaaaattagccaggcatggtggtacacatctgtaatcccagctacttaagaggctgcagcaggaagatcacatgaggtcaggaggtcgaggccacagtgagcctgatcaaaccattgcactccccccagacaatagagggagaccctgtctcaaattaa

SEQ ID NO: 55149 - DNA, 761 bp, Homo sapiens
agctggaatcaagatactgaagcaacaccaccccataaccttttctgtagcttggttgatgtcagttctgctgagactttagggtctgtagccttttcacttagcagcattcctgggttgttttctctgcagctgtatttacaaggtacccagcctcctagctttccccgttgaagagattcttactcatgtgacacagccagagtttggggtgcaccaaggcmgcgtggtctaaatcgggcccctcagtgtcctggtcttttagtcagcatttagcagaaggaagattgctaggtctattcttaactctttgatatatttaagaagcactgtgctcattcttgactcagagcatctagattctttcttttctttttcttgccctgtcttatggtgccaagcatctagattttttttttttttttttttttttttttgcctgttttaagatggaatctcagctgggtgtggtggctcacacctgtaatctcaacattttaggaggccgaggcaggaggatcccttgaggccaggagttcaagaccagcctgggcaacatagttagaccgcacctctaaaaaagaaaaagaaaagagaaatacaaaaattagccaggcatggtggtacacatctgtaatcccagctacttaagaggctgcagcaggaagatcacatgaggtcaggaggtcgaggccacagtgagcctgatcaaaccattgcactccccccagacaatagagggagaccctgtctcaaattaa

SEQ ID NO: 55150 - DNA, 538 bp, Homo sapiens
tcactcaatatggtgatttaggagggggttagaaatgtccctaggcccttggtgatggcttccctggactgccagttgactagtggggttgtctcaagcagtgactatcagcaaggctgtccctgggatgactgacacctgaccgcgatttcaattagtcagtttcattggtcacagagcctggatcttgcaggacacggggcaggagggctgttttacctggtagtrtctttggacctgatatccagcttcatcctaagcctctgtacaaaaacaaagcgggggaatttaaccaggcagaaaaatcaatttaaatgcttacagagaaacagtaaggcccaacactgccgcctcattttcacgaggtgagtcactcaaaccgttgacctcatggctgatctatgagcaaaggcgtgctggcagttgctgctggcacaggaatggcttcagacctgtttcctggaaccctggcgccaggcagagctcagagtggccttttgccattaggtcagatcacctctccgaggagcaagttccc

SEQ ID NO: 55151 - DNA, 538 bp, Homo sapiens
tcactcaatatggtgatttaggagggggttagaaatgtccctaggcccttggtgatggcttccctggactgccagttgactagtggggttgtctcaagcagtgactatcagcaaggctgtccctgggatgactgacacctgaccgcgatttcaattagtcagtttcattggtcacagagcctggatcttgcaggacacggggcaggagggctgttttacctggtagtatctttggacctgatatccagcttcatcctaagcctctgtayaaaaacaaagcgggggaatttaaccaggcagaaaaatcaatttaaatgcttacagagaaacagtaaggcccaacactgccgcctcattttcacgaggtgagtcactcaaaccgttgacctcatggctgatctatgagcaaaggcgtgctggcagttgctgctggcacaggaatggcttcagacctgtttcctggaaccctggcgccaggcagagctcagagtggccttttgccattaggtcagatcacctctccgaggagcaagttccc

SEQ ID NO: 55152 - DNA, 597 bp, Homo sapiens
gtcacccaggcygaagtgcagtggtacaatctcagctcattgcagcctctgcctcctgggttcaagggattccttatgcctcagcctcccgagtggctgagattataggcagatgccatcatgcctggctaatctttttttgtatttttagtagagaggggtttcaccatgttggccaggctggtctcaaactcctgtcctcaggtgatccacctgccttggcctcccaaagtgctgggattacaggcgtgagccactgctcccagcctcagccccacagcatttctcccattgactttcaggctgttgggctgaagtaggaaaggagaaagagatgatgtaagagaagtccctttagacagaaggggaagcagagagctcttcctgaaagtataaaataatatcaggatgctgccttagtccagggatacaggggagaggagagaggatggatgccctgataaaaccacacacttccaagttttaggaaatgctacaagagtttgtgttgtggttgcattttctccctgccccactcatatgctgcacgctgtgtctagactgatagccagaagcaggcttcacatgcttttaaag

SEQ ID NO: 55153 - DNA, 597 bp, Homo sapiens
gtcacccaggctgaagtgcagtggtacaatctcagctcattgcagcctctgcctcctgggttcaagrgattccttatgcctcagcctcccgagtggctgagattataggcagatgccatcatgcctggctaatctttttttgtatttttagtagagaggggtttcaccatgttggccaggctggtctcaaactcctgtcctcaggtgatccacctgccttggcctcccaaagtgctgggattacaggcgtgagccactgctcccagcctcagccccacagcatttctcccattgactttcaggctgttgggctgaagtaggaaaggagaaagagatgatgtaagagaagtccctttagacagaaggggaagcagagagctcttcctgaaagtataaaataatatcaggatgctgccttagtccagggatacaggggagaggagagaggatggatgccctgataaaaccacacacttccaagttttaggaaatgctacaagagtttgtgttgtggttgcattttctccctgccccactcatatgctgcacgctgtgtctagactgatagccagaagcaggcttcacatgcttttaaag

SEQ ID NO: 55154 - DNA, 597 bp, Homo sapiens
gtcacccaggctgaagtgcagtggtacaatctcagctcattgcagcctctgcctcctgggttcaagggattccttatgcctcagcctcccgagtggctgagattataggcagatgccatcatgcctggctaatctttttttgtatttttagtagagakgggtttcaccatgttggccaggctggtctcaaactcctgtcctcaggtgatccacctgccttggcctcccaaagtgctgggattacaggcgtgagccactgctcccagcctcagccccacagcatttctcccattgactttcaggctgttgggctgaagtaggaaaggagaaagagatgatgtaagagaagtccctttagacagaaggggaagcagagagctcttcctgaaagtataaaataatatcaggatgctgccttagtccagggatacaggggagaggagagaggatggatgccctgataaaaccacacacttccaagttttaggaaatgctacaagagtttgtgttgtggttgcattttctccctgccccactcatatgctgcacgctgtgtctagactgatagccagaagcaggcttcacatgcttttaaag

SEQ ID NO: 55155 - DNA, 597 bp, Homo sapiens
gtcacccaggctgaagtgcagtggtacaatctcagctcattgcagcctctgcctcctgggttcaagggattccttatgcctcagcctcccgagtggctgagattataggcagatgccatcatgcctggctaatctttttttgtatttttagtagagaggggtttcaccatgttggccaggctggtctcaaactcctgtcctcaggtgatccacctgccttggcctcccaaagtgctgggattacaggygtgagccactgctcccagcctcagccccacagcatttctcccattgactttcaggctgttgggctgaagtaggaaaggagaaagagatgatgtaagagaagtccctttagacagaaggggaagcagagagctcttcctgaaagtataaaataatatcaggatgctgccttagtccagggatacaggggagaggagagaggatggatgccctgataaaaccacacacttccaagttttaggaaatgctacaagagtttgtgttgtggttgcattttctccctgccccactcatatgctgcacgctgtgtctagactgatagccagaagcaggcttcacatgcttttaaag

SEQ ID NO: 55156 - DNA, 597 bp, Homo sapiens
gtcacccaggctgaagtgcagtggtacaatctcagctcattgcagcctctgcctcctgggttcaagggattccttatgcctcagcctcccgagtggctgagattataggcagatgccatcatgcctggctaatctttttttgtatttttagtagagaggggtttcaccatgttggccaggctggtctcaaactcctgtcctcaggtgatccacctgccttggcctcccaaagtgctgggattacaggcgtgagccactgctcccagcytcagccccacagcatttctcccattgactttcaggctgttgggctgaagtaggaaaggagaaagagatgatgtaagagaagtccctttagacagaaggggaagcagagagctcttcctgaaagtataaaataatatcaggatgctgccttagtccagggatacaggggagaggagagaggatggatgccctgataaaaccacacacttccaagttttaggaaatgctacaagagtttgtgttgtggttgcattttctccctgccccactcatatgctgcacgctgtgtctagactgatagccagaagcaggcttcacatgcttttaaag

SEQ ID NO: 55157 - DNA, 597 bp, Homo sapiens
gtcacccaggctgaagtgcagtggtacaatctcagctcattgcagcctctgcctcctgggttcaagggattccttatgcctcagcctcccgagtggctgagattataggcagatgccatcatgcctggctaatctttttttgtatttttagtagagaggggtttcaccatgttggccaggctggtctcaaactcctgtcctcaggtgatccacctgccttggcctcccaaagtgctgggattacaggcgtgagccactgctcccagcctcagccccacagcatttctcccatygactttcaggctgttgggctgaagtaggaaaggagaaagagatgatgtaagagaagtccctttagacagaaggggaagcagagagctcttcctgaaagtataaaataatatcaggatgctgccttagtccagggatacaggggagaggagagaggatggatgccctgataaaaccacacacttccaagttttaggaaatgctacaagagtttgtgttgtggttgcattttctccctgccccactcatatgctgcacgctgtgtctagactgatagccagaagcaggcttcacatgcttttaaag

SEQ ID NO: 55158 - DNA, 1362 bp, Homo sapiens
catggggccagataagacccacatgctaggcaggtctgatgcttaacggaccacggtaggtgctggcaagtaggccacatggtggaaggaaaggaggcctggacttggctccagagacctgagtttgaatcccagctcggccacgaaccatatgcctatggcctagtaayctcttggagatgcagttccatcattcttaaaataacacactccaggaagtaagacaacattgaggggtgtggaagaaaaggccaggtgcctaggacttccccagatccagggcaaaaccccaagactgctggctcccttgcacactggcattccgggagctggccgaggcggccctgcacaaacaacaaacatccaaacacagaattttgtttttcacaaattaccaagaggtgagggaggtgggaaggtgagcagagcaatagttaaagggagaaatgtgttaagttttaggcctttctctctaattctttctgcttctgctaccacttgcctgttaagggaccaggagccaaggacagcctggtgggaaccgccagtgcagcacacagccagcttcctgtggacgagtccaggtgtgtccaagatccagccctgtggcctccagtcagtgagagacatggtcctcgaggtgagggggacttcctgtccccatgcttgcagggttttccacgtggacccctgcctgtcttgggtgtcgggagggaaaggacacccaaggtcgcacgatgagtggggctcaagccagagctgccgactttcccgcctaactctggtaacaagaaaagagatgacaacagcttcctgagtcttgggcaggccctgcttccggggcttcccatgcactgtcccgtttaaacctcgtgccagcccagtgcggtgttatcatgtcactctctagatgaggagctgccattcagagggaaagaatcttgcctgaggtctcagcactggatcagtctcactgtcctcgggaacaacggacttcattgccttccataagccccctaagcagcaggcagcgcgtgcagaggtcccaccatgcgaggtggcatggaggtgcccttgtagccggatctggcgactctgacctttcttggccaccagcaggtacagagggccctaggggaggccttagggagtgtggtgtgctgtcccacagtgccccctgcagtcccacaggccaggaaacctgaatgttagtccccagaaggaccaatcaggagcccatatcgcacctgctcctgtggactgagccttcctcctggagagcagatggtaaataaatacggaggctaacgggggtctcctctcaccctctcccattagcatcttagacttggagcaatacca

SEQ ID NO: 55159 - DNA, 1362 bp, Homo sapiens
catggggccagataagacccacatgctaggcaggtctgatgcttaacggaccacggtaggtgctggcaagtaggccacatggtggaaggaaaggaggcctggacttggctccagagacctgagtttgaatcccagctcggccacgaaccatatgcctatggcctagtaacctcttggagatgcagttccatcattcttaaaataacacactccaggaagtaagacaacattgaggggtgtggaagaaaaggccaggtgcctaggacttccccagatccagggcaaaaccccaagactgctggctcccttgcacactggcattccgggagctggccgaggcggccctgcacaaacaacaaacatccaaacacagaattttgtttttcacaaattaccaagaggtgagggaggtgggaaggtgagcagagcaatagttaaagggagaaatgtgttaagttttaggcctttctctctaattctttctgcttctgctaccacttgcctgttaagggaccaggagccaaggacagcctggtgggaaccgccagtgcagcacacagccagcttcctgtggacgagtccaggtgtgtccaagatccagccctgtggcctccagtcagtgagagacatggtcctcgaggtgagggggacttcctgtccccatgcttgcagggttttccacgtggacccctgcctgtcttgggtgtcgggagggaaaggacacccaaggtcgcacgatgagtggggctcaagccagagctgccgactttcccgcctaactctggtaacaagaaaagagatgacaacagcttcctgagtcttgggcaggccctgcttccggggcttcccatgcactgtcccgtttaaacctcgtgccagcccagtgcggtgttatcatgtcactctctagatgaggagctgccattcagagggaaagaatcttgcctgaggtctcagcactggatcagtctcactgtcctcgggaacaacggacttcattgccttccataagccccctaagcagcaggcagcgcgtgcagaggtcccaccatgcgaggtggcatggaggtgcccttgtagccggatctggcgactctgacctttcttggccaccagcaggtacagagggccctaggggaggccttagggagtgtggtgtgctgtcccacagtgccccctgcagtcccacaggccaggaaacctgaatgttagtccccagaaggaccaatcaggagcccatatcgcacctgctcmtgtggactgagccttcctcctggagagcagatggtaaataaatacggaggctaacgggggtctcctctcaccctctcccattagcatcttagacttggagcaatacca

SEQ ID NO: 55160 - DNA, 1008 bp, Homo sapiens
ggcacaccgttagtaatgagacatcttagcacyaatatgtgcttttcacattgggcaggtgtcaggagaggcctggggtcataggaccagactgcaaacaacacaatcccagaataaatcctattaatttggcataattgatgaaaatgaagattagatatttgaccagagatgagaaattcatgggcatgaatgctgcagctctgattactttgcatgtgaatgtgtggtaagaggcaacatttcttttgtttaaaaccctgtgcacctaattcacattcagagaaaggttgtagaatcattcaggctcattgaaaacaaggaaccaggatgccagcaaggccaatgttgttgtgagaatgttgagctattaattataaaatagcaaaacagggtgattttatttatagcaaactgttgctaggcagataataaagacccctttcagagcttgcatttatatatacatatatatatatatatgtatttttttctcacaaaaaagtgctagcttgtgtaatgatttttcagatgaaatgaaagcaggacgaggctgtcagccctgaatacttgtgacttttagactaaagtccttggcatcagccagcactgcaggatggagcaggtgaggttcagcaaccctgtgaagggaggctagggtattacccgcaccctttaacagcagactgagtatataaactctcactagactggaagtgagtgagcagccccaggaaagcccagatgagctattgtgccttccttggcttccctaccttctgttgtgccaggaagggtcggggagcctgtctgtggccttactcagtcagatatcccttccctggcccctctagagatggttgctacctccttttaggaagtgtgtgggaaggggccaatttgcaaaggttcacttgtgctcagtccctgctaagatgatcaagctcttttcaaaactcaggggttgggcttttgcagtttctggatagaagaggcccttaaatattt

SEQ ID NO: 55161 - DNA, 571 bp, Homo sapiens
gaataaatgatagtgacagttacaataaattctatgccttttcacargtatattgcacaaatttaaggaaaataagtgggtttactgaagtacaagtgatataaaataagctgtctatatttaaagtaacaaattttatactttttaaccaaatatatcagtatacatctctacatagttacacataaaaaatagagtaggtaaatagatgatagatagataaatagatagataagtttgctagggttgccataacaaagttccacaacctgagttaaacaacagaaatttattttctcatcattctagaggttaaaagtttaaggcattagcagggttggtttctcctgagacattctctttaggttgtaaatagccaccttgttctccccgtgctcttccctctgtatttactgagtcataatctcttcttcttataaggacaccagttatatgggattagggcctactcatttaatcacatttctaaagaccccatctccaattaccatcccattctgaagtggtgctaggggttaagacttcaacatatgaattttggagggatgca

SEQ ID NO: 55162 - DNA, 1260 bp, Homo sapiens
gccatgttccttagctttttttaaggttgagttctacttgaagataatcagttttacctggagtgagttgaagatatctccattcttgagaaaagagaaagcaaaagaactgtttgtttgaggcaggtgttggtaaagatcctatgaaatatttttactctcctggggaawaatagaacaaaaagttaagttgtggcaaaaacgagctagcatgtcttactccagacactaattttcactgttctaacatggaaagatggtaagacccaatctcctacttttttcttatacattgcatcaggacagccagaaaaggagtactggctagtgaaaatacaaatagcatttttgtgatttgatagtatttaggctcttgacaaaattgctcccaaattggtccaatttggaattatatcagggaaggaagtttgttgtacctttttgctatacatttggatgatgaagagagaacatttggtctctagtgtaatcatcctgagatctttcacaaggattatagttattggcgaaaaagagagtcacacaactacttaacaaatgctataggatttggcaagaactagtagtagataggtactgaatctctttaacttcagaacataatatacacagaatttttaaaaagttatttaacatcaacttcatcacttttttccaggaatattgcttcagtttttgttgtggtcccagtgcctacaaattaagataattttagctcataatgaacttgatggttattaaatcctctgctcacaggaagattctctagaggaacagagctctttgactggctttgtaggacagatgatctattttattccatgacatctactttaagagggatttcctccttcaatatctacatatgtttcctagccttgatatcatcacagtgaaagctaatcagcaagctgggttttattttttcccctgtctttgtatttgatctaggcttgtgtctgttagatgtctgtttaatatcatgataatcctttgggagagaatatgcttttgcttacattaaataccaaggaataaatgtcaacactgaggaaatatttattatccagggagggaatatatagctctttcagaggacttggagttggaggtagataggtgtcctatgtttcagccttagtactgtcactgagctttttttttttttttgagattttcttacttaaagcatatttacatatgttaaaacattctaatcttttttaataaagcgtatta

SEQ ID NO: 55163 - DNA, 1260 bp, Homo sapiens
gccatgttccttagctttttttaaggttgagttctacttgaagataatcagttttacctggagtgagttgaagatatctccattcttgagaaaagagaaagcaaaagaactgtttgtttgaggcaggtgttggtaaagatcctatgaaatatttttactctcctggggaaaaatagaacaaaaagttaagttgtggcaaaaacgagctagcatgtcttactccagacactaattttcactgttctaacatggaaagatggtaagacccaatctcctacttttttcttatacattgcatcaggacagccagaaaaggagtactggctagtgaaaatacaaatagcatttttgtgatttgatagtatttaggctcttgacaaaattgctcccaaattggtccaatttggaattatatcagggamggaagtttgttgtacctttttgctatacatttggatgatgaagagagaacatttggtctctagtgtaatcatcctgagatctttcacaaggattatagttattggcgaaaaagagagtcacacaactacttaacaaatgctataggatttggcaagaactagtagtagataggtactgaatctctttaacttcagaacataatatacacagaatttttaaaaagttatttaacatcaacttcatcacttttttccaggaatattgcttcagtttttgttgtggtcccagtgcctacaaattaagataattttagctcataatgaacttgatggttattaaatcctctgctcacaggaagattctctagaggaacagagctctttgactggctttgtaggacagatgatctattttattccatgacatctactttaagagggatttcctccttcaatatctacatatgtttcctagccttgatatcatcacagtgaaagctaatcagcaagctgggttttattttttcccctgtctttgtatttgatctaggcttgtgtctgttagatgtctgtttaatatcatgataatcctttgggagagaatatgcttttgcttacattaaataccaaggaataaatgtcaacactgaggaaatatttattatccagggagggaatatatagctctttcagaggacttggagttggaggtagataggtgtcctatgtttcagccttagtactgtcactgagctttttttttttttttgagattttcttacttaaagcatatttacatatgttaaaacattctaatcttttttaataaagcgtatta

SEQ ID NO: 55164 - DNA, 1260 bp, Homo sapiens
gccatgttccttagctttttttaaggttgagttctacttgaagataatcagttttacctggagtgagttgaagatatctccattcttgagaaaagagaaagcaaaagaactgtttgtttgaggcaggtgttggtaaagatcctatgaaatatttttactctcctggggaaaaatagaacaaaaagttaagttgtggcaaaaacgagctagcatgtcttactccagacactaattttcactgttctaacatggaaagatggtaagacccaatctcctacttttttcttatacattgcatcaggacagccagaaaaggagtactggctagtgaaaatacaaatagcatttttgtgatttgatagtatttaggctcttgacaaaattgctcccaaattggtccaatttggaattatatcagggaaggaagtttgttgtacctttttgctatacatttggatgatgaagagagaacatttggtctctagtgtaatcatcctgagatctttcacaaggattatasttattggcgaaaaagagagtcacacaactacttaacaaatgctataggatttggcaagaactagtagtagataggtactgaatctctttaacttcagaacataatatacacagaatttttaaaaagttatttaacatcaacttcatcacttttttccaggaatattgcttcagtttttgttgtggtcccagtgcctacaaattaagataattttagctcataatgaacttgatggttattaaatcctctgctcacaggaagattctctagaggaacagagctctttgactggctttgtaggacagatgatctattttattccatgacatctactttaagagggatttcctccttcaatatctacatatgtttcctagccttgatatcatcacagtgaaagctaatcagcaagctgggttttattttttcccctgtctttgtatttgatctaggcttgtgtctgttagatgtctgtttaatatcatgataatcctttgggagagaatatgcttttgcttacattaaataccaaggaataaatgtcaacactgaggaaatatttattatccagggagggaatatatagctctttcagaggacttggagttggaggtagataggtgtcctatgtttcagccttagtactgtcactgagctttttttttttttttgagattttcttacttaaagcatatttacatatgttaaaacattctaatcttttttaataaagcgtatta

SEQ ID NO: 55165 - DNA, 1260 bp, Homo sapiens
gccatgttccttagctttttttaaggttgagttctacttgaagataatcagttttacctggagtgagttgaagatatctccattcttgagaaaagagaaagcaaaagaactgtttgtttgaggcaggtgttggtaaagatcctatgaaatatttttactctcctggggaaaaatagaacaaaaagttaagttgtggcaaaaacgagctagcatgtcttactccagacactaattttcactgttctaacatggaaagatggtaagacccaatctcctacttttttcttatacattgcatcaggacagccagaaaaggagtactggctagtgaaaatacaaatagcatttttgtgatttgatagtatttaggctcttgacaaaattgctcccaaattggtccaatttggaattatatcagggaaggaagtttgttgtacctttttgctatacatttggatgatgaagagagaacatttggtctctagtgtaatcatcctgagatctttcacaaggattatagttattggcgaaaaagagagtcacacaactacttaacaaatgctataggatttggcaagaactagtagtagataggtactgaatctctttaacttcagaacataatatacacagaatttttaaaaagttatttaacatcaacttcatcacttttttccaggaatattgcttcagtttttgttgtggtcccagtgcctacaaattaagwtaattttagctcataatgaacttgatggttattaaatcctctgctcacaggaagattctctagaggaacagagctctttgactggctttgtaggacagatgatctattttattccatgacatctactttaagagggatttcctccttcaatatctacatatgtttcctagccttgatatcatcacagtgaaagctaatcagcaagctgggttttattttttcccctgtctttgtatttgatctaggcttgtgtctgttagatgtctgtttaatatcatgataatcctttgggagagaatatgcttttgcttacattaaataccaaggaataaatgtcaacactgaggaaatatttattatccagggagggaatatatagctctttcagaggacttggagttggaggtagataggtgtcctatgtttcagccttagtactgtcactgagctttttttttttttttgagattttcttacttaaagcatatttacatatgttaaaacattctaatcttttttaataaagcgtatta

SEQ ID NO: 55166 - DNA, 1260 bp, Homo sapiens
gccatgttccttagctttttttaaggttgagttctacttgaagataatcagttttacctggagtgagttgaagatatctccattcttgagaaaagagaaagcaaaagaactgtttgtttgaggcaggtgttggtaaagatcctatgaaatatttttactctcctggggaaaaatagaacaaaaagttaagttgtggcaaaaacgagctagcatgtcttactccagacactaattttcactgttctaacatggaaagatggtaagacccaatctcctacttttttcttatacattgcatcaggacagccagaaaaggagtactggctagtgaaaatacaaatagcatttttgtgatttgatagtatttaggctcttgacaaaattgctcccaaattggtccaatttggaattatatcagggaaggaagtttgttgtacctttttgctatacatttggatgatgaagagagaacatttggtctctagtgtaatcatcctgagatctttcacaaggattatagttattggcgaaaaagagagtcacacaactacttaacaaatgctataggatttggcaagaactagtagtagataggtactgaatctctttaacttcagaacataatatacacagaatttttaaaaagttatttaacatcaacttcatcacttttttccaggaatattgcttcagtttttgttgtggtcccagtgcctacaaattaagataattttagctcataatgaacttgatggttattaaatcctctgctcacaggargattctctagaggaacagagctctttgactggctttgtaggacagatgatctattttattccatgacatctactttaagagggatttcctccttcaatatctacatatgtttcctagccttgatatcatcacagtgaaagctaatcagcaagctgggttttattttttcccctgtctttgtatttgatctaggcttgtgtctgttagatgtctgtttaatatcatgataatcctttgggagagaatatgcttttgcttacattaaataccaaggaataaatgtcaacactgaggaaatatttattatccagggagggaatatatagctctttcagaggacttggagttggaggtagataggtgtcctatgtttcagccttagtactgtcactgagctttttttttttttttgagattttcttacttaaagcatatttacatatgttaaaacattctaatcttttttaataaagcgtatta

SEQ ID NO: 55167 - DNA, 732 bp, Homo sapiens
tcccaacttgaactaccgtaagcaaagcaggtgaatttatttataaaagtccttgttagcatcatggctttctgcaggttctgcccctgtcactccaagccagaacacgtctgcaagggaaactgaaatttctttcatatttcctaaacaatgccagaaaagcactttacctggctagttccagtttaaaaataaaatccaaagaacacagataggactgagtcatgtgtccatccctgagccaatctcagtggccagggggaccatcgacctggacacagctcagggaatccaccactgcagccaatgtctgggctatgatgactggcagcttccactagaactacatggttagaatgagagaggagaggtatttttgccaacaaagggggagtactgagccaacaaaaagaatagctatctacatcactgagtaataacaagcatgttctttttatattttaacaatctgaaaataggatatgtctcaaaaacatttgttggcccgatgamaatcatgatatagtgtcattatccatatatgcaaaaactgggtgacgtatctgggccaggaaacttttcaacatttcaatcaataagccgtttgagaaccatcttaggaaggtaaatgaatattcatatttcactgaatcctttccattgactcatatggtaagattatgaaaacaatagcattgaaacatgcatctttgatgacagcagcttgaagaa

SEQ ID NO: 55168 - DNA, 2224 bp, Homo sapiens
aaagtttaataagcaagtttttctttcctgtggtacataaaatactcatgcatcataaaactgatagagtctcttagactcaataaaatgcagcaattaatttccatttacaatctattgctttgttgttttttccattgagtttaaaacagaaatatatactctttctccattctgcactttctttcttgctgccccccacctagcatgcattctctaaatcctcctggaagccttccctgatctccctcaggcaaattatatacctcgcctctgtgtgccactgtatgcaggacttatctatgtcataaataagtgttatccatatgtttattgaaataataattgaatactatattaagcatttctgaatgtcatttttctcaaataaattgsagattcagagcaacacagaagattgcaatataaaaaggtttaccaaccattagacaaaaaacagtagtgagaaaagcttttttatagttatcaaatatgtatttctcaaaaccttattatagttctgcctataaccaaaggagatgtctacagtcaattctgtttttatacatatcagctcccactctttcacattatttttaattgtcttcaattttaactacacatacacagcttatataattatctcaaatcttatatgtataaatgtgttcatatcataaaggcttttatttatgctatttgtgcagtttttgtttttcgcttgctctctccctctctcttctctatgctcacaccttattcccttccccaacccgtctaagagacacattataggatccctgcttctccatgttgataaacagacaaataaattttcacccatacacagtaaatatgtatatgtggatttgtttacttcacttattttattaaaatcacatcaaataatgggaacttttctgcatcctacttttctcctcactcaatacctcactgaaattccaaggcaatgagtgcagctctaattcttttttttcaaaatggcatcatattctttgacacatatatgccataatctataactattcaatgatgattgggcatttactttgtttatacttataattccatatctattgtttttctactaacactatggtattttatgccaacgaaaatgtaccttttttttttttttgagataggatctcgctgtcacccaggctagagtgtagtgctgtaatcatggctccctgcagcctcaacctcctgggctcaagtgatcctcccacctcaacctctcaagtagctgggactacagttgtgttccaccacacccaggtactaacttttaaacagtcaaatactcctagcttttaaacttctaggtttccaatcctagatgagaaagaccttccctaatcctacattcatatatatcctgattgccttcaaaaatttttgtttttcttttttacatttatgtatttttatgtatttggaaatattttcacatgtgatataagggtctgatacaatcacatagtctctatagatgaggaaaatattttgaagacgtttaaatcagcagtgttacaaaacagtttaaattgactgattcaagtttccttattaaattttttgcaataaggtaaaaaaatgtgaataggtattatctatccatcgtatttataaactgttggctaattcaccctagcaagcatctctcctcaatttaaaaatctggctaagtcaaggaagcatgttctcattaattaaaagtcataaggcctaggcaagactatactgatataataattacaatatttgactgcaattcaatacacatacataaaacaactataatgagtaaaaaagttttaggttaaattcaaactgttttcaggagatagtgcctaactgtgctacatgacattctccatacaagtcttccaatgtaactgttactgttacatgaaggacagacaatccaattctttggctaaaaatggatgtttgtaatcaaattttccacggttattaggactcgagactgttctaacactcaaatgtggcagataagtccaaggtagtaggttgcttctaatattctctatattacaatctttttcattacatttctgcctctgctcataaagtagaattcttaatcctagtggcatactttacttcaacattgtgaaatattttaagtataacctggctgggtttttggcttccaggttcttctacttttccagaa

SEQ ID NO: 55169 - DNA, 2224 bp, Homo sapiens
aaagtttaataagcaagtttttctttcctgtggtacataaaatactcatgcatcataaaactgatagagtctcttagactcaataaaatgcagcaattaatttccatttacaatctattgctttgttgttttttccattgagtttaaaacagaaatatatactctttctccattctgcactttctttcttgctgccccccacctagcatgcattctctaaatcctcctggaagccttccctgatctccctcaggcaaattatatacctcgcctctgtgtgccactgtatgcaggacttatctatgtcataaataagtgttatccatatgtttattgaaataataattgaatactatattaagcatttctgaatgtcatttttctcaaataaattggagattcagagcaacacagaagattgcaatataaaaaggtttaccaaccattagwcaaaaaacagtagtgagaaaagcttttttatagttatcaaatatgtatttctcaaaaccttattatagttctgcctataaccaaaggagatgtctacagtcaattctgtttttatacatatcagctcccactctttcacattatttttaattgtcttcaattttaactacacatacacagcttatataattatctcaaatcttatatgtataaatgtgttcatatcataaaggcttttatttatgctatttgtgcagtttttgtttttcgcttgctctctccctctctcttctctatgctcacaccttattcccttccccaacccgtctaagagacacattataggatccctgcttctccatgttgataaacagacaaataaattttcacccatacacagtaaatatgtatatgtggatttgtttacttcacttattttattaaaatcacatcaaataatgggaacttttctgcatcctacttttctcctcactcaatacctcactgaaattccaaggcaatgagtgcagctctaattcttttttttcaaaatggcatcatattctttgacacatatatgccataatctataactattcaatgatgattgggcatttactttgtttatacttataattccatatctattgtttttctactaacactatggtattttatgccaacgaaaatgtaccttttttttttttttgagataggatctcgctgtcacccaggctagagtgtagtgctgtaatcatggctccctgcagcctcaacctcctgggctcaagtgatcctcccacctcaacctctcaagtagctgggactacagttgtgttccaccacacccaggtactaacttttaaacagtcaaatactcctagcttttaaacttctaggtttccaatcctagatgagaaagaccttccctaatcctacattcatatatatcctgattgccttcaaaaatttttgtttttcttttttacatttatgtatttttatgtatttggaaatattttcacatgtgatataagggtctgatacaatcacatagtctctatagatgaggaaaatattttgaagacgtttaaatcagcagtgttacaaaacagtttaaattgactgattcaagtttccttattaaattttttgcaataaggtaaaaaaatgtgaataggtattatctatccatcgtatttataaactgttggctaattcaccctagcaagcatctctcctcaatttaaaaatctggctaagtcaaggaagcatgttctcattaattaaaagtcataaggcctaggcaagactatactgatataataattacaatatttgactgcaattcaatacacatacataaaacaactataatgagtaaaaaagttttaggttaaattcaaactgttttcaggagatagtgcctaactgtgctacatgacattctccatacaagtcttccaatgtaactgttactgttacatgaaggacagacaatccaattctttggctaaaaatggatgtttgtaatcaaattttccacggttattaggactcgagactgttctaacactcaaatgtggcagataagtccaaggtagtaggttgcttctaatattctctatattacaatctttttcattacatttctgcctctgctcataaagtagaattcttaatcctagtggcatactttacttcaacattgtgaaatattttaagtataacctggctgggtttttggcttccaggttcttctacttttccagaa

SEQ ID NO: 55170 - DNA, 2224 bp, Homo sapiens
aaagtttaataagcaagtttttctttcctgtggtacataaaatactcatgcatcataaaactgatagagtctcttagactcaataaaatgcagcaattaatttccatttacaatctattgctttgttgttttttccattgagtttaaaacagaaatatatactctttctccattctgcactttctttcttgctgccccccacctagcatgcattctctaaatcctcctggaagccttccctgatctccctcaggcaaattatatacctcgcctctgtgtgccactgtatgcaggacttatctatgtcataaataagtgttatccatatgtttattgaaataataattgaatactatattaagcatttctgaatgtcatttttctcaaataaattggagattcagagcaacacagaagattgcaatataaaaaggtttaccaaccattagacaaaaaacagtagtgagaaaagcttttttatagttatcaaatatgtatttctcaaaaccttattatagttctgcctataaccaaaggagatgtctacagtcaattctgtttttatacatatcagctcccactctttcacattatttttaattgtcttcaattttaactacacatacwcagcttatataattatctcaaatcttatatgtataaatgtgttcatatcataaaggcttttatttatgctatttgtgcagtttttgtttttcgcttgctctctccctctctcttctctatgctcacaccttattcccttccccaacccgtctaagagacacattataggatccctgcttctccatgttgataaacagacaaataaattttcacccatacacagtaaatatgtatatgtggatttgtttacttcacttattttattaaaatcacatcaaataatgggaacttttctgcatcctacttttctcctcactcaatacctcactgaaattccaaggcaatgagtgcagctctaattcttttttttcaaaatggcatcatattctttgacacatatatgccataatctataactattcaatgatgattgggcatttactttgtttatacttataattccatatctattgtttttctactaacactatggtattttatgccaacgaaaatgtaccttttttttttttttgagataggatctcgctgtcacccaggctagagtgtagtgctgtaatcatggctccctgcagcctcaacctcctgggctcaagtgatcctcccacctcaacctctcaagtagctgggactacagttgtgttccaccacacccaggtactaacttttaaacagtcaaatactcctagcttttaaacttctaggtttccaatcctagatgagaaagaccttccctaatcctacattcatatatatcctgattgccttcaaaaatttttgtttttcttttttacatttatgtatttttatgtatttggaaatattttcacatgtgatataagggtctgatacaatcacatagtctctatagatgaggaaaatattttgaagacgtttaaatcagcagtgttacaaaacagtttaaattgactgattcaagtttccttattaaattttttgcaataaggtaaaaaaatgtgaataggtattatctatccatcgtatttataaactgttggctaattcaccctagcaagcatctctcctcaatttaaaaatctggctaagtcaaggaagcatgttctcattaattaaaagtcataaggcctaggcaagactatactgatataataattacaatatttgactgcaattcaatacacatacataaaacaactataatgagtaaaaaagttttaggttaaattcaaactgttttcaggagatagtgcctaactgtgctacatgacattctccatacaagtcttccaatgtaactgttactgttacatgaaggacagacaatccaattctttggctaaaaatggatgtttgtaatcaaattttccacggttattaggactcgagactgttctaacactcaaatgtggcagataagtccaaggtagtaggttgcttctaatattctctatattacaatctttttcattacatttctgcctctgctcataaagtagaattcttaatcctagtggcatactttacttcaacattgtgaaatattttaagtataacctggctgggtttttggcttccaggttcttctacttttccagaa

SEQ ID NO: 55171 - DNA, 521 bp, Homo sapiens
aaaaagacaaatctctacaaatgaaccttatacttatttccagtcactttaaaattcagtgaaatactagaggccttttaggaatcttaaatatgcttcccagaaaggtttcactttcttaacttttctaaatatagagaagctcccccagattgttatttccttggcttattacagttactatagagaaatattacagattaataaagtaaatcctggagtgtagaaggatttatacaaattagattgcacatgagaaataaatttgaaaatgtttttgtgataaagatactaaagctgtgaacgctcctataaatctaacatttacattttataatgattatgggacctcacttcaataagtctcatgcttacagaattctaacactccaagttctttttcaaattactcacagtcatttctgccaaygttaccatggactcatttcaaaattctaggtatttattgctctaaagtgtgtcataaaatgttaaatcaacctgctagcctgaggtctaca

SEQ ID NO: 55172 - DNA, 1065 bp, Homo sapiens
gcccaaaatgcaaatttgcaaattgcatccaggaactcatcaaatctgctagatgaattatgtaattcaatttggcaaaatttttgcacacagcacaaatagtttactttggttttcttggattctgttctgagaaggaggtagctggaaaaaaagtgaaaaattacaggatatgattcataaaaatcccacatcttttttgtgtgcttgtacattcttttttgcgggaaaatgtttttgtcccacagtaatggctcctcatccttctcaatgagtactttttagtcagaaagatagccacacacaatatttccaagatactcaaaaaaaagtagtcataaggagaagacgcatgtcatttagcagctaaaagaaacatgtagcatgttcattaaatctctttttcaccagaaaggaatgtgaagactgaactttaacatggccacagtaygtacaaagaaatgaaacctcagctatgtatgttcctgccaagcattagctcaaatctttcactcttcaacatgtaacgagtatctgttttcctgtcatgttttgacagtgaagaaaatgaacctcatttctaaggttcagacaagtggcactcactactattcccttctctttttatttgatgcgaacaataagattaaacacataccaccaaagaaaggactaccagcacccattgtcagagacagttttcagtgggtgcattaaacatcaaatctctgcagatgatctatgtgtttctaatttgtaatttctctccggaagcagcctgcaaactttttaatcattttcagtttgtcaaaaactgttaaggcactggctgcccattatccacaatgaggagctctttcaagtaatggaatgactagcagtttcagaagctaaagtgtcaattttatacatatgaagaattcgcaaaataacagagctaaagagaaccctagagatgtcctttcatggctggagactgaggccacttccaattctcatcaatgtgaaagaccaggtaaactgcaacacccctgccataaggttcaagagatgctgagtggaata

SEQ ID NO: 55173 - DNA, 934 bp, Homo sapiens
tgcataatcaaagctgatttttcagctctctctgatgtttatttgtgttattcagttatccataaatagaatttctttcctaggaagtataaacaaatgtcaaggggaaaaacattttcgatccaagcaatcactggaaatgttcctgtttatattaaaacatgtcagaatattttataactctagattccaaaatgtacatgtttggtgtctagtacagttcaataatttattgaaaaaattaactatgatattttattttaggagcaactgcagtgatttcctatggaaccagtttgctaatgagagcaaaggacccagctagcttctggaggagactcactagggctctggtttttgcttctgttctttcataactggattggctgcctgccggaggcatttcaaatcaaattctgaatttgattagcaaattgttgctacagacccaatatttttacaagaaatgcactatggtagtgtgtaaatagtttttattcggcatcatctgcagggtattctgygcaggcaaaaccaaaactaattgcttgaaaatttatacttgagatttaaccttaatttagtaaccctttcagggtgctttaaggcaaacttttagaatgacttttaatttactcaaaagaataaattgtaggaggaatccaaatacatgaggtagttggattgtcatgggaagattactgggatatgagatgccgggtgaattgagtttgcgtctgagctctgccatttgttaattttgcaactgctgatttaaatacgcttttgtgaagctctggtttcaggtgtaaaccatgaacaaaatgatgttccttataaaattagcaaaggttaaaaaataaaggaggtaaaattgacctgtaaataataaacactatgagacattacttaatactttagatttgtccctttg

SEQ ID NO: 55174 - DNA, 659 bp, Homo sapiens
aggctggttttggaagcttgtggatttctttctgggtgagtcaggaaagttgtgctcctgctgggcgcagtggctcatgcctgtaatcccagcactttgggaggctgaggcaggcggatcacaaggtcaggagatcgagaccatcctggctaacgtggtgaaaccccatctctactaaaaatacaaaaaattagccgagcgtggtggtgggcacctgtggtcccagctactcgggaggctgaggcaggagaatggtgtgaacccgggaggcggagtttgcagtgagccgagatcgtgccactgcactccagcctgggcgacagagtgagactccgtctcaaaaaaaaaaaaaaaaaraaaaagaaagttgtgatccaagggaaagcatacaggttttaatgatgaactagtttgttcctttgtctcctggctttcattcttcatggcatgtgctcagggcagccagtggagagaggcatcattctgcatggtatagaagccttgggtgggtgtttcatcatctgtaaaatgaggacaacaatactgaactttcaaggccattgtaaattagaatgtacagtacaagcattgtaagttagaagtcaattagaacatgcaggagggattataactcagtgtttagcgtatagcagacactt

SEQ ID NO: 55175 - DNA, 659 bp, Homo sapiens
aggctggttttggaagcttgtggatttctttctgggtgagtcaggaaagttgtgctcctgctgggcgcagtggctcatgcctgtaatcccagcactttgggaggctgaggcaggcggatcacaaggtcaggagatcgagaccatcctggctaacgtggtgaaaccccatctctactaaaaatacaaaaaattagccgagcgtggtggtgggcacctgtggtcccagctactcgggaggctgaggcaggagaatggtgtgaacccgggaggcggagtttgcagtgagccgagatcgtgccactgcactccagcctgggcgacagagtgagactccgtctcaaaaaaaaaaaaaaaaaaaaaaagaaagttgtgatccaagggaaagcatacaggttttaatgatgaactagtttgttcctttgtctcctggctttcattcttcatggcatgtgctcagggcagccagtggagagaggcatcattctgcatggtatagaagccttgggtgggtgtttcatcatctgtaaaatgaggacaacaatactgaactttcaaggccattgtaaattagaatgtacagtacaagcattgtaagttagawgtcaattagaacatgcaggagggattataactcagtgtttagcgtatagcagacactt

SEQ ID NO: 55176 - DNA, 775 bp, Homo sapiens
  misc_feature (1)...(775): n = A,T,C or G
tnnnnnnnnnnnnnnnnnnnnnnnnnnnnnnnnnnnnnnnnnnnnnnnnnnnnnnnnnnnnnnnnnnnnnnnnnnnnnnnnnnnnnnnnnnnnnnnnnnnnagtattttcttcacggaacactatttttacttgaaagaaaactgacaagctatggttacccagacttggtatctggcagacattttcttaaaatgaaggaagtgagtctgtcattttaagagaataaaggggtcctgagaccaagacatctgcgartagctgatttaaagaaattctgttcaactctttttggtccaatttgaattatggtctacaagtaaaaggaaataaaactgaaattcttttaagatgtcattttcattgattctcactcttaatctccaaataagtgaaatactattacatgccatttcctaacactcacacatggaagtttttgatcacttaaaagtataaggtaattcataagattctttactagattctcacttaccttcatctcaataacagtttgcagagcttttgttttggcagaatcaggagcattctcaaaccttcgatgcatctcctgtagaaaagaggcagaaagagattcagtgctctcctgttcaccctcatttttttcaaagaggagtgagagccgatgtatgcaaaagatcactacagccttatgagacaatgaccccttctgtgttaccaacctttccctgtgaatcagggaatccacagactgcattcaggctcactcaaccatgcaggcataggaggatccc

SEQ ID NO: 55177 - DNA, 1274 bp, Homo sapiens
tgcatggtggattgcctctccttttcctccctggccgactgccctccctctgccacttcttcagtcctctcccacctcatcccccgagaccgggctagagcccatcctcctacttctgtggcatctggggctcacctctagcaaacactgtggttgatctacttctctgtcccacccactcaaccatgaactctctgaggacagggaccgtgttttgtgatacttgcatcccttgaactagattgtgggaaggagggacctgggcgatatttaatagctggtgaaacctgtgtaccggccaatcagaactgataccagcctagggtctggaacagggtcttggaaaccccctgccagagtcaagccagtagtcgctgtgtcaygaggagctgtggttggcatcctctaagttgggccctaatgatccctgcttcctagttccacaccctgcatacttccctccccttgagcatggatagcatttgactctctcctaataaatagagtatggctgatgtgacagcacatccactccacattaggctatcgaaaggctgcgattccttccttaggtgctttccctagaatcttgaggcatccctgttgagggacccgtgtgacgagggacaagccctgccaccaaccaagtgatctcagaagccgaacgccacctaggcaagccttgacatgatgcaggtccagctgctggcttgctggtagcctcatggaaacctcaaggaggaggcacccggctaagccatgtccagattctggacccacagatgaagatgtatcctctggggaggggagtggtgaaaactgacctgctgatgagacttcgccctgtcagttaacattgctaatggtaagaacccagttgcaagacatacaggttgtgaatcttttctatactttattttttttatgttttctttttctgagacagagtctcgctctgttgcccaggctggagtgcaatgacgtgatctcagctcagtgcaacctctgtacccaggttaaggtgaatctcctgcctcagcctcccgagtagctgggactacaggtgtgcaccaccatgcctggctgatttttgtagttctagtggacacgggggttacaccgtgttggccaggttggtctcaaactcctgaccttgagtgatcggccagcctcagcctcccaaagtgctgggattacaggcgtgaggcaccatacccggcccttttctgtactttatgaaatgacagcacgttgatggtcaatgacgacatgca

SEQ ID NO: 55178 - DNA, 3944 bp, Homo sapiens
tatggcattgggataaacactggggattcttcatggtagagacctcaccatctgtgcttctgaggcactggggccaagaaagcatcttgcacaaaatcaaaagtcagcaaatgttgacctgaactgaattccctgctctcagagatcttataacattgtcatagaacaacaacaacaacaacaacaacaacaaaatttcacccagaaacactgcaatttatggcaaatcatttagtcccagttgaaaacagctgtgtggtatggtactttgggcattaaaaaatttacacctgtcttagtccattttgtgttgctataccagaataccatagactgggtaatttataaagaagaagaatgtatttctcacagttctggaagctgggagttcaatattaaggtgttggcatcttgtgagggctttcctgatgctttctcccatggtggaagacggaaggggaaagggcaagagagcaacagagcgagcaaatggagctgaactcatttttataccaaagccactctggtgataactaacccactcctgagataacaacattaatccactcatgagggcagaactcttatgacctaatcacctcttattaggccccacctcccaacactgctgcattgggaattaagttgctgacacatgatctttgaggggtgcattcataccatagcaacatctaatcttagatccatcactaactggctatgtgatattgggtaagtctcttcttataatttggtctcagtttcctcatcttcaaatgatgagggcctagccatatgacctagattttcttgctgtggtcaaacaagaacatgaatgtgtttgtagttcacagatagcaaaggggtccttgctgacacttctgcttggggacttgaattgaagctcaaagctgcagggtgacgttggcctgagtcagcttccttccacaggaaacttgcaggtggtcagctgcagctcagcccgggcatgagatccactgggaggaaggggatcccctggcccactcacttctccgatgcatattcatgaggacagccagtcacccgaatgatgaggatgtgtttgtggaatctgtttggtcctttctaaagctctaatcccttcaggattcaaggtggcacaggagcagtagtgttgatgatgacaatctggaaatagcagccattacttcttgagcacctcctgtgtggcgcgtggcactttataaacctggtgggtgccagcaaaagctgactacgcatctcagactcatcacaatcaaaaccgagctcctggttgttcctctcaatctgctccacctgcagtcttctcatctctttttgggaaaactacctgctttgggttgctcaggccaatcattttgttttttgttttctttttttttttttttgagatggagttccctctgtcacccaggctggagtgcagtggtgtgaacttggctcactgcaacctctgcccccacgttaaagcaattctcctccctcagcctcctgagtagctgggattacaggcgcctgccacaaagcccggctaatttttgtatttttagtagagatggggtttcaccatgttggccaggctagtctcgaactcctgacctcaggtgatccacctgcctcggcctcccaaaatgctgggattacaggcgtgagccaccatgctcggccaggccagtcattttggagcttgcattttctctgtcacacgacacatctcatccatcaagaaatcccatcacaactgatgtgacaccatgggctgtgactgcactgctcttccaaatgcctaagtcggcctctcataacaatagtgatgtatttgctaccctttgttttttaacaaatcaaagaaaaggcattttagtggttcactaattcaattgactaaacaaagccacacgaccatggcttcaggccacatcacgctcagctctgcaattttctagtcggtgaactcgggccaaagcccccttcataagttcactgtggttgccttaccccatccaccccaactggccttgacctaaggatgtccccaaatgcttccacttttgctttgcttctgtctgcaaatctcccctcctccaccttccacaagagcttggggaggcttggcattgcgtggtctcttaggatgaaattcctcaaactcagtctccacaatatctgtgggcagtgtctcttcatttcctcaaggatcagagagcggggattaaatctcatggtgtcagggctggaggatagctgactctcaacccaaatcccttctgccagcactaaccaactccataaggaaaaagcccacttattacattgcattgggaattaagctgctgacgcatgatctttgagggacacgttcacaccatgataccttggaatatctagagtatgtgtatatttctgtgtgtgtatgttggagggggtggtgtcaaggaaaacagcattcaaggagatggctgtgtatgctcctatttgaaattttcctaagcatccgtggggacagggcattgggataaacactggggatccttcatggtagagaccacatcatctgtggtgtgtgtcgggactcaccataattcttaggtcacccatgaragatgctgccactgaagggggaggggtatttgaattggatacacaggttgtagatttaaaggcaatgcttgctatgttttcaaaacggaattttaaaatgaagtttgaaaagtcctgttgattttcaattagaaaaatttcatcttgggctgggcgcggtggctcatgcctgtaatcccagcattttggaaggctgaggcgggcggatcacgaggtcaggagttcgagaccatcctggccaacatggtgaaaccctgtgtctactaaaaatacaaaaatcagctgggcgtggtggcgggcacctgtaataccagctactcgggaggctgaggcaggagaatcatttgaaccctggaggtggagattgcagtgagctgagatcacaccattgcactccagcctgggcgacaggatgagactccatttcaaaataaataaataaataaataaaatttcatgttaacctctggtcccttttggtcattatgaagacacagtgaatggtataacaggatctttatttaaatggatttggttgtacaatgctccctgggatctggaagcgaaggaggatggatcgtaaagtacttttcatttgaaaaaatgatgtgctctggagtggaagtgaggacaagctggggttgggggtggaaactttgaaggggtaggaggcagaggactgattctaggagtcaattttagggattttgataaaaggtgtatttgcctgccagccccaaatgtctgctcatcttgggactctgaagaaagattttttctgggctagggtgatgtgtcaccttggaggggaagaggcagtgctaggcttagtacaatgaggggtagggtaggtgtaatatccctattctgcaggcggagagactaaactcagtgtgaccaagttgcctcccaaggttgcagagttagtcaatggcagaaccagacctaaaggcagctcaggcttgagtcaggtctgagccatgctctaccctggtcaggtgcgtgctggttccttaggtttcttaggagcagattcttatcacccacagtcccctggccaggaatgggccagtcccaggctgagccgtaagtgaagagagtgatgaggaagagtctgggttgtgggatggtggtgttgggcaggggacgtctcagtaggagggccctggattgagtgccttcctgtgtattcctaagaacctggtgttgagaccccgggcttggcggggtggggcagggcaccaaagcagagaagcacactggaaaagtaaacggcgtcctcctcctcattgccatcgctcctgtcgccgtgtgtgggg

SEQ ID NO: 55179 - DNA, 3944 bp, Homo sapiens
tatggcattgggataaacactggggattcttcatggtagagacctcaccatctgtgcttctgaggcactggggccaagaaagcatcttgcacaaaatcaaaagtcagcaaatgttgacctgaactgaattccctgctctcagagatcttataacattgtcatagaacaacaacaacaacaacaacaacaacaaaatttcacccagaaacactgcaatttatggcaaatcatttagtcccagttgaaaacagctgtgtggtatggtactttgggcattaaaaaatttacacctgtcttagtccattttgtgttgctataccagaataccatagactgggtaatttataaagaagaagaatgtatttctcacagttctggaagctgggagttcaatattaaggtgttggcatcttgtgagggctttcctgatgctttctcccatggtggaagacggaaggggaaagggcaagagagcaacagagcgagcaaatggagctgaactcatttttataccaaagccactctggtgataactaacccactcctgagataacaacattaatccactcatgagggcagaactcttatgacctaatcacctcttattaggccccacctcccaacactgctgcattgggaattaagttgctgacacatgatctttgaggggtgcattcataccatagcaacatctaatcttagatccatcactaactggctatgtgatattgggtaagtctcttcttataatttggtctcagtttcctcatcttcaaatgatgagggcctagccatatgacctagattttcttgctgtggtcaaacaagaacatgaatgtgtttgtagttcacagatagcaaaggggtccttgctgacacttctgcttggggacttgaattgaagctcaaagctgcagggtgacgttggcctgagtcagcttccttccacaggaaacttgcaggtggtcagctgcagctcagcccgggcatgagatccactgggaggaaggggatcccctggcccactcacttctccgatgcatattcatgaggacagccagtcacccgaatgatgaggatgtgtttgtggaatctgtttggtcctttctaaagctctaatcccttcaggattcaaggtggcacaggagcagtagtgttgatgatgacaatctggaaatagcagccattacttcttgagcacctcctgtgtggcgcgtggcactttataaacctggtgggtgccagcaaaagctgactacgcatctcagactcatcacaatcaaaaccgagctcctggttgttcctctcaatctgctccacctgcagtcttctcatctctttttgggaaaactacctgctttgggttgctcaggccaatcattttgttttttgttttctttttttttttttttgagatggagttccctctgtcacccaggctggagtgcagtggtgtgaacttggctcactgcaacctctgcccccacgttaaagcaattctcctccctcagcctcctgagtagctgggattacaggcgcctgccacaaagcccggctaatttttgtatttttagtagagatggggtttcaccatgttggccaggctagtctcgaactcctgacctcaggtgatccacctgcctcggcctcccaaaatgctgggattacaggcgtgagccaccatgctcggccaggccagtcattttggagcttgcattttctctgtcacacgacacatctcatccatcaagaaatcccatcacaactgatgtgacaccatgggctgtgactgcactgctcttccaaatgcctaagtcggcctctcataacaatagtgatgtatttgctaccctttgttttttaacaaatcaaagaaaaggcattttagtggttcactaattcaattgactaaacaaagccacacgaccatggcttcaggccacatcacgctcagctctgcaattttctagtcggtgaactcgggccaaagcccccttcataagttcactgtggttgccttaccccatccaccccaactggccttgacctaaggatgtccccaaatgcttccacttttgctttgcttctgtctgcaaatctcccctcctccaccttccacaagagcttggggaggcttggcattgcgtggtctcttaggatgaaattcctcaaactcagtctccacaatatctgtgggcagtgtctcttcatttcctcaaggatcagagagcggggattaaatctcatggtgtcagggctggaggatagctgactctcaacccaaatcccttctgccagcactaaccaactccataaggaaaaagcccacttattacattgcattgggaattaagctgctgacgcatgatctttgagggacacgttcacaccatgataccttggaatatctagagtatgtgtatatttctgtgtgtgtatgttggagggggtggtgtcaaggaaaacagcattcaaggagatggctgtgtatgctcctatttgaaattttcctaagcatccgtggggacagggcattgggataaacactggggatccttcatggtagagaccacatcatctgtggtgtgtgtcgggactcaccataattcttaggtcacccatgagagatgctgccactgaagggggaggggtatttgaattggatacacaggttgtagatttaaaggcaatgcttgctatgttttcaaaacggaattttaaaatgaagtttgaaaagtcctgttgattttcaattagaaaaatttcatcttgggctgggcgcggtggctcatgcctgtaatcccagcattttggaaggctgaggcgggcggatcacgaggtcaggagttcgagaccatcctggccaacatggtgaaaccctgtgtctactaaaaatacaaaaatyagctgggcgtggtggcgggcacctgtaataccagctactcgggaggctgaggcaggagaatcatttgaaccctggaggtggagattgcagtgagctgagatcacaccattgcactccagcctgggcgacaggatgagactccatttcaaaataaataaataaataaataaaatttcatgttaacctctggtcccttttggtcattatgaagacacagtgaatggtataacaggatctttatttaaatggatttggttgtacaatgctccctgggatctggaagcgaaggaggatggatcgtaaagtacttttcatttgaaaaaatgatgtgctctggagtggaagtgaggacaagctggggttgggggtggaaactttgaaggggtaggaggcagaggactgattctaggagtcaattttagggattttgataaaaggtgtatttgcctgccagccccaaatgtctgctcatcttgggactctgaagaaagattttttctgggctagggtgatgtgtcaccttggaggggaagaggcagtgctaggcttagtacaatgaggggtagggtaggtgtaatatccctattctgcaggcggagagactaaactcagtgtgaccaagttgcctcccaaggttgcagagttagtcaatggcagaaccagacctaaaggcagctcaggcttgagtcaggtctgagccatgctctaccctggtcaggtgcgtgctggttccttaggtttcttaggagcagattcttatcacccacagtcccctggccaggaatgggccagtcccaggctgagccgtaagtgaagagagtgatgaggaagagtctgggttgtgggatggtggtgttgggcaggggacgtctcagtaggagggccctggattgagtgccttcctgtgtattcctaagaacctggtgttgagaccccgggcttggcggggtggggcagggcaccaaagcagagaagcacactggaaaagtaaacggcgtcctcctcctcattgccatcgctcctgtcgccgtgtgtgggg

SEQ ID NO: 55180 - DNA, 1634 bp, Homo sapiens
gacttgcaaattctcccctctggaaggatgcccccagtagggagaactctggagcaagggtcctgtccttcctggactcctatagaacagggctggctgggcagttaggttactctgggaggatagttcttttcccataccttagaaatgaatttttgttatacaagaattgagacgacaagcctaaggaatcatttaaagaggaaaccacaccccccatttgtatagtaacttagttttaccagatacttcttccatatacgttatctctgattctccatcctggccgcacattacaatcatctggggagcgctcagacaccaggaacctcaccagaacaatacagttgaaatcacggggtggggtcagttgggtggggcccacttctttcccccttgattttaatgtgtagtcaggggtgagaatccctaagaaatataacttccttctcgtcactgggctgcagaaaccttaaggtgcaccttctcctatacaataaatgagtttcaggaaaattaagtagcaatttttttatctccttgcaggtgaagggccttcactaaaaccaaaaataaatcttgggctagcaatctgccttacaaaaacaagtcagttactagtggtttcatttgtaaaaaggaattattcgagcccttggaatattcctatttttaaaatgtgattaatgtgttgatcctggtctggggtttcccatgaatgacgagcacttattccttggtgagcaaatgtcccaasggtgcagcgcgtggccaggattggaggtcgtccaggcagcccctgcctcagggcgttttttggcaaggaagggaaccccaccatgcccggcgctgcgccgcggctgtagccctgggcccatctgtccctcgccggcaacgttagtcagcacattcctggggctcccgctgctctcggcgccacctgccgggggacgccggaagctcaggaggctgtggctgtcgtggggcaccacgggttctgacgctactggaggggtgtccatggcaaccgatgccgcgtgaggatttccgctgtttgctgccagccaatagcagtgggtgtgacggaggcagccttcggcatctgagccctcagcatccattagacgggctcgggtcccgtcgctgccgcagtgggcggggctgacgcggtggctgagctgtctggagcggtttctctagggaaggcaggcgggccggcgggcggggcgcacttgcggtgtcggcacaggtgactaattgctcggtagacctgaagccaaagaagaagtgctggtcgcagcagtggcctgagcactttgcaagtgggatccacctgttcctttttctggccgcacttcggttagtgcggtcggtgttgtgaagctcgagctaggcggcctctgcaggcggatcctctagctgcccttgagccctgcacattagtcgctggccctgtacaaggagcatgcttttgttagctttgctgttttgagtgcttaagggagcgattaatgaaggcaagggctaaataatacacgtttctgcagttgggcaaccagggctgcctctgcagaggtccttccacctttattcccgttcccctgccctcgaaaaaaattaattttcttttgcat

SEQ ID NO: 55181 - DNA, 592 bp, Homo sapiens
tttttgatgcccattaaatattatttaaataataatattaagtggtatatataggtggtgtcctaattgggaaataatcaagaatgatgtctttgtgccaggcacagtggctcrcttctgtaattccagtgtttgggaagccaaggcaggaggattgcttgagaccaggcgttcaagaccaaccggtcaatacaaaaaataaaaaattagctggggttggtggtgcgcacctgtagtcctagctactcggaatgctgaggtggagaaacgcttgagcccagtagttcaaggttacagtgagctatgattgtgccactgcactccattctgggcaacagagtgagaccctgtcttgacctgatactcacttttgtcacattgtctttccttatagaaggcgaaaggccgttgagataagctgagagtcttcaggttatctttctctgtgtgtcccctacccgacctggcactaactgggtgtgttagtcactggtgaacccctggctgaggtattactctttctctagtctcctcccagtgcccctccaccccctaccccaatacctggcaacaataagatgggaaagtggat

SEQ ID NO: 55182 - DNA, 592 bp, Homo sapiens
tttttgatgcccattaaatattatttaaataataatattaagtggtatatataggtggtgtcctaattgggaaataatcaagaatgatgtctttgtgccaggcacagtggctcacttctgtaattccagtgtttgggaagccaaggcaggaggattgcttgagaccaggcgttcaagaccarccggtcaatacaaaaaataaaaaattagctggggttggtggtgcgcacctgtagtcctagctactcggaatgctgaggtggagaaacgcttgagcccagtagttcaaggttacagtgagctatgattgtgccactgcactccattctgggcaacagagtgagaccctgtcttgacctgatactcacttttgtcacattgtctttccttatagaaggcgaaaggccgttgagataagctgagagtcttcaggttatctttctctgtgtgtcccctacccgacctggcactaactgggtgtgttagtcactggtgaacccctggctgaggtattactctttctctagtctcctcccagtgcccctccaccccctaccccaatacctggcaacaataagatgggaaagtggat

SEQ ID NO: 55183 - DNA, 1037 bp, Homo sapiens
tgtgtgcacgagaaacggccagttgccagtagtgtgcaaactcgtggcttaaacaggtcccaagagcctttcatccattgatttgtccttccgtacctctcttttgggatgcgtgcatgtctagggggtcacttttccattcccctgaccccagcaccccaccctcagtctctctccagcgtcggctgagctcctactgccatcttgtggccgttcacgtaaggtgcaccagagaggcggagcccctgctgtccttgtcctaggacttgatttgcagagatttgggaggcttcctgactctggggtgctcatttccttcacaaacagaaaaagaaaagtcactcctgggcacattgctgtcatgtgtgaggctggaagcactccctacgatgggattctctcaactgtccctatttgcatctctagtcctcacgtagtgcaattcactgtgtgagtgtgtgtgtgtgagagagtgggtgtgagtttgcgtgagtgtgagagtgtgcgtgtgtgtgtgagagtatgtgtgtgtgtgagagtgagtgtgcgtgcgtgtgtgtgtgtgtgtgtgtgtctgtgattattggtaargggaaggtacaagaagcagggtaggcactgatgctagtactatacttcaaagtcctcaaggaagaagtctcgttttgagccaaggatttgggtgtttctagagagagggaaaacgtgagctccagagctcatgaaaagctccatcacaacaaaggattgtcttgtctttttagccacatcctcccattcacattgcagcatattgagatcttggcactgtctccactctttctttggcatatggctttcaatttgagctccctgaggtgaagaaccattcaagtccacaacctgcatctcacacagggctgagcctagggaaggtattaaatgtttcttgaatgagagaaccttatcttcattcagatgctctgtggtcagcatatcctgtcgattcttcttccagaaatcattttcctatccctagccccctctctttattccca

SEQ ID NO: 55184 - DNA, 1037 bp, Homo sapiens
tgtgtgcacgagaaacggccagttgccagtagtgtgcaaactcgtggcttaaacaggtcccaagagcctttcatccattgatttgtccttccgtacctctcttttgggatgcgtgcatgtctagggggtcacttttccattcccctgaccccagcaccccaccctcagtctctctccagcgtcggctgagctcctactgccatcttgtggccgttcacgtaaggtgcaccagagaggcggagcccctgctgtccttgtcctaggacttgatttgcagagatttgggaggcttcctgactctggggtgctcatttccttcacaaacagaaaaagaaaagtcactcctgggcacattgctgtcatgtgtgaggctggaagcactccctacgatgggattctctcaactgtccctatttgcatctctagtcctcacgtagtgcaattcactgtgtgagtgtgtgtgtgtgagagagtgggtgtgagtttgcgtgagtgtgagagtgtgcgtgtgtgtgtgagagtatgtgtgtgtgtgagagtgagtgtgcgtgcgtgtgtgtgtgtgtgtgtgtgtctgtgattattggtaaggggaaggtacaagaagcagggtaggcactgatgctagtactatacttcaaagtcctcaaggaagaagtctcgttttgagccaaggatttgggtgtttctagagagagggaaaacgtgagctccagagctcatgaaaagctccatcacaacaaaggattgtcttgtctttttagccacatcctcccattcacattgcagcatattgagatcttggcactgtctccactctttctttggcatatggcttycaatttgagctccctgaggtgaagaaccattcaagtccacaacctgcatctcacacagggctgagcctagggaaggtattaaatgtttcttgaatgagagaaccttatcttcattcagatgctctgtggtcagcatatcctgtcgattcttcttccagaaatcattttcctatccctagccccctctctttattccca

SEQ ID NO: 55185 - DNA, 955 bp, Homo sapiens
tgaacttacgagctcccagttctgaattcttaattgaggaagcccatgaccacattcttagtattttgaatgcttagctacatcactagtgatatttaatgacatgcaamtttgtattagggttctccagagaaacagaagcaataggatggatgtgtgcgtgtgtgtgtgtgcatatgcacgtgtgtgtgggtacacgtgtgtgtgtgtgtgtgtgtgtgtgtgtgtgtgtgtgtgtgtaaagagatttattctaaaggaatcgcctcacccaattgtggaagcctgatacatccaaaatctgacacgggaggctaactggccagagatgtaggaaagggtttcagttcaagtccaaagacagtctgctagtgaaccaggaagagctgatgtttcagaagaaatttgaaggcagttggctggcagaattccctcttgctcaggggaggtgagccttttgtgctattcaggccttcaactgatttggcgtggcccaccacaccatggggggcagtctgctttactcagagtccattgatttaaaaagcaaatctcatccaaaaacactcccacaaaaacatccagaataacttttggccaaatatctgggcactgtggcgcggtcaagttgacacagaaaatgaatcatcacagaatgattatctctaatatatgcactgaggtgttatgatgtgacacgagcgcttccaacatatacaaaaaaatgatcagacgaagtactccaaaatagtttgtgcaattgtgttaagatagtcaaagtagaatcatttgttattttttcctgagctcctggcttgaggaaaggcctagttcaaagaggaattaggcatattaggataaacctcagcctagggcaactgggtgtagcccgaggaatatagatataaccatggatgggggaacccatggacaggacccaaccagaaagattcct

SEQ ID NO: 55186 - DNA, 731 bp, Homo sapiens
gatccagtttccctctggtccagttgcagagagggcygttgtggcaggacacaactgtattttttttttttttgagacagagtctcgctctgtcgtctaagctggagtgcaacggcgcaatcttggctcactgtaagctccacctcccaggttcacgctattctcctgcctcagcctcctaagtagctgggactacaggcatgtgccaccacgccgggcttattttgtatttttagtagagacggggtttctccatgttgggcaggctggtctcaaactcccgacctcaggtgatccgcccaccttggccttccaaagtgttgggattacaggtgtgagccacagtgcctggcctaaaattttaattattaatgtttatattttattgtaaaatacacaaaaatttacaatttgaaccattttaagtgtacaattcagtggcattaagtacattcacactgttgtacaactatcaccactgtccttttcagaactttctcatcatcccaaacagaaactctgcaccctttaaataactccttgttccttcctccctgcaatccctgcttttttttttttgaggtggagtctcactctgttgcccaggctggagtgcagtggcatgatctctgctcacttcaatctctgcctcccaggctcaagcgattctcctgcctcagcctcctgagtagctgagtctacaagtgtgcaccacaacgcccagctaattt

SEQ ID NO: 55187 - DNA, 661 bp, Homo sapiens
cccaatttagcatttgaattaaagcgagaactgaatgtggctggaaagctgactcccatctgtgtgtgagagagaraagagcacaagtgagcgtgggcacacgctggggcagccagggcaagggcagccgatccgggcagctcttgtttagcgcagacactcatcctcgggcgtaggcaacagctcagctgagagacactgaagtttgaaggttgctgtttttccagaagggaaagattgctgcaggggcatccttgtaacattctacacaaatgtgccaagtgtttatcgtgtgccaggccccgtgctggagatgctgggcaaacagtggggagccagctgggcccattgtctatgccccagccttcaggctggtggataaacagactgggaagcaggcaatgggcacacagggcaatgtgtgctgtcagggggaaaggacaggtatgtcaggggcctggaggggcatctgacaacttggcagtggggtggaggagtcactctgagctgagactcgaagcacacacaggagctgaccaggtgaagcaggtaaacaagggtgcttcaggcagaaggaaatgtgcatgcaaagacttgagtggggcgggcacggtagctcacgcctgtaatcccaacactttgggaggccgaggcaggagga

SEQ ID NO: 55188 - DNA, 661 bp, Homo sapiens
cccaatttagcatttgaattaaagcgagaactgaatgtggctggaaagctgactcccatctgtgtgtgagagagagaagagcacaagtgagcgtgggcacacgctggggcagccagggcaagggcagccgatccgggcagctcttgtttagcgcagacactcatcctcgggcgtaggcaacagctcagctgagagacactgaagtttgaaggttgctgtttttccagaagggaaagattgctgcaggggcatccttgtaacattctacacaaatgtgccaagtgtttatcgtgtgccaggccccgtgctggagatgctgggcaaacagtggggagccagctgggcccattgtctatgccccagccttcaggctggtggataaacagactgggaagcaggcaatgggcacacagggcaatgtgtgctgtcagggggaaaggacaggtatgtcaggggcctggaggggcatctgacaacttggcagtggggtggaggagtcactctgagctgagactcgaagcacacacaggagctgaccaggtgaagcaggtaaacaagggtgcttcaggcagaaggaaatgtgcatgcaaagayttgagtggggcgggcacggtagctcacgcctgtaatcccaacactttgggaggccgaggcaggagga

SEQ ID NO: 55189 - DNA, 1154 bp, Homo sapiens
tgactgaaaatgggataatgaaattctactgtaattaaataaagttgatggttgcctaacattgtgaatatgctaaaaatcactgaattgtacactttaaagggtgaattttatggtataagatttatatctcaattttaaaaaggaataaaaattaaaagatgtatattgtaagccccagagcaaacactaatactatttttaagtaaataaaataaaataaaaacatagtgaaaaaaatccaaaaaggaatttaatgaataataataactacctttcctaattttgttatgcttaactgcttggcatctagctggaatccaatatactgtacctatatgtattattagccttatttttgttattgttattgtattcatagcataaaatcatttcctcaaggccacagctttgctgtagtagtcattgaataaataatagcaataggtaagaaagtaaggtgagtctaggtttaactttgctgtttcactacttttttatttacaattttatttttcctattaactatcacctttgtgtactgttaaattaactgctttttttttcaaatagttttaacacatgtctgaaaaaaactgcaagggaacatgaggtaaagctagaagtgtcatatgatggcacttgcaatctcttgtaagatcttttgtttacttcaaagtgtaaattggacagctcttaattacattgttagaatagtttacaccagaattaagtacagtcttagattcactgcatttgccatcttttgtttagtcatttacataagtaattaaatagagcttacaaattatgtgtaaacaatattatgagtcactgaaaatgaaacttttagttgaataacccagagtaaaagccaattgagtaacttgtcatagtaatacacgctaaaaagtttatttatgaaacactggtcttcaaaaattgccttaatatttttcaatgaaataagtttggggaaatggtcatttaattttcatattccacttaaataacaagaagcttaccttactccattgtatttaaactgagaaaatatatatttatgttatgttatattawattacattatatttgaaccaatatactacttctagaacatttgttttggtacacgtgaaaatacataatttaca

SEQ ID NO: 55190 - DNA, 1435 bp, Homo sapiens
tcccttgaactcaggtggtcgaggctgcagtgagccctgatcacatcattctactccagctagggcaacagaccctgtctcaaaaaaaaaagaaattgtrgaatatagtcaactagatcacttctgtctcactttttataacaaagcatttaaaaattgaataaataataatacatatagaagtttgatttttatcaattttcagtgttcagaaattatgactcataattcaaatattatccctctagttattatacccagtgagcttttagcagatgtctaaatcaaaaatgaattagccataaatgttcagattagtcctgggaagattatattaatgtggcacagatttacaataattttgggggagctcatttaattcaaaaattatccttaggactaatgaatattgtaggaagttttcctttcaacttcaaatgtactctagcgattttctaataaatcatacatttgtcatactaaaaactcacctttgctaattatagtcaaatcagataatttttattattttgatagaaagtttttcagttattatcatcaatgaaattaaagactactcttccaccagtgattattcaatttgaatgcaagtctaggctcattacttttattctctctcctccaagataatgttaagtggttatttaaacagatttacctgttcctcctatgcttggaattcaaatggaaaaaaaaatttttttctcctcatttgtatttactaaatacctctgcttgtgtttgacatgttccatgagcgtgattattgttaaattatgtgcgaattcacacaacagttaactcaaaatctacagcatataaaattatgtttttcacagctagacctattccatttacataaaataatactttaaaaacatacacttcccaattgatagacttaaagtagctattgcaaatcactctatgatggtagtaacagacatggagagaatttgccttagtgggcagaatgcccagcaatttgaaactgctttctccataggtggtagcagaactatctgggaattatctcagtgttagtatgcacatagcacaacaaactgaaggttttcaaagagcagagctaatggagcaaaccatatgctaaatatctgtgttggagaccaactccaaccgatctgcaggaccaaaagctgtataatagtagtttcatatattcaaatatttatcgattgcttattacatgccaggcactatgccagatgctgggcatgtagtagtaaacaaggtaaaccaggcccctgctccaatggagcttacattctagctggagatacagaaaataaacatttaaacaaagatgtaggataatttcaaatcgtgataattgctatgaataaaatgaaattgcatcatgagataaagagtgattggggtaaatacattagat

SEQ ID NO: 55191 - DNA, 707 bp, Homo sapiens
atcatcgaaggagcaggttcataatgacactctggggaatgttctattgttcaggtcatctaagagcatccattagtagcaattttcagccaggataagactaaacattaatccaaaatacstcttcttgtctttctgagaactgcactactcttttttcacataatagccttagtgtgtaattatcagcattacacaataacagagaacaggaagttaccaaggcaacaaaccaaacaacccaaaagtcctaagagaaaaaatcttagggttgctttcctggccgtcacttttagtctcttcttagttcacacttacatctaaacagttttcctaccagtgataataaaagctcatttgtcacgcctatgttatctgttgtcttcaaatcttttcttctagttatctctaactttaagtctttctcctgatcaatgggacttaaacacttcgtttcaagagtgaagatgaaaattataatttagtgatcatcaatcatgtgtcaaacatcatgctatgattattcatatacttacactttataataattatctatagtaggaatactcatccttattttacaggtgaaaaaagagaggttcagagagattaaaaacttgtctaaggttactcaacacagttgggatataaatccaagtttctctgattccagggcccaaattgtccacaaaactgtttatacctaa

SEQ ID NO: 55192 - DNA, 564 bp, Homo sapiens
tcaggtatttaatacgaaatgtggaagggaatgctggagtaaaatatcccctctcccctccgcccgcccacccgcccgcccgctcgcccgctcgcccgctcctgtggtttttctgagcgtgcgggcgccgggaggggatgctgaggctgatggagctgcctccagggctagggccactcaccggaggagggcggggcctgcacttgaagtcaggccgcacctgtctgtttttggaagggtagccgacaaatccttccagagggaaagttctttgtttaagtgttgtacttgaaaaggtcaatcttcagggcttcctgtttgaagtcaagtcagaggtaaaccggtcagttacagaagcaggatttytaggatttctaactccagctgttcccatactgtctagtttaaattatggctgttaaggccgggcgggtgactcaggcaggtaatcccagaactttgggaggcccagacagaaggatcgcttgaggtcaggaatttgagacctggccaacatggtgaaaccctgtctctactaaaaaaaaaaaaaaaaaaaaaaaaaaa

SEQ ID NO: 55193 - DNA, 678 bp, Homo sapiens
ccttgccatggcctcccaaggttctgggattacaggcatgcacttggcstaatactttcctttaataactcacttgttaaggctaaatacctgttgagtttcatcctaagctgtgacgtcactagtttcatgtggataaataatagattggtaggtgggcacatagatgaatagatagatagatgattgatgttgatgacaatgatgacggatatagatggtatatacatgatagatgatagatattgatgataggtagagatagagatgaagagatgcccggtgttggtaattgtagtagaattaacatgcaattacgaaatctcattgtgtgtgcccctgaagtcaccttcccaccccggggctcttcggctcttcgaaggctgagcccttcgcatacaggaggcaggagccacaactcccattgtataggtgtggaacctgaggctggttggggggacttgtggatggtcacgcagccaggaggggcaggcctgggggactctccccacagtgctcatgtccccttatgaggcctccggggccttcctgctcccaccacacaccagcctggctctcaccaccacacacacatgaggctgctgggacaggctcacgtctccctccaggtgggacaggagaaacaggaaaggcccctgcaggaagtagggggagagg

SEQ ID NO: 55194 - DNA, 643 bp, Homo sapiens
cactgtaggtgcacactgggtgcgagggaagcggcatccacagctgctgacaatgtcgggctcctgcggtcctgctgtgggtgtcctgctctcaggaagggagcagtttcacgtaggtcactccacacaagtggaagcagctgtctctgaaactccaggaatgtgcacctttcctgctgttgcttgctctcccgtccttttaatgaacttttacacgtcgggggatatttctctgtggttgaatagtgaacattttaactgatcaagagcactatgttctgaattgaccaaaaagggaggggtctgttttgtgcattttagaaaccatcatagcctttgcctgggaaccaaatggaagtaagtttgctgtgctgcacggagaggctccgcggatatctgtgtctttctaccacgtcaaaaacaacgggaagattgaactcatcagtaagtaacctggtccctttcctcttctgagtaggtcagcacagatgatgacccagtcgctgyccaacagtgagcatttgactggcctaggaccactgctgggcaggccgggactcgcctatgaatggggtgtggcctcggctgatggaagtgagcgatggcctggaggtgccgcctccttgcagggtgtctctctgag

SEQ ID NO: 55195 - DNA, 643 bp, Homo sapiens
cactgtaggtgcacactgggtgcgagggaagcggcatccacagctgctgacaatgtcgggctcctgcggtcctgctgtgggtgtcctgctctcaggaagggagcagtttcacgtaggtcactccacacaagtggaagcagctgtctctgaaactccaggaatgtgcacctttcctgctgttgcttgctctcccgtccttttaatgaacttttacacgtcgggggatatttctctgtggttgaatagtgaacattttaactgatcaagagcactatgttctgaattgaccaaaaagggaggggtctgttttgtgcattttagaaaccatcatagcctttgcctgggaaccaaatggaagtaagtttgctgtgctgcacggagaggctccgcggatatctgtgtctttctaccacgtcaaaaacaacgggaagattgaactcatcagtaagtaacctggtccctttcctcttctgagtaggtcagcacagatgatgacccagtcgctgcccaacagtgagcatttgactggcctaggaccactgctgggcaggccgggactcgcctatgaatggggtgtggsctcggctgatggaagtgagcgatggcctggaggtgccgcctccttgcagggtgtctctctgag

SEQ ID NO: 55196 - DNA, 691 bp, Homo sapiens
caagcccgcacagagtgaaataagcgctcccagatgctttcgtgaagtgaccaggcagacctgtctgcgggttgtggttctctgtggttaaacaagtgccttccagccatccagtaacctccccccgggggtcagtcccttgtcttctagtgggaagggtattcgttacacagctgtgaggctgccttacctttgtggttggtgtcacggtgtcggtctcagctgtgttccagcagtgtgtcgaaatcatggagaagcttccagctttctgctctgagttaaaagaatacccttttgttgctgctctcccttgcttcattgtccacacttgctactgtatttttggaggcttacttagcctcagataacatttccagtaaaaataatatgatggcagtcrtatgtaatactcactgcacactctgcatctgtgatttggtaagtctcacagcggccaccagaggctgttgctgtgcttgtttccatgttaacgccgaggctggctccctggggaccccatgccgcagcacctctcaggagtgggatgccaggaggtatgcgtctccatgaagcctgacggtcctgtctgtctttgcagtatgaacggtgccttagcgtttgtggacacttcggactgcacggtcatgaacatcgcagagcactacatggcttccgacgtcgaatgggatcc

SEQ ID NO: 55197 - DNA, 654 bp, Homo sapiens
gggatccatataagcatcattaacaggatatgaaaacaaaacaaaacaaggtctgtgaattgaaaattcaattaaccatgtagatgatatgaaaatccaagaggggccaggcacagtggctcacacctataatcctagaactttgggaggctgaggcgggcagatcacctgaggtcaggagttgaagaccagcctggccaacatggtgaaaccccatctctactaaaaatacaaaaattagccaggtgtggtggcaggcatctgtaatcccagctacttgggaggctgaggcaggagaatcacttgcacccggaaggtgaaggttgcagtgagccgagatcatgccactgcactccagcctgrgcaacagagtgagactctgtctcaaaaaaagaaaagaaaagcaaatccaagagggccaggcacgatggctcacacctatgatcccagctctttgggaggccaaggcaggaggatcatttgcactcaggagttccagaccagcctgggtaacaaggtgaggccctgtctgtacaaaaacaataaaataaaataataaaataaatccaagagaatggactgaggagccctcctaattcactgtgagctcactcctccccaccccatccctgtctttctttctttttttttttt

SEQ ID NO: 55198 - DNA, 654 bp, Homo sapiens
gggatccatataagcatcattaacaggatatgaaaacaaaacaaaacaaggtctgtgaattgaaaattcaattaaccatgtagatgatatgaaaatccaagaggggccaggcacagtggctcacacctataatcctagaactttgggaggctgaggcgggcagatcacctgaggtcaggagttgaagaccagcctggccaacatggtgaaaccccatctctactaaaaatacaaaaattagccaggtgtggtggcaggcatctgtaatcccagctacttgggaggctgaggcaggagaatcacttgcacccggaaggtgaaggttgcagtgagccgagatcatgccactgcactccagcctgggcaacagagtgagactctgtctcaaaaaaagaaaagaaaagcaaatccaagagggccaggcacgrtggctcacacctatgatcccagctctttgggaggccaaggcaggaggatcatttgcactcaggagttccagaccagcctgggtaacaaggtgaggccctgtctgtacaaaaacaataaaataaaataataaaataaatccaagagaatggactgaggagccctcctaattcactgtgagctcactcctccccaccccatccctgtctttctttctttttttttttt

SEQ ID NO: 55199 - DNA, 885 bp, Homo sapiens
tagacagcatattttatgcacataattattttggctcttttaattattatttcttacctgcttaaaaaaatggctgcctaaccaagcactggaagttgaggttctgttgcttcaataaaaataaccatggagtccaagttccacattctttttaaaagcttcttttttgacctaaaattttctccatttctctgttccctttagtcatgaaaagtccatttcacaactgaattaaataatgctaaatttagtacccaaaaaggggttmtttaatttattcatttgctcatttaaacacgcattgctctgtgcccctaatacctgcatagattgatgggaggcacaaagggtcaccttttcatagcgtggttagtgatacaataaggtaaaggaaaaagtcagagacggtttagacttgagtagacatagataagagaattaaaagggaaagctgcatttaattttagagatgattaatttgcatgagaatagttgtcacctacaagacaatctaaaggagagcattcattaactgatataagaaacaacagtcaccatctaccagaaatttttatagcccaaacaaggtacaaacggggaggacattgtgctagaagttggaatagaaaatatatgatccctgcctctttgctctctggctgggaagacaagattaattccagaaagcattctcttcactttctctccaccttctcactccctggccctttgtcagtatttctcttcttctgcactcatcactatctgccttgttttagttattcctacatgcacatgtgatattcgtgataccagactgtgaaccccatgagggcaacaactgtttcatcgccgtataaataaaaccaggcagcattccttaca

SEQ ID NO: 55200 - DNA, 1327 bp, Homo sapiens
aatatatttataagaacaaagtgataggggctgggaacagtaaatagattcaaaataaagctattttaaaatgaaagccctattagacgaggctgaataaaaatagcttctggaacttgggactactttaattgacaataatgcctttaagatcaagttatggggcttggggagaggcagggaacaatcccgtatagttctaggtatcaggactaaaggaatgacaatgaccttttttgaagcaggaactcatcagcattatccctggggctgtcattgtcctgactagatactgtcatggtgccactatcccacatgactggctgcattgttcccacgtggtgaactctctctgactctcagctggtccagtgctagttcttggaacactcctaaggcctttctgcctctgctttttgcctgatcctgtgacccaacattgaacctttcgaactgattttgaactcagttcttcttttttttgagatggagtctcgctctgtcgccaggctggagtgcaatggcgtgatctcggctcatggctacctctgcctcctgggttcaagcgtttctcctgcctcagcctcctgagtagctgggatgacaggcatgtgctgccacacccggctaatttttgtatgtttagtagagatggggtttcaccatattggtcaggctggtctcgaactcctgacctcatgatctgcctgcctcggcctcccaaagtgctgggattataggcatgagccaccgttcctggccccagttcttctgttaatggggctgaccgtggtctctccattcatctctgttgaagccaggctggcttgaccactgtggttcttagctatcttcttctattctgtttttttgttttattttattttattttatttttcagagatggagtcttgctctgtccagcccaggctggagtgcagtggcacgatctaggctcactgcaacctctgcctcctaggttcaagtgattctcttgcctcagcctccccagtagctgggattacaggtgcgcaccaccaagcctggctaattttgtgtttttagtagagatggggtttcactatgttggctaggctcatctcaaactattgaccccaagtgattgggattacaggcgtgagccactgcgcccagcctatcctcttctattctgatgagcatggttttattttctatccttggcttccccttatttattttctcaacctttgcacattgattggcatragcctaaatttaatgccattcaaggcatacatactaattgcctcattcattttttcttctattcatttactcagtatgc

SEQ ID NO: 55201 - DNA, 694 bp, Homo sapiens
ttaccatatagaaaaataaactcacaaatgatcaaagatctaaatgtaaaagctaaaactataaagctcttacaagaaaacatatgtgtaagtcttcaggacctccagttataaaatggtttcttagctatgacaacaaaagcatatgaaacaaaagaaaaaaataaactggacttcataaaaatttaaaacttttgtgcttcaaataacccaattaaacaatgggcaaatgatttgaatagacatttctccaaaaaaaaamaaaaaaacaaaaaaaaaaaaacaccaaaaaacaaatgtccaacaagcacatcaaaagatattcaataccattagttattagggaaatacgaatcaaaaccacgagatgccactttggctataataaaaaaaagccagatgataatgaatgttggcaatgttgggtatataaaatggggtggtaactatgggaaaacagctgcaattctacgttggtatatatatatacccaagagaaataaaaaggcatgtttcattgtacgtggatgtttacagccaaattattcataatagtcaaaaagtaaaacaaaaaaaaaatccaagtgtccatcaactaatatatggattaaaaaatagggtatatccgtaaaatggaatattattcagctatgaaagggaatgaagtactgattcatgctacaacatggatgaa

SEQ ID NO: 55202 - DNA, 740 bp, Homo sapiens
ccaatttggaaaacactttagtggtatttattaatgcagaacatccactttccctttacycaggaatcctgtagataaaaactatcaaaaatgcttcacacaaatatgaacaagagatacatacaagaatattcatagcatcattacttgcaatagctgcagattggaaacaaacaaatgcccctttagattggatatatgaactgtggaatatttattctataaagactatacataaatgaaaaagaaagaattactattatatgtaccatttaacaagaatgaatcacacaaatgcaaaatagagtaagacaagtcggacacaaaagaccacacactgtatgtaaccccatttgtataaagtcccagtgagggaaatctcatctccagggatgtagttgcattagtttttgcctgtgggaggaattagtggctgggatggcacatatggttggtctcaaaagtgcagatcaatgggagcatttactttatataaaaattattgagctccacacaaatcaattctgtactttttatatatattttattcttgaataaaacgtctacaaatgtaaaaaatcttgtgccatattattatcttcatatactccaacccttttctgaatcctcaaacttttcatgttctgtacattctcctctttaatctgctaattcagtcataaaatacagtgcctggtttgagtcaaataatatatcttttaaaacaagtaaaataaaaa

SEQ ID NO: 55203 - DNA, 1512 bp, Homo sapiens
tacattggctttgtttttcaaggaggtattggataaaatagcaacttaataaaaattctctagagaataacatgataatttaaccagactattttagaagtgaaaataatgttgaattcattacttgactcccaaatggttattttcaaggaatattggcgtgatttccagatgtaaaagcttattcatatctaatgcttgtagcaattttattttgtataagtatgtcaaatttggtaatttattatactttttgatgaagtttatacattataccttgttgccatgagtggatgaagatttcggaaggctaaactagaagatgcaagagatgtaggcacattattacaccatatgggtatgagaaataatgaacattacatactataattcaccaaacatatatccaagctgattaaattaggacacttccactgaagtgatgtgaagtgtacattcaactaaagtgtcattataattgtgtaccttctcactgattggtcaagttaaagaacatgatgaatgtttgcagtaaaatgttccaaatcattctgatatcttgcatgaaagacacgcgggtgcatgtatcacctgctttgacgttgattcccaggtgtatgagttgaactctgattttagatcacatttgtcctcaacactcagcatatccacattgatattgacatggctttattttagttctagacatatggagaaagttatatcacatttgaaattgtcagtatatatttcttgaagcctgtattactattttcttcagtgtatttccttcatgtttagtcccaagaaacaaagtataaaatatcaaagcctacagtaatacaggcaggagtataaaacttgatgctaacatgctatccatgcattaatgtatggataacattatcatatttacatatgattgattatgtaacccttttgcttttcagtgtcttctcagaaacaaccagctgagaaggtaattaaagtctcatttatctgttgaaytattaactgtatagtctatgaaacctactttacgtattattttgttttcaaatcccattcaggctacaagtaatgagaaatattctgtttcaaatacagccacagaaataaaggggggaccaatatctgggacaggtaattttgcaaaacacatctaatgtcacgttcaatcaagatagaagagaacgtcccttctccaaataaatcagtggagagttcatctaagctgcacgttctgattcagtatgcctgagattgttcatttgtagtgagttctcaggtgaccctgatgctgctggtccttggccatgatctgagtagtaagattatagacttccctacattgaaattgggaagaagaaccattggagagcagttcaacacataccaggctaagggagcagcataattttgctttaattctacagcatgtttccatcaagaggggaaagagaacgagatgaagtaatagatattataggcatcatatcgtattgttataaa

SEQ ID NO: 55204 - DNA, 1512 bp, Homo sapiens
tacattggctttgtttttcaaggaggtattggataaaatagcaacttaataaaaattctctagagaataacatgataatttaaccagactattttagaagtgaaaataatgttgaattcattacttgactcccaaatggttattttcaaggaatattggcgtgatttccagatgtaaaagcttattcatatctaatgcttgtagcaattttattttgtataagtatgtcaaatttggtaatttattatactttttgatgaagtttatacattataccttgttgccatgagtggatgaagatttcggaaggctaaactagaagatgcaagagatgtaggcacattattacaccatatgggtatgagaaataatgaacattacatactataattcaccaaacatatatccaagctgattaaattaggacacttccactgaagtgatgtgaagtgtacattcaactaaagtgtcattataattgtgtaccttctcactgattggtcaagttaaagaacatgatgaatgtttgcagtaaaatgttccaaatcattctgatatcttgcatgaaagacacgcgggtgcatgtatcacctgctttgacgttgattcccaggtgtatgagttgaactctgattttagatcacatttgtcctcaacactcagcatatccacattgatattgacatggctttattttagttctagacatatggagaaagttatatcacatttgaaattgtcagtatatatttcttgaagcctgtattactattttcttcagtgtatttccttcatgtttagtcccaagaaacaaagtataaaatatcaaagcctacagtaatacaggcaggagtataaaacttgatgctaacatgctatccatgcattaatgtatggataacattatcatatttacatatgattgattatgtaacccttttgcttttcagtgtcttctcagaaacaaccagctgagaaggtaattaaagtctcatttatctgttgaattattaactgtatagtctatgaaacctactttacgtattattttgttttcaaatcccattcaggctacaagtaatgagaaatattctgtttcaaatacagccacagaaataaaggggggaccaatatctgggacaggtaattttgcaaaacacatctaatgtcacgttcaatcaagatagaagagaacrtcccttctccaaataaatcagtggagagttcatctaagctgcacgttctgattcagtatgcctgagattgttcatttgtagtgagttctcaggtgaccctgatgctgctggtccttggccatgatctgagtagtaagattatagacttccctacattgaaattgggaagaagaaccattggagagcagttcaacacataccaggctaagggagcagcataattttgctttaattctacagcatgtttccatcaagaggggaaagagaacgagatgaagtaatagatattataggcatcatatcgtattgttataaa

SEQ ID NO: 55205 - DNA, 568 bp, Homo sapiens
taattgttccaggccgtcaggggctttgttcttctctgcccttcttaacttagcagccagccstctctccctgcactcgagcatttgcaatctgtctgcggctcgaaagaaaagccaaggggccctcgtctctggctgctcctagtcctgactccagattcattgcagcgttgcttgggttgctttgcttgaagcttaaggagaaataattagggaggacttcagcttgtcctggacaggaaaggatttaaagaaaccatccctgcatctgaacatggcctaacaatgatacagcctctaccaaatgtgactgtggctacagcctaggaagaagagggtgcttttaaatctcccactcctcatctgtacacccacattcatagcagcattattcacaatagccaaaagatgacagcaacctgtgtccatcaacagaggaatggataaacaaaatatggtctatgcatacaatggcatattattcagccttaaaaaggaaggaaattctgatacatgttacaacatagatgaaactggagtgaaataagccagacacaaaaagataaaa

SEQ ID NO: 55206 - DNA, 669 bp, Homo sapiens
ctttctattgcccagaattacccaagctgaggctaagggacaggaagcagagattggaaagggcagggctgacgggagtgagtcactggtggggagaaaatgaaccacttcctgtgtgttcccacagaggtcagggccctcagcaaacagcgacaggctacaggctcgttctccgggcctggaggaggctcggtgcccagcgtctccggaggactggctcttccctccgcctggggagtttgcgggccccagacacaatccccagggaggggctcggctctggacagccttggcctctttccccagatttccccagcactcacactctcgggaggctcagggtctgtactgagaagggcccttgctcggcgtggtgctctgctgtggctgttttgaaattcgtaatactttttggacaagaggccccacattttcattttgcacaaattgtgcagccggtcctgaatcattgctggctttccaaggtcacagccagcaaatggaactaactccagggctcctggtcatctgtgcccccacagataccttctgggggtctctgaggtcaggcgccctcaccctcctccttccctggaacacgggcgaccactgcccactttgccgctgcggcaccctgagcgccgtggccygtgcagaccaccagaggaa

SEQ ID NO: 55207 - DNA, 752 bp, Homo sapiens
attgttaaggccaggcgcggtggctctcccagtggcagaggtgcagaggatacagtagaataaagccagacaagatctctgcttttgcagtgctttagtgaattgtctttcataatgaatttctaactgcctgcctttgagcaagtcctctttgtactaggagatctagagagcctgataatgatagtgaagatgacaatgtcagcttacatttattgagcacgtactatatcccaggcattgttctaagtgctttgcatgtattagcttactgaaccctcagaaaatctccagtttgtcatggcactaagaggctacatttggctcagattaccctctcccycaaacatgggaagtgtcatccatccaacgtgggtggatcacctgaggtcagcagttcaagacctgtctggtcaacatggtaaaaccccgtctctactaaaaatacaaaaattagccaggcatggtgccgggtgcttctaatcccagctactcaggagactgaaacaggagaatcacttgaacccgggtggcagagattgcgatgagccgagattgcaccactgcactccagcctgtgcaacagagtgagactctgtctcaaaaataaataaataaataaataaataaataaataaataaataaataaggattaggcaaaagtgcctcctttcacagagaaagataagcaaagctagagaaaagtaggaatgaggaagtgggatgaaagggtaacataatcagataacgg

SEQ ID NO: 55208 - DNA, 752 bp, Homo sapiens
attgttaaggccaggcgcggtggctctcccagtggcagaggtgcagaggatacagtagaataaagccagacaagatctctgcttttgcagtgctttagtgaattgtctttcataatgaatttctaactgcctgcctttgagcaagtcctctttgtactaggagatctagagagcctgataatgatagtgaagatgacaatgtcagcttacatttattgagcacgtactatatcccaggcattgttctaagtgctttgcatgtattagcttactgaaccctcagaaaatctccagtttgtcatggcactaagaggctacatttggctcagattaccctctccctcaaacatgggaagtgtcatccatccaacgtgggtggatcacctgaggtcagcagttcaagacctgtctggtcaacatggtaaaaccccgtctctactaaaaatacaaaaattagccaggcatggtgccgggtgcttctaatcccagctactcaggagactgaaacaggagaatcacttgaacccgggtggcagagattgcgatgagccgagattgcaccactgcactccagcctgygcaacagagtgagactctgtctcaaaaataaataaataaataaataaataaataaataaataaataaataaggattaggcaaaagtgcctcctttcacagagaaagataagcaaagctagagaaaagtaggaatgaggaagtgggatgaaagggtaacataatcagataacgg

SEQ ID NO: 55209 - DNA, 875 bp, Homo sapiens
tgcataggacagcccaaacaacacaaatgatctcaccccaaatgtcagtggtgccaaggctgagaatccctgttccaaaacaaaatgaccaccctcagtggcccacttctagacacaaaccaaactatgaaaccaagagagaacattcagcaacacgaactgaaatagcctcgattcagtcttgtgtagatagggaaacttcatgtaaggattttatatctcgttgtggmatttcctattacactaggggactgaagctcaatctctcattatcaccatccaaattccacactggaacttgacttcacaaggcctcattggccgtgcactttggcatggcccattgcgtgaggtttccagtgagacagaaagtcactcagactcgcgagcctgtaccaagcagcaggaatgagaagagaaatgaggtagacatcagtagaccaatgaggtggaggtggaagctgccgaagaatgggggagagaaatggctgagccaggctggtttggaatcagactctaaagctgccagatccagccacctaagatgccacctgccacagggaagctaggcagtgctacttctgaacatttaaaaccttctgctcaagtgtattcaagcagtttatgctccacagtaaaccaatcagaaaaaaaggtcttaccgggggtgctgatggtgggggagggggaggagcccccagaggcgggggaggtggaggcagaggaggtgggggtggcggtggcactggcatgtgtcacggtgttgatgtctcctgcttatgaatggtcccaagagagtggcttctgctctgaaaaagagaaaaagaatggatttaaacttggatttctttacttacatgcaggaaatgtgtatc

SEQ ID NO: 55210 - DNA, 875 bp, Homo sapiens
tgcataggacagcccaaacaacacaaatgatctcaccccaaatgtcagtggtgccaaggctgagaatccctgttccaaaacaaaatgaccaccctcagtggcccacttctagacacaaaccaaactatgaaaccaagagagaacattcagcaacacgaactgaaatagcctcgattcagtcttgtgtagatagggaaacttcatgtaaggattttatatctcgttgtggcatttcctattacactaggggactgaagctcaatctctcattatcaccatccaaattccacactggaacttgacttcacaaggcctcattggccgtgcactttggcayggcccattgcgtgaggtttccagtgagacagaaagtcactcagactcgcgagcctgtaccaagcagcaggaatgagaagagaaatgaggtagacatcagtagaccaatgaggtggaggtggaagctgccgaagaatgggggagagaaatggctgagccaggctggtttggaatcagactctaaagctgccagatccagccacctaagatgccacctgccacagggaagctaggcagtgctacttctgaacatttaaaaccttctgctcaagtgtattcaagcagtttatgctccacagtaaaccaatcagaaaaaaaggtcttaccgggggtgctgatggtgggggagggggaggagcccccagaggcgggggaggtggaggcagaggaggtgggggtggcggtggcactggcatgtgtcacggtgttgatgtctcctgcttatgaatggtcccaagagagtggcttctgctctgaaaaagagaaaaagaatggatttaaacttggatttctttacttacatgcaggaaatgtgtatc

SEQ ID NO: 55211 - DNA, 490 bp, Homo sapiens
tggattctgcctgcacaggtcacagaagacttcccagaagagcggacatttgaggcagatgttacaggatgcataggaattgccaggcacaggatggggacaatgttgtagtcagagactgcgtggaggctggagagggcatggtgggcccagttagtcactggcaatgtggcctggctggaaggtggggtatgagagggggctggtgggagggaaagccgaaggacaggatgggactgggtcacagtgtgttctggctggcatggcgggaccacagaggcgtcaccacatttctaagtagtggttgrtattccagatctcagatttagaaaatcattctggcagaaacgttaaagatgtatttggagggtgctggctgccgggagatccagtagcgggttgctgcaggaacccaggcgaggtatcacaacatgactttgagaggtggtctgtacttctatctggttttgtagagcaaggaggaagttca

SEQ ID NO: 55212 - DNA, 490 bp, Homo sapiens
tggattctgcctgcacaggtcacagaagacttcccagaagagcggacatttgaggcagatgttacaggatgcataggaattgccaggcacaggatggggacaatgttgtagtcagagactgcgtggaggctggagagggcatggtgggcccagttagtcactggcaatgtggcctggctggaaggtggggtatgagagggggctggtgggagggaaagccgaaggacaggatgggactgggtcacagtgtgttctggctggcatggcgggaccacagaggcgtcaccacatttctaagtagtggttgatattccagatctcagatttagaaaatcattctggcagaaacrttaaagatgtatttggagggtgctggctgccgggagatccagtagcgggttgctgcaggaacccaggcgaggtatcacaacatgactttgagaggtggtctgtacttctatctggttttgtagagcaaggaggaagttca

SEQ ID NO: 55213 - DNA, 867 bp, Homo sapiens
tcctgactcccaggcccatggttcatcaggctcatcctgccaggagaatggcttgaccagggatggccctcagttactttcttctctggggaagaagagactcagaatgacagcctggtcagtcgatggcagtgtccaaggaatggaccacctaggtaagtactctgtgcatgggacaggacatcctgtgcctgttcccaccctgatatgttgacaggtcctttgaagggctgggcagggctgcctgcaaggtgagttttgagctgggcaccctaatctcagctgacagggactcaccacacatatcctctggtccaccattcagcccttgtggcatcatctagctagagccagatgggggaactcgactttggtggatatacaccaaagaaagagaaagaggaagcaaggctgcctggcactgagcatctcrttttatagccatctgtgaaagaagagctatcatttaatttaaatttcccttgtattcacaactttacaggaagagttaaaaatacatgaaatgtcaactatttggataaccttttgccacttcccaataaatatgatgtacatgtttccatctcaatagccagaagtgagtttcgcattctgttttggtttcagctgcctccaggcacccctttctatgaattgacaccctccacatgcatgtctgtggggcacttggcccttttccagtttttggctgctatgaatagcaccgcaagaaatgcccctgggcaagccattttttttttttcaaatccattacacatctcactagaacattgctgtttccttttcttcttttattagagtcgaggaagaaaggacttatgccagctaactgaacagaaagggctc

SEQ ID NO: 55214 - DNA, 682 bp, Homo sapiens
gggatccaaaatcatacaactatacactaaaatcagtgaatattaccttatgaaaattaaaaattaggaaatcaaaagaaaagcatacatataaaaaatagttttttctaagcatttctcatttgtaaggtgttttaattatgttgtatgttgtctcrtttcacccccataacaaatctatgaaagaggtacttttatccccatgttaacgtgaataaacccaggtttggaaaagtcgagaaacatacttactgtcatatagttaacaagtgactgagcagggatgtgaagccagattcctctgactccaaggtctgagttcttcctcctgcacagtggtcaattggctagatccacataaacagcatgcacaaactcaccactcacacatacatacccacagacacacaccacacagatgggatacatctcacaatcacatatatggaatgagtgatatgcaaatataaaattgcattatttttatattattctcattttatataaatcctaccacgaggcatagtctgtctcattcattcattcatttatcatcccttcatttattccctcatttcctcaggaaatagcttcctttgtggcaggtgctattccagactctggagatactacagtaaacaaaacagaataaactcaaaaactctaaaatgcaacaataaaa

SEQ ID NO: 55215 - DNA, 674 bp, Homo sapiens
ccctggttaattgcaaattatttacaggaccatgctttctattttttaaatgaatctcagtctgtacctggcacttcactgggcatggagctaatgccaaataaaaacgtgatggttgatgagtgctgttcatacacatttcccagtggttctacccccggaaggcagctatgtgatcaataaataggacgccaggagagtgggaatttccagcagtacttcatactgtcacctttgagacctatagagagttctgctgagggcaartttttgtggtataggaggtcatcctgatgagggttttttttttttttttttaatggtggcttttagcgtaaattggcagggattgatcaggtgtttcctctaggctaatgctccttggggatcatgggatgtggtctgcacactcatctgagaagttccagtaatggcaaggcagtcaccaggggacccatgtcctcagaggacctggctcctcagagaaactgcaggttcactgggggagattatcaggactttagacctcaggatgaagagacacactccaggaggggctgtggatagttactatggtgccccagaaaggtgtcagggtagtgcatggggaaagccccccagggtcctggccagcttagaggcaatggggaggagcatgctgggcagactgtgcg

SEQ ID NO: 55216 - DNA, 523 bp, Homo sapiens
ggagaaaatgagaaaatagctgttgaggttttcccaaaagcaaacatctagagtaccactggctttttgtttcagaaaatgacagacattgtgaagaacactgttttttttttttttttttttttgagacggagtctccctctgttgcccgggctggagtgtgcagtggcacgatctcggctcactgcagcctccgcctcccgagttcaagcgattctcctgtctcagtttcctgagtagctgggactacaggygtgcaccaccaggcccagctaatttttgtatttttagtagagatggagtttcaccatattggccaggctggtctcgaactcctgactgaagaatgctgttttttaagtagctcaggcacatgtctgataactagagccggcataacatcccctccaggaagactgcggctggcctctgccaggtaaaccaaagtattatgtccttgtgcttttatttctgatttgaggactaatgattacccaattaattttgaaaagatagcaaaaaa

SEQ ID NO: 55217 - DNA, 523 bp, Homo sapiens
ggagaaaatgagaaaatagctgttgaggttttcccaaaagcaaacatctagagtaccactggctttttgtttcagaaaatgacagacattgtgaagaacactgttttttttttttttttttttttgagacggagtctccctctgttgcccgggctggagtgtgcagtggcacgatctcggctcactgcagcctccgcctcccgagttcaagcgattctcctgtctcagtttcctgagtagctgggactacaggcgtgcaccaccaggcccagctaatttttgtatttttagtagagatggagtttcaccatattggccaggctggtctcgaactcctgactgaagaatgctgttttttaagtagctcaggcacatgtctgataactagagccggcataacatcccctccaggaagactgcggctggcctctgccaggtaaaccraagtattatgtccttgtgcttttatttctgatttgaggactaatgattacccaattaattttgaaaagatagcaaaaaa

SEQ ID NO: 55218 - DNA, 531 bp, Homo sapiens
atctcaagtctcttcactgaagtctagtactcttatatttcatagacaatgaactggaccagatgaattcttctgttagtatgatgtatatcatatgaacttccaataattttaaagctaactttttattataaaaatgatacaggctcatggtaaagtcactgtgggaaacagtatggtgtttcttcaaaaaattaaaaataaaattaccaggcagatgtggtggctcacacctgtaatcccagcacttggagaggccatggtgggaggattgcttgagcctaggagttcaagaccagcctgggcaacacagcgaggtcccaactctacaaaaacaaattccaaaaattagttgggcatggtggagcatacctgtagtctcggctgaagcagaaggatcacttgagcccaggagttcaaggcttcaacaagccatgcttgtgccaatgyactccagcctgcgtgatagagtgagaccctgtctcaaaaaaaaagaaaaaaaaagaaagaaaaaggaattaccatatgatc

SEQ ID NO: 55219 - DNA, 855 bp, Homo sapiens
caaacaagaaacacacacacacacacagagtgaacttttaagtacccagcctgatgcccctcatggatgcgaaggcttctctacgctggcgactggaaatgcaaactactcccagccccgcgtgagtccttgaggtccctcccctgcttgctggcggctcttcccttaggttccagctgttccctcacatgcatgcacactcagctgacggctcaaggggagccttctgcacatgtctggagcttgctgtccctcttcatagcacacttacctctgtggaacagaattctacctttgcctccccaaattactagagcgtgtgaaaccactgtgagctgagcaagaaggatcagctttgataagtttgaagctgagcctctctctgatctctaaatcacactcccaaattgttggtcaaaagggagcacgacatgaacgttcagtttccagtgtctttttagtagagacggggtttcaccacggtgggccaggctggtctcgaattcctgacctcaagtgatccgcccaccttggcctcccaaagtgctgggattacaggcgtgagccaccgcgcctggcctgggtgtccatgcttgtgagcaagccctgcggacctggttagcatcccacgcacactcaggaactattcgacacatctgctcttgagcaggctttccactcttagaaacactggatccrtataacgaaacatctcctagtaaaacacctctgattttctaaagtgtggtctagcggcccacccagcatgtcggtatgcactgtcaccttcatcggcaactctctgctgtggctaggagtccacttcctggatcatggccaggaaacacatttccc

SEQ ID NO: 55220 - DNA, 756 bp, Homo sapiens
gagctsggatccaaacccacatagcaggcttcagagtgtatgttcttaatcataattatacagaaaatctcaaattaatagtttcaatccattattttggatttttctcaagagataaacatatcatttgcaaataatgatatgtttcattctcacttttctttgccaatagtgttactactacttatcttggctaattatattggctagacatttgaaaacaatgttaaacggcaggggcaatgaggtgggagggggtgcaacaggggagttttataggggtcgctcgagggagttcctctgtcatggcggatcagttgcacatcttgattgtggaggcgattaaatgaatctatgcgtaggatcaaattgtatagaatttagaattatttacacacacacacacacatgcaaatgagggcatactgaaaccagtgaaaactgagtaacgtttctattctagttaacagtattatataaatgtcagtttctcagtctttatgccacactccagttatgcaacatttcaccactggcagaagtggggtgaaggttttataggattctgtgcattatttttacaacttcttgtgagtctacatttcaaaatagtagtggcaaaagcaggtatcttcattttagcctagacatttaatagcaatgctttaggatttcacttatgattttgatttgaaataaatattatttacatacctaaagggtaatattcccacaaaacctagagaaactgagcta

SEQ ID NO: 55221 - DNA, 1740 bp, Homo sapiens
tccagacaagctgtgtaatggatgtatgtcagagattgtaaaatgactgcaggaaaaattcaattttccatcccccttgtttgtgccctccaaaaattccttatctttcatatcaattacagagacaaggagagtagacaaagtacttcaatgactatacatctagagtgataagagctagaaagaaaatgcataagttataatcttgggtcactctcaatatattacatactctgaaatgttatgtttacataatatgattccacaatgaaattatcttcaattccctataaactgaawtcaggcattcgctgctggctaagtctaagaaattaggttccaaaatcaaaggtaaaaattgttaggccaggtgcagtggctcactcttgtaatcccagcactttgggaggccgagacaggacgactgtttgagcccgagttcaagaccagcgtgggcaacaatgggcagatcctgtctccacaaaaattttttaaaaattagccaagtgtggtggtgtacacctgcagtcccagctaatcaggaggctggggtgggaggatcgcttgagcccaggaggttgagactgtggtgagccatgaatgtgccactgcactccagcctgggtgacagagcaagaccctgtctccaaaaacaaaacaaaacaaaacaaaattagggttactttaagttctagcccccaaactgctaaaattaaagaactcttatgcttaaatatctgaatataataatttaaattgagacatttaacaaggggacagaagggaaggtagattggaggaattactaacaatgagctatgtggaggagtttgtaaaaaatccgattaggcaaatcactactgaataatttgtatctttcaataatcgcagcataattgggagacgtaaatgaatactcatcgtccgtctgctgaacccaactggtcagttctgcttggtgaattaattctccaagtgcttgccttactccctgggtgaagtttactcactgtgcaaaatctgccacaacagttcgatgtcaatatctgggaattagggagtgtaatcacgcacatcagtcatataaatccactgggacagatcatgtcttactttatgtcctatgtgctgtctaatgcattactgataacaaaacaaccactttgttatcagaaattgtgacttattgttctgatgctccattagtaagcactgactccagtgcatctcccactgcacccttgagccaaacctgtgtttgctgtccgcccaaacgtgcctcactggggttgcaaaagggtgccagcctcaaagctgctgagccacagcacactgctgttctctggaatgaatgttgatcgggagtggttttgatatcagaacagaagacttccttttttaaaacaaaaccaagctcctctgaggtctgcacacacagagctcttcgcagagagccttcctgctggatggcctcctcccaagttttgccttctccttgggcttctctcttggacacgttttgacctcaagagcacacccagcctccatggtatatgttgttctgctttcattggagaaacgagggttttgggagggggacaaataaactttggcttgaatcctcaaacttcccattgactattcttgtgatctgggtcaataatttaacctcttagagcctcagtgtcctcagctttgaaacagagttgattgttaactcacagggctgtcgtggaatct

SEQ ID NO: 55222 - DNA, 695 bp, Homo sapiens
tgggtgacagcgcatcacttatttagatgttttgagacagggctagacctggttgccgctccactctaacacggtgctgtcctcaaggaaggaacggattattaccacaacagcaaacaagaggcggggctgcatgacactccgattttaaactaattacagcacaatccaccaggaatttaattaccagtacccgatcatcccgatggtgttcactacataaaggttccctgctttattctcccgacagcaagsaaaaatgtatcttcattaaatgataattggctgtaatatcttttgatttttcagaaacgctggccagaaagtttttacaaattttcctcaatcttgtgtggtgtttccacaaaagcctacatcagaagaaaaagatatctaagtctgcagaacacactctatcttactcccagtatcaataggtcttgagaatatctaatttcataataaatctggtgaagagacgcatccttcaatacatcacaccctcaccaggagcagggtggccaggtcctgaactgcagtgttcattgcttagagccctcactggatgccagaaagaagcacaattaaaacaattctgggggattctgcagattaatcaagacttctgacttttagaggttttcaaaataaaacttttagcagaaaaaaaaacaaaaaaaaaaaacacaaaaaaa

SEQ ID NO: 55223 - DNA, 695 bp, Homo sapiens
tgggtgacagcgcatcacttatttagatgttttgagacagggctagacctggttgccgctccactctaacacggtgctgtcctcaaggaaggaacggattattaccacaacagcaaacaagaggcggggctgcatgacactccgattttaaactaattacagcacaatccaccaggaatttaattaccagtacccgatcatcccgatggtgttcactacataaaggttccctgctttattctcccgacagcaagcaaaaatgtatcttcattaaatgataattggctgtaatatcttttgatttttcagaaacgctggccagaaagtttttacaaattttcctcaatcttgtgtgktgtttccacaaaagcctacatcagaagaaaaagatatctaagtctgcagaacacactctatcttactcccagtatcaataggtcttgagaatatctaatttcataataaatctggtgaagagacgcatccttcaatacatcacaccctcaccaggagcagggtggccaggtcctgaactgcagtgttcattgcttagagccctcactggatgccagaaagaagcacaattaaaacaattctgggggattctgcagattaatcaagacttctgacttttagaggttttcaaaataaaacttttagcagaaaaaaaaacaaaaaaaaaaaacacaaaaaaa

SEQ ID NO: 55224 - DNA, 657 bp, Homo sapiens
attatgagcagagtgaactgctttttgaaatgctttccatcacctttccagtctgtcaccacatttgttcctctttgaaggagcataattttgaccaaagggttccactctcgtgttaagactcttttcgattgccgagtgacaaagctgtgcccagcagagacgggagcacctgcgatggctaaggcagactcacagcacctcgagcacagctgatctcagggatacggtctggatctgtgttccatccaaatctcatgttgaactgtaattcctagtatgggaggtggggcctggtgggaggtgactggatcagagtcttgagggtggatttctcatgaatatttagcaccatcctcttggtgctgtcctcacgatagtgacttcttgtgagatctggctgtttaaaagtgtgtggcacctcccccttctctcgttccctcttgctcctgctctcgccatgtagcgcgyctcctccccctttgccttctgccatgattagaagcttcctgaggcctccccaggtgcagatgccaccatgcttcctgtacagcctgcagatctacgagccaattcaaccctttttctttataaattaccccgtcttgggtattctcttataacaatgcaagaacagcctaataacccttggtgatg

SEQ ID NO: 55225 - DNA, 657 bp, Homo sapiens
attatgagcagagtgaactgctttttgaaatgctttccatcacctttccagtctgtcaccacatttgttcctctttgaaggagcataattttgaccaaagggttccactctcgtgttaagactcttttcgattgccgagtgacaaagctgtgcccagcagagacgggagcacctgcgatggctaaggcagactcacagcacctcgagcacagctgatctcagggatacggtctggatctgtgttccatccaaatctcatgttgaactgtaattcctagtatgggaggtggggcctggtgggaggtgactggatcagagtcttgagggtggatttctcatgaatatttagcaccatcctcttggtgctgtcctcacgatagtgacttcttgtgagatctggctgtttaaaagtgtgtggcacctcccccttctctcgttccctcttgctcctgctctcgccatgtagcgcgcctcctccccctttgccttctgccatgattagaagcttcctgaggcctccccaggtgcagatgccaccatgcttccygtacagcctgcagatctacgagccaattcaaccctttttctttataaattaccccgtcttgggtattctcttataacaatgcaagaacagcctaataacccttggtgatg

SEQ ID NO: 55226 - DNA, 657 bp, Homo sapiens
attatgagcagagtgaactgctttttgaaatgctttccatcacctttccagtctgtcaccacatttgttcctctttgaaggagcataattttgaccaaagggttccactctcgtgttaagactcttttcgattgccgagtgacaaagctgtgcccagcagagacgggagcacctgcgatggctaaggcagactcacagcacctcgagcacagctgatctcagggatacggtctggatctgtgttccatccaaatctcatgttgaactgtaattcctagtatgggaggtggggcctggtgggaggtgactggatcagagtcttgagggtggatttctcatgaatatttagcaccatcctcttggtgctgtcctcacgatagtgacttcttgtgagatctggctgtttaaaagtgtgtggcacctcccccttctctcgttccctcttgctcctgctctcgccatgtagcgcgcctcctccccctttgccttctgccatgattagaagcttcctgaggcctccccaggtgcagatgccaccatgcttcctgtacagcctgcagatctacgagccaattcaacccyttttctttataaattaccccgtcttgggtattctcttataacaatgcaagaacagcctaataacccttggtgatg

SEQ ID NO: 55227 - DNA, 657 bp, Homo sapiens
attatgagcagagtgaactgctttttgaaatgctttccatcacctttccagtctgtcaccacatttgttcctctttgaaggagcataattttgaccaaagggttccactctcgtgttaagactcttttcgattgccgagtgacaaagctgtgcccagcagagacgggagcacctgcgatggctaaggcagactcacagcacctcgagcacagctgatctcagggatacggtctggatctgtgttccatccaaatctcatgttgaactgtaattcctagtatgggaggtggggcctggtgggaggtgactggatcagagtcttgagggtggatttctcatgaatatttagcaccatcctcttggtgctgtcctcacgatagtgacttcttgtgagatctggctgtttaaaagtgtgtggcacctcccccttctctcgttccctcttgctcctgctctcgccatgtagcgcgcctcctccccctttgccttctgccatgattagaagcttcctgaggcctccccaggtgcagatgccaccatgcttcctgtacagcctgcagatctacgagccaattcaaccctttttctttataaattaccccgtcttgggtattctcttataamaatgcaagaacagcctaataacccttggtgatg

SEQ ID NO: 55228 - DNA, 722 bp, Homo sapiens
ctttctcattattgaatactgtgagtagaaggcagtgaacgcaagaccttcatttcttttttttctgagacaggacttcactgtgtcacccaggctggagcgcagcggcatgatcatggctcactacagcctcaacctccagggctcaagtgattcttccatcttgcttcccaagtagctgggaagctgggactacaggcacgagtcacccaccactcttggccaatttttgtattttttgtggagaccaggtttcgccacgttacctaggctggtstcaaactcctggcctcaagttatccacccgcctcagcctcccaaaatgctgagaatgtaggcatgagccaccacgcccagctaagaccttcatttctggcagctccgaggacatcgctccagcagttactatggcctggagtctgttggtgttaacgaattgctgtaggctctttgaaggaaggacagggctggcgttttctatcagggactcctccccacagtagaaggagcttctgggactttgccttgggcgccaagtaagagaatgcttgcaaagcgctgaagctttggcatgtactacatgcccctctaccttttctcctgctcccttccccacatccgcttttcgctcctgcttcccctctcttcttccatctctcctgtcactcctccagcctaattcccctgggaaggatttgatatgaatattatggatcatacag

SEQ ID NO: 55229 - DNA, 722 bp, Homo sapiens
ctttctcattattgaatactgtgagtagaaggcagtgaacgcaagaccttcatttcttttttttctgagacaggacttcactgtgtcacccaggctggagcgcagcggcatgatcatggctcactacagcctcaacctccagggctcaagtgattcttccatcttgcttcccaagtagctgggaagctgggactacaggcacgagtcacccaccactcttggccaatttttgtattttttgtggagaccaggtttcgccacgttacctaggctggtgtcaaactcctggcctcaagttatccacccgcctcagcctcccaaaatgctgagaatgtaggcatgagccaccaygcccagctaagaccttcatttctggcagctccgaggacatcgctccagcagttactatggcctggagtctgttggtgttaacgaattgctgtaggctctttgaaggaaggacagggctggcgttttctatcagggactcctccccacagtagaaggagcttctgggactttgccttgggcgccaagtaagagaatgcttgcaaagcgctgaagctttggcatgtactacatgcccctctaccttttctcctgctcccttccccacatccgcttttcgctcctgcttcccctctcttcttccatctctcctgtcactcctccagcctaattcccctgggaaggatttgatatgaatattatggatcatacag

SEQ ID NO: 55230 - DNA, 1188 bp, Homo sapiens
ttcttcagaatcatctttactgctgcagtggtcaacttgtagcacccctaagctcacaggacatatgcttcaactggcatttcacaatgaacagtatgtggtagcttgagtcattgtgaggtcacttcctggaaatcaccagcctcccatatcccattagcaaggagctcagcactgctccttggataaccaaacctattcccaaatcccatctgtgtgggtctatctcctggtacccttcctaccatcaattctgtatttgtaggagtccaatcaggagacacaaaccactcaaaagtttaaactagaatgagcaaggtggctcacacctgtaatcccagcactttgggaggccaaggcgggtgaattgctttgagctcaggagtttgagaccagtctgggaaacatggcgaaaccccatctctacaaaaaacacaaaatttagcttggtgtggtggcacttacctgtaatcccagctactcgggaggctaagtcaggagaattgcttgagcctggcaggtagaggctgcagtgagtagaggttgtgccactgtactgcagcctgagtgagagcatgagacctggtatcaaaaagaaaaaaaatatatatatgtaaatttaatatagaaagtattaattttggccaggcaccatggctcatgcctgtaatcccagcactttgggaggccaaggcaggcggatcacctgaggtcaggagttcaagaccagcctgaccaacatggagaaaccccatctctactaaaaatacaaaattagctaggcatggtggcacatgctactcccagctactcggaaggctgaggcaggagaatcgcttgaacccggcaggtggaggttgcggtgagccaagatagtgccattgcactctagcctgggcaatccagcctgggcaacaagagtgaaactccatctcaaaaaaaaagtattaattttagcagaggatcagcataatgagggacacactagcacaaagtaaagacaactctagagaatacagaactagcagaggccaggcactgtggctcatgcctgtaatcccagcaatttgggaagcctaggcaggaggatcacttgaggccaggagttggagacctgtcagcgcaacatagtgagactatatgtctaccaaaaaaaagaaaaatattagcyaggtgtggtggtggtgc

SEQ ID NO: 55231 - DNA, 849 bp, Homo sapiens
aaggtccatcccgaaacatcagttagtagtcattatggaagacagcccactacactcattccaaatgatttttacctaacttcccaacttctaactttctagctaacaacttgttgtatattgagcacccgttgaaagacagacaccatgttccagagagatgggcggattgggagaaacatcttagaggaagtaggtattgaactggtttggctttgaaaaaaatgaasaagataccaacaggtgagtctgttggagaaagactattctagttagaggaataacctgaataaaggcatgaaagtgggagagttccatggtgcaggctagagattcttgtaatccccatcaagtattgggtgtatgttgcatatcctaacactttgaaaagcaagccctaaacaatggtactcaaacccttgcctgcatcagaatagcctggaggacttgttaagccgacttgtttgttaagccaactttctagaccattcccccagggtttctgattcagtagatctgggggaacaccagagatctgggggaaaaccagagaatttgcattcctaataagttcccaggtggttcggatgctgcagaccctggaagcacactttaaagagccactgccccacagggttggctgctacagaggaagagtgggctctagcaagcttatattgcctactttcaaagtgagggtgatacctcagaagtttgcctgagatcagctataaaacataatagtgccaggtccatcctaggcttgcttgtgcatgaattctcttcctgtcctgtagtctttcctgcaacttctaagcctttcccagaaggacttaaaatttgtaaatg

SEQ ID NO: 55232 - DNA, 1421 bp, Homo sapiens
aatttgaaaagaagtcctagtggagtcatcagctcaggagttgggtgtcgtgacaccagatctgattttgcctttcagctttacagaaaagaccatccccaatgttatcatctcacatcgctacaaagcccaggacactccagcccggaagacttttgagcaggccctgacaggcgccttcatgtctgctgtcattaaggacctgcggcccagcgccctgccctttgtcgccagcttgatccgccactatacgatggtggcagtcgcccagcagtgtggtgagcacgggggcacggtggggcacgggattggttctttgacttttataggtgctttaaaaacttgctcaggacattttgttgttctagaaaaagctgagtttggctgattgattttcggcttttattttccaattttccatttacgacattgataattggtatttcagtggtgggcactatatcagcttgaaagttactacctaccaagttttgtttgtaagatagacccaatttaataatacttctgtgtccaagtgctttgggacaagctgcctgtgaaacagacagtttgtgttcatactcactgctcaccttcctctgcctggctgtgttttccaaggccagtcttgccctccagaaacttctccatcacctgctccctgctctccaacccatgcctcgcagtctcccctgcgatgcccgtttctgctcccaggatcctcattctgctgttcctcctgcctggaacggctgctcacctccgtttcagtggctctcacactcttggtggtgaagggccacttgtatttgttcacttktatttccgatccattgtaggtgatgtctttgtaaaagacaataaaaatggccaggcacggtggctcacgcctataatcccagcactttgggaggccgaggtgggcggatcacctgaggtcgggagttcgaaaccagcctgaccaacatggagaaatcccgtctctactaaaaataccaaattagctgggcatggtggtgcatgcctgtaatcccagctactcgggaggctgaggcaggagaatcgcttgaacctgggaggcggaggttgtggtgagcagagatcgtgccattgttccagcctgggcaacaagagcgaaactccgtctcaaaaagaaaaaaaaagacaaaaaaaatgtcatgccactgccagttgctacataagtttctgaaaacctactgtcaatttcagcatctcctcccagaccagtcacagttcgtctgcagaccgcactggagtagcactgcccagttggtgtcctcaaagcccctcacccttaagatcaaccagcagagcacatagaattttcccctttaacttttcttggcctgacgggtcaatactgtacaatttagcactttgattgtttctcagtgtttgtt

SEQ ID NO: 55233 - DNA, 1826 bp, Homo sapiens
aagtggcaaagtggcatgagccactgtggttctcattttgaactaatatatttttgagttatgattgagatacatgaaaataacacagtgtatcatagaaaacgttcagaaaaatacagcctaaaggcatatcagaccacttaatttacacataattgcagtttaacagaagttggcttgaaatctcagtggtggctttttatggagtttcttttttttttaatttattttttttttgagacggagtctcactctggcggccaggctggagtgcagtggtgtgatctgcaacctccgtctcctgggttcaagtgattctcccgcctcagcctcctgagtagctgggattacaggcgcctgccaccatgcctggstaatttttgtatttttagtagagatggggtttcaccatgttggactaggctggtctcaaacttctatgtcaagtgatcctcctgcctcggcctcccagagtgctgggattacgggtgtgagccgccgtgccctgctttttatggagtttctaacttcaaggaaaacattggggagttctgcagtttgagggacaagactgttctcacgtgccttcccatctctccttttaggccctttcttgctgccttgctaccaggtgggcagccagcccagcacagccatgtttcacagtgaagaaaatggctcgaaaggaatggatcctttggttctcattgatgcaattgctatttgtatggcatatgaagaaaaggagctttgcaaaatcggggaggtggccctagctgtgatatttgatgttgcaagtatcatcctgggctccaaggagagggtaaggaagggttgaggagtgtcttctgatttggagggtgtctgtacctgagagtggtccttctagaaactgatagtttaagaattgcggccagacgcagtggctcacgcctgtaatcccagcactttgagaggccaaggcgggcggctcacctgaggttgggagttcgagaccagcctgaccaacatggagaaaccccgtctctactaaaaataaaaaaaattagccaggcgtggtggcgcatgcctgtaatcccagctactcgggaggctaaggcaggagaatcacttgaacctgggagatggaggttgcggtgagccgagatcacaccattgcactccggcctgggcaataagagcgaaactctgtctcaaaaaaaacaagaattgcagtaacgtgttgtggtttgttcattttcctctccaggcctgccagctgcccctgttttcttacatcgtggagcgcctgtgtgcatgttgttatgaacaggcgtggtatgcaaagctggggggtgtggtgtctattaagtttctcatggagcggctgcctctcacttgggttctccagaaccagcagacattcctgaaagcacttctctttgtcatgatggacttaactggagaggtaggtgatgggtggccccaaacctaaccatgctgtttttgaaatggtggtttcctgaagaatactataagatccttctgcaaatatgctctcctagcagcatggtgactttgatactcagatttcatttcagcatcttcactaaaaggacagctcagagctcccataggccttctgtgggtatctaaatacctgtttgctttgataaagaacagttacaggccacagtgtttaccacagtgtgtctgaaaaggggaattctgcttctcatgtgctgtttccggaggagctgcattcttaaacctatgcagatatgactcacaccagtagaacatgatgggcattgccagcttatctggtgaatgcaggggtcacattt

SEQ ID NO: 55234 - DNA, 748 bp, Homo sapiens
agtggaagcggtagaggtgggcgtcagcgggcagggccaggctgccgttgtccttggccaccaggctggccgagatggtcaccaccgctcccgtggtggcagggctatcggtggtgagattgagttcatacaggcctaggagcccagaaacaaagactgtgtttcagaatggtrtgtggcaaggagccccacagccacctctgggctggcatcaactattctatttcccaggtggagaaactgaggctcaggcagctcaagtgacttgcccaagggtcactcagccaattcgacatcaaacctgggtcccactgactccaaatcacagtcttttcagtcttatttccccttccttccttccctccctccctccctccttcttccttccctccttcctccttccctccttccttcctccttccctgcttctctttcttttcttccttcctttctttttctttcctttccttcctttctcttttcttttctctctccttccttccttcctctctccctccctcctctcttttttctttctttctcttctttctttttttctcccttccttccttccttttctttcttcttccttctttctttcttcctttcttcctctctctctctctctcactctctctctctccctttcgttctctggatctcactctgtaacccagactggagtacaatcatcacagttcgctgcagcctccaccttctaggatcaagagatcttcctgcctcagcc

SEQ ID NO: 55235 - DNA, 1325 bp, Homo sapiens
tggaggcagagtttgcagtgagccaagatcacgccattgcactccagcctgggcgacagagtgagactccgtctcaaaaaaaacttaaaagttgaactcctttctcttatgcttccttctccatcatgctgaactctgttgatatgccttttacactcgtgctttctcttgattttgtgcctttgcatgtgcttttcttagaatcttcttttctaccttttcatgggtagctcctacttgcctttcaagttttagtgtaaatgtcacttcaggaaggtgtcctccgcccttggttacatttagtaaatgatgtctcacagttatatgttcccttagttgttggcatatcccccctcatggttctgtatccttagtctttttgtttgatatctgtcttccttctgctgctgcctcccccatctctgagggcatgaatattatgtgttctgttcattattttatcccttttgagcacatgataggagtttagaaaatatttgttgaatgaataagtgaagcattaaacaagaaaaaggatttgggtgttagatatacttgatttgaatccacttccaaaactttactttttttttttttttttttttgatatgaggtcttgctatattgcccaggctggcctcgaattcctgggctccagtgatcctcccacttcagcctcctgagtagctggtactacagaccagctagtgtgcccattttcaaaacttaacctcttagatcctctttccttatctgtgaaatggagataatacctatcttagagataatacccatctcagactaaatgagaaagactaaaaggtacacagcacagtatttgacatgtaagtgctctgtaaataacaacacaacacttccgagcatttcctgtaggcagtgttagaaacttcataaactttgcatatattaactcatgcagtcttcacaatagtcctataaggaaggcgggaaataatatccccagagtttaggtaactgtccaaagtttctacttcctaagtgggacccagaaactgccctagtatcttcatgctgtagttttatttcctattctcctttttttttttttttttwaaaaaaatagagacaggatctcatgctgttgcctaggctggtgtgcagtggcatcatcatagctcactgctgccttgaactcccagtctgaagtgatccttttacttcagccctctgagtagctaagaccacagcataggcacgtgccacaatgcccagctttttaaaaaaaattttttgtagagatggagtcttgctctgttgcccaggctggtcttgaacttctgggc

SEQ ID NO: 55236 - DNA, 1325 bp, Homo sapiens
tggaggcagagtttgcagtgagccaagatcacgccattgcactccagcctgggcgacagagtgagactccgtctcaaaaaaaacttaaaagttgaactcctttctcttatgcttccttctccatcatgctgaactctgttgatatgccttttacactcgtgctttctcttgattttgtgcctttgcatgtgcttttcttagaatcttcttttctaccttttcatgggtagctcctacttgcctttcaagttttagtgtaaatgtcacttcaggaaggtgtcctccgcccttggttacatttagtaaatgatgtctcacagttatatgttcccttagttgttggcatatcccccctcatggttctgtatccttagtctttttgtttgatatctgtcttccttctgctgctgcctcccccatctctgagggcatgaatattatgtgttctgttcattattttatcccttttgagcacatgataggagtttagaaaatatttgttgaatgaataagtgaagcattaaacaagaaaaaggatttgggtgttagatatacttgatttgaatccacttccaaaactttactttttttttttttttttttttgatatgaggtcttgctatattgcccaggctggcctcgaattcctgggctccagtgatcctcccacttcagcctcctgagtagctggtactacagaccagctagtgtgcccattttcaaaacttaacctcttagatcctctttccttatctgtgaaatggagataatacctatcttagagataatacccatctcagactaaatgagaaagactaaaaggtacacagcacagtatttgacatgtaagtgctctgtaaataacaacacaacacttccgagcatttcctgtaggcagtgttagaaacttcataaactttgcatatattaactcatgcagtcttcacaatagtcctataaggaaggcgggaaataatatccccagagtttaggtaactgtccaaagtttctacttcctaagtgggacccagaaactgccctagtatcttcatgctgtagttttatttcctattctcctttttttttttttttttaaaaaaaatagagacaggatctcatgctgttgcctaggctggtgtgcagtggcatcatcatagctcactgctgccttgaactcccagtctgaagtgatccttttacttcagccctctgagyagctaagaccacagcataggcacgtgccacaatgcccagctttttaaaaaaaattttttgtagagatggagtcttgctctgttgcccaggctggtcttgaacttctgggc

SEQ ID NO: 55237 - DNA, 616 bp, Homo sapiens
ccacccaccttggcctcccaaagttctgggattacaggagtgagccactgcaccaggccatgtgagaatttctttaggtatatgtctaagagtgaaattgtaaggcatgcacattattaaccttaccattatgttattgcttaattgctttttaaaatgagtgccagtttagactyccaggagaaaaaggtaagagtttgtatttctcccaattcttgtcaacacctgatattcctagaccttagcattttatgttttaactagtataggtagagcttttttgttgatgcattttacatgccatttttttgtttataattttaaaaattatttttgattaaagtaaaggtatgtgataaaaaaatctaagtagaaaagcacattcaatgaaaagtgagtccactccccatttctgaccctatcccttagttttccttcccagggggaaggaacctattttttatgtatcccttcagagatattccatgcatctacaacatacgtgtatgtgtgcatacacacctacatggctccataccttgtttttctgatttaacacaagatcttggagccttttttcaattcattattatttatgtttacttcattttaaaat

SEQ ID NO: 55238 - DNA, 665 bp, Homo sapiens
atcctggaatgtgcagttggcatgtgctcaggaaacctgtgagcactggccatgagcaaaagtccagatgccctttttttttttttttttttttttgagacggagtcttgctctgttgcccaggctggagtgcagtggtgtgatcctggctcactgcaacctccacctcccgggttcaagagattctcctgcctcagcctcccaagtagctgggattacaggcacctgccacctgttataacagtattctctgtaatgatctattttaattttaatttaaaaaaacttttttagagatgagttctcactatgttgtctaagctgactttgaacttcctggctcaagcaatcctcttacctcaacctcccaagcagctggaactacaggtgtgtcactgtgcctggcaggagtttatcttgtcctgcttcatggactgtagtgtccaggggtacctagaattgttcacttacatgctgggagcagtgtcagggcatggtgtcagggaactcaccaggcagtgttcttttatataacaatgcagcctttttttttttttttagacagagtttcaatcttgttgcccaggctggagtgcaatggtgctatytcagctcaccacaacctccacctcctgggttcaagcgatcctcctgcctcagcctcc

SEQ ID NO: 55239 - DNA, 562 bp, Homo sapiens
aaatggaataaatgaaggagctgaaagaatggaagatatggtaccatttgtgtcacttgcttgctcgtacctgcacaaaatatttctggaaaggggatataaagaagctaacactgcgccttcagggagggaagaatagagaacagtgaagagttagtttgccatatgccctttgaaccatttgaagtttagacctgtttttaaagtttaaaccagctaggcacggtggctcatgcctgtaatcccaacacttcgggaggccaaggcgggcggatcacgcagtcaggagatcgagaccaccctggtcaacatggtgaaaccccgtctctactaaaaatacaaaaattagctgggcatggtggtgcatgcctgtaatcccagctactcgggaggctgaggcaggagaatcgcttgaaccagggagttggaggttgcagtgagctgagatcacaccacygtactccagcctggcgacagagcgaaactccgtctaaaataaataaataaataaaagtaaagtataaactaaataaataaataaaaataaaatataaaccaaaca

SEQ ID NO: 55240 - DNA, 1488 bp, Homo sapiens
gccgggcagacggctccgcggttcaggtttccacccttgttatttaaagcctgagcctggctcctggcaggcgggcaggggcggccgcctgcctgcgtgaccaggatgagaaatcgcagtcctgacgcgggcctgcgtgcctatggcaactggcgttgtggccttggagactaatctccgggctgtcagccggcggggactctccagcagggccacggctccctgcaaaggcccttggctgggggatcggacaaggctctcttccagtggaggagggggcgcttgcccctgcactggggcccctggccaggctcacagatccacatgttcccacggccacagcctccgtcacacacacacgtggggacaatcacaggggtggggacacagccaccagctcacaggcaccaatactctctcacactgtgtcccacaccgcacagggcccaacagcaggtgctcctgcccttgaaggattcccaggctggcagggaaaatgaccaaaaaaatagactactgggaaaaaaaaaaaagattaaaacacagtgcaaggatttgagctgagtgatggttacatgagtatacaagtcgggggaaaattcatcacacgggatgcttaagatttatgtacttgggctgggtgcgatggctcacgactgtaatcccagcacttagggaggccgaggcgggcagatcacttgaggtcaggagtttgagaccagcctggccaacatggcaaaaccccgtctctactaaaaatacaaaaattagctgggcatggtggacgcgcctataagccactcaggaggctgagacaggagaattgtttgaacccaggatggggacgttgcaatgagccaagaccacgccactccagcctagatgacagagcaggactctgtctccaaaaaaaaaaaaaaaaaaaaaagattcatgtactcatgtactttactggaagtaaattatgcttcagtgaaagataaaaataagtggcatggaagaagcccaggacggcgggtgaggcagtcagggtggggcttcctggaggaggtgacacctgagctgccgggaccctcccaggggagttggcgtttgcaggtgaggaggggagacaggcactgtgcccaggccctgctcttctacaagggaggcgccttccctgccccaccgcagcacccacctcccctagaaataaatgctgaataaataaagacctgtttgaaggagtgccaaattactggctgcccaggaaacccaaccgccagcctgggccgcccacgtgtcctggtcgggcctgagcggggccagaggctgtgggagtgggtgggtgggtggggaacaaatccagctctgcatggctggagtgtgcagggcagggcaggaagtggtgggcagagaccagcgtggccattggggtgaggccaaggatctcggaaggtcagcctcgctgcagggtgtggggcrggggtgagacgtgggcagtgaggg

SEQ ID NO: 55241 - DNA, 1334 bp, Homo sapiens
atcttttcctggctcactttaaggaaaaatttaatcaygttccctaattagtctggatgaactgttatttaggaaaaactttctcatataaacttagctttctaattttttctaatacacaagagctcaagttcttccaatgtttatcactgatgaatgattcttatccttcctggcctttgctcttcttagccctaaagtgaagccagcaatccaaatgaacataggatttgtgtgagcaagaactgccatcaactctcctgcaaagatcagtgagggcttttcattctgttagtggctctgccctctaaattcactgctctgtgtctgcaaatcacaaattaaaaatgtgttggttcataactaaaagctgcattccctttttctcgaaatttccagaatgctcctaaaatgttatatttatggtaaggcaaatatgtaaggcaattttgaatacttggaatattttgtctttactaagtacttttttaaaggttttttgttctgttttgttttttgtttgtttttgagacggagtcttgttctgttgcccaggctggtgtacactggtgttatctcggctcactgcaagctccgcctgccaggttcacgccattctcctgcctcagtagctgggactacaggcgcctggctaattttgtttttgtatttttagtagagacagggtttcaccttgttagccagggtggtctcgatcttctgacctcatgatccacctgcctcggcctccaaaactgctgggattacaggcgtgagccactgtgtctggccaggtttttttatctatttatttatttttgagacaccttttggctctgtcacccaggctggagtgcagtggcacgatcttggctcactgcaacctctgcctctagggctcaaactatcctcccatctcagcctcctgagtagctggaacacaggtgtgtgctgccagacctggctaatttttttatattgttttgcagagatgggggtctcactctgttgcccagggtggtctcgaactcctgagcctgaggattacaggtgtgagccaccgtacccggcttactaagtatttgaattgacttgagaatattttgaagttacacagatctagatacagaaactatgaaatagaatgaaagatttctgggtgtgtaattaattggacgaaataatcaaatgattaatattattatgacaattagaattactagaatctaaatgtatgtagatttttaaaaacctttcattaacatccctgagacaaccacaaagtagagcatagacacttgcatatctaacaaccaagaacccaactattgaag

SEQ ID NO: 55242 - DNA, 1334 bp, Homo sapiens
atcttttcctggctcactttaaggaaaaatttaatcacgttccctaattagtctggatgaactgttatttaggaaaaactttctcatataaacttagctttctaawtttttctaatacacaagagctcaagttcttccaatgtttatcactgatgaatgattcttatccttcctggcctttgctcttcttagccctaaagtgaagccagcaatccaaatgaacataggatttgtgtgagcaagaactgccatcaactctcctgcaaagatcagtgagggcttttcattctgttagtggctctgccctctaaattcactgctctgtgtctgcaaatcacaaattaaaaatgtgttggttcataactaaaagctgcattccctttttctcgaaatttccagaatgctcctaaaatgttatatttatggtaaggcaaatatgtaaggcaattttgaatacttggaatattttgtctttactaagtacttttttaaaggttttttgttctgttttgttttttgtttgtttttgagacggagtcttgttctgttgcccaggctggtgtacactggtgttatctcggctcactgcaagctccgcctgccaggttcacgccattctcctgcctcagtagctgggactacaggcgcctggctaattttgtttttgtatttttagtagagacagggtttcaccttgttagccagggtggtctcgatcttctgacctcatgatccacctgcctcggcctccaaaactgctgggattacaggcgtgagccactgtgtctggccaggtttttttatctatttatttatttttgagacaccttttggctctgtcacccaggctggagtgcagtggcacgatcttggctcactgcaacctctgcctctagggctcaaactatcctcccatctcagcctcctgagtagctggaacacaggtgtgtgctgccagacctggctaatttttttatattgttttgcagagatgggggtctcactctgttgcccagggtggtctcgaactcctgagcctgaggattacaggtgtgagccaccgtacccggcttactaagtatttgaattgacttgagaatattttgaagttacacagatctagatacagaaactatgaaatagaatgaaagatttctgggtgtgtaattaattggacgaaataatcaaatgattaatattattatgacaattagaattactagaatctaaatgtatgtagatttttaaaaacctttcattaacatccctgagacaaccacaaagtagagcatagacacttgcatatctaacaaccaagaacccaactattgaag

SEQ ID NO: 55243 - DNA, 1334 bp, Homo sapiens
atcttttcctggctcactttaaggaaaaatttaatcacgttccctaattagtctggatgaactgttatttaggaaaaactttctcatataaacttagctttctaattttttctaatacacaagagctcaagttcttccaatgtttatcactgatgaatgattcttatccttcctggcctttgctcttcttagccctaaagtgaagccagcaatccaaatgaacataggatttgtgtgagcaagaactgccatcaactctcctgcaaagatcagtgagggcttttcattctgttagtggctctgccctctaaattcactgctctgtgtctgcaaatcacaaattaaaaatgtgttggttcataactaaaagctgcattccctttttctcgaaatttccagaatgctcctaaaatgttatatttatggtaaggcaaatatgtaaggcaattttgaatacttggaatattttgtctttactaagtacttttttaaaggttttttgttctgttttgttttttgtttgtttttgagacggagtcttgttctgttgcccaggctggtgtacactggtgttatctcggctcactgcaagctccgcctgccaggttcacgccattctcctgcctcagtagctgggactacaggcgcctggctaattttgtttttgtatttttagtagagacagggtttcaccttgttagccagggtggtctcgatcttctgacctcatgatccacctgcctcggcctccaaaactgctgggattacaggcgtgagccactgtgtctggccaggtttttttatctatttatttatttttgagacaccttttggctctgtcacccaggctggagtgcagtggcacgatcttggctcactgcaacctctgcctctagggctcaaactatcctcccatctcagcctcctgagtagctggaacacaggtgtgtgctgccagacctggctaatttttttatattgttttgcagagatgggggtctcactctgttgcccagggtggtctcgaactcctgagcctgaggattacaggtgtgagccaccgtacccggcttactaagtatttgaattgacttgagaatattttgaagttacacagatctagatacagaaactatgaaatagaatgaaagatttctgggtgtgtaattaattggacgaaataatcaaatgattaatattattatgacaattagaattactagaatctaaatgtatgtagatttttaaaaacctttcattaacatccctgagacaaccacaaagtagagcatagacacttgcakatctaacaaccaagaacccaactattgaag

SEQ ID NO: 55244 - DNA, 636 bp, Homo sapiens
tcagttttatacctaattatatattcttggttttgaatttttttgcttaagaagggctcctcaaattgtataacatcaggttccagaagatctgtgtaagccactgactgtccctggggttgtagtcagcctggtcttctcttttttctaaattgagacggagtttcactcttgttgcccaggctagagtgcagtggctctatctcggctcactgcaacatctgcctcccaggttcaagtgattctcctgcctcagctttccagatagctgggattacaggcatccaccatcacacccgctaattttttgtatttttagtagagacagggtttcaccatgttggccaggctggtctcaaactcctgacctcaggtgatccacctgccttggccttccaaagtgctgggattacaggcatgaaccattacgcctggccaggctggtcttcttaaagcagaaggctagtaggtgacggcccccyaattggaatactttgacaacctttatccttcataaactgacatccactgccctcctcctacctttctcatgctatagaccagccatgtgcacactgacagctcctgggacacacagcttcattgttcgcccctcacctcctttgaccatgtgga

SEQ ID NO: 55245 - DNA, 937 bp, Homo sapiens
atgttctgcggtgtaagaagcatgccaggaatggaagggacaaatatgcaggaagtttgtccatccactttatatgtactacagtttgtggttatgagagcatcgaaggtattcagggcaatgacattctcattcatggcattccacttggctcctggggaatataaaccagttgtctcatgtaaaaaagtctcacactcccattaggaaaacattaggagaaaatagacataacagggacatatttaattttttaatgatcgtctaaagaccacaaagagtctgtgatatgaaagactttaaattcctctttgatctacgttagctgagtaatcaccacattatcacaacatgcgggggctccaagcatccgaaacagtacagatgtcatcccagcagacgccataccttctgcctctgtgcaagctgatgaacccatccaaactggctttcctcatctgtaaaatgggtagatattgggattttcttcatagattttaaggattaatgatcatgcaggaaacaggcttagcacagggtccagcacttaggaagtccttggtgggtgctaaggatgattcctaactcaggcaggcaggtattgaggcagtgcctccagcgtctggtccctacatcctatccacaaaatcagtgcagagggaacrtgcattacagcagcagacctagaagccaagagaaagaaggaatgttttagttcttctgaagttgagaccctggatatgttgagaaaactagcatggaataagagcggtcaaagaaaggctttaagaaataaagtcgctagaatttattgtttctgtctaacactaaataatccctgagaggactaacagcatcactggccgtcccaagtgatcaatttggaaagcaacatacagtcatgagttgcttaacaactggggatccattctgagaa

SEQ ID NO: 55246 - DNA, 1566 bp, Homo sapiens
gggcactcaacccacttttcctagctctatcttctggctcctgcatttgtgtctctccaaataagtttaaattaacaaatgggtagcctagtctcctcttctataggctgagaaggcaagtgtaaaagcccttagtacacacggcctggtgcgtagcaaatatacataaaatcccattgctatcattaattaccccaaagcaggatggattgatcaaggttgaatgatattttgatttttaaaggaatatatgcttacttctaccaattattttcttttcttttgacccatcttcattggatctaatttggagccttgtcctgctgtgtccctctcctgcgatgaggctacaggtggtccctctataagtgtatctaagtgtgacctgaccaccaaagggggtcatctctcacttcgtaatccatgcagttcaaactcacgccagctattctagcagctgcatgctgttgtagcttaaaagtgttaagtctcttttacacacacacttactaaaggctctgctttaacatctggaatatactaagcactgttccaagtaacccctttagttaattctgcatttccccaaaggagcaccataccttaagactgtgctcagcacacagtggttgctcaacttgttagattgaccagaatgccaccaagttcccagaagtttactagtgtctacacttactcaatgacgtaccctgcaaatgacagtctggggacagtcagggcttccaggaggcagcactgaggaaatgtgctctatgacagtaagatacatgaggtgccaacaggacaaggcccttgtgaaatgtgacagctccatgtgtttgccaaggatcagaaaaggatcccagctcagcaaagccagctcttatgtcccttcctaggggtgagcccacataagttagaggggacaacctcagaaccctgatttaggatttggacacaaagaacgcccatagatcccaacttttccgggttggaggtttgctctccacagcaggcagggcctatgttggcaactgtgcttccagaacggtcccccattccaaaacttgactcgctgcatctgacctatgataagcctacgtttggcatcaagatcatctgtggaaagagatccctgggtttctaagagcttaaactgaaaacacacctaggaggaacccatttctggagctgcttttggggctgtttcccctgaggggtgaaaggttaactctgcaacttttgaggctggggacctagctgtcagtgagttagttgcaagtataacaccaggaacatagattaagaaccaaggatggcaatataaagaaatgaagtgctgacacgtgctacaacatggatgagctataacacactatgctacatgacaggagmcagtcacaaaaggccacatggtgactggttccatttctataaatgtccacaacagccaatccatagggacagaaagtagattagggactgcctaaagcttgagggggcagagtggagggaggcagagattggaggataacagcaaaggggtatggagtatcatcttggggt

SEQ ID NO: 55247 - DNA, 1127 bp, Homo sapiens
atatatgctaattattaatattattgccattatggaaaaaaaaaatttttcagatggagtcttgagtcttgctctgttgtccaggctggagtgtagtggcacgatcttggcttactgcaacctctgtctcctggattcaaacgattctgctgcctcaccctcccgagtagctgggactgcaggtgggcaccaccatgctcagctaattttttgtatttttagtaggcagagtttcaccatgttggccaggctggcctcgaactcctgacctcaggtgacctgcccacctcagcctcccaaagtgctgggattacaggcatgagccaccgtgcatggctggaaatgtttattttaaaacaaaactgcaacctagatttgacgtttcctctccaagatgaatatacctgtacaattctattgataatcaatcagattgccttaactaaatgataatataaatcttgtgaatggacgtgtgtgttttatccayggtctgcttgaacagtcccataggtatactcattaaggatggtgtttcctgggcttcatccagatttcctggttcagaatcagaagggagaaaatagtgatccaaaactcaatcttcttaaaactatttctcaggtgatattatgcatgccaaagtttgagaaactctgaaacatcttcacctagaaaaagtttaaacagaaatcttttccgtaaatattgtagcggttgctgcagcagattcagtgagtgctgtttacgaaaatgtcagtagacagggtgaattccacataggctcctgtgaattatttacaggataactagtagagactcaagagtttttatataacctttctgtataccaaaatatcttctgaaattactgtggaagaatttcaccagtcatagaccaaccacatatatccgcaggcaccaccacccacgaccacacacacacacacactctctctctctctactgagaatagtagcctggatgtgatcattacccctgcaatctccactgatttcagtggggggtaaaaatctagcattctaaataaattatcctacttactcttactcacttcataagaaattaaaaatatattcttccaaaaagtatatttctaaatggga

SEQ ID NO: 55248 - DNA, 741 bp, Homo sapiens
gaattggacaatttatactaagtgaaataagtcaagcacagaaacacaaataccacatgttctcacttatatgtggaataagaaacaattgaactcaaagaagcagagagtagaatggtggttacagaggctgggggttgggaaatggggaaatgaagaaatgatggtcaaaggacacagtctcagacaggaggaatatgtttttgttttattttgttttagatctattgcccagcttgktaaatatagttgataatagtatattgtacatttcaaaattactaacagtatatttcaaatgttctcactacaaaacaatgataggtatgagataacagatatgttaattgactggatttaattattccacattgtattcataagtcatagcatcactttggaccccataaatatatacaatcataaagggtcaatttataaaaatttgttttaaagtgattgacacacccatattaagaaatacaatgttgaaaaaccagggatccatgtaccatagatcacctgattgattagtaaatgagacttctagtggatagatgcagcaattacgttagttatgaaacgatggctaatatctaggtttgcaaaaaagtaatcaaggaaaaaaacaaacactgttgattctacccttgaggtaagactgaccacaaatataggcagagtgaaaaatatccatctaaggtgaattttggcataccagaaaggaccactggctaacca

SEQ ID NO: 55249 - DNA, 543 bp, Homo sapiens
aaaaattagttaatcagattcagttaaacagatttagttaatctgttttgttattgttggttctgtaacactatctcatgttaaactaaatctgtttagtttaaagcactaggtttaaacgaagcttagctcaaaactcaaagctctaggtttctagtattggcattttccccatggtagttttttttttttttcttttgagacagagtctcatgtcacccaggctggagtccagtggcacaatcttggctcactgcaacctccacctcccrggttcaagcaattctcttgcctcaacctcccaagcagctggaactacaggtgcccacccccgcacctgtctaatttttgtattttttttcccatagagatggggttttgccatgttggccaggctggtcttgaactcgtgacctcaagtgatccacctgcctcagactcccaaggtgctggaattacaggcatgagccactgcacttggcctccccatggtagtcttgtttccatatgggcacatcaccgatttcagctttttgtgtttgt

SEQ ID NO: 55250 - DNA, 582 bp, Homo sapiens
gacgggtggagcagccaggtgagccccgaaaggtggggcggggcaggggcgctcccagccccaccccgggatctggtgacgctggggctggaatttgacaccggacggctgcggcggcgggcaggaggctgctgagggatggagttgggcccggcccccagacaaggcccgggggctccgccagcagcaggtccctcgggccccagccctcgctgccacccgggcctggagccccacacccgaggtaagccagcccacttgcctgtttctggtcccagccctggatggacgctcytgggctgggggagaggacaggaccacccccctcctctcctttcttgcatcctccctctcttgggccctcggcacagttctccgcccctcccagcccctcagtccctcttgtcgcttgttggactgtgctggccttgccggcccactgtaatgtgaggctcccgctgccgctacagggtgcagactggctgccaaggccacacttttggctaaaagaggcactgccaggtgtacagtcctgggcatgcgctgtttgagcttcgggggagagcccagcactggtccccg

SEQ ID NO: 55251 - DNA, 558 bp, Homo sapiens
tactcacttgggagggtctccagacactcagaatgtagagtcatggttgcatgaatcccaaagccccagtgagatcagtggccctcagtaaagatwcggagggaggttgggactgacacctacagagatcctcagctcaggttcgtcccggccacagctgctccacagagctcactgcctgatggcctcacttcagttcttgccacctcttgccagttccgaacctgatcgactcccaggcacacctggtccctttgtggtgtgtcctgcagtagcctccatccctgtggccctgagagcgatggcctgttggccactgattttcatcctgcacccctctgagtggggctgaggctgtgtcacccacattcattaatatccttgctctctacctagatcatctctgaaagtggtgaaggcagcagcccaggtcttgaatacattatggcaatatcgggacctccggagcatttataaaaaggtaacctacaagaatagctctggcataattagcattcatcagagcacacactcataatcatttattgtaatgaaatg

SEQ ID NO: 55252 - DNA, 642 bp, Homo sapiens
agtttattttattttattttattttattttattttattttattttattttttgagacagtctcttgctctgtcacctaggctggaatgcggtggcatgatctcggcttactacaacctctgcctcccaggttcaagtgattctcatgctcagccgccagagtagctgggattacaggggtgtgccaccatgcccagctaattttgtatttttggtagagatggggtctcgtcatgttggctaggctggtctcgaactcctggcctcgagtgatccacccgcctcaacctcccaaagtgctgggattacaggtgtgagccactgtgcctggcctgtattttattaattacaatgttatctgcaaaaacctggaaaaatagtatggctgtatgtgagatttaccccccatttagtcttcaggtgatacatggtatatacgctgagtcctggggaggtgggatgtggctcacagctagaaactgctgtgcaaaggaagagcwttggagccagaggagtctggcttggatttctaatattgctactcactagctgtgtggtctggagcaagtccctctctgaacctgtaaatgatgattaatatctgtcacacagaatttaggctctggagtcaagtagacctgat

SEQ ID NO: 55253 - DNA, 1103 bp, Homo sapiens
ttccagctggaaccattcccaattaattggatttaattttttttcccacgaaagtagaagaggaagaaatggagaagggaggaaagatttaattttttttttccgcgaaagtagaagaggaagaaatggagaagggaggaaagtggaaggaagcagtgaaattgggggagatataaaagctaaaaagttatttctggaaaaaccagagatgcaagatatttagctcttatctctcattgtctatttattcaataaatatttatcaagtatctactctttgacaggtactattctagactgtgsaagtagaacagaccaggtccctgctttcttaaagcttccattctagtgaagctgataaagtaaaggagaaataaaaataaataagcaagagcctggcacggtggtgcccaagtgtagtcccagctgcttgggaggctgaggtgggaggattgcttgggccggggaggtcaaggctacagtaagctgtgattgtaccactgcactccagcctgggtgatagagtgagatcctgtctctaagaaaaaaagcttcctagttttacatttgcctttcaatgttgtttatgacatttatcccatacagaaatttcaaaggtttatgtatttgatctatccctgtatgattttagttgtttagtcttataaggcataagaatacttttacatgtgtacacctatattttttctaatactttttatattatgttatccaaatctttgcttcaaatagtacctttttttttttttttaaagagacagggtcttgctctgtcaccgagactggagtgcaatggtgtaatcgaagttcactgcagcctcaaactcctgggctcaagcgatccttccacttcaacctccaagttgctaggaatattgtcatgccaccactatgcttggctattttgtttttaagtttttgtagagattaggtcacgttatgttgaccagggtggtctctgactcttggcctcaagcagtctgtccacactggcctcccacagtgcaaagattatatgtgtgagccactgtgccaggccccaaatggtattttttttataggagcactttgataaataacct

SEQ ID NO: 55254 - DNA, 1280 bp, Homo sapiens
ttggggatgaatagatgaaaaaatatccttgcctcagtatttaccatgctaggttgataactttggagcataagtagagagaagaaaagtttcttgtaaagacacatttcttaaaccaaccaaaagccttatcagtgaatgctccaaagccaatttgtgagtkatagaattacttagctttaaatatgactcttctcaggaaggcatggtcctgatccttattttgtgctcactgacaaagctataaaaatgcttctgaaatggggtctttacaaagcatgtatgttccactacaccccaaaacactgctttaccgacctgccacacactcccctactcacaggccccaagttggcttcctccgcttcatagaggtagtgatccagggtggcaaagtagtaaccaggttccacttcgttgcactgacgtccaatcatgtgaggccggcatgagcactggcctgactccgcaaagcaactggaagggaggaggagccacatcagctgagttcatggtcacgcgagtcaacccgccagaagcagctctacagctgccattactcagtacacaggaccaaatacatagcatgttcttgttttcttcagaaaatacatatgtggaaaaaagtagtgcctatggattaatcccaaactccagaagcgtggctgagaacctggtcttctcggttttacctcccttgccctctcttgactaacacgccgtccgcatcacatgaaggttttccacatcccaaaccttcttgctttggcatgttacatcttttgcttatttcctgagatttaggctcaaatatccagctccctgaagaacatctccagcttggctgtcccagagcatcccaaaccaacggatctaagacagaagccctcaatccctcggatggtctctatcagggtgaaggcactaccacctgctgagtcaaccaagtcagaaatttagtccccgttcttctccagattctttcttcacactccatcaggaaccaaattctgtgatttttacttctgcatcttgtgtctctcttccccctttccattggctatgctatgctaaatataagaaatgcggctgggcacggtggctcacgcctgtaatctcagcactttgggaggccgagacaggcggatcacctgaggttgggagttcgagaccagcctcaccaacatggagaaaccccatctctactaaaaatacaaaattagctgggcgtggtggcgcaggcctgtaatcccagatacttgggaggctgaggcacgaga

SEQ ID NO: 55255 - DNA, 1230 bp, Homo sapiens
ttgtttctgggagttagagttttacaatttatagttaaggaaactatgaaacaaactaaatattatttgtttacttcatttgtgagtaataaggtctttttaaaggaatgatcctgggcaagttccttaacctctctgagccttgcctgtataatggggataaagatattcaagtttcaggtgattgtgaagattaaataaggtttccaaagcatctggtttacatccaacacactataggcatttactaaatggtagttattattttgattattagcattttttacacaaaatgtttaagtttttaattcttatctcaatcctgtttctattatgcttaaaagatcaatttgacaaaatgtttaaatgcacattaccaagttagccttcacaattctttgaggcagttacccttattattttattattattattttattcttacaaatgataaaataatcacacacactccaaacccacactaaattggaaatactttttcttgggacatacagcttgttaacatggcagaaatggtacctgcattttcagacttctttgctctcttttctatgtcatgcagcttctctattgttcaatataaacataatcgaagaacattccaactaactgctagcattttttccctctaatcttgttctgtattactactcataatgcccaagttttgttcctcagcttcaatcacagtgattaattgaattatctcacactagatagtatcttgttacaccgtgccctcatataccttatgggattttcagcatgtttgcagagctcaagttataaccaggaatcagatgctggcctctactgctggccccacttgacctctctttgatcactcatttttctctcccatcccattttctagtttcctctaaagtcctctgtactcacttttgaccacaatatactgcttctgccccacatctctggcttgatctccagaatttgagwtcctttgagctcagttatgactcccttattattattattattattattattattattagagacaggatctcactgtcgcttggggtagagtgcagtggtgcaatcatagctcactatggcctcttaactcctaggctcaagcggtcctcctgtctcctgagtagctgggactacaggtgtggcccaccatgccctgctaatttttaaaatatttcagtagaggcagggatctttcatatgttgcccagg

SEQ ID NO: 55256 - DNA, 1004 bp, Homo sapiens
atggaccatatactgtcttataaaacacactccctagtattttaaatacatattgatctatttttaagataattatatctatcacaatgtgcaatttctcgggagcatgccaacataatttttcttaaaagctacttaaacagttgaagcgaaggggagagacattaatgcaaactagcatggaagttgcaccactaatatccatcagaattttcagacatcaaggaactcaraagtatagagaaaaaggggatcacataagggtaatatgactagaaacataaactgctttctaaaggtcggcaaaactccctttgaagtcaaaagagagttttacttacctaagaagcaaaggatttagttctcaaggagtattatttgaaatgatgttagtttaaattaggtctcagtaagtagagagcagttatggctgtaattgactttgttatataaaatcataccaactcagaccttagagctccctagattttattttctcatacagcaaatttctcagcttctgggcccattttaactccactgggatggtattcacatttccagtaaaggatttactgagaagtgatggatgattttaggtaaaaatatcaaagtttatctaatactttccaaaaaggacttcaaagatgaaacgtgttaaacaattctttctgttaaaaaaaaaaaaaatttgtcaccatgtgggagcaaattcaaaatgtttaagcggcttagcctatattatttgaccacaaatcaatgttatatcttgggaactgcatattaaatcttcggcctttttctttctttcttttttttttttattacaagtgagatgtttgggagagaaatattgtgattacaataaagttctgacattactgggtttgaaaataataattttgacttattcatcatgtccctaaaagtttgtgataaaatttgaaagttagctaagacacaaatttgaattctgtgaacttcaagtcaccttgctagcatat

SEQ ID NO: 55257 - DNA, 786 bp, Homo sapiens
gatcctttcatttaggtagcctaaggttccctgctccaggccctgcttttgcccttttaatgcctgctctgggctgtcatgcagcatcctatagagaaagaaactgagggggattctaaggattcagcatggtcactttaaacaattaccggatcatatagttcaattgctctcttactgtaattaaaagacaattcacagttcgcaatgtagtcccttttgacatttaattarggcttccaatctgcaaagcctgagtgctatcaatcaaattggagccagcagcagtagtgctcatttccacgtaaatagcagagaggtggttgttaccatacaaggtcccctctcaatctatgatgattaatcaggcaggtttttccagcaaacttattgagaaccttttccccaaccactgtgtagctcagagtctaaaagggtttttgcctgttttaaggtaaacaaatgggagttttaacacagtgtagaagcaaatagataactttttctcacccattttgcaagggtcactcctataaaagaagacagattaacaagagaaaagcacaacaaattgatagattgagacaaggtcttgttctgtcacccaggctagagtccagtggggtgatcatggttcactgcagcctcaaactcctgggctcaagcaatcctcccacttcagcctcccaaagcactggaataaccggtatgagccaccagccctggccaacaaatttataatatttaatcacagttttatatgacacaggagtcttcagaaatgaa

SEQ ID NO: 55258 - DNA, 1332 bp, Homo sapiens
tgartctcaaaataattatgctgaatgaaagaagctagacctaacagaatacatatgatattgctccctttatataaagttctagaaaatacaaactaatctctagtggcagtaagcaaaacagtggttgccaaggatcaggggaggagggctggagagggtcagggtgaaatggttacaaaagtcatgtgaaaagtatggctgactatctagattttggtgtacatatacgccaaaatttttccaatcatatgttttaatatgtacagtttcttatattcaatgaaacctcaaaaaactgttaaaaacaaaaatcaaagtcaaataaaagaagcaaatacattcagcagcccagttggtcattctaaagttctgcaggaatcctgaatgagactgagacattttaatgaatgccctgcaaaaataatgacaaagtagattggggacaactgtgatatagagttgcagacaggcagatttcggtatttttaactggaaattaattatcagcatatgtaagtttctatgggtcatttttatggtataacctactctacagtagaagagagttatactaagcactaacatgcttagtgctttctttattttctgatattgtcaagtttatgaatattttattaaactaatgagtgactgatacgtggggaacaggtttttattgcttgcttcttgcttttctttttttctttttatttcaggtggaatttcgctcttgttgcccgggctggagtgcaatggcacgatctcggctcactgcaacctccgcctcccaggttcaagcgattctcctgcctcagcctcccaagtagctgggattacaggcatgtgccaccacgcctgcctaattttgtatttttattagagacatggtttctctgtgttggtcaggctggtctcaaactcccgacctcaggtgatgcgcccaccttggtctcccaaagtgctgggattacaagcatgagccaccgcacccggccagcttgcttcttgtttttctcagtctcgcatttactttggtgtggtaattctaagcctcgcttatacagcacacccttatgaatggtataacaaaattggttaaaaatgtgagtcttttttttaagtaaacactgagttcccactcactgccttccagaaggttgcctcagttggatttggggctcatcggtgacatgtgctccatggtgtagtgctgttaacgtcaaccttttttttttctttttctttttttagaatagctttagatttacagaaaaattgcaaagatagtgcaggaagcttccatgtaccctgcgttctaacatcttacat

SEQ ID NO: 55259 - DNA, 1332 bp, Homo sapiens
tgagtctcaaaataattatgctgaatgaaagaagctagacctaacagaatacatatgatattgctccctttatataaagttctagaaaatacaaactaatctctagtggcagtaagcaaaacagtggttgccaaggatcaggggaggagggctggagagggtcagggtgaaatggttacaaaagtcatgtgaaaagtatggctgactatctagattttggtgtacatatacgccaaaatttttccaatcatatgttttaatatgtacagtttcttatattcaatgaaacctcaaaaaactgttaaaaacaaaaatcaaagtcaaataaaagaagcaaatacattcagcagcccagttggtcattctaaagttctgcaggaatcctgaatgagactgagacattttaatgaatgccctgcaaaaataatgacaaagtagattggggacaactgtgatatagagttgcagacaggcagatttcggtatttttaactggaaattaattatcagcatatgtaagtttctatgggtcatttttatggtataacctactctacagtagaagagagttatactaagcactaacatgcttagtgctttctttattttctgatattgtcaagtttatgaatattttattaaactaatgagtgactgatacgtggggaacaggtttttattgcttgcttcttgcttttctttttttctttttatttcaggtggaatttcgctcttgttgcccgggctggagtgcaatggcacgatctcggctcactgcaacctccgcctcccaggttcaagcgattctcctgcctcagcctcccaagtagctgggattacaggcatgtgccaccacgcctgcctaattttgtatttttattagagacatggtttctctgtgttggtcaggctggtctcaaactcccgacctcaggtgatscgcccaccttggtctcccaaagtgctgggattacaagcatgagccaccgcacccggccagcttgcttcttgtttttctcagtctcgcatttactttggtgtggtaattctaagcctcgcttatacagcacacccttatgaatggtataacaaaattggttaaaaatgtgagtcttttttttaagtaaacactgagttcccactcactgccttccagaaggttgcctcagttggatttggggctcatcggtgacatgtgctccatggtgtagtgctgttaacgtcaaccttttttttttctttttctttttttagaatagctttagatttacagaaaaattgcaaagatagtgcaggaagcttccatgtaccctgcgttctaacatcttacat

SEQ ID NO: 55260 - DNA, 1332 bp, Homo sapiens
tgagtctcaaaataattatgctgaatgaaagaagctagacctaacagaatacatatgatattgctccctttatataaagttctagaaaatacaaactaatctctagtggcagtaagcaaaacagtggttgccaaggatcaggggaggagggctggagagggtcagggtgaaatggttacaaaagtcatgtgaaaagtatggctgactatctagattttggtgtacatatacgccaaaatttttccaatcatatgttttaatatgtacagtttcttatattcaatgaaacctcaaaaaactgttaaaaacaaaaatcaaagtcaaataaaagaagcaaatacattcagcagcccagttggtcattctaaagttctgcaggaatcctgaatgagactgagacattttaatgaatgccctgcaaaaataatgacaaagtagattggggacaactgtgatatagagttgcagacaggcagatttcggtatttttaactggaaattaattatcagcatatgtaagtttctatgggtcatttttatggtataacctactctacagtagaagagagttatactaagcactaacatgcttagtgctttctttattttctgatattgtcaagtttatgaatattttattaaactaatgagtgactgatacgtggggaacaggtttttattgcttgcttcttgcttttctttttttctttttatttcaggtggaatttcgctcttgttgcccgggctggagtgcaatggcacgatctcggctcactgcaacctccgcctcccaggttcaagcgattctcctgcctcagcctcccaagtagctgggattacaggcatgtgccaccacgcctgcctaattttgtatttttattagagacatggtttctctgtgttggtcaggctggtctcaaactcccgacctcaggtgatgcgcccaccttggtctcccaaagtgctgggattacaagcatgagccaccgcacccggccagcttgcttcttgtttttctcagtctcgcatttactttggtgtggtaattctaagcctcgcttatacagcacacccttatgaatggtataacaaaattggttaaaaatgtgagtcttttttttaagtaaacactgagttcccactcactgccttccagaaggttgcctcagttggatttggggctcatcggtgacatgtgctccatggtgtagtgctgttaacrtcaaccttttttttttctttttctttttttagaatagctttagatttacagaaaaattgcaaagatagtgcaggaagcttccatgtaccctgcgttctaacatcttacat

SEQ ID NO: 55261 - DNA, 1332 bp, Homo sapiens
tgagtctcaaaataattatgctgaatgaaagaagctagacctaacagaatacatatgatattgctccctttatataaagttctagaaaatacaaactaatctctagtggcagtaagcaaaacagtggttgccaaggatcaggggaggagggctggagagggtcagggtgaaatggttacaaaagtcatgtgaaaagtatggctgactatctagattttggtgtacatatacgccaaaatttttccaatcatatgttttaatatgtacagtttcttatattcaatgaaacctcaaaaaactgttaaaaacaaaaatcaaagtcaaataaaagaagcaaatacattcagcagcccagttggtcattctaaagttctgcaggaatcctgaatgagactgagacattttaatgaatgccctgcaaaaataatgacaaagtagattggggacaactgtgatatagagttgcagacaggcagatttcggtatttttaactggaaattaattatcagcatatgtaagtttctatgggtcatttttatggtataacctactctacagtagaagagagttatactaagcactaacatgcttagtgctttctttattttctgatattgtcaagtttatgaatattttattaaactaatgagtgactgatacgtggggaacaggtttttattgcttgcttcttgcttttctttttttctttttatttcaggtggaatttcgctcttgttgcccgggctggagtgcaatggcacgatctcggctcactgcaacctccgcctcccaggttcaagcgattctcctgcctcagcctcccaagtagctgggattacaggcatgtgccaccacgcctgcctaattttgtatttttattagagacatggtttctctgtgttggtcaggctggtctcaaactcccgacctcaggtgatgcgcccaccttggtctcccaaagtgctgggattacaagcatgagccaccgcacccggccagcttgcttcttgtttttctcagtctcgcatttactttggtgtggtaattctaagcctcgcttatacagcacacccttatgaatggtataacaaaattggttaaaaatgtgagtcttttttttaagtaaacactgagttcccactcactgccttccagaaggttgcctcagttggatttggggctcatcggtgacatgtgctccatggtgtagtgctgttaacgtcaaccttttttttttctttttytttttttagaatagctttagatttacagaaaaattgcaaagatagtgcaggaagcttccatgtaccctgcgttctaacatcttacat

SEQ ID NO: 55262 - DNA, 557 bp, Homo sapiens
cctcagggcaccaggaaggaggagactgccctgcctgtgccatcctacctgctgagagtcccagcatcccacgggtagccctggcatctggaaggcaggccttggacagaatatcctctggccaattcgggccaaagcaggagtgctgaggtgtcacaatgacatacctccccctgtaccagcactgactccctccctcctagaggccccatggcctcttcccatccagctgccactcagggaccccatgtctcccttctctgtggactccaggcccaatatagtctacaaactccctggaccctgagtcttttcttttagggtccatctgcaaaaccgtagctgtaggcagactcccctgggctaggagagtggaggccaccctgaggccacagcatccctgcccctggttgccctgtgcctgccagcagtgagctyctctgctcggtcactttctccctgcagactctcagtttgtgcccttattcctatcatctctgataaaaagagacccataggggacactgcctcaactttgtcataaagcctcacccctg

SEQ ID NO: 55263 - DNA, 263 bp, Homo sapiens
cacwcacacacacacacacacacacacacacacacactctcaaactttctttgcccttcattttggtttgtgtctttccttactcctaaaggagaaggcaggaccaagactttttccccctgatatgtatccacaggtttcatattttcccatgttcttttcacttttcttttggttgtgagtttttgataggggtaggggtgaggggtgtaataggtaaataaaggacttcagcagtaaaataccagaaagatccttttggg

SEQ ID NO: 55264 - DNA, 762 bp, Homo sapiens
actgtctcttggctgcttgagacatcgcttctatttgtaagtctctattaaatgtttctttytgagaaactggatttgtcagtctctttctttggctgctcagctccctcagcagttgggagtaggtgtgcacagacctgctcaccaacagaacaagtgacaatgaaacttatgccttggaacctcaattttgttcaagttacttctgtacattttggcaaggtttgaaggaaaggagtaacaaccaaattatctctcaataagaaaaatccaaaactggtcaggcgtagtggctcacacctgtaatcccagcactccaaggagggcagatcacttgaggtcaggagttggagaccagcctggccaacacggaaaaaccctgtctctactaaaaatacaaaaattagcaggacgtggtggcatgtgcctgtaatcccagctattcaggaggctgaggcacgagaattgcttgaacctgggaggtggaggttgcagtgagctgaaatcacatcactgcactccagcctgagcgacagagcaagatgtctcaagaaaaaagaaaaagaaacctatcttcatctgcctgctctttggggaaagaagtctgggtttcagccaagtatgtgattggcaccaggctggttgagatgactgatgattagacagctgttgagaggctgacatttacaaagggaaaaggaaatataaaatcaggcatcttctaaccatctcctttttcaatttttaataaaaagctgctga

SEQ ID NO: 55265 - DNA, 597 bp, Homo sapiens
agggcctgcccctcctggttccttccagtacctgcagagccagaccacagcctcccttgccctgctctgaagaatgttcgagaagggcaggaatgtgcaatggagagggaatgggcatcatccggctgcacccctggatgcccccagctacaccagaccctctaccagaggaaagaaagacacagaatacggccaggggaggtggctcacgcctgtaatcccaacactttggcaggttgaggcaggtgggtcacctgaggtcaggagttcaagcccagcctggccaacatggtgaaaccccttctctactaaaatacaattagccatacatgatagcggggtgcctgtaatcccagctactcaggaggctgagacaggacaatcacttgaactctggaggtggaggttgtagtgagtccagatcgtgccactgcactccagcctgggygactgagcaagactccgtctcaaaaaaagaaaagaaaaaaaaacacaaaacacagaattgaacctcgctctctgcagctcaccgggggacgggcacagccagagtcaatgcccacggctcatccgaggtctcaggggcagcaagggcag

SEQ ID NO: 55266 - DNA, 1518 bp, Homo sapiens
aagttatttattgaatccttaccacgtgccaggggacacataagtgatcaagagaaacagtcttgggccgggcgcaatggctcacgcctgtaatcccagcatgttgggaggccaagttggttggtcatttgaggtcaggagtttgagaccagcctagccaacatggtgaaaccccatctctaccaaaaatacaaaaaattagccaggcatggtggcagacacctgtggtcccagctacttgggaggccgaggcacaagaatcacttgaacccaggaggcggaggttgcagtaagccaagatcacaccactgcactccagcctgggtgacggtagtgaaactctgtttcaaaacaaaaaaaaaagaaagaaaaaaaagagagagacacagtcyctgctgtcacacagtttataatttaactagggtgtatcaatttaaaagtttaatgtttcaagtgaaagaaaacaatctcaaataggcttgagtaatacaggaatttattgtctcactggagatccaggcacaatttgatccaagattcaaacagcatggatccatttcttggctctgcttcctttgagttggattcattctttagccaccacatgttggaacccctctctcctggcagcttcaagttttccacgacggctgcagcagatctaagacataccatttaccaggctgacaagagtccaagttccagcaatccctggaggtccatcctgagaaggccatctcaggttatagaccagcataaatcgggagctcacaggacagaagacactgattggctcacgcccagtggggcccaccccctgatatgggaaagttgggccctttccacttccagaaatttgggcacctatttggaagggagaaagggccacaactaataactgtttatgatagaaggaaaaacaataaatatgcttatacttctgctctgagggaatcattcagcctgcagaaaatggagacatctcattactacctggcgagtcaaacacaggcctggggatccagagatgtatttggattccaaattctgtgtgggcccctatacacagctgacccttggggacactgtaaaggttgatacatgatagactttgctccttgatctggcccttcagtagttacccttggactgtattctgctgtgtgatagcttttcccttattgattgattgattgattgattgattgattgatttgagatggggtctcacccaggctgaagtgcaatggtgcagtctaggctcactgcaacctctgcctcctgggttcaaatgattctcctgcctcagcctctcgagcagctgggattacaggcgcatgccaccatagccggctaatttttgtatttttagtagagatggggtttcaccgtgttggccaggctggtctcgaactccttgcctcaagtgatctgcccgcctcggcctcccaaagggctgggattaccggcatgagccaccacagaggagagtatgtgcctgagagagatgctaaaagg

SEQ ID NO: 55267 - DNA, 561 bp, Homo sapiens
atttatatcacaccttatggtwtggtaagcactgagggtgtaattggaaaagaaaaatatgtgttaccattttcctctagaattgcatcctctagtggggaatgctagacagcaatggttgaagaatcaagtttttcaggccctagagttttcccagatttgtccctagcttttagactgctgagatgaattacctaacgaagctgtgaagaaagaaagcattaggatgcctcagtagccaaagggccatgtcctaatctcatcttgtagctctaaagatagaaaaagacagtgagaaagttgccatatcacttccctgcttaaaaccccttgatggtttctgatactctttggagcaagtctgaaatcttcactttgcttccaaaggcccgcaccatctggtgcctgcccgtgcctccagcctggtcaccctttgtttccccccaacaacaccagataagtctcagtttttctagcttgctgtggttctgtccaccacaggacctttgcacctgccatttcctctgccttttgcctgaccaaatctctctaattctcaaa

SEQ ID NO: 55268 - DNA, 746 bp, Homo sapiens
ataaagacacatgcacacgtatgtttattgcggctctattcacaatagcaaagacttggaaccaacccaaatgtccaacaatgatagactggattaagaaaatgtggcacatatacaccatggaatactatgcagccataaaaaatgatgagttcatgtcctttgtagggacatggatgaaattggaaatcatcattctcagtaaactatcgcaaggacaaaaaaccaaacaccgcatattctcactcataggtgggaattgaacaatgagatcacatggacacaggaaggggaacatcacactctggggactgttgtggggtggggggaggggggagggatagcactgggagatatacctaatgctaaatgacgagttaatgggtgcagcacaccagcatggcacatgtatacatatgtaactaacctgcacattgtgcacatgtaccctaaaacttaaagtgtaataataataaaattttttttaaaagctggaaataaagccaaaagtataccaaaaaaaaaaaaggcaaaacaaaaaawtttttttttaattaaaaaataaaataaaggaagatgggctgatagggtgagggttagagaggggtggcatgaaaagatcaaatatccagggagatctgattttcacagttcatggtgaatactaattataagcttggaagctttattgtgggggcttcgtcaaaatgcccccaaaccaaaatagctgcctcagaacttgtcgt

SEQ ID NO: 55269 - DNA, 1096 bp, Homo sapiens
tattgctcttctgcttttttaaactataaaataggagtgattataacagatgtgtttaaatttctcactatatgcatgatagtgtattgaataaccagtggtagtcaatgtcttcatgtaaactgaataatttcttacaatcttttgttatgaaataaaaaaaaaaaaaactaaagaaattttggcatcagttttctacatctcccagtctctaatcaggtttttgtctaaactacaggccagattttttgtaaatgaatctcctaaaaacttgttgggaagaaggaaagattattatggagttgagaatggaatagacggtcagagaagttggtaaaacacaacttgtttaccctgtttgctaaagacaaagggcaggatgtagaaaatgccaaaataatactccatattcattcaggttcatattgtgattgaaatttcacatgagcagaggacaaaggctaacawagaaagttattagctttgggtcataaagaaagttaaaaactccccctgaaatacatcaaaagactgagagccccctggaaacgactgggcaacatttctaatgctgtgaagtcaggccatagcattgcttagctactttccaatgtagtagaaatgatgccgataagataacatcgagatttacaaaataaaaataagaaggcccagcataggccaagatgtggattatatcacagttatggttttcaattacgtttaacaatcaggttattgtccctcagtacacacttggctagatctacaggttaactgtgacaatggcttaccttggtgagtgtgtttttcatctttaatggcattcaacgtgcaatatgcctttaaaattcattgaatacataagcatatcatagacctaatttcacatgtcacaattttaaaagtatagattttttcccccatcatggttacttccttggtgttttttttggaactttcctggaggcagtgggcacagtttcagagtaactcctaatgtataaatttggagagggcaaggggaagggaaggaatagtcacatctttatcagtggatccagacctatccattggcctggaaacttcttttatc

SEQ ID NO: 55270 - DNA, 1096 bp, Homo sapiens
tattgctcttctgcttttttaaactataaaataggagtgattataacagatgtgtttaaatttctcactatatgcatgatagtgtattgaataaccagtggtagtcaatgtcttcatgtaaactgaataatttcttacaatcttttgttatgaaataaaaaaaaaaaaaactaaagaaattttggcatcagttttctacatctcccagtctctaatcaggtttttgtctaaactacaggccagattttttgtaaatgaatctcctaaaaacttgttgggaagaaggaaagattattatggagttgagaatggaatagacggtcagagaagttggtaaaacacaacttgtttaccctgtttgctaaagacaaagggcaggatgtagaaaatgccaaaataatactccatattcattcaggttcatattgtgattgaaatttcacatgagcagaggacaaaggctaacatagraagttattagctttgggtcataaagaaagttaaaaactccccctgaaatacatcaaaagactgagagccccctggaaacgactgggcaacatttctaatgctgtgaagtcaggccatagcattgcttagctactttccaatgtagtagaaatgatgccgataagataacatcgagatttacaaaataaaaataagaaggcccagcataggccaagatgtggattatatcacagttatggttttcaattacgtttaacaatcaggttattgtccctcagtacacacttggctagatctacaggttaactgtgacaatggcttaccttggtgagtgtgtttttcatctttaatggcattcaacgtgcaatatgcctttaaaattcattgaatacataagcatatcatagacctaatttcacatgtcacaattttaaaagtatagattttttcccccatcatggttacttccttggtgttttttttggaactttcctggaggcagtgggcacagtttcagagtaactcctaatgtataaatttggagagggcaaggggaagggaaggaatagtcacatctttatcagtggatccagacctatccattggcctggaaacttcttttatc

SEQ ID NO: 55271 - DNA, 632 bp, Homo sapiens
acaaggacagtcaggctacccttgagtttcccactcaagactcccccgctgacctcctgccttctggctcagatactgttctccaaggtcacttctgcctgccttctscatgttcttcttaaagtggcatggtgagtttaagttctcatttcatgccaactcaacactgattgtgcctgagccactcagaaggtgggagggggcacaacgctgcctcttcatttcggcagtggtcacgtactgcaggttgtgaaaagcgcaggtgagttataggcgcagctttgccaccaattagagctggttgtgtcatctcagacaacttgcttttcttctccagaccttgatcttctcatctatcacatgatttctaagaaggctttagagaggactagcatgggttccgatgctggctttgtcacttattaactgtggtcttggataagctgcttaacctctctaagcctcagttttctcatcggtaagatggggataataatgcctgtctcatagggttattgagaagatttagtaacatctgtaaagaccctagcacagagcctagcccacaatcagtcctcaataaagagctgctggctaagacatatttctgctggaacattctgtggctctgg

SEQ ID NO: 55272 - DNA, 632 bp, Homo sapiens
acaaggacagtcaggctacccttgagtttcccactcaagactcccccgctgacctcctgccttctggctcagatactgttctccaaggtcacttctgcctgccttctccatgttcttcttaaagtggcatggtgagtttaagttctcatttcatgccaactcaacactgattgtgcctgagccactcagaaggtgggagggggcacamcgctgcctcttcatttcggcagtggtcacgtactgcaggttgtgaaaagcgcaggtgagttataggcgcagctttgccaccaattagagctggttgtgtcatctcagacaacttgcttttcttctccagaccttgatcttctcatctatcacatgatttctaagaaggctttagagaggactagcatgggttccgatgctggctttgtcacttattaactgtggtcttggataagctgcttaacctctctaagcctcagttttctcatcggtaagatggggataataatgcctgtctcatagggttattgagaagatttagtaacatctgtaaagaccctagcacagagcctagcccacaatcagtcctcaataaagagctgctggctaagacatatttctgctggaacattctgtggctctgg

SEQ ID NO: 55273 - DNA, 632 bp, Homo sapiens
acaaggacagtcaggctacccttgagtttcccactcaagactcccccgctgacctcctgccttctggctcagatactgttctccaaggtcacttctgcctgccttctccatgttcttcttaaagtggcatggtgagtttaagttctcatttcatgccaactcaacactgattgtgcctgagccactcagaaggtgggagggggcacaacgctgcctcttcatttcggcagtggtcacgtactgcaggktgtgaaaagcgcaggtgagttataggcgcagctttgccaccaattagagctggttgtgtcatctcagacaacttgcttttcttctccagaccttgatcttctcatctatcacatgatttctaagaaggctttagagaggactagcatgggttccgatgctggctttgtcacttattaactgtggtcttggataagctgcttaacctctctaagcctcagttttctcatcggtaagatggggataataatgcctgtctcatagggttattgagaagatttagtaacatctgtaaagaccctagcacagagcctagcccacaatcagtcctcaataaagagctgctggctaagacatatttctgctggaacattctgtggctctgg

SEQ ID NO: 55274 - DNA, 632 bp, Homo sapiens
acaaggacagtcaggctacccttgagtttcccactcaagactcccccgctgacctcctgccttctggctcagatactgttctccaaggtcacttctgcctgccttctccatgttcttcttaaagtggcatggtgagtttaagttctcatttcatgccaactcaacactgattgtgcctgagccactcagaaggtgggagggggcacaacgctgcctcttcatttcggcagtggtcacgtactgcaggttgtgaaaagcgcaggtgagttataggcgcagctttgccaccaattagagctggttgtgtcatctcagacaacttrcttttcttctccagaccttgatcttctcatctatcacatgatttctaagaaggctttagagaggactagcatgggttccgatgctggctttgtcacttattaactgtggtcttggataagctgcttaacctctctaagcctcagttttctcatcggtaagatggggataataatgcctgtctcatagggttattgagaagatttagtaacatctgtaaagaccctagcacagagcctagcccacaatcagtcctcaataaagagctgctggctaagacatatttctgctggaacattctgtggctctgg

SEQ ID NO: 55275 - DNA, 601 bp, Homo sapiens
atttttaagttgtggagtatacttttaaagataaaaataataagccaggtctcttaatacttatctaaagaagtgtttgtataacatttaataaaatgttttatctcagtggcatttggatttaaaaattattttgggctgtcacagaatgttgacttttcttaatctgttacatagggctgtgggtctggatttccaggaaagcggagacctcgaggtgcaggactgtcggggtgaggtggccgaggcaggtcaaagctgaaaagtggaatcggagctgttgtattgcctggggtgaggcttccttcatgtatattttatctaatctaaatgtcagttaatgatgacaatctcatagcaagttattttgaacttaagagtcatataaataggtcaaaatgtttattttactgttctactttgctttttttttgagcctctggttacgttttcttgtatakttactttctcatcctttctctattcttaccttcctctttgactccttatctttctatgccacccctctctaaaaagtcagtatgtaatatagttgctcttttacttaaaaaattttaagattgttatttgcttactatca

SEQ ID NO: 55276 - DNA, 705 bp, Homo sapiens
acccgactcggcctcccaaagtgctgggattacaggcgtgagccacygtgcccggcctatccttgttttatggacaagaaagctgaggcagaaagtgctcaaatactctgcttaggatcacgtggtaataggtgaacttttcccccccaaccccccgacaacgtatacctctgttcactcataatgttgcagaggcagaatgtttaatcctgagctgggaggcccgtgttgggcatagaacagctcagctggtgagttagctaccccatagccacagctccgtgtgacagtttgttttcctttttgtgacaaatgacactgaaaaagctagactccaagaatattcgcaaatcaggatgaagtgacagttaaaggagtcctctattgcacagggttctatatttatatatagtctgtattgcacagggttctgtatttatatatagtctctgattctcagttttctcatttataaactggagatcaatacgcgtatcttgcagagaactgttgcaaggattcgaggtaatataacaaagtgattgacatgcagtatggcttcaaacagttgttattgatgctattttgattatgggatacccaagatgattatttgccaaatgtagtggtatttaactttggggtaaacagagcctttatcttatgaaagctgtggctctgatgtgcctatatacatacacacaa

SEQ ID NO: 55277 - DNA, 705 bp, Homo sapiens
acccgactcggcctcccaaagtgctgggattacaggcgtgagccactgtgcccggcctatccttgttttatggacaagaaagctgaggcagaaagtgctcaaatactctgcttaggatcacgtggtaataggtgaacttttcccccccaaccccccgacaacgtatacctctgttcactcataatgttgcagaggcagaatgtttaatcctgagctgggaggcccgtgttgggcatagaacagctcagctggtgagttagctaccccatagccacagctccgtgtgacagtttgttttcctttttgtgacaaatgacactgaaaaagctagactccaagaatattcgcaaatcaggatgaagtgacagttaaaggagtcctctattgcacagggttctatatttatatayagtctgtattgcacagggttctgtatttatatatagtctctgattctcagttttctcatttataaactggagatcaatacgcgtatcttgcagagaactgttgcaaggattcgaggtaatataacaaagtgattgacatgcagtatggcttcaaacagttgttattgatgctattttgattatgggatacccaagatgattatttgccaaatgtagtggtatttaactttggggtaaacagagcctttatcttatgaaagctgtggctctgatgtgcctatatacatacacacaa

SEQ ID NO: 55278 - DNA, 1018 bp, Homo sapiens
aaaaaaaaaaacaaaagaaaaaaagaaaatcaaaagcagttgaatattggcaatttcagatcattcaatgcaatattaaatattttatgaggtgtttgcccagctcatgytgttcacctttctttgagaactatcctattcacaaagatatttttctaacaacatggttatagcacatgactccagcccctggccacacttaattagaccagaggtgaacacttgatccagattggattaattgagtatctctcctaagaatttggaatagggatcaaaagacactggtctcagtctcagggtgaggctggaaacacagagatataaacttgggagctatggggtggccacgggcaagagaggtccaggaaacttatctgcctagcaaggacacaacagaggagagactcaacagcccatgaatcccagaggagctggagggaggctgcctggctccagagggctcttcactttctaattccaggtcctcatggcgtccaatgggcacttaatgatttgcattccttcagttgcctctgaagcctaaaaatgaacttcctcttaatgtgaaagctgatttcatgtgcatttctgatacctgcaactgaaggagctttaagataatggctcaaatagcaaaagatctcaatcaactggattcagagcatctccattacctgctggacattttgccctttagtgacatattcattgccaaccttcacccttggacagcacaggcccttcagcatttctgcagaattcagtcccatcaggtatccggctttgtcagccactgaaggaagagaaaaaaatggcatcatgcaaaaacagtagctgctaaagtgtccagtcagcccctggcttctcccagaagtgttttctgtaattttcttaaatgttttcatgttgtcatatctgtaccaggtctggacttgttcactgaagctttaatcccatatccaggggcccatggttctcaggaacttccaatttgcctcctagatgcagttttaac

SEQ ID NO: 55279 - DNA, 577 bp, Homo sapiens
ttccaacacagggagctcccaagagaaatcccaagggaagtccaaagagaagttgccatgtgggcctgagagtcttgggccactttgcttgtgcacctcccctygccctgcagagcgactgagttcctggctgttggctcctaggggatgcagagttgcccaggtgtgatcagaggggaggaagccttgagctccccctagtggccgtggccgggcatgtaaaccagaggcccaggttgggggctgcgggccccacctcccacccccactccacgcaagactcttagggcctcatcatcagactttggagtccactttccaaatgtggcaccactcctttccacaaaaccaggggccacaaatgagagatttggtgcctctaatttatttggccagctccatgttaaagaaaaactttacttgccaatacataagcgttggatttgacataaaaatccagacatgtgatttctcttgcaaaatcagaagccctggcagatgaagcctcgctggcttgctcactgctcacctcctgttgcgtggccagcccagttcctaacaagccatggactggtac

SEQ ID NO: 55280 - DNA, 575 bp, Homo sapiens
caaacttcggttctcctacaactacctacagatattttggggtactggttaaaaatgcagcctcctggcccccactccagacctgctaggtcagaagatcctggggaggacctggggatcttgacttctaacaaggtccccacttctgaaaagcaccagggcctgggaactactgacctaagtggccccatggttcctttcagctacaggattcactgcttctcaaacatatcaccctgcccatggccacccgtcaatgaasggagctccctctgcctgcagggcaggaagtgcagagcgggtgaggagagacagaagctttgcctgaagccgcccacagagaagccatgtgtggctggggtactgggacatggagtcagcagtgggtgtgtttcctgggtgggaggctcaggaacagaggagaaacagagtgaggccagggtgctcaatgccatcagcctgtggggattgggctccatgggcccagcttcatgttgaggactgcagggaacacaaaggaagggcctcctatacacctgggggaaggagacctccacatccagatcctacaatgc

SEQ ID NO: 55281 - DNA, 1227 bp, Homo sapiens
tgacccaagctacttctgcctcttctttccagctaacagaatcccaatttgttcagatagggaccttcaccagggatgaactatgactgagctaaataaaccaggctttctaatctcatcccttttggaagtaattggtctgatgatgagcaggtgacctagttcaactgcagatggagacacctggagaggacttcttttcctgactaaaaagacaaagctgtgcaaaaaggaaagatttaactttctccccttctttcttcctggaatatggctctggttcctgagatgcagcagatgttttgtgacatgagcaaaaagtccaaggatgaaaggtaaagatgaagatggaaaggccctgattccttggtgggatcatggagcagttgaacctactccagcaactgtctgccactggaattctcgtaatagaagaaaaataatcccctattctattaggttactgaagtttggtttgctgtttcttgcgattgaatgcctracacagatgggctctcctgaggtttgttgtgagactctattgctaacataataagcaatctgggtgtcttcatttgggttccctcaataacagaccttatgacaaggattagggtgcaagtggttcatttgagaggcaaaggaaatatcaataagcagttagggaagtgaaacagaaaaaagcagccaataaagggtgcattatcaagccagctaccactgtgaagaaactctacaaaccaacggaaaacacatgcctcaggggtaaaggagctagggtatttacataccaactcatttattggttgaggaaggcttccagggaacattaataccctggcatatctgtttaccatataggaggcaaactgggctttaacagtcagagaaagccctcaggagaagaaatgcaggcactgatcattgaaagtccagctagcacgcattgaaaaactaggagatatggaaggacaatcaagagcatctgctgcaactaatgagctgctgttacaggcaaatacaggtattgagttaacaactataatcgctgcattcatctctaataagagacattttaaaagtaccttacagacacgtgtctccctgctaactccaagtctaagtataatcagactcctccttccccaataaatccccataaacgtgcctcaaaagtcattggctatttcttcctgaagtcaaaattgatggtaaaataaaaaaggt

SEQ ID NO: 55282 - DNA, 1227 bp, Homo sapiens
tgacccaagctacttctgcctcttctttccagctaacagaatcccaatttgttcagatagggaccttcaccagggatgaactatgactgagctaaataaaccaggctttctaatctcatcccttttggaagtaattggtctgatgatgagcaggtgacctagttcaactgcagatggagacacctggagaggacttcttttcctgactaaaaagacaaagctgtgcaaaaaggaaagatttaactttctccccttctttcttcctggaatatggctctggttcctgagatgcagcagatgttttgtgacatgagcaaaaagtccaaggatgaaaggtaaagatgaagatggaaaggccctgattccttggtgggatcatggagcagttgaacctactccagcaactgtctgccactggaattctcgtaatagaagaaaaataatcccctattctattaggttactgaagtttggtttgctgtttcttgcgattgaatgcctaacayagatgggctctcctgaggtttgttgtgagactctattgctaacataataagcaatctgggtgtcttcatttgggttccctcaataacagaccttatgacaaggattagggtgcaagtggttcatttgagaggcaaaggaaatatcaataagcagttagggaagtgaaacagaaaaaagcagccaataaagggtgcattatcaagccagctaccactgtgaagaaactctacaaaccaacggaaaacacatgcctcaggggtaaaggagctagggtatttacataccaactcatttattggttgaggaaggcttccagggaacattaataccctggcatatctgtttaccatataggaggcaaactgggctttaacagtcagagaaagccctcaggagaagaaatgcaggcactgatcattgaaagtccagctagcacgcattgaaaaactaggagatatggaaggacaatcaagagcatctgctgcaactaatgagctgctgttacaggcaaatacaggtattgagttaacaactataatcgctgcattcatctctaataagagacattttaaaagtaccttacagacacgtgtctccctgctaactccaagtctaagtataatcagactcctccttccccaataaatccccataaacgtgcctcaaaagtcattggctatttcttcctgaagtcaaaattgatggtaaaataaaaaaggt

SEQ ID NO: 55283 - DNA, 1227 bp, Homo sapiens
tgacccaagctacttctgcctcttctttccagctaacagaatcccaatttgttcagatagggaccttcaccagggatgaactatgactgagctaaataaaccaggctttctaatctcatcccttttggaagtaattggtctgatgatgagcaggtgacctagttcaactgcagatggagacacctggagaggacttcttttcctgactaaaaagacaaagctgtgcaaaaaggaaagatttaactttctccccttctttcttcctggaatatggctctggttcctgagatgcagcagatgttttgtgacatgagcaaaaagtccaaggatgaaaggtaaagatgaagatggaaaggccctgattccttggtgggatcatggagcagttgaacctactccagcaactgtctgccactggaattctcgtaatagaagaaaaataatcccctattctattaggttactgaagtttggtttgctgtttcttgcgattgaatgcctaacacagatgggctctcctgaggtttgttgtgagactctattgctaacataataagcaatctgggtgtcttcatttgggttccctcaataacagaycttatgacaaggattagggtgcaagtggttcatttgagaggcaaaggaaatatcaataagcagttagggaagtgaaacagaaaaaagcagccaataaagggtgcattatcaagccagctaccactgtgaagaaactctacaaaccaacggaaaacacatgcctcaggggtaaaggagctagggtatttacataccaactcatttattggttgaggaaggcttccagggaacattaataccctggcatatctgtttaccatataggaggcaaactgggctttaacagtcagagaaagccctcaggagaagaaatgcaggcactgatcattgaaagtccagctagcacgcattgaaaaactaggagatatggaaggacaatcaagagcatctgctgcaactaatgagctgctgttacaggcaaatacaggtattgagttaacaactataatcgctgcattcatctctaataagagacattttaaaagtaccttacagacacgtgtctccctgctaactccaagtctaagtataatcagactcctccttccccaataaatccccataaacgtgcctcaaaagtcattggctatttcttcctgaagtcaaaattgatggtaaaataaaaaaggt

SEQ ID NO: 55284 - DNA, 1227 bp, Homo sapiens
tgacccaagctacttctgcctcttctttccagctaacagaatcccaatttgttcagatagggaccttcaccagggatgaactatgactgagctaaataaaccaggctttctaatctcatcccttttggaagtaattggtctgatgatgagcaggtgacctagttcaactgcagatggagacacctggagaggacttcttttcctgactaaaaagacaaagctgtgcaaaaaggaaagatttaactttctccccttctttcttcctggaatatggctctggttcctgagatgcagcagatgttttgtgacatgagcaaaaagtccaaggatgaaaggtaaagatgaagatggaaaggccctgattccttggtgggatcatggagcagttgaacctactccagcaactgtctgccactggaattctcgtaatagaagaaaaataatcccctattctattaggttactgaagtttggtttgctgtttcttgcgattgaatgcctaacacagatgggctctcctgaggtttgttgtgagactctattgctaacataataagcaatctgggtgtcttcatttgggttccctcaataacagaccttatgacaaggattagggtgcaagtggttcatttgagaggcaaaggaaatatcaataagcagttagggaagtgaaacagaaaaaagcagccaataaagggtgcattatcaagccagctaccactgtgaagaaactctacaaaccaacggaaaacacatgcctcaggggtaaaggagctagggtatttacataccaactcatttattggttgaggaaggcttccagggaacattaataccctggcatatctgtttaccatataggaggcaaactgggctttaacagtcagagaaagccctcaggagaagaaatgcaggcactgatcattgaaagtccagctagcacgcattgaaaaactaggagatatggaaggacaatcaagagcatctgctgcaactaatgagctgctgttacaggcaaatacaggtattgagttaacaactataatcgctgcattcatctctaataagagacattttaaaagtaccttacagacacgtgtctccctgctaactccaagtctaagtataatcagactcctccttccccartaaatccccataaacgtgcctcaaaagtcattggctatttcttcctgaagtcaaaattgatggtaaaataaaaaaggt

SEQ ID NO: 55285 - DNA, 1227 bp, Homo sapiens
taaattaaaagcataatactctcagggaactcatctcacaatctaagcctcttgcttaattaaagtagcctgtgaatgcagtcatagcaagctacagccaatgtatagaaaacattcaccctacatggctatttaggcccaaacttaagcctaaaccagtcatgccaggcataacacctttcttatctgtctctcacctctgctttgctcttcctgagcaatgtggggcccatgcctttctgaggaacagaggaaggaggaaggtggggtggggaggaagaaatactcctacaactttacaaaaccttccttcacccctcaatgcaggaaggaaggtagagagagtggctgtatgtgctgtattaacaggcatgctcaggcttgtttgagtccttactttttttttattttgttttgttttgtttttatatatatatttttttttattatactttaagttctaagtcctttctaaccacctgactttgtgcggaaggtccaaacaccattaggcaaaccccagtaatgttacaagcacagtgacctatcccagagcaacttttttaagaggatccgtggtttttaccaygcctttgagtggaagcagaatttgaactctctcatactaattcttgtggagccttcaacctccataaagtgtgcaggaggtactcatcatacattttaaactaaaataatttgattaagcgtttgggtctctgagggaaaagttaaagaggactcttcactctattctttaatttcgaggcaaatggacacaacaggaggtagtctgacatgtaaaaatagaaacctttacagccaagcagatctgggtctaaatcctgactcatttactctttagttccgtgctcattaaagttaataatgatgacaatgatgataatcactagcacttacatgtgcttactacatgccaggctctgttctaagtgcctcgcatgtatcaacttattgaagataccaccaccatattttatagtgaaggaatctgaggcacagaaaggttttgtaatggatacaagttactaaagagccgagccagaattcaaacccaggcagctgggctgcagatatccatgctaatatacactgtgcttccctgactcccacgtacctctggagcacagcgtctggctttcagaatctgagtttccttccctgtaaagtgcatatgatgaggccaaccttggtgaggcctgaagg

SEQ ID NO: 55286 - DNA, 1796 bp, Homo sapiens
aaccattttcataaagcttccctgactctccctgccagaactgctacctccctcttctgaaggcctgatattgacatgtcctttggcattcacagtcttgcgtgagtagatctatttttaagtatttctgtgttataatctatgtgttttttaaagcttcttgaggacagggctacacttctttggagtctctacaaaattagcatggtttctcacactgtagatgtccactgatttttcctgtacttaacactcagcctaaaacataaaaaaactctttaattataagaaagtctcatgtagttgtctgctataaaaagaacagacaggagtaagtgaataaagtagaacagttcagagtatatatgttctaatcacatttttaattgaattattcattagtaaattagtgttggttttgggagagagcatggggggtaccaagtttattaaagcaagcaagaggattaatgggtgaagtcccaaaaaatttttgcataatttccccattttctctcctacctatattttgagtgaaaacatcaggataaatcatataagaggaattaatgcttattcttttgtatttacaaagatttattatctttatagtgctcattatagaaaattaaaaaaaaaacagaaaaaaataaagggaaaataaacaggagtccttgaaaatcttattacgcaaacataaccaccgtttggcatatatccttccattcttttctaaatgcatgtatgtatccacaatacatgctattgatattttatataacagggtcatgtttatttacagcttgcttttctacccaggaaatctatcatagggatttttctatgtcgataaatattactatgcaacatcctctctgatatctagattgtactctgttgtatgtgcatttggtttccagtgatagaacaccaatatgagtggactttaacaaaaaaggaggcaaatcagattgtgaaatccaaaaaaaagtttgaataattgaggaaaagataagaatgcagtggaatttcaggaaaarctagaaccagggactcagacaacattaagactgttctcctcatctatgtttttccttggatccatctcaagttctgtcactatggtgtggctctctccacacagcaggaaaagtttctctgactgcaatcactgtaattttggggatacaatgttcataatttcaggacacaggctcattagttaattcccacactgtgccaattagctgttaaagtatggcaactattatagtacatgtgactgggcaaacgcagttcctatgagaacatagctactgggcagataaaactgtagatgttcaccatgatttgcttaattaatatcctattaatagacataaaggaggtttaaaatttttattactgaggaggttttttttctactattaatgcttaataaatattttaaggatgctatgaactttttatacatctaattgttagcacgtatctgacaatattcttattatatattcctaaaagttggattcatttaattaatgtattcatttaatcaattttttaagtatctactatataccaggctctaatctaggccctaggaatacagccacgaataaaatagagaaacctctaccttttcagagtttacatgctagtatgtgaaaacagacaataaactaaaatacattggggaggggcaaggattgctgctttaaatagattctaagggagggcagcattaaaaagaggcatctaacctgtgcactgagggatgtaagggtgagccatgt

SEQ ID NO: 55287 - DNA, 878 bp, Homo sapiens
aaaaaaaaaaaaaaaaaaaaaagtgaggcatgtgaatattcctgagaagaaagcatagactgaaaatgcagaccagtcctcaaaagtgaccctgagcttcttgcagccacacacaagggaactcatgtcattaatgtcactcacagttggccgggcacagtggctcatgcctgaaatctcagcaatttgagaggctgaggtgggaggctctttgagcctatgagtttgagaccagcctgaacaacacagcaagaacttgtctctacaaataataaaaaaattagccgggtgtggtagtgcacacctgtggtcccaggtacttgggaggctgaggtgggaggattgcttgagcctgggaaggcagggtgcagtgagccacggttgcaccactgcactccagcctgggtaagagtgagaccctgtcggccaggcgcagtggctcatccctgtaatcccagcactttgggaggctgaggcgggcggatcacaaggtcagcagttcgagaccagcctggccaacatggtgaaaccccatctctactaaaagtacaaaaattagccaggcatggtggcgggtgcctgtaawcccagctactccggaggctgaggcaggagaattgcttgaacccgggaggcggaggttgcagtgagctgagaccgtgccattgcactccagcctgggcaacagagtgagactcggtctcaaaaaaaaaacaaaaaaaacaaaaaaaaaaaaacaaaacaaaaagtgagaccctgccacacacacacacacaattaactttttctccttccatgcctagcttgttgaggaaacaattttttttttttaaatacgtcgttcacccaaatctctgatggcaattattctgaggatc

SEQ ID NO: 55288 - DNA, 878 bp, Homo sapiens
aaaaaaaaaaaaaaaaaaaaaagtgaggcatgtgaatattcctgagaagaaagcatagactgaaaatgcagaccagtcctcaaaagtgaccctgagcttcttgcagccacacacaagggaactcatgtcattaatgtcactcacagttggccgggcacagtggctcatgcctgaaatctcagcaatttgagaggctgaggtgggaggctctttgagcctatgagtttgagaccagcctgaacaacacagcaagaacttgtctctacaaataataaaaaaattagccgggtgtggtagtgcacacctgtggtcccaggtacttgggaggctgaggtgggaggattgcttgagcctgggaaggcagggtgcagtgagccacggttgcaccactgcactccagcctgggtaagagtgagaccctgtcggccaggcgcagtggctcatccctgtaatcccagcactttgggaggctgaggcgggcggatcacaaggtcagcagttcgagaccagcctggccaacatggtgaaaccccatctctactaaaagtacaaaaattagccaggcatggtggcgggtgcctgtaaacccagctactccggaggctgaggcaggagaattgcttgaacccgggaggcggaggttgcagtgagctgagaccgtgccattgcactccagcctgggcaacagagtgagactcggtctcaaaaaaaaaacaaaaaaaacaaaaaaaamaaaacaaaacaaaaagtgagaccctgccacacacacacacacaattaactttttctccttccatgcctagcttgttgaggaaacaattttttttttttaaatacgtcgttcacccaaatctctgatggcaattattctgaggatc

SEQ ID NO: 55289 - DNA, 1079 bp, Homo sapiens
tgtatatgtgcttaaaaaacaacaaaaaaagcaccttccaatcagtccatcatattcacatgttaggagtattaactgttcttctttggtgtgtattcctttgtatgtaggtacacagatgcaaaagtgtatctttttttctttctagtacaaaaatagatttggttcatactttctataaggtatgtactcatctgcaactttctcttgtgttttttcctactactaggtagtacaccacaggaaccattggttttaacagattgcccatgtctgagtacactaaaactcatatgatcatttcctacatgtggtcacttagattctctttgatctttgtgcatctgtctttgcacactacaaatatttccacgggatattcctctacaggtagcatcactggctcaaaggcatacgcaattaaaattctgagacattctaggcaattgcccttcaaataaggctgtaccaagatatactctctcaacattttttgagaacattttcctccacaccttcaataactgtggatagtgttaatattttcaaattttgaggatcaggttggcagaaatacacaaacagaaatataccgtgtttaatttagaaaacatattaatcttaagttgggttggtttttatcattttaaggatcgatttcatccatatttggaaactcatgtcttaagctatatccattagttggagtccttattcacatgtttctttgatagtggcggcagaattatgtcttattattcctcttcttatttcctgtcaagagaagaaaaactcttctccatggttaaggagttatgagcattgggaaaatactccctctacatctttctgcttccttcattcatgtctatgcaagagagaaggcgggcgttttctcagtggtgttctctaggtagatggcaatgcgcgagatggccctggacctggacttggttctttctttctcttggaatctcattttgcgttcaaacagaggcttcaaaattcttgcacagaagkcttacctcctttcagttttcttttctattcatgaaatatgaaaggaaggctgtagtttt

SEQ ID NO: 55290 - DNA, 1191 bp, Homo sapiens
ttccagggggagctagaatagcgcttttagacctgctggtgtttggatatattccytgctacccacttctgtgactaaagacacctttatttgcattttctgctaaaacttttacttaattctgtgcatatgcaaaccacacacattctcattgaattctgcttttatgtctgcttttaattaaagcagtagtgttaatttcttcattcaaaagaaaatccaaggaatagtataacccagtggattagctaacactttgaacgtccaggcaaatccctgtgaagcccaccacgactatatccttccctggcatcagatatttggaaatgaaattttaaaaaagatataggcttccaattactcctgcaattgactgttgtataagcaaaattttaggaaacaacaaataacatgtgagagtttcttaaaagtatatgatctataaattttaaagagtttagctgaagggggcattattaatgttatatgatgacactgaatagcctcataatatttagtggttgtctttactgaataatgaccttaaataataatgtagaaaagggatatcataatacacatatttgaagcttctgggtcagtatctggggctttccaggtcttgtgtaccatgataattctaaatttttggatctcaactttttaaaatattaagttcaataatttgtctttattaaagaagttttactctttaatactttgtttgaattttggtgttctaatttttcatatttttaaatcattttatattatcttgaagcaaatattacatagacaaaatgcaaaaatcataaaagtaaaactcaataatttcttaattttaaaaattaacatattttttggaacagttttagatttacagaaaaattgagcagatagtaatagagagttcccatatataccacattcccctgcacatgctatttcttattatgatgttgcattagtgttgtatatttttaataattaatgatccagtattgacatattactattaatgaaagtccatagtttatgttaagatctattctttatttttatgcactcttatgggttctgacaaataatgccatatatccaccattacggtgtcgtacagcataatttcactgctctaaaatcctctggcaactattgacctttgccttttcaaactagcttcttttacca

SEQ ID NO: 55291 - DNA, 1191 bp, Homo sapiens
ttccagggggagctagaatagcgcttttagacctgctggtgtttggatatattccctgctacccacttctgtgactaaagacacctttatttgcattttctgctaaaacttttacttaattctgtgcatatgcaaaccacacacattctcattgaattctgcttttatgtctgcttttaattaaagcagtagtgttaatttcttcattcaaaagaaaatccaaggaatagtataacccagtggattagctaacactttgaacgtccaggcaaatccytgtgaagcccaccacgactatatccttccctggcatcagatatttggaaatgaaattttaaaaaagatataggcttccaattactcctgcaattgactgttgtataagcaaaattttaggaaacaacaaataacatgtgagagtttcttaaaagtatatgatctataaattttaaagagtttagctgaagggggcattattaatgttatatgatgacactgaatagcctcataatatttagtggttgtctttactgaataatgaccttaaataataatgtagaaaagggatatcataatacacatatttgaagcttctgggtcagtatctggggctttccaggtcttgtgtaccatgataattctaaatttttggatctcaactttttaaaatattaagttcaataatttgtctttattaaagaagttttactctttaatactttgtttgaattttggtgttctaatttttcatatttttaaatcattttatattatcttgaagcaaatattacatagacaaaatgcaaaaatcataaaagtaaaactcaataatttcttaattttaaaaattaacatattttttggaacagttttagatttacagaaaaattgagcagatagtaatagagagttcccatatataccacattcccctgcacatgctatttcttattatgatgttgcattagtgttgtatatttttaataattaatgatccagtattgacatattactattaatgaaagtccatagtttatgttaagatctattctttatttttatgcactcttatgggttctgacaaataatgccatatatccaccattacggtgtcgtacagcataatttcactgctctaaaatcctctggcaactattgacctttgccttttcaaactagcttcttttacca

SEQ ID NO: 55292 - DNA, 1191 bp, Homo sapiens
ttccagggggagctagaatagcgcttttagacctgctggtgtttggatatattccctgctacccacttctgtgactaaagacacctttatttgcattttctgctaaaacttttacttaattctgtgcatatgcaaaccacacacattctcattgaattctgcttttatgtctgcttttaattaaagcagtagtgttaatttcttcattcaaaagaaaatccaaggaatagtataacccagtggattagctaacactttgaacgtccaggcaaatccctgtgaagcccaccacgactatatccttccctggcatcagatatttggaaatgaaattttaaaaaagatataggcttccaattactcctgcaattgactgttgtataagcaaaattttaggaaacaacaaataacatgtgagagtttcttaaaagtatatgatctataaattttaaagagtttagctgaagggggcattattaatgttatatgatgacactgaatagcctcataatatttagtggttgtctttactgaataatgaccttaaataataatgtagaaaagggatatcataatacacatatttgaagcttctgggtcagtatctggggctttccaggtcttgtgtaccatgataattctaaatttttggatctcaactttttaaaatattaagttcaataatttgtctttattaaagaagttttactctttaatactttgtttgaattttggtgttctaatttttcatatttttaaatcattttatattatcttgaagcaaatattacatagacaaaatgcaaaaatcataaaagtaaaactcaataatttcttaattttaaaaattaacatattttttggaacagttttagatttacagaaaaaytgagcagatagtaatagagagttcccatatataccacattcccctgcacatgctatttcttattatgatgttgcattagtgttgtatatttttaataattaatgatccagtattgacatattactattaatgaaagtccatagtttatgttaagatctattctttatttttatgcactcttatgggttctgacaaataatgccatatatccaccattacggtgtcgtacagcataatttcactgctctaaaatcctctggcaactattgacctttgccttttcaaactagcttcttttacca

SEQ ID NO: 55293 - DNA, 1191 bp, Homo sapiens
ttccagggggagctagaatagcgcttttagacctgctggtgtttggatatattccctgctacccacttctgtgactaaagacacctttatttgcattttctgctaaaacttttacttaattctgtgcatatgcaaaccacacacattctcattgaattctgcttttatgtctgcttttaattaaagcagtagtgttaatttcttcattcaaaagaaaatccaaggaatagtataacccagtggattagctaacactttgaacgtccaggcaaatccctgtgaagcccaccacgactatatccttccctggcatcagatatttggaaatgaaattttaaaaaagatataggcttccaattactcctgcaattgactgttgtataagcaaaattttaggaaacaacaaataacatgtgagagtttcttaaaagtatatgatctataaattttaaagagtttagctgaagggggcattattaatgttatatgatgacactgaatagcctcataatatttagtggttgtctttactgaataatgaccttaaataataatgtagaaaagggatatcataatacacatatttgaagcttctgggtcagtatctggggctttccaggtcttgtgtaccatgataattctaaatttttggatctcaactttttaaaatattaagttcaataatttgtctttattaaagaagttttactctttaatactttgtttgaattttggtgttctaatttttcatatttttaaatcattttatattatcttgaagcaaatattacatagacaaaatgcaaaaatcataaaagtaaaactcaataatttcttaattttaaaaattaacatattttttggaacagttttagatttacagaaaaattgagcagatagtaatagagagttcccatatataccacattcccctgcacatgctatttcttattatgatgttgcattagtgttgtatatttttaataattaatgatccagtattgacatattactattaatgaaagtccatagtttatgttaagatctattctttatttttatgcactcttatgggttctgacaaataatgccatatatccaccattacggtgtmgtacagcataatttcactgctctaaaatcctctggcaactattgacctttgccttttcaaactagcttcttttacca

SEQ ID NO: 55294 - DNA, 566 bp, Homo sapiens
gggactatccagaagaacctggtagatgcaggtgcagtctgcagtccaatggtcagccatgaaagaacaggctacctgttctttctctttaccatggaggccttgatgtaaaaatcgatgatgctttcttgcttctggtgtgcttccctttcttcttcattttccataagtagtttcckccatcccacctcccaacaggccacagtcaattcaggacattttaaccatgaaaatgagtctacataacatgaatttagaggccaggcagggtggctcatgtctctgggaggctgaagtgggagaatggcttgagcttaggagtttgagaccagcctgggcaacatggtgaaaccctgtctctaaccaaaaataaatgaataaaaaaaaataagtcatgtatggtggtgcatgctactagtccagctactcaggaagctgaggtgggaggattgcttgagtcaaggaggtcaagtctgaagtgggccaagatcatgccactgcaattcagcctgggcaacagagtgagaccttacctcaagaaaaaaaaaaaaaagatttaaaggaca

SEQ ID NO: 55295 - DNA, 418 bp, Homo sapiens
ggtctcccaaagtgctgggattacaggtgtgagccaccgtgcctggccccctaaatgcatcttaaatgaactaatgaaagatgaataaatgcttccctgaagttacttattcaccgatgtgtgagagaataaaaagagaaaatggacaagaggtgatactagagacaggtactgaagaactcttcatgtctcaagaagaccatgagatccaytcacacaataatgaccttggtggggaaggggatttgctaagagaggaccacagggagaattcgaggtcctgagaacaacataggtgagctgtccctctgctcaccacactatcccctgtctgtgacccagcagctgacctcatggtgctcctaggaaaggagatgtgtaaggggtcaagatttaaggtggtgactctgcactgtac

SEQ ID NO: 55296 - DNA, 620 bp, Homo sapiens
aaacaaaggagattccaacgtgtgtgtgtgattccaacactatgtggcagggtgtgccatgaaggaactgtatcatgttttagacttaagacgaacaaccacacatagtgcgtttttggagaacttcatcaagctttacaatctttcttgttgtttctctccaatgacccccaaaatatcaaacattattttcttcccctgaagtttcattgttgagagagaagaaattacattttaaaattcgtattcttcactcagcattgcaatataaggacggtttgcaagcagacagggaatgggtgaaaacatattttgtgttttaatcttaagacatacatttttatactaaagtcacatactacatttcgatcacaagcacagaaattctgttcttttttgccccctcccaccctgggggaaaaatagattcaaatttttggagacttaattgccctaaactttcatctttatgatggaaatgacatttttcctggaagatggaacttggcccttcactgctccatgactttctcggactgagttgtgtccttgaggaagagggagtgggtaaactggaggagggtgggggtcctgagaaggartgtgggcaactgggagtt

SEQ ID NO: 55297 - DNA, 1098 bp, Homo sapiens
ccctctcacacgtcctcyttataaaaatgtccctcagtgtctgctatgagccaggtgcagacttaagtgacagggctgctacgggaaataaaaaattaacaaggagcacctgcctcttaatgcacagtaacaaactatgttaagtgtcaggaaggaaaggttaaggatgccaggaaggcttttaataaataacctgacttagatgggcaggtggtgctgaggattcagaacgtgttcttctcgagcgcatctgagagatgagtagggttggccaagtgagaaacatgggagaatgtcctaggcagagggatggcccccgaggaaggccttgcagtggaaacaagtttggcccattaaaaggtattgcacggaggtctatacaaatggcttaccatatgcaagagaaacagtgatgggacatgagggtaggcactagacccatcccaggtcttaagagagtttttgaagactttatacttgttcttaaatgtaacaggaagacagtgaagaatgtgagcaggggagtagcactctgatttccataaatgaaggatttatattctctttgctgtgagaagaactgattagaagaaagcaagactgaaagtgcggagaagccagttaggaggctctgacaatagaagaggcaagagatgatgctggcttaggatgtgcgtgtggaggtgcaggctgaagataaacagattcatgatatattttggggggatgtttgaaaatacagttgttcttaagtatttgccatgtgaattaaagattggtctatttgcttcacttatcccttctttctttgcaacaaattaaaagttgcaagctgcttccatcaaggctgttagaacatcttttgggacaacttaggaaaacaggctccaggagctatcatggggtggatccgaggatgtctgcttttctatagccattttcagttgaaaagatactgaaatcatcttatcatccattcaactaagagtcaagttatttgtcattctgttgccttggaaacaaaaagacttttgctttcttgatctgctgttttttcaaaacttacaggttgaccttggggactgttatgcaaggccc

SEQ ID NO: 55298 - DNA, 839 bp, Homo sapiens
tatataagatcatgataagatattacaattggtgaatgtcaacaggattcagaataatgctacatgtttttgattattacctgccattgtcaaagaaatgatcctaaactttttttgtgtgctaccaaaatatcttacttttataatatattttgatgtctaaggctcctcttctaaagttttaaaatgtatgacctttcaaatggaaaccaaaaatagaatgaatcacattgttcaaccatttgcaaaaaaatcaccacacataccagtgtagtaataacttgaagattagaagcatggactgcatgcagaatcagacaaacctgggtttgaatccaaatctgccatttacaaactctgtgaccctgagaaagcaacatcacttctgtaagcctcattgtccacttaagtaacaaggcaaacatatctcaccaggttgcttaaaaaattagtggaaaaatgtaaataatacgttaagtcaagtcaagaaaatacaattaatattatagtaacaatacttaataactgttgttagaataatctggtatagtttttatgaaataactgaaaataaaaaattagagttaagcaacatgaggaaagtgggtatcataataaagggaatgtatgtttgggagcaaacataaaccagttttctttgctgctctcyctcttaggttgacagccttttttttttttttcttttttttttttttttttttttttaagacggagtctcacactgtcgcccaggctggagtgcagtggtgtgatcttggctcactgcaacctccgcctcctgggttcaagcaattctcgtgcctcagcctcccaagtag

SEQ ID NO: 55299 - DNA, 685 bp, Homo sapiens
catgatataaagttgttttaaaaatatctagttagatagagaaggagataatccatttaatggaaaaaattaagttaattataacatgtggcatgtggtcataataaattttgtgaaggtagatctgataaaattaatgaagaataacagggttttggcctggaggtatagatattggagtcttcatcatggaaatggtagatggaaatatagggaatgatgatttcacccagagaaagtatgcagaccttagctacaaactgatattgacaataagaatcttcaaaatgaaaaggcaaaacatttacatttatcccaaggtgggagaatcaccgttagcacagagtctaagcaaaagatctcttagataaatacatcttgcgtttcctgaattgacattgtgagctcataacctaasttttgccaaatgaagtgtgtctggcagtgcagcacgcagactcttagtgagcgtgggcatttcaggaggtggtagaaagacggagcctgactcattaatcagtgaaagaatcaaagagctatctttagaatgaacggacagttctgaaattcagctgatttccaaggtcagtgggtcatatccacaaatatttactgagcacgcactcggtgtcaggtggactcaggtatcaagaaaagactcttggtgagattcctgcccctcccc

SEQ ID NO: 55300 - DNA, 1622 bp, Homo sapiens
ctaccacttytaatttcatctgagtgtctgctttttggagaaactgagctgacatacttggtttataggttccttctttcttcttcctccattcttctcattctcctctaggttcctacccacacactatgtttgcccacatagtagctttattttctttttctttttgtttttggtggcagatcagacagagatcaagatcccattcaatctgagcctaaatcattaacaatcccaaaactagttggttgcccagtcttcattctctgtaggatacggttggtacctcatcatcaaggtgacctactcctgcctgcaccactgataggacagagggatccttctaactagaacagtgaaaatcaagttgaactttacaaaaaataagggaagcatttctacgccgctctatttgagttttacttaatcatgttttcttcatcatattaccatcaccagtgcctggcgtagtactaacgtagttgtaataattattggatgaagactccacaaaatgtctttctgctgttttcccacccatatgcctctttccacatccccactatcacctcctgatagccagtggcttcaggatgatcttaactattatgcccaaatcagagctctccccaccaaaacttattcttggttctcatataaaatccatgttaaaaccgttattcccttagtccccattatgatttcttccagaaatctgattaaattcataaagagagaaaggaatttccatggaagtcagggtgctgcctttaactagctgtagattttggataagtaagtctacttttcttgccttcagtttttctcattcgtgttaactagtttatagtgactgcaagtatttttcggagaaacaaatttggatcaacaatatatgaagggttgaaaattctctacattttctgggttgtatagctttttaaaagatgcttactaaatcagataaatcatttatattcagatggaaataaagagtgtcaaatagcattaaaaatattctgggaggattggaaagggtgattttcctgacgtcaaagtatattcacctctgtcccaccatgctcactcacacacatctctccggagttactgtcctcacctgttctggaataacagggctagagtctcaccgacacactgggcaactttgctacatcccagattagactgtaacccttttagttgttcatcaagacatataatgaatgtcctgacaaggaaagacaacaaaactgagaaataacatgtaaaggatttgaaatagatggcaaaactttggttatttatgcttaaccactccaaagttctaggaaaaatgatatctggcttaagccttcacattttctttttccatcactgggacaaggtcctggaatacacataacttggaaaaatgcaagacatctctttgatctaagccccctccccatgtgcttcaagtactgtgatataataaggctacaggcaacctggaaacactctgcaaatgtttcccagtaaacagtaaacatcccggtactgtgatgggatgtttcttccatctgagagactggaggaaaaataaagagtttatttctttcctgtccaaagtgtttggcagg

SEQ ID NO: 55301 - DNA, 1622 bp, Homo sapiens
ctaccacttctaatttcatctgagtgtctgctttttggagaaactgagctgacatacttggtttataggttccttctttcttcttcctccattcttctcattctcctctaggttcctacccacacactatgtttgcccacatagtagctttattttctttttctttttgtttttggtggcagatcagacagagatcaagatcccattcaatctgagcctaaatcattaacaatcccaaaactagttggttgcccagtcttcattctctgtaggatacggttggtacctcatcatcaaggtgacctactcctgcctgcaccactgataggacagagggatccttctaactagaacagtgaaaatcaagttgaactttacaaaaaataagggaagcatttctacgccgctctatttgagttttacttaatcatgttttcttcatcatattaccatcaccagtgcctggcgtagtactaacgtagttgtaataattattggatgaagactccacaaaatgtctttctgctgttttcccacccatatgcctctttccacatccccactatcacctcctgatagccagtggcttcaggatgatcttaactattatgcccaaatcagagctctccccaccaaaacttattcttggttctcatataaaatccatgttaaaaccgttattcccttagtccccattatgatttcttccagaaatctgattaaattcataaagagagaaaggaatttccatggaagtcagggtgctgcctttaactagctgtagattttggataagtaagtctacttttcttgccttcagtttttctcattcgtgttaactagtttatagtgactgcaagtatttttcggagaaacraatttggatcaacaatatatgaagggttgaaaattctctacattttctgggttgtatagctttttaaaagatgcttactaaatcagataaatcatttatattcagatggaaataaagagtgtcaaatagcattaaaaatattctgggaggattggaaagggtgattttcctgacgtcaaagtatattcacctctgtcccaccatgctcactcacacacatctctccggagttactgtcctcacctgttctggaataacagggctagagtctcaccgacacactgggcaactttgctacatcccagattagactgtaacccttttagttgttcatcaagacatataatgaatgtcctgacaaggaaagacaacaaaactgagaaataacatgtaaaggatttgaaatagatggcaaaactttggttatttatgcttaaccactccaaagttctaggaaaaatgatatctggcttaagccttcacattttctttttccatcactgggacaaggtcctggaatacacataacttggaaaaatgcaagacatctctttgatctaagccccctccccatgtgcttcaagtactgtgatataataaggctacaggcaacctggaaacactctgcaaatgtttcccagtaaacagtaaacatcccggtactgtgatgggatgtttcttccatctgagagactggaggaaaaataaagagtttatttctttcctgtccaaagtgtttggcagg

SEQ ID NO: 55302 - DNA, 1181 bp, Homo sapiens
actaggaaacatgttgtatcactcaaacttcttattttgaggcaggaggtgtggactccaattgaacagaaaggagtttattgaaaatatattcggtatttaccagctataatggaaggctggagcactagtcatgagaaaatgtttctagaaacaaagctccaaattccacattggaattggtctgatgagtaaaccacggcagagcaccaggtgctacacttgcactcctgcctctttggtgccaatacctcaccttcctacaactgctacttcatatcatttctgtgccttgaccttgaagcctccactgctgatactgtcttcagttagcgtgcatgagtcagatatggttgtactgatggccagagcctaaaattattctccatctacaagaatgactagctatcggagtgtctaacactttcagctctgatgaggaaagaagcttttacccctccaccaagataataaagtgaagagtgaagaacccccacacaaatgtaagggagttcagattttgaattacttaacgcaagtggcagatttccacttgcatatatcttattcatgtttgtatacttarcaactcatacagtagtagtagcacaagagaagtaataaataattctgaattctgaatggaattttaaaattgttttaacaacgagttagagtaattcagataaaaattgcccccttcattttggtcatgtagacagtgtactactagcttattatgcctcattttaatttgtttttgtgaactgacctcactgtgaaattctatgattactattataatttattctttagagaatcatgtattttttccaaaacaataacaatggccttgtatctcattaggggatatagggcacatttcaatgcccaaaatattttagacattttatttaagaaaaacatctttccatttcttttttcctacctgtgccttatgatcctaaggaaataaataatatttgacatttcctattgttccgtggcacatttttgtcctagaacttatttcacattccatcagtcccactcagattgatggagtaccatcatttagcatttctcttgccttcttcctttttaatgtttcaggcccttaagttttgtttttcccttcacaaatttgaaaattttttttgaaaaattctgcattgttttca

SEQ ID NO: 55303 - DNA, 1181 bp, Homo sapiens
actaggaaacatgttgtatcactcaaacttcttattttgaggcaggaggtgtggactccaattgaacagaaaggagtttattgaaaatatattcggtatttaccagctataatggaaggctggagcactagtcatgagaaaatgtttctagaaacaaagctccaaattccacattggaattggtctgatgagtaaaccacggcagagcaccaggtgctacacttgcactcctgcctctttggtgccaatacctcaccttcctacaactgctacttcatatcatttctgtgccttgaccttgaagcctccactgctgatactgtcttcagttagcgtgcatgagtcagatatggttgtactgatggccagagcctaaaattattctccatctacaagaatgactagctatcggagtgtctaacactttcagctctgatgaggaaagaagcttttacccctccaccaagataataaagtgaagagtgaagaacccccacacaaatgtaagggagttcagattttgaattacttaacgcaagtggcagatttccacttgcatatatcttattcatgtttgtatacttaacaactcatacagtagtagtagcacaagagaagtaataaataattctgaattctgaatggaattttaaaattgttttaacaacgagttagagtaattcagataaaaattgcccccttcattttggtcatgtagacagtgtactactagcttattatgcctcattttaatttgtttttgtgaactgacctcactgtgaaattctatrattactattataatttattctttagagaatcatgtattttttccaaaacaataacaatggccttgtatctcattaggggatatagggcacatttcaatgcccaaaatattttagacattttatttaagaaaaacatctttccatttcttttttcctacctgtgccttatgatcctaaggaaataaataatatttgacatttcctattgttccgtggcacatttttgtcctagaacttatttcacattccatcagtcccactcagattgatggagtaccatcatttagcatttctcttgccttcttcctttttaatgtttcaggcccttaagttttgtttttcccttcacaaatttgaaaattttttttgaaaaattctgcattgttttca

SEQ ID NO: 55304 - DNA, 1181 bp, Homo sapiens
actaggaaacatgttgtatcactcaaacttcttattttgaggcaggaggtgtggactccaattgaacagaaaggagtttattgaaaatatattcggtatttaccagctataatggaaggctggagcactagtcatgagaaaatgtttctagaaacaaagctccaaattccacattggaattggtctgatgagtaaaccacggcagagcaccaggtgctacacttgcactcctgcctctttggtgccaatacctcaccttcctacaactgctacttcatatcatttctgtgccttgaccttgaagcctccactgctgatactgtcttcagttagcgtgcatgagtcagatatggttgtactgatggccagagcctaaaattattctccatctacaagaatgactagctatcggagtgtctaacactttcagctctgatgaggaaagaagcttttacccctccaccaagataataaagtgaagagtgaagaacccccacacaaatgtaagggagttcagattttgaattacttaacgcaagtggcagatttccacttgcatatatcttattcatgtttgtatacttaacaactcatacagtagtagtagcacaagagaagtaataaataattctgaattctgaatggaattttaaaattgttttaacaacgagttagagtaattcagataaaaattgcccccttcattttggtcatgtagacagtgtactactagcttattatgcctcattttaatttgtttttgtgaactgacctcactgtgaaattctatgattactattataatttattctttagagaatcatgtattttttccaaaacaataacaatggccttgtatctcattaggggatatagggcacatttcaatgcccaaaatattttagacattttatttaagaaaaacatctttccatttcttttttcctacctgtgccttatgatcctaaggaaataaataatatttgacatttcctattgttccgtggcacatttttgtcctagaacttatttcacattccatcagtcccactcagattgatggagtaccatcatttagcatttctcttgccttcttcctttttaatgtttcaggcccttaagttttgtttttcccttcacaaatttgaaaattttttttgaaaaattctgcrttgttttca

SEQ ID NO: 55305 - DNA, 549 bp, Homo sapiens
tcgggaggtagaggttgcagtgagtcaagatcgcgctactacacttcatcctgggcgacagagcaagactctctctaaaaaaaaaaaaaaagaaagaaaaaagaaaaaatattctttccttgttttttaaattatactgtaaactccagttaagtagaggctcatgacagctcagtgcggatttcatgttaactcatcatattgccaaagcctaggaccagagaaaattttagatacaaaacctggaactttccgtcttgaatatcataatgctttagtgtcctattggctcttatttctgccggcactttgttgttttgcctcagcattcagcatcagaatgaaatttgtgtatttcaaagctttattaacaaaacctgcctcccaccagcaaaaataaacttttctacccagagcaccattcctatgccctggaacactgtatttccctacttttaaccagaaagcagcagtgtaattattcacatgtaaatagaggctgtgcatcacatgtggtgccttctgaaagcattggctggattgtstgcg

SEQ ID NO: 55306 - DNA, 1322 bp, Homo sapiens
cattcaagtggacaattcagtctctttcctcttccccatcgccaaaacrtaaaacagaaaaatctatattttttccattaactccattcctatcaaatgcaaattcagttttgccaaaaccacccaccaaaaatgacccactcagctagcttctcttatatttcaactgagactatactgtaagaaacaaaaatgatctgaaccatatttgccatgtaacattaacaatgtgagaaaattattttttaaaactgttgtcaattaagacataacttatatttttctcattggaatttcccaacatggctgtcctggttaggacagccaaaccaagccaaagagcagctccctatgtctgggcatgcagtcatctgacttcaatagactcttcacctcgacatgtcatgtactctaagaatgtaaaagcttttagtgctccagcaatgctaaggccaaatccagcacaactagcatcacagtaaatacttaacagcatatgttccttaatacagtatatgcttgttaaaaataattcattagaacgtattaataagcagccattcacatgagagggctccatcattttgtgagcttaataaatataataaacaactaggtacataagcaacactttcaaacagacctgatcctataaaaggtatattttctaactgtattttaccttggcttaggttaaataaaatgttcttcagctgataaaacactaagcaaacctggtctatgtattttctacagaaagaaatcttttagcttgtaatgatgaaaactcatagcctttttgtgtccttcgtataattaaaatgaacgtgtctcacttatttctgtggagaaagaaaaaatatctgaaaatataaaaggctaataagaccttctatgaaagaggcagttgagaagaaacgcagtttcccagtcaagatgactaacctgggttccagaatataaaagaatatcgtgctgtgctgcagtattacaaacaaataaaataggccgaaaagaatcccccttccacttccataaaaagaaaaatgcatcttcatgctcaatgtaaacatcacaaaagcttggtcaatggtttaatatttaaaaaatggttttgggtcatcagataactatagcaacacaacgtggaaagaaatttttttaaatgaataaaatatatacaaaatttcttgtatgtgtagccaaagtatcagcattttccatatagaacatccaatattttgctgcattttaattaaggtgtctaaacattatcacaaagaactgcaaattggtcagagcatgcagtaaggaaaattaag

SEQ ID NO: 55307 - DNA, 603 bp, Homo sapiens
aggatcacttgagcccatgaggttgaggctgcagtgagctctgatgccaccactgcactctagcctgggggacagagtgagagagaagtttattccccggagcaccccattgggtctcccttgtggcccgcctcgcatcttcttaaactctgcatggcatatgtcttctgttcttgccttaggagttctgtttgctcagccgccggcccccacgccaacctctgctcccaacaaaggrggcggcggcggcggcggcagcagcagcaacgcaggcggccggggaggaaacaccggaaccagcggcggccaggctgggccagcggggctgtccacaccctccacatctacctcaaataactcgttgccttaaccgcatcactccccacccgccacccaccctggagcccgccggcctgggcagggggtccaggtgggccacacaggggccaggatggcggaagatacgggtggggagggaagatatccagaaaggagccacagctgacgccaaaaagaaaagaaaaaagatatatatatatatatatatatatacacgtatatatataaagagaatttaataaaacaggggaaaaccaaggaaca

SEQ ID NO: 55308 - DNA, 603 bp, Homo sapiens
aggatcacttgagcccatgaggttgaggctgcagtgagctctgatgccaccactgcactctagcctgggggacagagtgagagagaagtttattccccggagcaccccattgggtctcccttgtggcccgcctcgcatcttcttaaactctgcatggcatatgtcttctgttcttgccttaggagttctgtttgctcagccgccggcccccacgccaacctctgctcccaacaaaggaggcggcggcggcggcrgcagcagcagcaacgcaggcggccggggaggaaacaccggaaccagcggcggccaggctgggccagcggggctgtccacaccctccacatctacctcaaataactcgttgccttaaccgcatcactccccacccgccacccaccctggagcccgccggcctgggcagggggtccaggtgggccacacaggggccaggatggcggaagatacgggtggggagggaagatatccagaaaggagccacagctgacgccaaaaagaaaagaaaaaagatatatatatatatatatatatatacacgtatatatataaagagaatttaataaaacaggggaaaaccaaggaaca

SEQ ID NO: 55309 - DNA, 603 bp, Homo sapiens
aggatcacttgagcccatgaggttgaggctgcagtgagctctgatgccaccactgcactctagcctgggggacagagtgagagagaagtttattccccggagcaccccattgggtctcccttgtggcccgcctcgcatcttcttaaactctgcatggcatatgtcttctgttcttgccttaggagttctgtttgctcagccgccggcccccacgccaacctctgctcccaacaaaggaggcggcggcggcggcggcagcagcagcaacgcaggcggccggggaggaaacaccggaaccagcggcggccaggctgggccagcggggctgtccacaccctccacatctacctcaaataactcgttgccttaaccgcatcactccccacccgccacccaccctggagcccgccggcctgggcagggggtccaggtgggccacacaggggccaggatggcggaagatacgggtggggagggaagatatccagaaaggagccacagctgacgccaaaaagaaaagaaaaaagatatatatatatatatatatatatayacgtatatatataaagagaatttaataaaacaggggaaaaccaaggaaca

SEQ ID NO: 55310 - DNA, 1002 bp, Homo sapiens
ggctcaaagactgtgaggccgcctgctctgtcttagggaagcacagactttctcaagtgtcaattgagcagcagtgttgggtcatggacagacacatcagtgggagtcacagcccctggtacccctcccagtccctccctaatcagttgactggctggctcaccttgggttccttacctggaatgtgcaactgctgggccccttccaaattccatcctactttgcccccctatatgtgatttctctgcagcttccatttctaaggatgttctagagatgagtaataatgggacttcccattgtcctgagaccctgaagatacttagcagcctggcctgggactggatgtttcagcagaaataacacagaggagaccagagtcaagcctggaggtcagttcagtcatcaggcagtggaggctcaaggtggggcagttttttrcaggtgtttcatgatgacttacttgaaccagtgacctctaaacatagagcagagtgcaaggaatgatctagaaagagtgaaggcgacaggcaagagctggtggctttggagcagaaccatgttctctgtcctgggttctttaagtttcctctccttctgcagagggcagaggaggaccatgtggatctttccagaaatacatgtggacatttgcaaatgcagaactgactggtggaaagtgtgggaatgaactgctggaaatctggtcctcatggaccatgtgtgtttgatggatatgagacaaacttggagagaagttttgcaaatattttctttcattggacattctactctctgatcccctgggttcgactactctagggacctcatgtaagtggattccagagtgaatatgagaagagactgctggttgccaggagctgggagtggggagaatcagaaattgttcatgggtgtgcagtttcagttatgcaaggtggggaggttctagagatctgctgtagagcttgatgcctatagttcacacagattgagtatttc

SEQ ID NO: 55311 - DNA, 1002 bp, Homo sapiens
ggctcaaagactgtgaggccgcctgctctgtcttagggaagcacagactttctcaagtgtcaattgagcagcagtgttgggtcatggacagacacatcagtgggagtcacagcccctggtacccctcccagtccctccctaatcagttgactggctggctcaccttgggttccttacctggaatgtgcaactgctgggccccttccaaattccatcctactttgcccccctatatgtgatttctctgcagcttccatttctaaggatgttctagagatgagtaataatgggacttcccattgtcctgagaccctgaagatacttagcagcctggcctgggactggatgtttcagcagaaataacacagaggagaccagagtcaagcctggaggtcagttcagtcatcaggcagtggaggctcaaggtggggcagttttttgcaggtgtttcatgatgacttacttgaaccagtgacctctaaacatagagcagagtgcaaggaatgatctagaaagagtgaaggcgwcaggcaagagctggtggctttggagcagaaccatgttctctgtcctgggttctttaagtttcctctccttctgcagagggcagaggaggaccatgtggatctttccagaaatacatgtggacatttgcaaatgcagaactgactggtggaaagtgtgggaatgaactgctggaaatctggtcctcatggaccatgtgtgtttgatggatatgagacaaacttggagagaagttttgcaaatattttctttcattggacattctactctctgatcccctgggttcgactactctagggacctcatgtaagtggattccagagtgaatatgagaagagactgctggttgccaggagctgggagtggggagaatcagaaattgttcatgggtgtgcagtttcagttatgcaaggtggggaggttctagagatctgctgtagagcttgatgcctatagttcacacagattgagtatttc

SEQ ID NO: 55312 - DNA, 1002 bp, Homo sapiens
ggctcaaagactgtgaggccgcctgctctgtcttagggaagcacagactttctcaagtgtcaattgagcagcagtgttgggtcatggacagacacatcagtgggagtcacagcccctggtacccctcccagtccctccctaatcagttgactggctggctcaccttgggttccttacctggaatgtgcaactgctgggccccttccaaattccatcctactttgcccccctatatgtgatttctctgcagcttccatttctaaggatgttctagagatgagtaataatgggacttcccattgtcctgagaccctgaagatacttagcagcctggcctgggactggatgtttcagcagaaataacacagaggagaccagagtcaagcctggaggtcagttcagtcatcaggcagtggaggctcaaggtggggcagttttttgcaggtgtttcatgatgacttacttgaaccagtgacctctaaacatagagcagagtgcaaggaatgatctagaaagagtgaaggcgacaggcaagagctggtggctttggagcagaaccatgttctctgtcctgggttctttaagtttcctctccttctgcagagggcagaggaggaccatgtggatctttccagaaatacatgtggacatttgcaaatgcagaactgactggtggaaagtgtgggaatgaactgctggaaatctggtcctcatggaccatgtgtgtttgatggatatgagacaaayttggagagaagttttgcaaatattttctttcattggacattctactctctgatcccctgggttcgactactctagggacctcatgtaagtggattccagagtgaatatgagaagagactgctggttgccaggagctgggagtggggagaatcagaaattgttcatgggtgtgcagtttcagttatgcaaggtggggaggttctagagatctgctgtagagcttgatgcctatagttcacacagattgagtatttc

SEQ ID NO: 55313 - DNA, 2230 bp, Homo sapiens
tgttttcaatgggtcgctttaccctgggactgacagggaggctctgaccatttagccaccaaatgtaggtgtagttcttactcttaggttcacaggtgaaggttaagacatccttattctcyctggggtttaagttgttgattgtgatgtagggcttggacagctttgctgtgtggataacagagagaagattgtcctgtgtggcacctttgattcctccacaggcatacttcaatcagagttggcatctcccacctctcagcccacccgagtccttgaaagccaatagctggtgcttctgtcacaagatagatgcatgatgatctaagggctcaaagactgtgaggccacctgctctgttttagggaggcacagactttctcaagtgtcaattgagcagcagtgttgggtcatggacagacatatcagtgggagtcacagccccttgtacccctcccagtccctccctaatcagttaacttgctggctcaccttgggttccttacctggaatgtgcaactactgggccccttccaaattccatcctcctttgcccccctagatgagatttctctgcagcttccatttcaaggacattctagagatgagtaataatgggacttcccattgtcctgaaaccctgaagatactgagcagtctggcctgggactggatgtttcagcagaaataacacaggagagaccagagtcaagcctggaggtcagttcagtcatcagccagtggaggcagaaagtggggcagtgttttgcaggtgtttcatgatgacttacttgaaccagtgacctctaaagatagagcagagtgcaaggaatgatctagaaggagtcaaggggacaggcaagagctggtggctttggagcagaaccatgttccctgtcctgggttctttaagtttcctctccttctgcagagggcaggtgaggaccatgtggatctttccagaaatacatatggacatttgcaaaagcagaactgactggtggaaagtgtgggaatgaactgctggaaatctggtcctcatggaccatgtgtgtttgatggatatgagacaaatttggagagaagttttgcaaatattttctttcattggacattctactctctgattccctgggttcgactactctagggacctcatgtaagtggattccagagtgaatatgagaagagactgctgtttgccaggagctgggagtggggagaatcagaagttgttcatgggtgtgcagtttcagttatgcaaggtggggaggttctggagatctgctgtagagcttgatgcctataattcacacagattgagtattatgcataagacttagaacaaaaagtgttttggatttctgacatttttttattctgaaatatttgtcatatgcttactggtttagcatcccaaatctgaaagattcaaaatctaaaatgcttcagtgagcatttcttttcagcatcagattagtaggcaaaagtgggaggtgataagccaaagatattcttgccctttttttttctctcaccacgtttctagcttgatgattagtttttggtcaattccatactggccatgctgcactcatatattttttaaagctttgggatgtgagaaaggctgattgctattttctgtcgtcagaactttccacgttttcatggttgcctctttttctcagtgtttctgttgtggcagtcattaataagagcctgtcaggtcagatttaggacagagttttataattctgcaaaaaaatgttactgggattctggtaggggttgcattgaatctgcaactaactttgggtagtattgtctttctaacaatattgattcttccaatccatgaaaatgaaatgtctttccatatattgatatcgtctttaatttctttcagcaatgttttgtagttttcaggatataatcatttgacctttttgattaaacttactccaaaatattttattccttttgatgttaatgtgaattgaaattatttccttaatttcctttcagattgttcattgttagtgtatagtctaaagaatgacctagaaagagtgaaggggacaggcaaaagctggtggttttggagcagaaacatattccctgtgctgggtttttgattttccctctccctttgcagagggcaggtggcttttccctgatagctagatagacttcactggaaaacatattgccaatgctccagggatcc

SEQ ID NO: 55314 - DNA, 2230 bp, Homo sapiens
tgttttcaatgggtcgctttaccctgggactgacagggaggctctgaccatttagccaccaaatgtaggtgtagttcttactcttaggttcacaggtgaaggttaagacatccttattctctctggggtttaagttgttgattgtgatgtagggcttggacagctttgctgtgtggataacagagagaagattgtcctgtgtggcacctttgattcctccacaggcatacttcaatcagagttggcatctcccacctctcagcccacccgagtccttgaaagccaatagctggtgcttctgtcacaagatagatgcatgatgatctaagggctcaaagactgtgaggccacctgctctgttttagggaggcacagactttctcaagtgtcaattgagcagcagtgttgggtcatggacagacatatcagtgggagtcacagccccttgtacccctcccagtccctccctaatcagttaactkgctggctcaccttgggttccttacctggaatgtgcaactactgggccccttccaaattccatcctcctttgcccccctagatgagatttctctgcagcttccatttcaaggacattctagagatgagtaataatgggacttcccattgtcctgaaaccctgaagatactgagcagtctggcctgggactggatgtttcagcagaaataacacaggagagaccagagtcaagcctggaggtcagttcagtcatcagccagtggaggcagaaagtggggcagtgttttgcaggtgtttcatgatgacttacttgaaccagtgacctctaaagatagagcagagtgcaaggaatgatctagaaggagtcaaggggacaggcaagagctggtggctttggagcagaaccatgttccctgtcctgggttctttaagtttcctctccttctgcagagggcaggtgaggaccatgtggatctttccagaaatacatatggacatttgcaaaagcagaactgactggtggaaagtgtgggaatgaactgctggaaatctggtcctcatggaccatgtgtgtttgatggatatgagacaaatttggagagaagttttgcaaatattttctttcattggacattctactctctgattccctgggttcgactactctagggacctcatgtaagtggattccagagtgaatatgagaagagactgctgtttgccaggagctgggagtggggagaatcagaagttgttcatgggtgtgcagtttcagttatgcaaggtggggaggttctggagatctgctgtagagcttgatgcctataattcacacagattgagtattatgcataagacttagaacaaaaagtgttttggatttctgacatttttttattctgaaatatttgtcatatgcttactggtttagcatcccaaatctgaaagattcaaaatctaaaatgcttcagtgagcatttcttttcagcatcagattagtaggcaaaagtgggaggtgataagccaaagatattcttgccctttttttttctctcaccacgtttctagcttgatgattagtttttggtcaattccatactggccatgctgcactcatatattttttaaagctttgggatgtgagaaaggctgattgctattttctgtcgtcagaactttccacgttttcatggttgcctctttttctcagtgtttctgttgtggcagtcattaataagagcctgtcaggtcagatttaggacagagttttataattctgcaaaaaaatgttactgggattctggtaggggttgcattgaatctgcaactaactttgggtagtattgtctttctaacaatattgattcttccaatccatgaaaatgaaatgtctttccatatattgatatcgtctttaatttctttcagcaatgttttgtagttttcaggatataatcatttgacctttttgattaaacttactccaaaatattttattccttttgatgttaatgtgaattgaaattatttccttaatttcctttcagattgttcattgttagtgtatagtctaaagaatgacctagaaagagtgaaggggacaggcaaaagctggtggttttggagcagaaacatattccctgtgctgggtttttgattttccctctccctttgcagagggcaggtggcttttccctgatagctagatagacttcactggaaaacatattgccaatgctccagggatcc

SEQ ID NO: 55315 - DNA, 2230 bp, Homo sapiens
tgttttcaatgggtcgctttaccctgggactgacagggaggctctgaccatttagccaccaaatgtaggtgtagttcttactcttaggttcacaggtgaaggttaagacatccttattctctctggggtttaagttgttgattgtgatgtagggcttggacagctttgctgtgtggataacagagagaagattgtcctgtgtggcacctttgattcctccacaggcatacttcaatcagagttggcatctcccacctctcagcccacccgagtccttgaaagccaatagctggtgcttctgtcacaagatagatgcatgatgatctaagggctcaaagactgtgaggccacctgctctgttttagggaggcacagactttctcaagtgtcaattgagcagcagtgttgggtcatggacagacatatcagtgggagtcacagccccttgtacccctcccagtccctccctaatcagttaacttgctggctcaccytgggttccttacctggaatgtgcaactactgggccccttccaaattccatcctcctttgcccccctagatgagatttctctgcagcttccatttcaaggacattctagagatgagtaataatgggacttcccattgtcctgaaaccctgaagatactgagcagtctggcctgggactggatgtttcagcagaaataacacaggagagaccagagtcaagcctggaggtcagttcagtcatcagccagtggaggcagaaagtggggcagtgttttgcaggtgtttcatgatgacttacttgaaccagtgacctctaaagatagagcagagtgcaaggaatgatctagaaggagtcaaggggacaggcaagagctggtggctttggagcagaaccatgttccctgtcctgggttctttaagtttcctctccttctgcagagggcaggtgaggaccatgtggatctttccagaaatacatatggacatttgcaaaagcagaactgactggtggaaagtgtgggaatgaactgctggaaatctggtcctcatggaccatgtgtgtttgatggatatgagacaaatttggagagaagttttgcaaatattttctttcattggacattctactctctgattccctgggttcgactactctagggacctcatgtaagtggattccagagtgaatatgagaagagactgctgtttgccaggagctgggagtggggagaatcagaagttgttcatgggtgtgcagtttcagttatgcaaggtggggaggttctggagatctgctgtagagcttgatgcctataattcacacagattgagtattatgcataagacttagaacaaaaagtgttttggatttctgacatttttttattctgaaatatttgtcatatgcttactggtttagcatcccaaatctgaaagattcaaaatctaaaatgcttcagtgagcatttcttttcagcatcagattagtaggcaaaagtgggaggtgataagccaaagatattcttgccctttttttttctctcaccacgtttctagcttgatgattagtttttggtcaattccatactggccatgctgcactcatatattttttaaagctttgggatgtgagaaaggctgattgctattttctgtcgtcagaactttccacgttttcatggttgcctctttttctcagtgtttctgttgtggcagtcattaataagagcctgtcaggtcagatttaggacagagttttataattctgcaaaaaaatgttactgggattctggtaggggttgcattgaatctgcaactaactttgggtagtattgtctttctaacaatattgattcttccaatccatgaaaatgaaatgtctttccatatattgatatcgtctttaatttctttcagcaatgttttgtagttttcaggatataatcatttgacctttttgattaaacttactccaaaatattttattccttttgatgttaatgtgaattgaaattatttccttaatttcctttcagattgttcattgttagtgtatagtctaaagaatgacctagaaagagtgaaggggacaggcaaaagctggtggttttggagcagaaacatattccctgtgctgggtttttgattttccctctccctttgcagagggcaggtggcttttccctgatagctagatagacttcactggaaaacatattgccaatgctccagggatcc

SEQ ID NO: 55316 - DNA, 750 bp, Homo sapiens
tggatcccacactggggctgcagatggagttgcctgccagtcccacgccatgtgcccgtgctcctcagcccttgggtggttgatgggactgggtgctgtggagcaggaggtggcactcctcagggaggctccccccgcactggaggctcgggccgcacatggagggggtgggaggctcaggcatggcggactgctggtcccgagccctgccctgccagaaggcagctaaggcccggtgagaaatcgagcacagcgccggtgggctggcactgctgggggacccagtacaccctctgcagccgctggctcgggtgctaagcccctcattgcctggggccagcagggccagccggctgctccgagtgcgaggcctgccaagcccacgcccacccggaactccagctggcccgcaagcgccacgcgcagccccggttccgctggcgcctctccctccacacctccctgcaagctgagggagctggctctggccttggccagcccagaaaggggctcccacagtgcagcggtgggctgaagagctcctcaagtgctgccaaagtgggagcccaggcagaggaggcaccgagagcgagmgagggctgtgaggactaccagcatgctgtgacctctcagcaccactgatttctccatgagcattttccaatcacagttgacatctcccacctctcagccaatccatgtccttaaaagcccacagcaggtctgtgtaccaaaagacagatggatgca

SEQ ID NO: 55317 - DNA, 750 bp, Homo sapiens
tggatcccacactggggctgcagatggagttgcctgccagtcccacgccatgtgcccgtgctcctcagcccttgggtggttgatgggactgggtgctgtggagcaggaggtggcactcctcagggaggctccccccgcactggaggctcgggccgcacatggagggggtgggaggctcaggcatggcggactgctggtcccgagccctgccctgccagaaggcagctaaggcccggtgagaaatcgagcacagcgccggtgggctggcactgctgggggacccagtacaccctctgcagccgctggctcgggtgctaagcccctcattgcctggggccagcagggccagccggctgctccgagtgcgaggcctgccaagcccacgcccacccggaactccagctggcccgcaagcgccacgcgcagccccggttccgctggcgcctctccctccacacctccctgcaagctgagggagctggctctggccttggccagcccagaaaggggctcccacagtgcagcggtgggctgaagagctcctcaagtgctgccaaagtgggagcccaggcagaggaggcaccgagagcgagcgagggctgtgaggactrccagcatgctgtgacctctcagcaccactgatttctccatgagcattttccaatcacagttgacatctcccacctctcagccaatccatgtccttaaaagcccacagcaggtctgtgtaccaaaagacagatggatgca

SEQ ID NO: 55318 - DNA, 1231 bp, Homo sapiens
ctcccaccgctagagggcagcatcctaaggatccgtttccraagcgctggaattgcgtttttagaggtcacagaccctttggtaaacaaataaatgctatggacgcctaatttttagagtatgttctcatgtttacaggttcttctatattcagaattttaaaatatcattctcaccaagaatcggaacttactgaaaaagaagggagtgaaagaatttctgagttcgtgggaaacctggccatgcactgcagtgtaatgaaaactgggactccagggggcaaatgagggtaaatgctgttcctaaagcggggatcagttaaaaaaggtcaatcactaccttaggtgattggtgaaaggttggtgagtttagcccatgagataatatatgtgcttctcttttggggtcccagcctcccaaagtgctgggattacaggcatgaaccaccgcgcccagtctcttatggattttttttaaatcaagaattctctggaaagaacattttcctttccggaaggggccacgtatacgctatcttgagaagaaggcaggttatatttgagaagaatcaaaatttaatgtcagatgcagcaatgaggtttcatgtttagcaaatctgagtctgattgttgaactattacatggacaacataatgtcacagtgggaatctagtgaaaattggcccaatatgtcttgagaagccactaggggaagccaaacactacgtaaccaaaaaaatcaaattggggttaggaaaacagaattagctaccagggaaaataatgtcccaagtgttctcaccttcttcttcttaaattgaagtttaaagcattttgcggctcaacccctaaccgcaaaagaaaagcacacatattatcccatgggctaaactcaccaaccttccacctaaggtagtgattgtcgtcttttaattactccctgcttcaggagcagcgcttaccctcatttgccccctggagtcctagttttcattccactgcactacatggccagacttcccactggctcagaaattctttcactctcttctttttcagtaagttccaattcctggtgagaatgatattttaaaattctgaatatagaagaacccgtaaacatgagaaaatgccctaaaaattaggagtccagagcatttatttgtttaccaaaagggtctgtgacctttaaaaactcaatttcagccctttggaaacggattcccaggat

SEQ ID NO: 55319 - DNA, 1033 bp, Homo sapiens
aagtgtgatcatatgacccaatatattatggaacaaatttataagttattaaattttagattcaaattatctttaaaagctacatcatggttcactgcatgaactactatccaatatcaaaaagcatttaagttacttccaatttttctctctctagaacattaagatatttgcaagccgcataactgataaatttatatttaaaatatataaagaactcctataactcaaaaacaaataatccaatttaaaaacaggcaaaatattttgaacagacatttctccaaagtggatacacaaatggccagtaaggacatgaaaagatactcagcatcattagttattaaggaaatgcaaccactactacaatgagatacaacttcactctcaacaggatggctacagtttttttttacagaaggaaaataagcgttggtgaggatgtggagaaactggaacccttatagactggtgggaaagtgaaattgtatagcctcttcagaaaagtttggcagcttctgaaaatattaaacatagaattattatatgacccagcaattccacttctaagtatccagcaccgtgaaataatcatcagaggaattttttttttttttttgagacggagtcttgctctgtcgcccaggctggagtgcagtggcgtgatctcggctcactgcaagctccacctcctgggttcacgccattctcctgcctcagcctcccaagtagctgggtctataggcgcccgccaccatgcctggctaattgtttctttgtatttttagtagagacagggtttcaccrtgttagccaggatggtctccatctcctgacctcgtgatccgcccgccttagcctccaaaagtgctgggattacaggcgtgagccaccgcacccggccatcagaggatttctttatggtggacactgaatattgtaaaagagatcctttcttccagtaagtcctaagcagttcacttcccaatgaatgcaaggtggaagatgggggcctcaccagacacagcctcca

SEQ ID NO: 55320 - DNA, 1890 bp, Homo sapiens
aagctacagaggttttgacaaaagtttatgcatatgaaatgtgctcgtgatgaagtcatccactcccatgacacaagaccagtgaaatatcccaagattttaaaacactgaccactttgcattctgtttcctgagtcaaagccaaactacagagttgaaagtgctttagctcaacctcaaaccctttttgtttagatcagaagtcaccaacccccaggccatggaccagcactggtccgtgccctgttaggaaccaggccacacagcaggaggtgagcagcaggtgagcaagcattaccacctgagctccacctctcctgtcagatcagcagcagcaacagattctcataggagcgcaaaccctattgtgaactgtgtatttgagggatctaggttgcgcactccttatcagaatctaatgcctgatgacctgaggtgaaacgaaaccggtccctggtgccaaaaaggctggagaccattgatttaggtaatggttctcacttagcaagcaagtgaacaaatctgtatatgcccatttggttaagcctggtatctcccagacatatgaccatagcagaatgaacaataattatgtttaatgattttgttactaccttttttgctgagggactttttccaggatgttatttctggagaaaagaaagggatctctaggaaatacttgctcctgtctggtacagaaatttcacccaatttacacaggccaggccctcttctctgaataacttaacaggtgaggtcaacatgcatttattcagtgcctgctgtgtgcttttataaaataaaagctgtatcatgttatagtgtggcagagaatagtgggaacagacatcaacaaggaatgtatataaaagaactttaaagccgggagtcccagctgtgacagaccaatctccaattcattaagaccctaaccctcaggctcctttcaagctgaactcatgcttaatttaaaggaaaatattcgtgccaaagtttccaggaaatggaaactggagactttttcaggtcctctaaattctcaatcattccccacatgaattgtcacagaaacaaagggcaagagaccactttacctcttgtggatttactgcagttaagacagaaacttcatatgattgcctccctgactgcatggtcaccaggtgatgtgtcacatcaggcactgaagacagggaacgtggggatccttcagcaagcacctctgtgaagcaacagaaaaatgtttcaatgaaaagtgaatccagagatacacctatctggatcattaagcctctcattaacaactctaaaactctattcctctatttcccacattcctctatttcttccaagttaatcctgtctgataagcattatcagtgaatttggaaagtaatataaaaagagaatagaaaggcaagaaatcttaatacaggatttagaataatatggygttagcacttttaactgaattaaaactatgtatgaaacaggcaaaagtcttaggcaagcaggtaagggaaccaaagccacccttaaaagcagtcgccaatgatactaatagcacttactaactgaatatgatatgagtaacaaaaacatagggtctcacagttactaaatgttcatcagtgggatcaccatgaaaatcttctggaaatagtttatggatataccacttagccctcaaaaaactagaagtttcttctaggggttttctagattatacaactattttatgctgtaccatataatttaatgttggcttatatactatcttttatgtactcaatgttctttcccatatatatgtaagctttcacttctcaactggattttaaggtccctatcttctacttttgtctttcccatggtgccaggcacaca

SEQ ID NO: 55321 - DNA, 704 bp, Homo sapiens
ggggttccgaggcgcagggcgaccgccggctccggctccccgaggaaggggcacaggcgctgcccgcggtcactcgggccaggtgagggcaggggacgcgcgggggccggaggaggaggcctggtctgcgggcggcaggagggacccggggccagccgaggctgttcccagggaggcagacacctgctgtcgccgggaccctcgacacgctccgcacgcgcgggagcggaaccgggcctgctttggaggcctcccttggcgcgcttggatttactcaaaggtcaaagaaaaatgtcaaggagagcgattgcctggagagctcctggctctcctcccgggtccccgctgggtcccaggagtccccggaggggaagcaaggagccccagtgccctggagtcctgtctccaccaacctcgcccggctccctgctgcctaggcccgcgctgtcccagcagaggaggggtgggagccgccccaggcycacctccccgcgccggtccacaaggaggcccctcctgcaacctgggagaggccgggggaggcccggagggcgaccgcgcggggccgcgggacctggacagccggggagtcgtgaccgcgggcagcgccggggctgagggcgaggagggtcttactgcagggaagggcgggacgctggacagagggaccgactggggtccaccggcctgacacagaagtcgct

SEQ ID NO: 55322 - DNA, 704 bp, Homo sapiens
ggggttccgaggcgcagggcgaccgccggctccggctccccgaggaaggggcacaggcgctgcccgcggtcactcgggccaggtgagggcaggggacgcgcgggggccggaggaggaggcctggtctgcgggcggcaggagggacccggggccagccgaggctgttcccagggaggcagacacctgctgtcgccgggaccctcgacacgctccgcacgcgcgggagcggaaccgggcctgctttggaggcctcccttggcgcgcttggatttactcaaaggtcaaagaaaaatgtcaaggagagcgattgcctggagagctcctggctctcctcccgggtccccgctgggtcccaggagtccccggaggggaagcaaggagccccagtgccctggagtcctgtctccaccaacctcgcccggctccctgctgcctaggcccgcgctgtcccagcagaggaggggtgggagccgccccaggcccacctccccgcgccggtccacaaggaggcccctcctgcaacctgggagaggccgggggaggcccggagggcgaccgcgcggggccgcgggacctgkacagccggggagtcgtgaccgcgggcagcgccggggctgagggcgaggagggtcttactgcagggaagggcgggacgctggacagagggaccgactggggtccaccggcctgacacagaagtcgct

SEQ ID NO: 55323 - DNA, 1462 bp, Homo sapiens
ctcaatacattcaagagaatcacctctgacccctgcactttttttatttttatgctggggttcactctgtcacccaggctggagtggagtggcatggcacgatcacagctcactgcaacctcaacctcctgaattcaagcagattacaggcgtgagccactgggcccagcaagacaggaattttgattagagacccaggtcctgtgcttggcatgtcaccaggtttatttatgacttattcatattgattgactgattgagatagggtcttgctatgttgcccagacctgtctcgatctcctgacctgaagtgatcctcctgcctcaagcctcccaaagtgctgagacgacaggcatgagccactgtgcctggctcctgcccattcttagactcaagttctgcatttctagctgtctcttggacaacttggtagcatctcaaactcaacatccacgtggtcatagaactgagtccaggtgaataggatgtgagtggatgtatctgtttccatgtcgtgtggctcaaacgcagatgtggtcatgtaccaactccaaacccaaggacacagataaggcctaggtccctcctggactccctggcacagatcctgtctgcccattctgaaagggtatggagaagagaaatgtgctcctctcctgtcaaagccacagcatactagggtttctttgcagagcagcttgcttggtctcctttgagacaacttcactccttttcctctacgaaaccgatctggttcccccaccccccagatgacactggggcaataaaacactagaaacatacttggaagatggaagcatcctgataatgaaatgcttcccatctcagtgcatagaaggaaaccaggttgtacggatcacttactggtgtcagacattttcacatatcttattgatgtagtttagatatgagtgtcctccagatctcatgttgaaatttgattcccgaatttggaggtggggcctggtgggaggtgtttgggtcacaggggtggagacctcatgatggcttggcactgtctctgcagtaatgagtgagttctccctgcattagttcatgagagagctggcttttttttawaaaaaaaagcatggcacccctctcttttttttttttttttgagacagagtctcgctctgtcactgaggctggagtgtagtggcgtgatcttggctcactgcaacctccgccttccaagttcaagagattcttctgcctcagcctcccgagtagctgggattatagatgtctgccaccatgcccggctaattttgtaattttagtagagacagggtttcaccatgttggtcaggctggtcttgaactcctgacctcaggtgatccacccaccttggcctcccaaagtgctgggattacaggcatgagccactgcgcccggtcacccctttctttcccccccctttctcatcgtgtgatgct

SEQ ID NO: 55324 - DNA, 1462 bp, Homo sapiens
ctcaatacattcaagagaatcacctctgacccctgcactttttttatttttatgctggggttcactctgtcacccaggctggagtggagtggcatggcacgatcacagctcactgcaacctcaacctcctgaattcaagcagattacaggcgtgagccactgggcccagcaagacaggaattttgattagagacccaggtcctgtgcttggcatgtcaccaggtttatttatgacttattcatattgattgactgattgagatagggtcttgctatgttgcccagacctgtctcgatctcctgacctgaagtgatcctcctgcctcaagcctcccaaagtgctgagacgacaggcatgagccactgtgcctggctcctgcccattcttagactcaagttctgcatttctagctgtctcttggacaacttggtagcatctcaaactcaacatccacgtggtcatagaactgagtccaggtgaataggatgtgagtggatgtatctgtttccatgtcgtgtggctcaaacgcagatgtggtcatgtaccaactccaaacccaaggacacagataaggcctaggtccctcctggactccctggcacagatcctgtctgcccattctgaaagggtatggagaagagaaatgtgctcctctcctgtcaaagccacagcatactagggtttctttgcagagcagcttgcttggtctcctttgagacaacttcactccttttcctctacgaaaccgatctggttcccccaccccccagatgacactggggcaataaaacactagaaacatacttggaagatggaagcatcctgataatgaaatgcttcccatctcagtgcatagaaggaaaccaggttgtacggatcacttactggtgtcagacattttcacatatcttattgatgtagtttagatatgagtgtcctccagatctcatgttgaaatttgattcccgaatttggaggtggggcctggtgggaggtgtttgggtcacaggggtggagacctcatgatggcttggcactgtctctgcagtaatgagtgagttctccctgcattagttcatgagagagctggcttttttttaaaaaaaaaagcatggcacccctctcttttttttttttttttgagacagagtctcgctctgtcactgaggctggagtgtagtggcgtgatcttggctcactgcaacctcygccttccaagttcaagagattcttctgcctcagcctcccgagtagctgggattatagatgtctgccaccatgcccggctaattttgtaattttagtagagacagggtttcaccatgttggtcaggctggtcttgaactcctgacctcaggtgatccacccaccttggcctcccaaagtgctgggattacaggcatgagccactgcgcccggtcacccctttctttcccccccctttctcatcgtgtgatgct

SEQ ID NO: 55325 - DNA, 742 bp, Homo sapiens
ggatcccgtgtcctctgtacatccttggtgcctgtactctgttcaccatgtcttggaggtaacacacatctaccgcactgagccacaatagccattgcatatatatgtatatgtattggccattgcattttttagatctctttggttgcagctagtaggaacccacttgagctagatgaaaacctaaaaactatttatagggacatatgggtactttcactacccataccgcagtcaatcagaggctgaagtggagacttgtcttgttatcacaggagtgaggatgtggcctgtgtgctgcctcatcttgcctagaactggctgtacctgctattcttttgcttgtacctttacccttggttaccctaattccctatctatctatctatctatctatctatctatctatctatcatctatctatctattatctatcttctatctattatctatctaygtatctatcatctgtcttctatctatctatctaatcgtctatctatcttatctatctattatctatctatatcttctattaattgtgggttttttttggaggactctgacaaaaagataaacttttacaagacagtttatcagattttgagtatttttttcccaaaggtattgaatctgaaggttcaaccagaggagaacaccgaggttcttctcttccttcctctttcctctcccaggcctccaatgctctcctctctttatcaagcagaacaaaaatgatgac

SEQ ID NO: 55326 - DNA, 718 bp, Homo sapiens
acggccaaaggcccgaragaccctggcaaaccactggtgtaagtccaagagtccaaaagaggaagaacttggagtctgatgtttgaaggcaggaagcatccagcatgggagaaagatgaaggctgaaggactcagcaaaatctagtccttccacgttcctctgcctgcttgtatcctagctacactggcagctgattagatggtgcccacgcagattgagtgtgggtctgcctctcccagtccaccggctcaaatgttaatctcctctggcaacaccctcactgacacacccaggaaccataccttgcatcctttaatccaatcaagttgacactcagtattaaccatcacaccagcctatcagcctttttgctgaggttatgaaaaagcgctatcggacagattcagtgtgggatgttgttgcaagctctgggcctggcagaggaaatatatttgagcgaatacagtagaagctgctagtatattttcattgtcatattctcatagcgtctgccagtaattgggggttatcctagctccaaaggcaatgtgtaaaactccttcttggaacgtcaaaggcctttaagatgtagttagtgctgtacttaacacaggtaatagctattagcctgaagtatttcaagggtttagagtcatctcagaggaaacctcaaagatgagttgcacaaaggaaatctttcatgaggcctgatggatc

SEQ ID NO: 55327 - DNA, 1008 bp, Homo sapiens
agattgacgggcccaggaatatcactggccagaataagatggtaactcccagtgcacttgcctttgccatctacctagaccaggtgatatggtttggctctgtgtccccacccaaatctcacttcgaattgtaataatccccacatgtcatgggagggatctgtgggaagtcattgaatcatgggtgcagatttttcccmagctgttcttgtgatagtgaataagtctcaggagagctgatggttttataaaagggcagctctcctgcacatgccctcttgcctgccaccatgtaagatgtgtcttgcttcaccttcgccttccaccatgattgtgaggcctccccagccatgtggaactgtgagtccattaaagctctttcctttataaattacccagtctcaggtatgtctttattagcaatgtgaaaatagactaatacaccaagtgaactaaaggcctggatgtacagatgacactggacatatcaccttcctagggggctgccatggaaaccctgggcatcccaggctaccagccaggctataagcttattcacattaacccaaactcctcatcagcttccctgtatcactgcccaccacttccaaaagtcctcattgagccatataaacagattaaactgattaaacatacttccccaagagtccattgggtgtgatttttctgtgacctctctggcaagcaccagcatctgtaattgtgtaggcaccatgccaacacagacacgtgattgtaagaattgagtgtgttcttagtctttgataatgaaaatcttagcattttcacaaagtatgaaattaaaaggtgttatctctttggagcctgacatgagacacaaaagtgtttataagaattgcgcaaactgggacatgctttgacaaaatctgcttaattcttccaaaattggtgtttagatagggacagcaacatgttttttccccacaaagctctattattactctcattatgtgttttatcttagaa

SEQ ID NO: 55328 - DNA, 1008 bp, Homo sapiens
agattgacgggcccaggaatatcactggccagaataagatggtaactcccagtgcacttgcctttgccatctacctagaccaggtgatatggtttggctctgtgtccccacccaaatctcacttcgaattgtaataatccccacatgtcatgggagggatctgtgggaagtcattgaatcatgggtgcagatttttcccaagctgttcttgtgatagtgaataagtctcaggagagctgatggttttataaaagggcagctctcctgcacatgccctcttgcctgccaccatgtaagatgtgtcttgcttcaccttcgccttccaccatgattgtgaggcctccccagccatgtggaactgtgagtccattaaagctctttcctttataaattacccagtctcaggtatgtctttattagcaatgtgaaaatagactaatacaccaagtgaactaaaggcctggatgtacagatgacactggacatatcaccttcctagggggctgccatggaaaccctgggcatcccaggctaccagccaggctataagcttattcacattaacccaaactcctcatcagcttccctgtatcactgcccaccacttccaaaagtcctcmttgagccatataaacagattaaactgattaaacatacttccccaagagtccattgggtgtgatttttctgtgacctctctggcaagcaccagcatctgtaattgtgtaggcaccatgccaacacagacacgtgattgtaagaattgagtgtgttcttagtctttgataatgaaaatcttagcattttcacaaagtatgaaattaaaaggtgttatctctttggagcctgacatgagacacaaaagtgtttataagaattgcgcaaactgggacatgctttgacaaaatctgcttaattcttccaaaattggtgtttagatagggacagcaacatgttttttccccacaaagctctattattactctcattatgtgttttatcttagaa

SEQ ID NO: 55329 - DNA, 1008 bp, Homo sapiens
agattgacgggcccaggaatatcactggccagaataagatggtaactcccagtgcacttgcctttgccatctacctagaccaggtgatatggtttggctctgtgtccccacccaaatctcacttcgaattgtaataatccccacatgtcatgggagggatctgtgggaagtcattgaatcatgggtgcagatttttcccaagctgttcttgtgatagtgaataagtctcaggagagctgatggttttataaaagggcagctctcctgcacatgccctcttgcctgccaccatgtaagatgtgtcttgcttcaccttcgccttccaccatgattgtgaggcctccccagccatgtggaactgtgagtccattaaagctctttcctttataaattacccagtctcaggtatgtctttattagcaatgtgaaaatagactaatacaccaagtgaactaaaggcctggatgtacagatgacactggacatatcaccttcctagggggctgccatggaaaccctgggcatcccaggctaccagccaggctataagcttattcacattaacccaaactcctcatcagcttccctgtatcactgcccaccacttccaaaagtcctcattgagccatataaacagattaaactgattaaacatacttccccaagagtccattgggtgtgatttttctgtgacctctctggcaagcaccagcatctgtaattgtgtaggcaccatgccaacacagacacgtgaytgtaagaattgagtgtgttcttagtctttgataatgaaaatcttagcattttcacaaagtatgaaattaaaaggtgttatctctttggagcctgacatgagacacaaaagtgtttataagaattgcgcaaactgggacatgctttgacaaaatctgcttaattcttccaaaattggtgtttagatagggacagcaacatgttttttccccacaaagctctattattactctcattatgtgttttatcttagaa

SEQ ID NO: 55330 - DNA, 1008 bp, Homo sapiens
agattgacgggcccaggaatatcactggccagaataagatggtaactcccagtgcacttgcctttgccatctacctagaccaggtgatatggtttggctctgtgtccccacccaaatctcacttcgaattgtaataatccccacatgtcatgggagggatctgtgggaagtcattgaatcatgggtgcagatttttcccaagctgttcttgtgatagtgaataagtctcaggagagctgatggttttataaaagggcagctctcctgcacatgccctcttgcctgccaccatgtaagatgtgtcttgcttcaccttcgccttccaccatgattgtgaggcctccccagccatgtggaactgtgagtccattaaagctctttcctttataaattacccagtctcaggtatgtctttattagcaatgtgaaaatagactaatacaccaagtgaactaaaggcctggatgtacagatgacactggacatatcaccttcctagggggctgccatggaaaccctgggcatcccaggctaccagccaggctataagcttattcacattaacccaaactcctcatcagcttccctgtatcactgcccaccacttccaaaagtcctcattgagccatataaacagattaaactgattaaacatacttccccaagagtccattgggtgtgatttttctgtgacctctctggcaagcaccagcatctgtaattgtgtaggcaccatgccaacacagacacgtgattgtaagaattgartgtgttcttagtctttgataatgaaaatcttagcattttcacaaagtatgaaattaaaaggtgttatctctttggagcctgacatgagacacaaaagtgtttataagaattgcgcaaactgggacatgctttgacaaaatctgcttaattcttccaaaattggtgtttagatagggacagcaacatgttttttccccacaaagctctattattactctcattatgtgttttatcttagaa

SEQ ID NO: 55331 - DNA, 1008 bp, Homo sapiens
agattgacgggcccaggaatatcactggccagaataagatggtaactcccagtgcacttgcctttgccatctacctagaccaggtgatatggtttggctctgtgtccccacccaaatctcacttcgaattgtaataatccccacatgtcatgggagggatctgtgggaagtcattgaatcatgggtgcagatttttcccaagctgttcttgtgatagtgaataagtctcaggagagctgatggttttataaaagggcagctctcctgcacatgccctcttgcctgccaccatgtaagatgtgtcttgcttcaccttcgccttccaccatgattgtgaggcctccccagccatgtggaactgtgagtccattaaagctctttcctttataaattacccagtctcaggtatgtctttattagcaatgtgaaaatagactaatacaccaagtgaactaaaggcctggatgtacagatgacactggacatatcaccttcctagggggctgccatggaaaccctgggcatcccaggctaccagccaggctataagcttattcacattaacccaaactcctcatcagcttccctgtatcactgcccaccacttccaaaagtcctcattgagccatataaacagattaaactgattaaacatacttccccaagagtccattgggtgtgatttttctgtgacctctctggcaagcaccagcatctgtaattgtgtaggcaccatgccaacacagacacgtgattgtaagaattgagtgtgttcttagtctttgataatgaaaatcttagcattttcacaaagtatgaaattaaaaggtgttatctctttggagcctgacatgagacacaaaagtgtttataagaattgygcaaactgggacatgctttgacaaaatctgcttaattcttccaaaattggtgtttagatagggacagcaacatgttttttccccacaaagctctattattactctcattatgtgttttatcttagaa

SEQ ID NO: 55332 - DNA, 1008 bp, Homo sapiens
agattgacgggcccaggaatatcactggccagaataagatggtaactcccagtgcacttgcctttgccatctacctagaccaggtgatatggtttggctctgtgtccccacccaaatctcacttcgaattgtaataatccccacatgtcatgggagggatctgtgggaagtcattgaatcatgggtgcagatttttcccaagctgttcttgtgatagtgaataagtctcaggagagctgatggttttataaaagggcagctctcctgcacatgccctcttgcctgccaccatgtaagatgtgtcttgcttcaccttcgccttccaccatgattgtgaggcctccccagccatgtggaactgtgagtccattaaagctctttcctttataaattacccagtctcaggtatgtctttattagcaatgtgaaaatagactaatacaccaagtgaactaaaggcctggatgtacagatgacactggacatatcaccttcctagggggctgccatggaaaccctgggcatcccaggctaccagccaggctataagcttattcacattaacccaaactcctcatcagcttccctgtatcactgcccaccacttccaaaagtcctcattgagccatataaacagattaaactgattaaacatacttccccaagagtccattgggtgtgatttttctgtgacctctctggcaagcaccagcatctgtaattgtgtaggcaccatgccaacacagacacgtgattgtaagaattgagtgtgttcttagtctttgataatgaaaatcttagcattttcacaaagtatgaaattaaaaggtgttatctctttggagcctgacatgagacacaaaagtgtttataagaattgcgcaaactgggacatgctttgacaaaatctgcttaattcttccaaaattggtgtttagatagggacarcaacatgttttttccccacaaagctctattattactctcattatgtgttttatcttagaa

SEQ ID NO: 55333 - DNA, 1028 bp, Homo sapiens
attcacctgctaaaggttttacctcttagcactgctgtgggatcccaaccaagtttccaacacatgaattttggaggaatgcactcaatccatagccatatccaaagcattgtcacatctgggccgattactttatatattaaaaacagccttagtacctctgcctgttttcctgtaatttaatagaagcaatgaaggtaataataattaaaataagggttcttatttacttagtctgtaccatattctaggcacaatactagtcttttgtaaactagaaggaggttctattattgctcccacacccaactgttacaggaaaggagtcccaatccagacctcaagagagggttcttggatctcacacaagaaagaattcagagtgagtttgcagtgcaaagtaaaagcaagtttattaagaaagtaaagtgatgaaaatacagctactccatagacagagtagggtgttcctgaaagtaagaggaggaatgcgtccaccctaggtacaatactcgtatgtatggggagatgttctctgctataagggtttgtgataaaggataaattttcttaattactatatttttccagaattaatattattatctttaaagcaaaattaggaatgcctttgtccagatatcaggatatctggacactcccaagtctgggtctgtttagtaaacattatgaatttgttctcttaaccataaatatctagaagctaggaatgcctgactttctgggaatgcagcccagcaggtyccagcctcattttcctagccctcactcaagatggagtcactctggttagaacacctctgccacaaccattgtgtagaagaggaagataaggcccaatgagcctctgtgatttgcacctgagaacagctggaattggaattcaaataccttctggcttatttcaacctcccctgcccaccactcaagcctcccagatttggaggattgtccagaggtccacgtttgcctgtaggatgatggcaccatgtttaaacagttggatg

SEQ ID NO: 55334 - DNA, 847 bp, Homo sapiens
tcctcactttgagatttaattatttgtgagaggcaagccatatatttattcattgatttcttgcaaactacagctcacaatgctgacaataccaactgatagcaacatttttaatcttttataactttttgtagaggttattggcacattatacacaaactgacctgattaatttgttaaactgtgtgggtcacagtctaacaatctaattccaaatttagttctttataataacatttacatgtatataaggcaaaactggttaatgtgaaaaatacatgtacaaagtaaaataaactactgaaaggatttcagcctttggaagaggttcatgattccccctcccctccattttaataagtaaaatcagttatattgtttataaaaggagaattgactacttttagtctgtattgtagtcaaagttcataaactggcttcactttgtatgatattcacatttgaactgtgtatcaatgtagacatagaaaagtcacaaacttgaaagatttaaaaatagcactattaggagagtctagatccacagattatctttagcacctcaatcaatagagataaaaatgttacaaattaggcattctatcatattcttctgctttttactgagtgatgatggattttagtgttagtttgktgttccatctttggtttcttttagtctatgatcattatttttattttataggctgatagaacgttacggctgtaaaaagctctagcatttatctagtcaactctcccattttgccgatgagaaaacaggctcagcaaggttgcatcacccaggtcacagaattaactaatggttgagcctcatcaggaaccc

SEQ ID NO: 55335 - DNA, 801 bp, Homo sapiens
ttggatgaaagagccaacagttaagagaatagaattcaaattaatattgattcaataactaggtatagattaacaagattaaatataagaggaaaagtttaaagttattcacccatggaagaaaagcatacttctaaaacaggagatgaaaaagtaaacttttaccaatcctggcagaaaaatacgagccagtcatgacttgctattataatttttaaaaagtataataaaaatatagaatttatgaactaacagttacatttccagcatggttagaatttgtraaattgcagtttcgtcttttcttctcaatttataatccactccattagtaaaaagctataaccacaaatctctgtgacaaatttttttctatcttgggctttatatgaggctgttatggaacatcacccctaagatcctagagagacttttgcctgacagaatgctctaaagctccatcttagatccttctgagattttagcacaaaattttacagtcacgcctggattcgatgtttgctctgaagttctatcttaatttgagaattttggagaggccgagaataagaaacaattttttaattgaactcagcaaatttcgattcctttatatttaacagttcttctttaactgttgcctctcctttatattttattacctaaaacacaccagggagtagtttcaatactctttgtggaactatccttaggtagaccacattgcattgagtatgtttttgattttccatgtggaccacaggtgacagtgctgctaaactttttgctactcagtagcaa

SEQ ID NO: 55336 - DNA, 1164 bp, Homo sapiens
tcaaacctgaaggcttgcctggcgtaggggtctccacatctacccattggcatctccatccccatccctggccctatccccaagctcagtgacacatcaccagagaaaaacgcggccagagaggttaataagttacccaaggtcacacagttggtcagaagcaagactcgaacctagcactgcctaatgccaacattcgaggtctgcccctccatgccatactcctagagggcattgggttcctggtccccgtgctctgtctgacttctgactctgttacttgcttgacctttgaatatcactttgccggctcctctgcccgcctgacttggacccttgctgatttcacccagcttgttagtctcagctcagacttccccaccagctactgatccctggccagaccccagccttgtatcttccctaggaccttctggggctccctcagaccccatttcctcaggccacccacatctctgatgacagacgggcaggcgggaggatgctcagaagacggtgttaaggaggagatactttaggttggaatcagctagcatagcctctggcacatggcacagtggagagtggagagcccaccgcagagagggcagctgggagcagcttcatggctcacagagggtggagctgcatggaatgtgccgggaaagtcaacgaggaaaatttggccaagttacagtgagtgcctagctgaaaccggacaccaagaatttgtagcaggtcaggcctgctgcctgggaaatagttggcctactttgcttttcagttttcattgtttatttctaaaataaatgtttattttacctttgtatttaaggtttttaggaacatgggaaagaatgattttgttctggttttaracacttacttttggccttagagagacacgagccaacttgctaattacagcctaaaagtcagtgtttgatggtggagtctttctttgataggtgcagctgcctggtggcacatctccaggctttgcgttctccaccccggcccagtgatccaaaatttcagcccaactcataaaaaccctagccctcccctacccacttccccattgtttcccaacacgcctgatcttctctccttaccctgaatccagggctcttgactgatgctgaagagaatggcacactcaca

SEQ ID NO: 55337 - DNA, 851 bp, Homo sapiens
tgactgggaggtaaacgatgtgtacacatggacataaaggtgaagataacagacactgtggactccaaaagggaggaggatgagaggagggtgagggtkgaacaattacctgttgggtacaaagttcaatattttgggtgatgggttcaccaggatcccaagcccaccatgacacgatatacccacgtaacaaacaggcacacggacccttgaatctaaaataaatataatattaaaaaaagaaagagttgcttggggagtggaaaagtgaaaagagtaggaagggagaagtgttggttggactacctctgttgattgacttggagatagaggagcaagtgtgtggaattataaagaaaaggattctgcagctagactgcctgagggcaaatcctgttttttgtcacctaattgttgtgtgaccttggacaggctgcttaatgtccctacaggctccagtttacttgcctgtgaaatggggttaatacaatagtacctaatgcatatgggttttgttaggatttaattagtcactataggtaatacacttagcgtgtgccctggtcacaccacacggcatagaaatgttagctgttactccacgtgggaccaatcggcacagtggcgttttcctctcaccaagtttagttgctgagatgacagcacccaaaagagccccacaggtggattgaactggtattaaggctttgccatgcaaatatgtgtgaaataagagtgagatgcttgcagcttagattttggatgtagcatcgttattggggatgataagaacagtggcctgatcacagaggcacgggtggtggagactgagaggaagacctggtgattgg

SEQ ID NO: 55338 - DNA, 851 bp, Homo sapiens
tgactgggaggtaaacgatgtgtacacatggacataaaggtgaagataacagacactgtggactccaaaagggaggaggatgagaggagggtgagggtggaacaattacctgttgggtacaawgttcaatattttgggtgatgggttcaccaggatcccaagcccaccatgacacgatatacccacgtaacaaacaggcacacggacccttgaatctaaaataaatataatattaaaaaaagaaagagttgcttggggagtggaaaagtgaaaagagtaggaagggagaagtgttggttggactacctctgttgattgacttggagatagaggagcaagtgtgtggaattataaagaaaaggattctgcagctagactgcctgagggcaaatcctgttttttgtcacctaattgttgtgtgaccttggacaggctgcttaatgtccctacaggctccagtttacttgcctgtgaaatggggttaatacaatagtacctaatgcatatgggttttgttaggatttaattagtcactataggtaatacacttagcgtgtgccctggtcacaccacacggcatagaaatgttagctgttactccacgtgggaccaatcggcacagtggcgttttcctctcaccaagtttagttgctgagatgacagcacccaaaagagccccacaggtggattgaactggtattaaggctttgccatgcaaatatgtgtgaaataagagtgagatgcttgcagcttagattttggatgtagcatcgttattggggatgataagaacagtggcctgatcacagaggcacgggtggtggagactgagaggaagacctggtgattgg

SEQ ID NO: 55339 - DNA, 1301 bp, Homo sapiens
aattatgacaggctgacccagctggtttcatgtttggggtttatctactgagtaaggctgaccttacctgagtttctgtatgtgtatttgcaagacagttaatactaatccatcatccctcacagagatgtagaggatgagatgtagtaacttatagcagtgtcatttggaaaagttgaatttgccctacaaggcatgttctccattcaagggtcttgtgtaaacgtttgcagacacaggtgcagctttggagaactcacctctggctcttgtgcttttatgttgggacagctgcctaaattaggagctctagacctgttattggttcccaactgttggccagaatgaattcttcgaaaaatataggtggtttccagggaatttgaatgattgtattttgtgtccatggaacgtttatagacatggaggcaggcaataaattcctccaataatttttttatctcttttgttcttttatgggtgtttctttctaggttatatttgggaaagtatggattacagagactcattgagtgctagagattattggaatttggggttatttcttttaataccttcaagggcagagtggtatggtaacttactgaaggttgcacagttggttttttaaaatttctaagcatttaatagtttttagaaaagtatgcactctataaattaaaataatttttctgtgtgtgggtttttttttttttttttttttttgagacacagtcttgctctgtcacccaggcaggagggcaatggcacaacctctgctcattgcaacctccactgccaaggttcaagaattcttctgcctcagcctcctgagtagctgggattacaggcaccygccaccaggcctggctaatttttgtgtttttagtagagatggggtttccccatgttggtcaggctggtcttgaactcctgacctcaggtgatctgcccgccttggcctctcaaagtgttggggtttacaggcatgagccaccgcacctggcaaaataatttttctatagatatcattgtttaaattaatttaattctcagcctattataacaacacaagcatgagcctaggatatcattaacatctgatgttgtggtagaaattgtctgtgttccgtgactgtggtccagaagcattacctcctaaggcaatttaacaaagaaaaagagtctaattcctttgaatggggaactctgcttaagcccgagctgggactcgcaggtctggctaacaccgagacttaaccagccatgactatatgaattccgccagagaagaagcagct

SEQ ID NO: 55340 - DNA, 640 bp, Homo sapiens
cagactattggaaccaacttaattcctcactcaggggccagtgcccacctgactgaagtctcttgtccacttacctctttccaattacactgttatgttttatttccttgctgtgtcctgctgtcatattggagaaagtcagtactggacaaacaaacagcatcaccagtttttttttgtttttttgttttttgtttttttttttttttagaatgatagcaatggataaaagtggtctgcactaggaattagaagaccagagttttattttcaattctaactgacttggtaacaatgggtggggcacactgtctttgggtgtctgagtccttatctgcagaatgaggtccctagactggataattttggaaacacttctcagttctaaggtttgatgagctctgtagttgatttatgtgagtggggtgtgtgtrtaattttggggtaagctttaaaggatggctttaaaaatgatgggaattgtgtagttacgccctctcccccttgccaggagaaaaagacttgctttgactatagctatcacttgttgggattaacttgctgctttctgggaacttgcatctgtatggaaatttcaagatagaacttgtctgaaactgcttattttcttctattgaaa

SEQ ID NO: 55341 - DNA, 750 bp, Homo sapiens
ccccagctactcaggagattgaggtgggaggagttggagactgcagtgagctgtgattattatcccactgcactctacctggaccacagagcaagaacctgtcaaaaaaaaaaaaaaaaaccacacatacacagacacacacacacacacacacacaaaccaactacactagaacagtataggttttatatggcttgaatttcacagttttcttaactgcatcatcagtatcagaaatctgttcttggccaggtgcagtggctcacatctgtaatcctagcacttagggaggcaaaggtggaggatcacttgagcctaggaatttaagactagcctggacaacacagtgagacacctccccccaacccctgccttctctacaaaaaaaattttttttaattagctgtgtgtgatgccagcacctacagtcccagctactaaggaggctgaggtggatcacttgagcccaggagatggaggctgcggtcagctgtgatcccaccactgcactccagcatgggcaacagagcaagactctgtctcaaaaaaaaaaaaaaaatawatatatatatatatatatatatatgtatatttttacatatatatattttacatatatatttttacatatattatatatatataatctttaaatttaaattttaaaaaatctgttccttcagctggcttctttgctccaaattcaaagaaataccttctcttcctggtttcatttcaccttctggatcc

SEQ ID NO: 55342 - DNA, 750 bp, Homo sapiens
ccccagctactcaggagattgaggtgggaggagttggagactgcagtgagctgtgattattatcccactgcactctacctggaccacagagcaagaacctgtcaaaaaaaaaaaaaaaaaccacacatacacagacacacacacacacacacacacaaaccaactacactagaacagtataggttttatatggcttgaatttcacagttttcttaactgcatcatcagtatcagaaatctgttcttggccaggtgcagtggctcacatctgtaatcctagcacttagggaggcaaaggtggaggatcacttgagcctaggaatttaagactagcctggacaacacagtgagacacctccccccaacccctgccttctctacaaaaaaaattttttttaattagctgtgtgtgatgccagcacctacagtcccagctactaaggaggctgaggtggatcacttgagcccaggagatggaggctgcggtcagctgtgatcccaccactgcactccagcatgggcaacagagcaagactctgtctcaaaaaaaaaaaaaaaatatawatatatatatatatatatatatgtatatttttacatatatatattttacatatatatttttacatatattatatatatataatctttaaatttaaattttaaaaaatctgttccttcagctggcttctttgctccaaattcaaagaaataccttctcttcctggtttcatttcaccttctggatcc

SEQ ID NO: 55343 - DNA, 574 bp, Homo sapiens
gggaaggaggccaggttcccaggctaacttaatcaacaagtctattccacccataagtgtctcttggatttacttgtaatctcccacgccttgcttgttctaggtgagctgatataatcacattctagatctgaagagctgaggaccagactctagraggtcctgagacacacttgggaaggccctgactggccagtcagctggagccactgctgcaaagtgggcttgggatggtggcccgggtcggggaagacactctgcagaggtccaagtggggcaggctggatatcgcaggtccccgcagggacctgagctgtgcagaggactttacctgtcagtagaaacttcctgcagggccgcttgttctgctcatccagcaagatggcagctgcatctgcgagagaagagagggacgggattcggatggttcaggctccaccaaaggaggcaggaagtggaagccacaggggcacatggaccctttatctcgacacagctgtgcagaaagaagagtttcctgttccacggaggagtggaagcaggagatgaccacaggtgggagtcctgggcagat

SEQ ID NO: 55344 - DNA, 916 bp, Homo sapiens
tttatgcttttctcttgttaacctcttttgttatagcagtgttggccgtaatccttatggtagatgaggaaaggtatcacactttccatccctacaggccccacagttcagtgcgtagagcttccattaattctcttattttcaggtggcctcttatgagrtctgatgtgtctgagatctgagcgtatgtggctcaatttctctcaagaaaaaactgcccatctcctgcagtggtggtaggtgggaaggattgtttcctagtagggcaggagatctaggggtgcaaagtctcctgtgacagacttgaccattcctctgctgttagccccatgcctcattcctgctttccatggtccctagtgccttcaagagccaaggccaggctttgttgcgaaaactggctcactttgtcacatcacttctgcccccaacatgtaggttagaatgttctttactctgtccctatgcactttcttttttattaaattttgaaatatttcaggcatacagaaatgtataaaaattgtaagattttactttgataccttgtactcgctgaccaattaaaaaaataaaaaataacaaatacagacataggggcctgtggttatgttccccaattacgtaaactttgtatcttggacaaatgtgttgaaattattaatagtttgttaaccttgtgagttcatgccatttttgttcctttagtgacatgttgcatttgaggaaagggagaagatgaacatatgtctacaatattgtcttggttgcattgagtgactttattacaatttacttaatcgtttcctttttattagacacagatttttttcttttttaatatacatagtgctgtggtagaacaccgttgttcacacagatttttttttttcatcttctgggttatttatttaga

SEQ ID NO: 55345 - DNA, 916 bp, Homo sapiens
tttatgcttttctcttgttaacctcttttgttatagcagtgttggccgtaatccttatggtagatgaggaaaggtatcacactttccatccctacaggccccacagttcagtgcgtagagcttccattaattctcttattttcaggtggcctcttatgagatctgatgtgtctgagwtctgagcgtatgtggctcaatttctctcaagaaaaaactgcccatctcctgcagtggtggtaggtgggaaggattgtttcctagtagggcaggagatctaggggtgcaaagtctcctgtgacagacttgaccattcctctgctgttagccccatgcctcattcctgctttccatggtccctagtgccttcaagagccaaggccaggctttgttgcgaaaactggctcactttgtcacatcacttctgcccccaacatgtaggttagaatgttctttactctgtccctatgcactttcttttttattaaattttgaaatatttcaggcatacagaaatgtataaaaattgtaagattttactttgataccttgtactcgctgaccaattaaaaaaataaaaaataacaaatacagacataggggcctgtggttatgttccccaattacgtaaactttgtatcttggacaaatgtgttgaaattattaatagtttgttaaccttgtgagttcatgccatttttgttcctttagtgacatgttgcatttgaggaaagggagaagatgaacatatgtctacaatattgtcttggttgcattgagtgactttattacaatttacttaatcgtttcctttttattagacacagatttttttcttttttaatatacatagtgctgtggtagaacaccgttgttcacacagatttttttttttcatcttctgggttatttatttaga

SEQ ID NO: 55346 - DNA, 916 bp, Homo sapiens
tttatgcttttctcttgttaacctcttttgttatagcagtgttggccgtaatccttatggtagatgaggaaaggtatcacactttccatccctacaggccccacagttcagtgcgtagagcttccattaattctcttattttcaggtggcctcttatgagatctgatgtgtctgagatctgagcgtatgtggctcaatttctctcaagaaaaaactgcccatctcctgcagtggtggtaggtgggaaggattgtttcctagtagggcaggagatctaggggtgcaaagtctcctgtgacagacttgaccattcctctgctgttagccccatgcctcattcctgctttccatggtccctagtgccttcaagagccaaggccaggctttgttgcgaaaactggctcactttgtcacatyacttctgcccccaacatgtaggttagaatgttctttactctgtccctatgcactttcttttttattaaattttgaaatatttcaggcatacagaaatgtataaaaattgtaagattttactttgataccttgtactcgctgaccaattaaaaaaataaaaaataacaaatacagacataggggcctgtggttatgttccccaattacgtaaactttgtatcttggacaaatgtgttgaaattattaatagtttgttaaccttgtgagttcatgccatttttgttcctttagtgacatgttgcatttgaggaaagggagaagatgaacatatgtctacaatattgtcttggttgcattgagtgactttattacaatttacttaatcgtttcctttttattagacacagatttttttcttttttaatatacatagtgctgtggtagaacaccgttgttcacacagatttttttttttcatcttctgggttatttatttaga

SEQ ID NO: 55347 - DNA, 916 bp, Homo sapiens
tttatgcttttctcttgttaacctcttttgttatagcagtgttggccgtaatccttatggtagatgaggaaaggtatcacactttccatccctacaggccccacagttcagtgcgtagagcttccattaattctcttattttcaggtggcctcttatgagatctgatgtgtctgagatctgagcgtatgtggctcaatttctctcaagaaaaaactgcccatctcctgcagtggtggtaggtgggaaggattgtttcctagtagggcaggagatctaggggtgcaaagtctcctgtgacagacttgaccattcctctgctgttagccccatgcctcattcctgctttccatggtccctagtgccttcaagagccaaggccaggctttgttgcgaaaactggctcactttgtcacatcacttctgcccccaacatgtaggttagaatgttctttactctgtccctatgcactttcttttttattaaattttgaaatatttcaggcatacagaaatgtataaaaattgtaagattttactttgataccttgtactcgctgaccaattaaaaaaataaaaaataacaaatacagacataggggcctgtggttatgttccccaattacgtaaactttgtatcttggacaaatgtgttgaaattattaatagtttgttaaccttgtgagttcatgccatttttgttcctttagtgacatgttgcatttgaggaaagggagaagatgaacatakgtctacaatattgtcttggttgcattgagtgactttattacaatttacttaatcgtttcctttttattagacacagatttttttcttttttaatatacatagtgctgtggtagaacaccgttgttcacacagatttttttttttcatcttctgggttatttatttaga

SEQ ID NO: 55348 - DNA, 1009 bp, Homo sapiens
aatggcatactaacaccatttgctaactttctcataatgggaaaatgttgataacatttaatatgggtccatccttatcttaccacttctccttgcaagccaactgtgtcagttgccagctctactaaactcagagcaaaatgggcattctgagctgccagagagggtggcaagctacagaatggtaaatgtctgttagtacaatggcttcttatgctgttaaaactgcagcataaggttgggcagatgagcatgtggcttacagtgtcccaagtgagaccatatctgttacaccagttgctcttcatcacaattaaggatggagaagggccaagtttsgtggctcatacctgtaatcccagcactttgggaggccgaggtgggaggatcacctgaggtcgggagttcaagaccaaccatgatcaacatggagaaccccgtctctactaaaaatacaaaaaaaaaaaaaaaagaaaaattagccgggcatggtggcacattcctgtaatccagctacttgggaggctgaggcaggagaatcgcttgaacctgggaggcggaggttgcagtgagctgagactgcaccattgcactccagcctgggtgacacagcgagactcagactcaaaaaaaaaaaaagttaaggatggagaaaattgaaatatggaaaatgtgagcagtttacatgaattcacaaaatgtttaagaggaggaggtgagtcttgtccatgctttctataaaagggaaatacaatagctgttaattccttgctcattattttagagacattgccaaagaaagataagtagctgcatatatatttactgagttgttttcttcaaaaaagaatgtataattcaaaagaccgatgccagtataatataaaagtgactgttaatgtaaaaaaaaaaaaatccacaatattttcttgagcgattggcataacatatcacttccatgcaagtgaagtgaagattgagagggaacttatcagtgtcatatccctgg

SEQ ID NO: 55349 - DNA, 1009 bp, Homo sapiens
aatggcatactaacaccatttgctaactttctcataatgggaaaatgttgataacatttaatatgggtccatccttatcttaccacttctccttgcaagccaactgtgtcagttgccagctctactaaactcagagcaaaatgggcattctgagctgccagagagggtggcaagctacagaatggtaaatgtctgttagtacaatggcttcttatgctgttaaaactgcagcataaggttgggcagatgagcatgtggcttacagtgtcccaagtgagaccatatctgttacaccagttgctcttcatcacaattaaggatggagaagggccaagtttcgtggctcatacctgtaatcccagcactttgggaggccgaggtgggaggatcacctgaggtcgggagttcaagaccaaccatgatcaacatggagaaccccgtctctactaaaaatacaaaaaaaaaaaaaaaaraaaaattagccgggcatggtggcacattcctgtaatccagctacttgggaggctgaggcaggagaatcgcttgaacctgggaggcggaggttgcagtgagctgagactgcaccattgcactccagcctgggtgacacagcgagactcagactcaaaaaaaaaaaaagttaaggatggagaaaattgaaatatggaaaatgtgagcagtttacatgaattcacaaaatgtttaagaggaggaggtgagtcttgtccatgctttctataaaagggaaatacaatagctgttaattccttgctcattattttagagacattgccaaagaaagataagtagctgcatatatatttactgagttgttttcttcaaaaaagaatgtataattcaaaagaccgatgccagtataatataaaagtgactgttaatgtaaaaaaaaaaaaatccacaatattttcttgagcgattggcataacatatcacttccatgcaagtgaagtgaagattgagagggaacttatcagtgtcatatccctgg

SEQ ID NO: 55350 - DNA, 1009 bp, Homo sapiens
aatggcatactaacaccatttgctaactttctcataatgggaaaatgttgataacatttaatatgggtccatccttatcttaccacttctccttgcaagccaactgtgtcagttgccagctctactaaactcagagcaaaatgggcattctgagctgccagagagggtggcaagctacagaatggtaaatgtctgttagtacaatggcttcttatgctgttaaaactgcagcataaggttgggcagatgagcatgtggcttacagtgtcccaagtgagaccatatctgttacaccagttgctcttcatcacaattaaggatggagaagggccaagtttcgtggctcatacctgtaatcccagcactttgggaggccgaggtgggaggatcacctgaggtcgggagttcaagaccaaccatgatcaacatggagaaccccgtctctactaaaaatacaaaaaaaaaaaaaaaagaaaaattagccgggcatggtggcacattcctgtaatccagctacttgggaggctgaggcaggagaatcgcttgaacctgggaggcggaggttgcagtgagctgagactgcaccattgcactccagcctgggtgacacagcgagactcagactcaaaaaaaaaaaaagttaaggatggagaaaattgaaatatggaaaatgtgagcagtttacatgaattcacaaaatgtttaagaggaggaggtgagtcttgtccatgytttctataaaagggaaatacaatagctgttaattccttgctcattattttagagacattgccaaagaaagataagtagctgcatatatatttactgagttgttttcttcaaaaaagaatgtataattcaaaagaccgatgccagtataatataaaagtgactgttaatgtaaaaaaaaaaaaatccacaatattttcttgagcgattggcataacatatcacttccatgcaagtgaagtgaagattgagagggaacttatcagtgtcatatccctgg

SEQ ID NO: 55351 - DNA, 1009 bp, Homo sapiens
aatggcatactaacaccatttgctaactttctcataatgggaaaatgttgataacatttaatatgggtccatccttatcttaccacttctccttgcaagccaactgtgtcagttgccagctctactaaactcagagcaaaatgggcattctgagctgccagagagggtggcaagctacagaatggtaaatgtctgttagtacaatggcttcttatgctgttaaaactgcagcataaggttgggcagatgagcatgtggcttacagtgtcccaagtgagaccatatctgttacaccagttgctcttcatcacaattaaggatggagaagggccaagtttcgtggctcatacctgtaatcccagcactttgggaggccgaggtgggaggatcacctgaggtcgggagttcaagaccaaccatgatcaacatggagaaccccgtctctactaaaaatacaaaaaaaaaaaaaaaagaaaaattagccgggcatggtggcacattcctgtaatccagctacttgggaggctgaggcaggagaatcgcttgaacctgggaggcggaggttgcagtgagctgagactgcaccattgcactccagcctgggtgacacagcgagactcagactcaaaaaaaaaaaaagttaaggatggagaaaattgaaatatggaaaatgtgagcagtttacatgaattcacaaaatgtttaagaggaggaggtgagtcttgtccatgctttctataaaagggaaatacaatrgctgttaattccttgctcattattttagagacattgccaaagaaagataagtagctgcatatatatttactgagttgttttcttcaaaaaagaatgtataattcaaaagaccgatgccagtataatataaaagtgactgttaatgtaaaaaaaaaaaaatccacaatattttcttgagcgattggcataacatatcacttccatgcaagtgaagtgaagattgagagggaacttatcagtgtcatatccctgg

SEQ ID NO: 55352 - DNA, 1330 bp, Homo sapiens
tgttaagtttccataaaaccaccaactctgacaccaaagaacaatttgttccttttgttggttttcacagtccctgaaacttgaaggtgatgacaggaagaaaggctcatcaataaagaaatgagaaagttaccttagaataattagaaggttggttctcctgtagaatattttttatctaataaagaaaatagtttcaatttcactgtgaaaattaaaacaattttaagtcttttgaaatgaactaataatatcattcagccataatatttatttttcattactgtatgtcctaaagtttaggactaccatgcttaattttgcattttaaattaacagaacaggataaatatacatatagtaacytttttttcttatttggacatattaaaattcatagcttttaatctaggaaaaataaaagatgttaatacttgatatgggctttgtgacaaattacaaattccccaaattattctgtaaatagtgagatgtggagcaactaaaatcctcacttgaaactttaatgatgtcagcagtaagtcttatttaacatttcagatgaggttaatatattttaatccatttttatataaaatataatttgcaattagtctgtagaataaaaaacatttaaagtctagaaatttaataataaaaataacaaaacatgagaataataggacatatttacatagtattcaataagaaaagcaactggtgtttgaattataaattttaatcagaaatgactataaatgtgttgaataacttgttaaatcttgtagccagcctgaatgagaaactctgatcaaaagaagaacccagtttccattcctggttttaccactaattagatgtgtggtcttgggtaaaaatagagaactttagaatgagatgaggactcaaaggcctcagtgaagacattttctccaatagagaggaccgtaacagctgatcttacagcctctgctttcacacttatgttgacaaaaactcactccttcatgaagcagacagtgttttctataaattacctgtgattacttcagtttaaatacagtcatataaatgtgcctgtctcctatggataattagttaactggaagaatcctaatcaagaccatacaccctgggccaggcacagtggtttactcctataattccagcattttgtggggatgaggcgggaagatagcttgaagccaggaggtccagatccccatctctacaaagttttctaaaaaaaaaaaaaaaaaaaaaaaaaaaaaatagctaggcgtgatggcatatagctgtagccctaactactctggaggctgaggcagga

SEQ ID NO: 55353 - DNA, 1330 bp, Homo sapiens
tgttaagtttccataaaaccaccaactctgacaccaaagaacaatttgttccttttgttggttttcacagtccctgaaacttgaaggtgatgacaggaagaaaggctcatcaataaagaaatgagaaagttaccttagaataattagaaggttggttctcctgtagaatattttttatctaataaagaaaatagtttcaatttcactgtgaaaattaaaacaattttaagtcttttgaaatgaactaataatatcattcagccataatatttatttttcattactgtatgtcctaaagtttaggactaccatgcttaattttgcattttaaattaacagaacaggataaatatacatatagtaacctttttttcttatttggacatattaaaattcatagcttttaatctaggaaaaataaaagatgttaatacttgatatgggctttgtgacaaattacaaattccccaaattattctgtaaatagtgagatgtggagcaactaaaatcctcacttgaaactttaatgatgtcagcagtaagtcttatttaacatttcagatgaggttaatatattttaatccatttttatataaaatataatttgcaattagtctgtagaataaaaaacatttaaagtctagaaatttaataataaaaataacaaaacatgagaataataggacatatttacatagtattcaataagaaaagcaactggtgtttgaattataaattttaatcagaaatgactataaatgtgttgaataacttgttaaatcttgtagccagcctgaatgagaaactctgatcaaaagaagaacccagtttccattcctggttttaccactaattagatgtgtggtcttgggtaaaaatagagaactttagaatgagatgaggactcaaaggcctcagtgaagacattttctccaatagagaggaccgtaacagctgatcttacagcctctgctttcacacttatgttgacaaaaactcactccttcatgaagcagacagtgttttctataaattacctgtgattacttcagtttaaatacagtcatataaatgtgcmtgtctcctatggataattagttaactggaagaatcctaatcaagaccatacaccctgggccaggcacagtggtttactcctataattccagcattttgtggggatgaggcgggaagatagcttgaagccaggaggtccagatccccatctctacaaagttttctaaaaaaaaaaaaaaaaaaaaaaaaaaaaaatagctaggcgtgatggcatatagctgtagccctaactactctggaggctgaggcagga

SEQ ID NO: 55354 - DNA, 1261 bp, Homo sapiens
gcataaaccaacacccctgcatggcctaatctgggactgatgggagaagtgcttgcaaaccaagatcaaggtgtcatttctctgctaatactgtctaacaagctgacccttacaaaaacgcacgtaaaatcaggcaggtttagctactgtgttgcaagagaaaccaggacctttctaaatagttctctccattaccatttattctctcaagggaaacttaaaaaaaaaaaaaagaagaaaaagaaaaaacaacacattagtctggccacctcataaatcgaacaagcattgctgtggcatttcagtggaaaaggaaacttgagggggaaaaaaaccatcaacgttgtaagaaaggcttccaatttaaccgtccctgtccctatttatccactttaactcaccacccaagaccatccattattctagagcaccctgatctataaaaggggtcaaagcatcaggaacaggcaaggagtgagaaccaaaagacatcaagaaaccgatttgcttgagaaaagcagtgattcttcctyttatagcctccatggctgagagagaaaatgcccaagagattatccatgtgacttggagactgcttatttattgcattactttagacaagctgacaaatctttctgaacttgcttgcttcatcctctgtaatttagggacagcaattcctatcttgtaggttgctgtgggacagaggcgaggcagcatacacaagttaatcctgaggctccccatctggactgttgtgttacccagtgtttttgccttcctctcacttggggtcactggaaacatgcaggttccaagcttggccagaagaattgcccaagcgccaagcacagccccttagcagcttgccgcacaatgcctgagctgagagggccatagcccattggcctcctggggtcttgctgtgctcttgtaatccctccttcagcccatgtgtcaaatgctacccaatgctctcatttccaccatgatccaataattatagtggtgggagggaatattgtccagaaaggaccaggagggtgggaagcaaggtcctcaatgactgcattcacctggacctttggcagtcagtggtctactgtcagtgggttccagccatcaggtgtctaccacgaggcatgcccctcttcttgtcttactgccaattcatctcctcctataagtgctccctcagtcaaggctctcatatccatcaaattctgctcttacaatcttgcccactcagctctattaacca

SEQ ID NO: 55355 - DNA, 707 bp, Homo sapiens
aggatgagctatggaaggagtgaacactggagcaggagtatagacttaaatgaagtatgctcttcaaaaacattgcaaactgggtgtccagtttaaataacctagcctaccaaaggatgtatacacccaaccacaatcctgtagacccctgttgcctgcaaggcactgaaagttacagttaaactgaagtcagcagtgaggaggctaagaatgttcctctcaccgcacactccaagaacctggagaactctctggccatttgaggaatcataaaataaacaatttaaaaacaaaaatgggagcactagaagtacaccttattaaagtgataatattgttctgagaaatttwaaaaaagatcatatagatgaaataactttatgccaatttttttaatttagaaggtatttcctagataactttataaagttgacaaagaaaatataaaaattttaaaaaaactgatggacgtagatatacaaaaaggagaggaacaacaaaaatgtaagaaaattctaaatgcaaatacaaattaaaaatcaatattggagactgacagggaagaaaaggcactatagaaaataaaggattgatataaaagataaccctgaggaaactaccaaattccagaggaaaatgacaatgaaatggataagagaataaatgcaagctatatagtacagataaaggagccccaaccttaaagt

SEQ ID NO: 55356 - DNA, 1396 bp, Homo sapiens
tttgggaaaatagtgacttttgaacttcagaagcaacttctattcctcttggctttagaaagatgcctcccaccgaggaagcgagggggttcctgctgtcatggcagccctacctgtctcacttcatcacagaagaggacaaagaccagcgagtacaggaccagctcgggggggtgtggcaccgaatggaaatccatgagcagcacgtaggcaaacagcaggaggaaggcgatgtagaagaccacattccaggagaagaccacgaagggggaggtgaagaacgccacatagtaccaaagcagcttcttgtgcttgtcgacaggtttcttcctggacccagagataagggcatcgtcagcatccttgcaagcatgggacgggcacagccctcccctccttccaaacatagrtaaatacagacccatagccaggaggaagagacgggagcaaaaccgtgtcctaagatggaaccaaccccaattaaatccttggcattttgcaattaacaaatccacattctgccccagatattaaagacacaaccccacccctacccatttaagaggaaacccaggaaaagtcaggggagaaacaagaccaaattcataggcaacaatgtaaacatcataagttccaggctttttaatcatttacatgagagcacacatatgtggatgcatgtacacacactggcacacacactcacacacgattatgtgccttggtttgtacctaaatgatacaaagccacagcccaccaagggtataataaacagacacaggataatcttccagttcttggtgtctcgggaaatctctccataccattgcttagaaagaaaattctacagggaaacaaagacagagaacaaggtccttattaacacaattgtatgcaggatgccatgcaaactttcttccccgccccacactttccccaaaatacacagctctttgaattaatgtcattattcttttataccagttgcctggattctaaggggcagtgttaaaaaaaacaatttaaaacttggttttttgttttttttcttgagacggagtttcacgcttgctgcccaggctggagtgcaatggtgcaatctcagctcaccacaacctccacctcccaggttcaagcgattctcctgcctcagcctcccgagtagctgggattacaggaatgtgccaccattcctgtctaattttttttttttttgtatttttggtagtgacgggatttctccatgttggtcaggctggtcacaaactcccgacctcaggtgatccaccgcctcggcctcccaaagtgctgggattacaggtgtgagccaccatgcctggccaaacttggttttattttaagtctttttctgagttgcattatgtgcactttaaa

SEQ ID NO: 55357 - DNA, 807 bp, Homo sapiens
tttttttcatgcaatgatgcttaaatatgctaagaagtacaaaaatgaattttttagtgttctatttctttctgtctgcctgagggatgtttaactgaactaaagaggaccctgcataatggaaattcactagacaaggcactttaatgtaaagacttttactttgattcttagcagtatctaagtgagccagatgtaaagttttctaggtctagtagcagcagcagcagcaataagttgcctcaacaccttggcacactgaccattacttatcctctgatggatcacagactgtttcactcactggtgcactggcactatctaaaactcttcattcactgaccacgtttctgggcttgtcacttatccctgtatcagctagcttctcaccttagcagggtatgtggggctttatccagcaccaaagtagtttgtgacatgtcatgcacaggttgattgcactttatagaaagccactgggaccaggtgagtgacataagagatgatgtgtgtgctctcaggtaggccatgtttacatggtgccaacttacctggctgcaaggatggaaactgcagtccatcatccaattgcctctagctacagatatgtcagcatccacattggtggagcatttagctattctggcattgtgtgaacaacatttccaaatgattgatttttttaaacttttccgtgggctgttcttgcagcctgcaaactcagtcacagtacagaatattcagatarcaagaccttctcacaagcatccacgttctcaggtgaattgaaagaacttttgccaattt

SEQ ID NO: 55358 - DNA, 807 bp, Homo sapiens
tttttttcatgcaatgatgcttaaatatgctaagaagtacaaaaatgaattttttagtgttctatttctttctgtctgcctgagggatgtttaactgaactaaagaggaccctgcataatggaaattcactagacaaggcactttaatgtaaagacttttactttgattcttagcagtatctaagtgagccagatgtaaagttttctaggtctagtagcagcagcagcagcaataagttgcctcaacaccttggcacactgaccattacttatcctctgatggatcacagactgtttcactcactggtgcactggcactatctaaaactcttcattcactgaccacgtttctgggcttgtcacttatccctgtatcagctagcttctcaccttagcagggtatgtggggctttatccagcaccaaagtagtttgtgacatgtcatgcacaggttgattgcactttatagaaagccactgggaccaggtgagtgacataagagatgatgtgtgtgctctcaggtaggccatgtttacatggtgccaacttacctggctgcaaggatggaaactgcagtccatcatccaattgcctctagctacagatatgtcagcatccacattggtggagcatttagctattctggcattgtgtgaacaacatttccaaatgattgatttttttaaacttttccgtgggctgttcttgcagcctgcaaactcagtcacagtacagaatattcagatagcaagaccttctcacaagcatccacgttctcaggtgaattgaaagaacttttgccarttt

SEQ ID NO: 55359 - DNA, 565 bp, Homo sapiens
tgaaataaaatatctttgaagataatttatggaacacctaatgcaattgttacacgagaaagatatctttaatttaaatctatctcaatatctgacaaatataccttcagctgaaattggcaaataaaattttattttcaataagtgtacatagatttaaacagaaactattgtgattttccttttagtcaatatttcttcaamatatcaaaggaaagaaaagctcattctaaatccccagtatttttatccttggtgatgactaattgtactttccactgaagttttaatctgttaataatttatgtagctgacacaaacacttatatttgcttgtttttccagtaccctcattatcagcttcaaaatgtagaaatgaatttaattttgttaaatggttatttcccactaagttgggggggagagataaattagttttgttaaattattccattttttaaaaaaattattaaaataaattaagggaatcagttattgaattccgttttctcagttttccccaaacaaaataacatgtgcttgtatgaaaattgtttgccctgag

SEQ ID NO: 55360 - DNA, 947 bp, Homo sapiens
atttgggttgaaaggaaactgactgagactcagtgtgcccaaagctgtcatttgggctgaaaggagagagagcttgtccccaggaggcgggacgtggggttctgctgtgacttctgctgctggccgctctgtggcctgggagaagtcacttctgccctctgggctgcggcattcttattggtgaaacgagaggaggcggacgtgatctccaacattctgggacacgattcgtcctttctttagcccttctgcagctagtttcaccagctagcttgaaggttccacaagagcagggaatatttatgtccccaagtttagtatttcaatatccccatctttatgatttttgcctcactgggtacctcttgtattactatttacttaatatgttcctttaaatttactcacttttaagaaatgttgcttctgtcctaaacaataatattcatgaaatcatgggctcactaattcattcatccatttgttcaacaaatattgattgtatgmctatggggtacaggcactgttctatgtgctggggatgcagcaaagaaaaaaggaacaggcaaagtctgtctcttagggagattacgtttgcttggaggagatggagaataaatatatacagaagagagtttcagataacatccgctgctctgaagaaaactcagcagggtaatgtattaggtcaaaatttttgattcctagtaagaaactgattttacactgcagcccaatgtacacacaagcatacaaaaaagaaaaatgaaaatgtgaagaaacactacttacctttattacacatgatgtgttctgatattttctcttctgttttattgtagaagatgctggttatgggccacattagataggttgtacagtctaggaatggattgcagcctgcagtttgaaaaacactggaacagctagggagtggtggtgacatg

SEQ ID NO: 55361 - DNA, 670 bp, Homo sapiens
ggatcctacactttttttaatgctctgctgtttctgccttgaaattcttaacaatttttttaaccgaagtcctcacaaattcagtttacattagccctgcaatcatgtagacatcctgattccagacaatgtgtctggaggcagggtttacaggacttcaagaaccttaccttctcaactttcatctgcatctttactcccaactatatatgaagatgatgaagatagatatggatggtgcttctaccataccctcttcctctgccaaacttccttgatctaggataaggtcagtaaacttcytccgtaaaaggccaaaagtaaatattataggctctacaggccctagagtgtctgtcataactactcaactcttattgtagcataaaaactgtcaacagacaatacagaaacaaatgagtgtgactgggttccagtgaaactttatttacaaaagatttgtcccatgagtcaaatttaccacctccagatctagagaaacacttttgagcccttttattttgctcaacagttaagcatggctccatgtcccttatatttagtcagaactcggtatgttttaaggaaagaatggttacacgaagacatacattcattcatttatacaacacattttcagtgttgaatgataaattttggaatagttaac

SEQ ID NO: 55362 - DNA, 777 bp, Homo sapiens
cattcttttccaatttcttaagatgctaataagttcatstatttgagcaattgagaacatttaaagcaatagactgcctctgagcacagctttgtccatattacattaaccttttataccctgggttcccactagtttttaaataatctactatcaaataaaagatttgttaataataaattttaaatcattaacacttaacgcattattttcagtcacactaagttgattccttcgtttctttcaggttgcttcacagtcttcccttctatctgattcagtggaccaagtaaatgactctctggtaacagaatttgtattacttggacttgcacaatccttggaaatgcagtttttcctttttctcttcttctctttattctatgtgggaattatcctgggaaacctcttcattgtgttcacagtgatctttgatcctcacttacactcccccatgtatattctgctggccaacctatcgctcattgacttgagcctttcatctaccacagttcctaggttgatctacgatctttttactgattgtaaagttatttccttccataattgtatgatacaaaagttctttatccatgttacaggaggagttgaaatggtgctgctgatagtcatggcatatgataggtacactgcgatctgcaaacctctccactatccaactattatgaaccccaaaatgtgcatgtttttggtagcagcagcttgggtcattggggtgattcatgctatgtctcagtttgtttttgtcataaattt

SEQ ID NO: 55363 - DNA, 777 bp, Homo sapiens
cattcttttccaatttcttaagatgctaataagttcatctatttgagcaattgagaacatttaaagcaatagactgcctctgagcacagctttgtccatattacattawccttttataccctgggttcccactagtttttaaataatctactatcaaataaaagatttgttaataataaattttaaatcattaacacttaacgcattattttcagtcacactaagttgattccttcgtttctttcaggttgcttcacagtcttcccttctatctgattcagtggaccaagtaaatgactctctggtaacagaatttgtattacttggacttgcacaatccttggaaatgcagtttttcctttttctcttcttctctttattctatgtgggaattatcctgggaaacctcttcattgtgttcacagtgatctttgatcctcacttacactcccccatgtatattctgctggccaacctatcgctcattgacttgagcctttcatctaccacagttcctaggttgatctacgatctttttactgattgtaaagttatttccttccataattgtatgatacaaaagttctttatccatgttacaggaggagttgaaatggtgctgctgatagtcatggcatatgataggtacactgcgatctgcaaacctctccactatccaactattatgaaccccaaaatgtgcatgtttttggtagcagcagcttgggtcattggggtgattcatgctatgtctcagtttgtttttgtcataaattt

SEQ ID NO: 55364 - DNA, 777 bp, Homo sapiens
cattcttttccaatttcttaagatgctaataagttcatctatttgagcaattgagaacatttaaagcaatagactgcctctgagcacagctttgtccatattacattaaccttttataccctgggttcccactagtttttaaataatctactatcaaataaaagatttgttaataataaattttaaatcattaacacttaacgcattattttcagtcacactaagttgattccttcgtttctttcaggttgcttcasagtcttcccttctatctgattcagtggaccaagtaaatgactctctggtaacagaatttgtattacttggacttgcacaatccttggaaatgcagtttttcctttttctcttcttctctttattctatgtgggaattatcctgggaaacctcttcattgtgttcacagtgatctttgatcctcacttacactcccccatgtatattctgctggccaacctatcgctcattgacttgagcctttcatctaccacagttcctaggttgatctacgatctttttactgattgtaaagttatttccttccataattgtatgatacaaaagttctttatccatgttacaggaggagttgaaatggtgctgctgatagtcatggcatatgataggtacactgcgatctgcaaacctctccactatccaactattatgaaccccaaaatgtgcatgtttttggtagcagcagcttgggtcattggggtgattcatgctatgtctcagtttgtttttgtcataaattt

SEQ ID NO: 55365 - DNA, 777 bp, Homo sapiens
cattcttttccaatttcttaagatgctaataagttcatctatttgagcaattgagaacatttaaagcaatagactgcctctgagcacagctttgtccatattacattaaccttttataccctgggttcccactagtttttaaataatctactatcaaataaaagatttgttaataataaattttaaatcattaacacttaacgcattattttcagtcacactaagttgattccttcgtttctttcaggttgcttcacagtcttcccttctatctgattcagtggaccaagtaaatgactctctggtaacagaatttgtattacttggacttgcacaatccttggaaatgcagtttttcctttttctcttcttctctttattctatgtgggaattatcctgggaaacctcttcattgtgttcacagtgatctttgatcctcacttacactcccccatgtatattctgctggccaacctatcgctcattgacttgagcctttcatctaccacagttcctaggttgatctacgatctttttactgattgtaaagttatttccttccataattgtatgatacaaaagttctttatccatgttacrggaggagttgaaatggtgctgctgatagtcatggcatatgataggtacactgcgatctgcaaacctctccactatccaactattatgaaccccaaaatgtgcatgtttttggtagcagcagcttgggtcattggggtgattcatgctatgtctcagtttgtttttgtcataaattt

SEQ ID NO: 55366 - DNA, 904 bp, Homo sapiens
ccattcataaagggcttttaattaaccaagtggtttactaaaaaggacaattcactacatattattctcttacagttttatgctactatgcttcaagggactacagcaattttcacagaattatatataattctaatggttgaattccatgaataatctatggcatgaaagattttacctgtcaacagtggctggctcttcatggttgctacaatgagtgtgtaagattctgaagaactcctttaataagcctaaacttaatgttcaacttagaataaatacaattcttctaaatttttttgaataatttttgaaaagtcagaaatgagctttgaaagaattatggtggtgaaggatcccctcagcagcacaaattcaggagagagatgtcttaactacgttagcaagaaattccttttgctaaagaatagcattcctgaattcttactaacagccatgatagaaagtcttttgctacagatgagaaccctcgggtcaacctcatccttggcatatttcatgtgaagatataacttcaagattgtccttgcctatcaatgaaatgaattaattttatgtcaatgcatayttaaggtctattctaaattgcacactttgattcaaaagaaacagtccaaccaaccagtcaggacagaaattatctcacaataaaaatcctatcatttgtactgtcaatgattagtatgattatatttattaccgtgctaagcagaagagaactgaagtgaatgttcatgatttattccactattagacttctctttattcttaaaaatatttaagatcactaaatttttataggactttaaaaacagtaatgtgctgcttgagtgtgtaggactaagaaatgggattcagagtagtaaagagaaaagtagaattt

SEQ ID NO: 55367 - DNA, 542 bp, Homo sapiens
ctgccttgaaattcttaacaatttttttaaccraagtcctcacaaattcagtttacattagccctgcaatcatgtagacatcctgattccagacaatgtgtctggaggcagggtttacaggacttcaagaaccttaccttctcaactttcatctgcatctttactcccaactatatatgaagatgatgaagatagatatggatggtgcttctaccataccctcttcctctgccaaacttccttgatctaggataaggtcagtaaacttcttccgtaaaaggccaaaagtaaatattataggctctacaggccctagagtgtctgtcataactactcaactcttattgtagcataaaaactgtcaacagacaatacagaaacaaatgagtgtgactgggttccagtgaaactttatttacaaaagatttgtcccatgagtcaaatttaccacctccagatctagagaaacacttttgagcccttttattttgctcaacagttaagcatggctccatgtcccttatatttagtcagaactcggt

SEQ ID NO: 55368 - DNA, 542 bp, Homo sapiens
ctgccttgaaattcttaacaatttttttaaccgaagtcctcacaaattcagtttacattagccctgcaatcatgtagacatcctgattccagacaatgtgtctggaggcagggtttacaggacttcaagaaccttaccttctcaactttcatctgcatctttactcccaactatatatgaagatgatgaagatagatatggatggtgcttctaccataccctcttcctctgccaaacttccttgatctaggataaggtcagtaaacttcttccgtaaaaggccaaaagtaaatattataggctctacaggccctagagtgtctgtcataactactcaactcttattgtagcataaaaactgtcaacagacaatacagaaacaaatgagtgtgactgggttccagtgaaactttatttacaaaagatttgtcccatgagtcaaatttaccacctccagatctagagaaacasttttgagcccttttattttgctcaacagttaagcatggctccatgtcccttatatttagtcagaactcggt

SEQ ID NO: 55369 - DNA, 587 bp, Homo sapiens
agttggtaagttatttagtaaagctcatgaaaattgtgccctccattcccatataatttagtaattgtctaggaacttccacatacattgcctcaatttatctttcaacaacttgtgtgttatattttggaatacagatacaaagttattatgctttcaaaatattcttttgctaattcttagaaygaagaaaggcataaatatattagtatttgtgtacacctgttccttcctgtgtgatcctaagtttagtagaagaaaggagagaaaatatagcctagcttataaatttaaaaaaaaatttatttggtccattttgtgaaaaacataaaaaaagaactgtcacatcttaatttaaaaaatatatgcttagtggtaaggagatatatgtcaacttttaagaggttgaaaaacaaacgcctcccattataagtttatacttcacctcccaccactataacaacccagaatccatgagggcattatcaggagtgagtggaagagtaagtttgccaatgtgaaatgtgccttctaggtcctagacatctgtggtataactgctcataagcagtagaaagaatttagag

SEQ ID NO: 55370 - DNA, 1727 bp, Homo sapiens
attaaaaatgtaaaagctatatcaacaagcaaaatgtcttgagcatccccaaaacctgttgccatgacctttgctttttgtgtgtgttgggacctttgcttttgaccagcctgcttttactttgactaggccatttgcacctcttggtagcattgctttgattgtgctttgtcttcaagatcatactgctaaagccatgtgtcatctcctgttacagttctccaaagaaagtattcagaatcttgatcccattgtttaaaatttccatggaaactcagttctcatctgcagctgatctaggtgcaatggttttggacccattgaggagaaatttgctcaactttaattttttagtcagaagtgatcaaaggaaagcagaagcatctatcaaatagagttcaagacaaagataactaccggtatatagaggaaaatcaggccaggagcggtggctcatgcatgtaatcccagcaacttgggaggccaaggcgggtggatcatttgtggtcaggagttcaagaccagcccggccaacgtgatgaaatcccctctctactaaaaatacaaaaatgagcctggcggtagtggtgcgcgcttgtaatccyagctacttgggaggctgaggcaggaaaatcacttgatcctgagaggtggaggttgcagtgagccgagatcacaccactgcactccagtccggatgacagagtgagaccctgtctcaaaaaaaaagagagagagagagagaggaaaattataaatgataaggagtcaatccaccaaaaagacatggcaaccctaaatgtgtatgcaccaaacaacagagctgtgaaacaaaatctcatagaactaaaaggagaaacagataaatccacaattataattggagacttcaacaattctctctcaacaaataacagaacaactaaaaagaaaatcagcaagaatatagaagaactcagtaacatcactaaccaatggaaactaattgacatttatagaacacactattcaacaatcacgggctgagcacagtggctcacacctgtaatcccagcactttgagacactgaggcaagcagatcacttgaggtcaggagttcgagatcagcctggccaacatggtgaaaccctgtctctactaaaaatacaaaaattagccaggtgtggtggtgcatgcctgtagtcccagctgcttgggaggctgaggcaggagaatcacttgagcccgggaggtggaggttgcagtgagccaagagccaagatcatgccactgcactccagcctgggcaacagagtgagactctgtctcaaaaaaaaaaaagagagagagagagagagactccatcatctcaaaaaaaaaaaatttcaaaatacactcttccaagtgccagtgaaacatatctcaaaacacatcttgccctgagtcataaaacaagcctcagtaaatgtaaaagacatgaaatcatacagagtgtgttctgtgaccacaatggaatcaaaggagaaatcaataacataaagataaaagaaaaatattctaacacttggatgttaacgtatctctaaataatccatgggccaaagacgatgtctcaaaggaataaaaaaaaatacatggtatgaggtaaaaaaaatttaatttaaaaaataacaccaatactaatctctcccagaaaatacaagaggtcttcaaaaagttcatgaaaaatgcgtactatgaaaaaata

SEQ ID NO: 55371 - DNA, 559 bp, Homo sapiens
tcatatggatattgaatcgcaatatcagagacacgtactgagaatctttatatartccatagtcaaaagaaaaatgtaaatcttatgcaaagatatatttaaaaaataatttgagaataacctacctattaataaacctctctttcaatttcagtccaattcataatcagaatcccatagctacatcttagtttgactaagaaatgtgatcagaataagctatcactagtttttttttaaaggaatggccataatgtttatattttaagtactaagaatagttaaggacattaatgtgaataaggattatttaatccagtatgtcttcataatcagaaagcctaaatccttgtttacttgataattaagatatagacaaaacatggagctattttatttttaacaagcagtttatatattttaacagttcaatgtagtaattactttattacaaaagatagagcaacataagatacatgaatattctcttagtctaaaagtgaagcaaactttaaacttggaaacattctaaaggttagcagatttagagaacattgtc

SEQ ID NO: 55372 - DNA, 559 bp, Homo sapiens
tcatatggatattgaatcgcaatatcagagacacgtactgagaatctttatataatccatagtcaaaagaaaaatgtaaatctwatgcaaagatatatttaaaaaataatttgagaataacctacctattaataaacctctctttcaatttcagtccaattcataatcagaatcccatagctacatcttagtttgactaagaaatgtgatcagaataagctatcactagtttttttttaaaggaatggccataatgtttatattttaagtactaagaatagttaaggacattaatgtgaataaggattatttaatccagtatgtcttcataatcagaaagcctaaatccttgtttacttgataattaagatatagacaaaacatggagctattttatttttaacaagcagtttatatattttaacagttcaatgtagtaattactttattacaaaagatagagcaacataagatacatgaatattctcttagtctaaaagtgaagcaaactttaaacttggaaacattctaaaggttagcagatttagagaacattgtc

SEQ ID NO: 55373 - DNA, 559 bp, Homo sapiens
tcatatggatattgaatcgcaatatcagagacacgtactgagaatctttatataatccatagtcaaaagaaaaatgtaaatcttatgcaaagatatatttaaaaaataatttgagaataacctacctattaataaacctctctttcaatttcagtccaattcataatcagaatcccatagctacatcttagtttgactaagaaatgtgatcagaataagctatcactagtttttttttaaaggaatggccataatgtttatattttaagtactaagaatagttaaggacattaatgtgaataaggattatttaatccagtatgtcttcataatcagaaagcctaaatccttgtttacttgataattaagatatagacaaaacatggagctattttatttttaacaagcagtttatrtattttaacagttcaatgtagtaattactttattacaaaagatagagcaacataagatacatgaatattctcttagtctaaaagtgaagcaaactttaaacttggaaacattctaaaggttagcagatttagagaacattgtc

SEQ ID NO: 55374 - DNA, 983 bp, Homo sapiens
tcagtgcagctatatccgttaattttagctttaggagggttataaatatagagaatcatgcatatttcaccatcaaactgatactcaatyactcttttttttgtcatctcaagagcaaatgaactctggtaaatggactgagaagagaaactttggaaagtgagaccaagcaatcagacacagaaaaaatgaccccaatgtttggagatttctaactgatcattctttcttagatgcctcctgtcgtgggaatagaaaagagtgggggataatttttgactttgctttaaaattttcataataggaaaaggctcccattctaattcaagaggtgacaccttaacaacctttctcctcataaaacattccccagctccttgtggctgttgcgtaaccaggagggtcctgccatgaaatagaactggagtttcttccccagtcatagccacacttcccaagggaactggatgtctgtggtcgttatgaattaaaggctcagtcttcattacatcagtgtcagcctgtattaacagatctcaacattttctctaaaggcaggtatttttatttgtcgaggaatcaggactctcttctctgattctgacttacagcctgcaaatccagtgtgcacggcttatttttcttttccttctccactgagattggcttgtgtgactattccattcatcaggcatggagtgagggaaacgcacacttcatttgctttgtggccactgccttattttccctattttggtctgaaaagaaccaataaaccttctatcttcaaattttcagaggagtactttccatctagctggttcttgaatgctttaaaatggaaaaaagaacagaaaacaggttgctgtttgggtgatttgcaagcgctctgaaattactgtttttctgcttcacagactcggtgactgacagtgccttcccccagatagtcagccagtggcattggccacgacggtgctgct

SEQ ID NO: 55375 - DNA, 983 bp, Homo sapiens
tcagtgcagctatatccgttaattttagctttaggagggttataaatatagagaatcatgcatatttcaccatcaaactgatactcaattactcttttttttgtcatctcaagagcaaatgaactctggtaaatggactgagaagagaaactttggaaagtgasaccaagcaatcagacacagaaaaaatgaccccaatgtttggagatttctaactgatcattctttcttagatgcctcctgtcgtgggaatagaaaagagtgggggataatttttgactttgctttaaaattttcataataggaaaaggctcccattctaattcaagaggtgacaccttaacaacctttctcctcataaaacattccccagctccttgtggctgttgcgtaaccaggagggtcctgccatgaaatagaactggagtttcttccccagtcatagccacacttcccaagggaactggatgtctgtggtcgttatgaattaaaggctcagtcttcattacatcagtgtcagcctgtattaacagatctcaacattttctctaaaggcaggtatttttatttgtcgaggaatcaggactctcttctctgattctgacttacagcctgcaaatccagtgtgcacggcttatttttcttttccttctccactgagattggcttgtgtgactattccattcatcaggcatggagtgagggaaacgcacacttcatttgctttgtggccactgccttattttccctattttggtctgaaaagaaccaataaaccttctatcttcaaattttcagaggagtactttccatctagctggttcttgaatgctttaaaatggaaaaaagaacagaaaacaggttgctgtttgggtgatttgcaagcgctctgaaattactgtttttctgcttcacagactcggtgactgacagtgccttcccccagatagtcagccagtggcattggccacgacggtgctgct

SEQ ID NO: 55376 - DNA, 983 bp, Homo sapiens
tcagtgcagctatatccgttaattttagctttaggagggttataaatatagagaatcatgcatatttcaccatcaaactgatactcaattactcttttttttgtcatctcaagagcaaatgaactctggtaaatggactgagaagagaaactttggaaagtgagaccaagcaatcagacacagaaaaaatgaccccaatgtttggagatttctaactgatcattctttcttagatgcctcctgtcgtgggaatagaaaagagtgggggataatttttgactttgctttaaaattttcataataggaaaaggctcccattctaattcaagaggtgacaccttaacaacctttctcctcataaaacattccccagctccttgtggctgttgcgtaaccaggagggtcctgccatgaaatagaactggagtttcttccccagtcatagccacacttcccaagggaactggatgtctgtggtcgttatgaattaaaggctcagtcttcattacatcagtgtcagcctgtattaacagatctcaacattttctctaaaggcaggtatttttatttgtcgaggaatcaggactctcttctctgattctgacttacagcctkcaaatccagtgtgcacggcttatttttcttttccttctccactgagattggcttgtgtgactattccattcatcaggcatggagtgagggaaacgcacacttcatttgctttgtggccactgccttattttccctattttggtctgaaaagaaccaataaaccttctatcttcaaattttcagaggagtactttccatctagctggttcttgaatgctttaaaatggaaaaaagaacagaaaacaggttgctgtttgggtgatttgcaagcgctctgaaattactgtttttctgcttcacagactcggtgactgacagtgccttcccccagatagtcagccagtggcattggccacgacggtgctgct

SEQ ID NO: 55377 - DNA, 983 bp, Homo sapiens
tcagtgcagctatatccgttaattttagctttaggagggttataaatatagagaatcatgcatatttcaccatcaaactgatactcaattactcttttttttgtcatctcaagagcaaatgaactctggtaaatggactgagaagagaaactttggaaagtgagaccaagcaatcagacacagaaaaaatgaccccaatgtttggagatttctaactgatcattctttcttagatgcctcctgtcgtgggaatagaaaagagtgggggataatttttgactttgctttaaaattttcataataggaaaaggctcccattctaattcaagaggtgacaccttaacaacctttctcctcataaaacattccccagctccttgtggctgttgcgtaaccaggagggtcctgccatgaaatagaactggagtttcttccccagtcatagccacacttcccaagggaactggatgtctgtggtcgttatgaattaaaggctcagtcttcattacatcagtgtcagcctgtattaacagatctcaacattttctctaaaggcaggtatttttatttgtcgaggaatcaggactctcttctctgattctgacttacagcctgcaaatccagtgtgcacggctyatttttcttttccttctccactgagattggcttgtgtgactattccattcatcaggcatggagtgagggaaacgcacacttcatttgctttgtggccactgccttattttccctattttggtctgaaaagaaccaataaaccttctatcttcaaattttcagaggagtactttccatctagctggttcttgaatgctttaaaatggaaaaaagaacagaaaacaggttgctgtttgggtgatttgcaagcgctctgaaattactgtttttctgcttcacagactcggtgactgacagtgccttcccccagatagtcagccagtggcattggccacgacggtgctgct

SEQ ID NO: 55378 - DNA, 713 bp, Homo sapiens
tccagagatagatgcacacaaggaaagcaccatgtgaagatgaagcagagattgaggcgatgcttctacaagccaaggaacgccatctattgacagcaaatcagcagaagcgagggcggcagcctaggacagattgtccctcacagccttccaaggsaatcgaccctgtgacacgctaatctgaaacttcctgcctccagcacatttaacccatgcagttaggggcactttgttataggaaccctattaaaccaacacactgcttgacttttgggtttaggtacgtttcagagctgctactttgaagaagagaccacaaagaacagttctattttgctttatttgacaaataatcatgtctcatcagtcatatggaatcccacggaatttgccatttcacttttaacgctgtctgaaatctcattgaatgatatctcaacttggtatttaagaccaaataagcaaaagcaaataaataaaataaataaaaatgatgcttcagttaatcacattggctgccatcatcactgtcactaccactggattctgttttgtccaaatctgttaaaacaaaacaaaacaaaacaaaacaaacaacaacaaaaaaacaggcttcaagctccctggagttaacaaagcacagagccagcactgacgaaatggcaagctcaagaccaatttctctagaaagtccttgacagccacagaaagcc

SEQ ID NO: 55379 - DNA, 678 bp, Homo sapiens
tgggcctcctcaccatgaggccagggcaggctcaagggcaggaaatcgaacagtggactagatggatggggcaggagaggaccggacactctgtcccttaaggggagagttgaaggatcaggattgccccagcctaggaaagagaaggccaaaaggcaacaagagagatgaagtgtgagcaccaaggtgtgacatcctctggggaggtatattctagatgatcagtgtggggaatgggggtactttctacagaggggcccccggatggcatggcttcctcaagagctgtgaggtcccaggcagtgggggcatcaggccaagctgcacagctgcttgtcaggttgggggtgggggctggaccagcaacaccatcctctcccctctggaccacgcccccccatcccagatctcttctgactcttgggactgtgtaattttcaattcttcgggaagtttgagaatacatttataagagaggatgtccggagagcagtggacatttcacaagcccaggtcagcagctgccgctgggcagcaactttayggttcccccaggtgctgaagtgcacctgcaggttgacttgatctactgttaacagagggtgatcagtttgactcatgcttaagggagagacgacaccaacacacacacagaggtttgcaagagtaaggcagggt

SEQ ID NO: 55380 - DNA, 1404 bp, Homo sapiens
acaaataacatcagctagttctgacatcctttagctgtatctcaccaatataattagacattttcattatcaagactcttctctgaatgaacacaatgcagataagtggcatctggaaactacatgagaaaatctgtggaatgtacatcaccatgcttggttcccttcttcaccaaataactcattaaaatatcattttggatacaattcctacagaatgccttacaaaaaccctatcttagtatatgggattcatatacatgtaacattttcttgagtatcattgttcatagcatgaatactgcttaatggtatatcaaatatttttcttttcataattctttatagacatcattttattagctgcataatactttatcacttgagtctagtataatttgcttagtgatttccatattacaggacacttgatttatataagatcatttacagtgtcattccaggtatcacaatcttttgattctagactaaggtttttcaccctaggcactaatgacatattgtgctgtataatcctttgttggggctatagggagggttatcctgtgcacggtacaatgttcagcagtatccctgacctctatccactagatctaagtagcacctcccccatggtgtgacaaccaaaagtttttaaacatcacccccgctgagaatcaatgttctatctagatcaatggatccaaacctcatgggtcacatacagttttgatagtcttatgaaatgatatactatttctccctctaaaacccacattgataaatttccatagtacttcaatacattatttcaagagctttgtggtccccaagaccatacgtggagttacaagaactcagattaagaatttcagtcctacattcttgacaaaaatagaaaaaaaaaaatcctaaaatgtgcatagaaccacaaaagacccaaatagccaaagcagtctggagcaaaaagaacaaagttggaggcatcaaactacctgacttcaatatatactacaaagctatagtaaccaaaacagcakgatactgacataaaaacagacacctagacaaacggaacagaatagagagccccagaataaatccatatgtttacaaccaactgatttttgagacaggtgccaagaacatacaataaggaaaagacagtctcttcaatacatactgttgtgaaaactggggagtcatacacagaagaatgaaattagacccttttctcaaaccattatacaaaaatcaactctaaatggattaaagatttaaatgtaagatcccaaactatgaaacaaatagaaaaaaacgtacggggaaagcttcatgacattgatctgggcaataatttttttttctagaaatgacttcaaaagcacaggcaataaaagcaaa

SEQ ID NO: 55381 - DNA, 497 bp, Homo sapiens
aaattagctgggcatggtggtgtgggcctgtggtcccagctacttgggagcctgaggcgggaggagcacttgagccctgaagattgaggctgcagtgagctgtgatggcaccaccacactccagcctgggtgacagagtgagaccctgtctcaaaacaaacaaacaaacaaacaacagaccctgaaatatagattcyttgaccggcttccttcaatgtacttccagaatcatggttttttttccccaatttttaaaagatcattcatttaaaaattttagatttagctgggcgtggtggcttatgcctgttatggtttgaattgtcttccccacaaaagatgtggaaggctgggcgcagtggctcacgcctgtaatcccaggactgtgggaggccgaggtgggcggatcatgtgaggtcaagagttcgagaccagcctggccaagagggtgaaaccctgtctctactaaaaatacgaaagttagctgggtgtggtgg

SEQ ID NO: 55382 - DNA, 497 bp, Homo sapiens
aaattagctgggcatggtggtgtgggcctgtggtcccagctacttgggagcctgaggcgggaggagcacttgagccctgaagattgaggctgcagtgagctgtgatggcaccaccacactccagcctgggtgacagagtgagaccctgtctcaaaacaaacaaacaaacaaacaacagaccctgaaatatagattccttgaccggcttccttcaatgtacttccagaatcatggttttttttycccaatttttaaaagatcattcatttaaaaattttagatttagctgggcgtggtggcttatgcctgttatggtttgaattgtcttccccacaaaagatgtggaaggctgggcgcagtggctcacgcctgtaatcccaggactgtgggaggccgaggtgggcggatcatgtgaggtcaagagttcgagaccagcctggccaagagggtgaaaccctgtctctactaaaaatacgaaagttagctgggtgtggtgg

SEQ ID NO: 55383 - DNA, 497 bp, Homo sapiens
aaattagctgggcatggtggtgtgggcctgtggtcccagctacttgggagcctgaggcgggaggagcacttgagccctgaagattgaggctgcagtgagctgtgatggcaccaccacactccagcctgggtgacagagtgagaccctgtctcaaaacaaacaaacaaacaaacaacagaccctgaaatatagattccttgaccggcttccttcaatgtacttccagaatcatggttttttttccccaatttttaaaagatcattcatttaaaaattttagatttagctgggcgtggtggcttatgcctgttatggtttsaattgtcttccccacaaaagatgtggaaggctgggcgcagtggctcacgcctgtaatcccaggactgtgggaggccgaggtgggcggatcatgtgaggtcaagagttcgagaccagcctggccaagagggtgaaaccctgtctctactaaaaatacgaaagttagctgggtgtggtgg

SEQ ID NO: 55384 - DNA, 1053 bp, Homo sapiens
tttcccattttcttaccactctatcccaatacacatgcacatgcatgcacacgtgcacacacactggcacccacacccatgcatgtgggacacacagagcagcccaggcgatttcaattgttgggagctttgcttttattaggtattagtctatggactcgctttctctttagagagactaagtgaaaccaaactcatttctacccagttagcctgctggaacctgtaacagttactgtaatgttaaaagcagtaaaacaaaataaaaaccagtcagttcacttactcccgaagtccgcagtttggtgttcagctttaaaacgtgctctgggcgtcctgtggtggctaccagaggctttggtgagtcattgtcaacccagtggctagagaagtgctggaatgcccctcttaaatacagaaccacgtttgtccttcagaatggctgcttgaacgaatttattgctcaacttgaaaggccattttttataacccactgcagttgtgcttcatgggtttctccacctatcctgtraagtgtattgggaaattaattttgtagatttcctcacactgcagtgactagggaaatcacccattcgttattatctaatgaggagaaagtggaaacatctagaagcactgctcccatcctcctccccagcccacacagacacctacctcaggccctccctgtcccaggtgagcagagggccccaccttcagaggttgcctcccttccaccttcaccaatcctatgaccagattatccccaaggaaatgtcaatttccaggcagcaagggaatcatataaagataagatcattgagagatttttttcctccgtgattggcagtttatattttcttgggtctacaaatctgacagcatttattaaattttctagtttgatactgacctctgtctgatgctgggctgtcaccatgcccaagactgaggggacccacagtctagctagaaggcatggatcaattccaactgtcctacccctagcctgtgggcaggagaaatctctcaggctctggcagaggagtc

SEQ ID NO: 55385 - DNA, 1053 bp, Homo sapiens
tttcccattttcttaccactctatcccaatacacatgcacatgcatgcacacgtgcacacacactggcacccacacccatgcatgtgggacacacagagcagcccaggcgatttcaattgttgggagctttgcttttattaggtattagtctatggactcgctttctctttagagagactaagtgaaaccaaactcatttctacccagttagcctgctggaacctgtaacagttactgtaatgttaaaagcagtaaaacaaaataaaaaccagtcagttcacttactcccgaagtccgcagtttggtgttcagctttaaaacgtgctctgggcgtcctgtggtggctaccagaggctttggtgagtcattgtcaacccagtggctagagaagtgctggaatgcccctcttaaatacagaaccacgtttgtccttcagaatggctgcttgaacgaatttattgctcaacttgaaaggccattttttataacccactgcagttgtgcttcatgggtttctccacctatcctgtgaagtgtattgggaaattaattttgtagatttcctcacactgcagtgactagggaaatcacccattcgttattatctaatgaggagaaagtggaaacatctagaagcactgctcccatcctcctccccagcccacacagacacctacctcaggccctccctgtcccaggtgagcagagggccccaccttcagaggttgcctcccttccaccttcaccaatcctatgaccagattatccccaaggaaatgtcaatttccaggcagcaagggaatcatataaagataagatcattsagagatttttttcctccgtgattggcagtttatattttcttgggtctacaaatctgacagcatttattaaattttctagtttgatactgacctctgtctgatgctgggctgtcaccatgcccaagactgaggggacccacagtctagctagaaggcatggatcaattccaactgtcctacccctagcctgtgggcaggagaaatctctcaggctctggcagaggagtc

SEQ ID NO: 55386 - DNA, 1053 bp, Homo sapiens
tttcccattttcttaccactctatcccaatacacatgcacatgcatgcacacgtgcacacacactggcacccacacccatgcatgtgggacacacagagcagcccaggcgatttcaattgttgggagctttgcttttattaggtattagtctatggactcgctttctctttagagagactaagtgaaaccaaactcatttctacccagttagcctgctggaacctgtaacagttactgtaatgttaaaagcagtaaaacaaaataaaaaccagtcagttcacttactcccgaagtccgcagtttggtgttcagctttaaaacgtgctctgggcgtcctgtggtggctaccagaggctttggtgagtcattgtcaacccagtggctagagaagtgctggaatgcccctcttaaatacagaaccacgtttgtccttcagaatggctgcttgaacgaatttattgctcaacttgaaaggccattttttataacccactgcagttgtgcttcatgggtttctccacctatcctgtgaagtgtattgggaaattaattttgtagatttcctcacactgcagtgactagggaaatcacccattcgttattatctaatgaggagaaagtggaaacatctagaagcactgctcccatcctcctccccagcccacacagacacctacctcaggccctccctgtcccaggtgagcagagggccccaccttcagaggttgcctcccttccaccttcaccaatcctatgaccagattatccccaaggaaatgtcaatttccaggcagcaagggaatcatataaagataagatcattgagagatttttttcctccgtgattggcagtttatattttcttgggtctacaaatctgacagyatttattaaattttctagtttgatactgacctctgtctgatgctgggctgtcaccatgcccaagactgaggggacccacagtctagctagaaggcatggatcaattccaactgtcctacccctagcctgtgggcaggagaaatctctcaggctctggcagaggagtc

SEQ ID NO: 55387 - DNA, 1053 bp, Homo sapiens
tttcccattttcttaccactctatcccaatacacatgcacatgcatgcacacgtgcacacacactggcacccacacccatgcatgtgggacacacagagcagcccaggcgatttcaattgttgggagctttgcttttattaggtattagtctatggactcgctttctctttagagagactaagtgaaaccaaactcatttctacccagttagcctgctggaacctgtaacagttactgtaatgttaaaagcagtaaaacaaaataaaaaccagtcagttcacttactcccgaagtccgcagtttggtgttcagctttaaaacgtgctctgggcgtcctgtggtggctaccagaggctttggtgagtcattgtcaacccagtggctagagaagtgctggaatgcccctcttaaatacagaaccacgtttgtccttcagaatggctgcttgaacgaatttattgctcaacttgaaaggccattttttataacccactgcagttgtgcttcatgggtttctccacctatcctgtgaagtgtattgggaaattaattttgtagatttcctcacactgcagtgactagggaaatcacccattcgttattatctaatgaggagaaagtggaaacatctagaagcactgctcccatcctcctccccagcccacacagacacctacctcaggccctccctgtcccaggtgagcagagggccccaccttcagaggttgcctcccttccaccttcaccaatcctatgaccagattatccccaaggaaatgtcaatttccaggcagcaagggaatcatataaagataagatcattgagagatttttttcctccgtgattggcagtttatattttcttgggtctacaaatctgacagcatttattaaattttctagtttgatactgacctctgtctgatgctgggctgtcrccatgcccaagactgaggggacccacagtctagctagaaggcatggatcaattccaactgtcctacccctagcctgtgggcaggagaaatctctcaggctctggcagaggagtc

SEQ ID NO: 55388 - DNA, 550 bp, Homo sapiens
ggatcaaaaatacagtattcctggacaagaaacccatgtacacagagggccaactttttctgtacacagggctgagtataggacttsagtatggtcaatgtggaatatgtggggattctagaaccaatcttctgtgcagcagagggaagaatctactccttttgataaatggataaatggataaatggataaatggaagtaaccttgggtaaccttggatgctctgagatgtaccaactctgacgtcagagaagtaatgccttagacttctaggagccaactctacataacctagcagccctgagcaggatgcaggagctgaaatacccactgaagactcttagaatcacacgtcagaggtcagaggcagaaaggtcattgaacatgtactagtccaacctctccatttcacactgtagagacaggctcagagaagacaggggactcactctacatcactcagtggtaggtggcagatgtgagattgcaacccagatatcctggtttcaatcctgacttatttccctaaaacccactttgcctcttgcag

SEQ ID NO: 55389 - DNA, 550 bp, Homo sapiens
ggatcaaaaatacagtattcctggacaagaaacccatgtacacagagggccaactttttctgtacacagggctgagtataggacttcagtatggtcaatgtggaatatgtggggattctagaaccaatcttctgtgcarcagagggaagaatctactccttttgataaatggataaatggataaatggataaatggaagtaaccttgggtaaccttggatgctctgagatgtaccaactctgacgtcagagaagtaatgccttagacttctaggagccaactctacataacctagcagccctgagcaggatgcaggagctgaaatacccactgaagactcttagaatcacacgtcagaggtcagaggcagaaaggtcattgaacatgtactagtccaacctctccatttcacactgtagagacaggctcagagaagacaggggactcactctacatcactcagtggtaggtggcagatgtgagattgcaacccagatatcctggtttcaatcctgacttatttccctaaaacccactttgcctcttgcag

SEQ ID NO: 55390 - DNA, 655 bp, Homo sapiens
tgaggtttcactgtgttgctcaggctggtcttgaactcctggcctcacggaatccttctgtcttagtctcccagtgggctgggattataggtatgagccacctcacctgacctgcgacgatttttcaacratgtaatttctcttttacagagccacctaagctgaagattcccttgagaacaagtactgtcctgcggtttcatggcccttcttccatttgtggttcttgcgaagtggaatttaaatgacatcttatcaagatggataaaccctagtttcccagtgctggaatatagaaaatggatggacaagtaaatcccactcagcacccatagtccaggcatggggacctcaacacacctgagccccagacatcacctttcattgtgagtagctctgagatgacacttctgctgttcccaattccagcattaattggattagatagttattttatgaagaattttcatatgccacaatcctgaccatatcttcaagtgaacagaaaaattctattaaaaagtcaaccttctgtctcactctgttgcccagactggagtgcagtggtgcaattatggctcactgcagcctcaacctcctgggctcaagcaatcctcctgcctcagcctcacaagtagctgggactacaggtgct

SEQ ID NO: 55391 - DNA, 990 bp, Homo sapiens
accacagggccacagagctggaggtgagcagcaggcgagtgaagggaaacttcatctgtatttctagcccctcccatcgcttgcatgaccacctgagctccatgtcctgtcagatcagcagcagcattagattctcataggagcacaaactctgttgtgaagtgtgcatgcgagggatctaggttgtgtattccttatgagaatctaatgcctgatattctgttactgtctcccatcaccccagatggacagtctaattgcaggaaaacaagctcagagatcccactgagtctacgttatagtgagttgtagaatcatttcattatatattactgtgtagtaataatagaaataaagtgcacaatatatgtaatgcacttgaatcatcctgaaattattccctcactcccagtctgtggaaaaattgtcttccacacattcactctgttttttggtagaggcagggtcttaatatattgcccaggctgatctcaaactcctggcctcaagtaatatacctttctcagcctcccaaagtgctgagattacaggcataagccaccaccctcaaccaagactttcttaaaccaaataaaaattaagtgagattacttgagcccaggtggtcaaggctgcagtgagcctgattgcaccactgcactccagcctaggtgacagaatgagactgtctcaaaaaataaaataaaatacaaattaaccctttatgacattcccagtaactttccctcctaagtgttccccacaagtctttgaattctgtttaattttcacataacatttaagacatttaagaacttatgtctgtctgtgtcatccctttatgtcaaaagatgtctttttgtcacttccagctggatctaccatgaaagacttctgaatccaggaagagagactgactgggcaacatgttattcaggaacaaaaaratttggactgtaacttaaaaatgatcaaataatagtgcatgca

SEQ ID NO: 55392 - DNA, 571 bp, Homo sapiens
agcttggatgtgcggacaagcagggtggtgagtagagccctcaggcggggtgggcaggcaggagcaggggaggctcgcactgtgcccagattcccacccccctccctctctctgaagatcttagtgggctgagcctcactgatagcatggaggctgcaccgggasaggacagggagggttctcccccatgacaaccccactgcacagcagatccagcagctgcttcctctaatgcaggactccccaggagcacccaggcttgagtggagaagctgttggtacaggagaggcggcaggaggagcaggagaggctgcatgccattcttttcgggctgccgagaacagggagctaaacatcaccatcatctaagagcgggtcaaggaattgaaaaaaaaaaacaaaacatttaaggggttaatatcctacacaattcatttacttcatttgaatgttagagccacttatgtttatttgtgtttctaatttatagtttaaatttatttgtgtttctaatttatagtttaaatttatttgtgtttctaatttatagtttaaatttatttgtgtttc

SEQ ID NO: 55393 - DNA, 571 bp, Homo sapiens
agcttggatgtgcggacaagcagggtggtgagtagagccctcaggcggggtgggcaggcaggagcaggggaggctcgcactgtgcccagattcccacccccctccctctctctgaagatcttagtgggctgagcctcactgatagcatggaggctgcaccgggagaggacagggagggttctcccccatgacaaccccactgcacagcagatccagcagctgcttcctctaatgcaggactccccaggagcacccaggcttgrgtggagaagctgttggtacaggagaggcggcaggaggagcaggagaggctgcatgccattcttttcgggctgccgagaacagggagctaaacatcaccatcatctaagagcgggtcaaggaattgaaaaaaaaaaacaaaacatttaaggggttaatatcctacacaattcatttacttcatttgaatgttagagccacttatgtttatttgtgtttctaatttatagtttaaatttatttgtgtttctaatttatagtttaaatttatttgtgtttctaatttatagtttaaatttatttgtgtttc

SEQ ID NO: 55394 - DNA, 571 bp, Homo sapiens
agcttggatgtgcggacaagcagggtggtgagtagagccctcaggcggggtgggcaggcaggagcaggggaggctcgcactgtgcccagattcccacccccctccctctctctgaagatcttagtgggctgagcctcactgatagcatggaggctgcaccgggagaggacagggagggttctcccccatgacaaccccactgcacagcagatccagcagctgcttcctctaatgcaggactccccaggagcacccaggcttgagtggagaagctgttggtacaggagaggcggcaggaggagcaggagaggctgcatgccattcttttcgggctgccgagaacagggagctaaacatcaccatcatctaagagcgggtcaaggaattraaaaaaaaaaacaaaacatttaaggggttaatatcctacacaattcatttacttcatttgaatgttagagccacttatgtttatttgtgtttctaatttatagtttaaatttatttgtgtttctaatttatagtttaaatttatttgtgtttctaatttatagtttaaatttatttgtgtttc

SEQ ID NO: 55395 - DNA, 571 bp, Homo sapiens
agcttggatgtgcggacaagcagggtggtgagtagagccctcaggcggggtgggcaggcaggagcaggggaggctcgcactgtgcccagattcccacccccctccctctctctgaagatcttagtgggctgagcctcactgatagcatggaggctgcaccgggagaggacagggagggttctcccccatgacaaccccactgcacagcagatccagcagctgcttcctctaatgcaggactccccaggagcacccaggcttgagtggagaagctgttggtacaggagaggcggcaggaggagcaggagaggctgcatgccattcttttcgggctgccgagaacagggagctaaacatcaccatcatctaagagcgggtcaaggaattgaaaaaaaamaacaaaacatttaaggggttaatatcctacacaattcatttacttcatttgaatgttagagccacttatgtttatttgtgtttctaatttatagtttaaatttatttgtgtttctaatttatagtttaaatttatttgtgtttctaatttatagtttaaatttatttgtgtttc

SEQ ID NO: 55396 - DNA, 571 bp, Homo sapiens
agcttggatgtgcggacaagcagggtggtgagtagagccctcaggcggggtgggcaggcaggagcaggggaggctcgcactgtgcccagattcccacccccctccctctctctgaagatcttagtgggctgagcctcactgatagcatggaggctgcaccgggagaggacagggagggttctcccccatgacaaccccactgcacagcagatccagcagctgcttcctctaatgcaggactccccaggagcacccaggcttgagtggagaagctgttggtacaggagaggcggcaggaggagcaggagaggctgcatgccattcttttcgggctgccgagaacagggagctaaacatcaccatcatctaagagcgggtcaaggaattgaaaaaaaaaaacaaaacrtttaaggggttaatatcctacacaattcatttacttcatttgaatgttagagccacttatgtttatttgtgtttctaatttatagtttaaatttatttgtgtttctaatttatagtttaaatttatttgtgtttctaatttatagtttaaatttatttgtgtttc

SEQ ID NO: 55397 - DNA, 726 bp, Homo sapiens
acacgcatgtgtacctgtacctgtgtgactgcatcggcatctgatgaactcatatgtctgtgtcactgagtctggggacatgtgattatgcacttccctgagggagtgcatctcaagctgtgtgaccgacaccccgtaaccatgtgtggggtgggtattaacatgtgaccagctggggcaacccagtgaaaccccatctctacacaaaacatttaaaaattagccaggcatggtggcacatgactgtggtcccagctacttgggaggctgagcccttgagcctaggacgttgaggctgcagggagctgtgatcacaccacagcactcmagcctgggtgacagagtgagaccctgtctcaaaaaaacaaaaaatatgaccagctgcatgtctggctgctgtgtgtgtgaacccacatgtgtgtgtgtcactaaatgagcagtggtatctggggaaataagtggagcaagatcaaggctgttctggctgcttagggccacagtgggcccctctgagacccctctgcgcattcccttgtgagtcctcatgacctctgttaaccaggtagcccaggaggcagtgccgccagcagacatcgttttctcagtgaagagcccaccgagtgccggctacctggtgatggtgctgcgtggcatcttggcagatgagccacccagcctggaccccgtgcagagcttctcccaagaggcagtggacacaggcaggat

SEQ ID NO: 55398 - DNA, 1375 bp, Homo sapiens
  misc_feature (1)...(1375): n = A,T,C or G
tnnnnnnnnnnnnnnnnnnnnnnnnnnnnnnnnnnnnnnnnnnnnnnnnnnnnnnnnnnnnnnnnnnnnnnnnnnnnnnnnnnnnnnnnnnnnnnnnnnnntatttatttatattatttatttatttttttttttagactgagtctcgctctgttgcccaggctggagtatagtggtgcaatctcggctcactgcaatgtccacctcccaggttcaagagattctcgtgccttagcctcccgagtagctgggataacaggcacccaccatcacacctgcctaatgtgtttatttttttaaaaaaagaaactgtatctttagagaaaatgtatacatgcatactttgctacatttttgttgattgttacattttacatttgtataacaatacaggcaagtcatctttgcactcataaccacatcttttatggaacatcaagcctactctgaggtacaggctttcagaagcctgaatttggaggaccatgcctgaaccaaatggagtctccagaatcaaaactgctcaaaataatcattcatggttctcagaccaaataagatctacttagaaacatttctcgacagcacgctgccatgccgacgcagaccccactctgcacgccagcccccctgcacccaccatggccacagttcagcagctagaaggaagatggcgcctggtggacaacaaaggctttgatgaatacatgaaggagctaggagtgggaatagctttgtgaaaaatgggcgcaatggccaagccagattgtatcatcacttgtgatagcaaaaacctcaccataaaaactgagagcactttgaaaacaacacagttttctggtaccctgggagagaagtttgaagaaamcacagctgatggcagaagaactcagactgtttgcaactttacagatggtgcattggttcagcatcaggagtgggatgggaaggaaagcacaataacaagaaaactgaaagatgggaaattagtggtggagcgtgtcatgaaccatgtcgcctgtactcggatctatgaaaaagcacaataaagattccatcatcactttggacaggagttaaccaagagaatgaccaagctcagttcaatgaacaaatctccatactgtttctttcttttttttttcattactgtgttcaattatctttatcacaaacattttacatgcagctatttcaaagtgtgttggattcattaggatcatccctttggttaataaataaatgagtttctgctaaaaaaaaaaaaaaaaaaaagaaaaagaaacatttctcaggccgggcacgatggctcacagaccaggcacagtggcacacacctgtaatcccagcacttttgggaggccgaggcgggtgg

SEQ ID NO: 55399 - DNA, 1375 bp, Homo sapiens
  misc_feature (1)...(1375): n = A,T,C or G
tnnnnnnnnnnnnnnnnnnnnnnnnnnnnnnnnnnnnnnnnnnnnnnnnnnnnnnnnnnnnnnnnnnnnnnnnnnnnnnnnnnnnnnnnnnnnnnnnnnnntatttatttatattatttatttatttttttttttagactgagtctcgctctgttgcccaggctggagtatagtggtgcaatctcggctcactgcaatgtccacctcccaggttcaagagattctcgtgccttagcctcccgagtagctgggataacaggcacccaccatcacacctgcctaatgtgtttatttttttaaaaaaagaaactgtatctttagagaaaatgtatacatgcatactttgctacatttttgttgattgttacattttacatttgtataacaatacaggcaagtcatctttgcactcataaccacatcttttatggaacatcaagcctactctgaggtacaggctttcagaagcctgaatttggaggaccatgcctgaaccaaatggagtctccagaatcaaaactgctcaaaataatcattcatggttctcagaccaaataagatctacttagaaacatttctcgacagcacgctgccatgccgacgcagaccccactctgcacgccagcccccctgcacccaccatggccacagttcagcagctagaaggaagatggcgcctggtggacaacaaaggctttgatgaatacatgaaggagctaggagtgggaatagctttgtgaaaaatgggcgcaatggccaagccagattgtatcatcacttgtgatagcaaaaacctcaccataaaaactgagagcactttgaaaacaacacagttttctggtaccctgggagagaagtttgaagaaaacacagctgatggcagaagaactcagactgtttgcaactttacagatggtgcattggttcagcatcaggagtgggatgggaaggaaagcacaataacaagaaaactgaaagatgggaaattagtggtggagcgtgtcatgaaccatgtcgcctgtactcggatctatgaaaaagcacaataaagattccatcatcactttggacaggagttaaccaagagaatgaccaagctcagttcaatgaacaaatctccatactgtttctttcttttttttttcattactgtgttcaattatctttatcacaaacattttacatgcagctatttcaaagtgtgttggattcattaggatcatccctttggttaataaataaatgagtttctgctaaaaaaaaaaaaaaraaaaagaaaaagaaacatttctcaggccgggcacgatggctcacagaccaggcacagtggcacacacctgtaatcccagcacttttgggaggccgaggcgggtgg

SEQ ID NO: 55400 - DNA, 571 bp, Homo sapiens
tggcagaagcagccttggcctttcagacattgagtacagggagcagcagagtggtgggtggtgagaggagagaggaaggtggggaccagatggacccccaacccctgccaccctgtccctgtaggatggttcctttataagcagcccaggttcatcattaggacttgacattggtccacctctttttccccctcccacccacatccctggacatagctttcggttagcccctagccctcacagttgtggtaaaatatttcagagagtggcttggaatagtggctcatgcctgtaatcctagcactttgggaggctgaggmaggaggatcacttgagccaaggagttcaagaccagcctgggcaacatagggagactcgtttctacaaaaataatgaaaatattagccaggcatggtggtatgcacctgtggtcctagctactcaggagacaggtgggaggatcacttaagcccaggatgtggggctgcagtgagccgtgacagcgccactatactctggcctgggtgatacagcaggaccctgtcccccctcaaaaaaaaaaaaaaaagat

SEQ ID NO: 55401 - DNA, 552 bp, Homo sapiens
gaactctctttttgacttctttatcctaggcatacattcttaaaacccaatacattttacctaaataaaaaatgaataaatgagaatattaaccttacttttttctctttttacctgaacatttattctttgatcaatattgactaagattttgtgaatatgaaaggagtagagaagataaatttgtgagcatgtctcacctttctctaaaattttataagtaccagaggtccatcttttccctttgagtctgtgaattccttacctttccacatctttttacttgtacctatgtgaatcatatttgagatttttcagggcaccactttyaaatattcaaatatgctattaacaattaaacttggtttacaatggcaggtatacattgtttaacaatgagtatattaatattttcagagaaacacatcattaagtgatttcatcattgtttgaacatcataaaaagtacttacacagacttagatggtagcacctgctacacatcacacccaagttatatggtatagcttatggcttctatgctacaagcct

SEQ ID NO: 55402 - DNA, 552 bp, Homo sapiens
gaactctctttttgacttctttatcctaggcatacattcttaaaacccaatacattttacctaaataaaaaatgaataaatgagaatattaaccttacttttttctctttttacctgaacatttattctttgatcaatattgactaagattttgtgaatatgaaaggagtagagaagataaatttgtgagcatgtctcacctttctctaaaattttataagtaccagaggtccatcttttccctttgagtctgtgaattccttacctttccacatctttttacttgtacctatgtgaatcatatttgagatttttcagggcaccactttcaaatattcaaatatgctattaacaattaaacttggtttacaatggcaggtatacattgtttaacaatgagtatattaatattttcrgagaaacacatcattaagtgatttcatcattgtttgaacatcataaaaagtacttacacagacttagatggtagcacctgctacacatcacacccaagttatatggtatagcttatggcttctatgctacaagcct

SEQ ID NO: 55403 - DNA, 1491 bp, Homo sapiens
ccccactttattatactcactctcatcctcaagctcaggttttcttgcttctgtgtgcttggagggctacatactagacacaccacagcttaagggagaatggtatgttttgctaaaatcaaaacacgtcatcatggggttcaccatcaaagggaaggttgtgaggaaatgactaactagagaatcggccgtttcctcccatcaacagtgtgtgtgtgtttctgtgtgtacatgcatgtgtttgcgtgttggtaggtagaatacaaaaggagtgaaaaaggaagaaaatgacatacaaactcttgtttttcaactgccctttctctgttgactttagaaatatttgacttgacagatggaaagtaatcctaattgaagtcatttacccgaatgcttaccacttaagcctaattgccatgcaacagaataacagttatgcatrctattaaattagtgtcagattaacttcgacgctcgttatgtttgaatcctgcttgttcaatctaaattgtttttggctcaggtgctatggttgtagatttacatcttaagagaatgggactatcatttgcatgccttctctattatttagctcccacatatttcagaacagaaggtcagagtgctcagagttgaaaagggccctgtctctctacatatatatagagagaggagctttctcccttatgaggaagaaagaactaggaggaaagaaatggaaggtgctcatggcaaggggcccagcaaaaaagatcaccaagggtgaggagttcttgtgtttattcttcatttccaaagactaatcgttggtgtgtgtaggttccactttttatcttgactagagtgaacttagaatgtgaactgaacctcttgatgttagttaaaattcaagcaaattctaaaagcccacatgctgtttaatttgttagtggaacaccatttaggaataactttttaggtaagataggagctatttggggtgcacatggaagattagaaattatcttgctaaccattcttcctttggcacccataagcattcttaaatcgatgttggttcctcaagtatttataagaggtgaatgtttatcaaacttattccaaacttcatccaccctgcggcataatttttgtttatagtttagatttgtgggtgatcattttctgtagctaagcacacataaaaaccaacttggcctaagttgtgaagggaacccatagatgtgtagccttcttatgatttcaaacctttacagcaaattgtcaggatattcatagacctcgtccacgtgcctaaaaagctggaagccatcctctaaactctggggaaatgatacagtataagaacaagaaagcaataggagggaaaagggtgggttgagtctttgaagttgaaataataaggcaaaatgtattttactctaaaagagaaatgcctggaaagcttggatgaataaaactataattaaaagaaatgaaaatacggcgctc

SEQ ID NO: 55404 - DNA, 1491 bp, Homo sapiens
ccccactttattatactcactctcatcctcaagctcaggttttcttgcttctgtgtgcttggagggctacatactagacacaccacagcttaagggagaatggtatgttttgctaaaatcaaaacacgtcatcatggggttcaccatcaaagggaaggttgtgaggaaatgactaactagagaatcggccgtttcctcccatcaacagtgtgtgtgtgtttctgtgtgtacatgcatgtgtttgcgtgttggtaggtagaatacaaaaggagtgaaaaaggaagaaaatgacatacaaactcttgtttttcaactgccctttctctgttgactttagaaatatttgacttgacagatggaaagtaatcctaattgaagtcatttacccgaatgcttaccacttaagcctaattgccatgcaacagaataacagttatgcatactattaaattagtgtcagattaacttcgacgctcgttatgtttgaatcctgcttgttcaatctaaattgtttttggctcaggtgctatggttgtagatttacatcttaagagaatgggactatcatttgcatgccttctctattatttagctcccacatatttcagaacagaaggtcagagtgctcagagttgaaaagggccctgtctctctacatatatatagagagaggagctttctcccttatgaggaagaaagaactaggaggaaagaaatggaaggtgctcatggcaaggggcccagcaaaaaagatcaccaagggtgaggagttcttgtgtttattcttcatttccaaagactaatcgttggtgtgtgtaggttccactttttatcttgactagagtgaacttagaatgtgaactgaacctcttgatgttagttaaaattcaagcaaattctaaaagcccacatgctgtttaatttgttagtggaacaccatttaggaataactttttaggtaarataggagctatttggggtgcacatggaagattagaaattatcttgctaaccattcttcctttggcacccataagcattcttaaatcgatgttggttcctcaagtatttataagaggtgaatgtttatcaaacttattccaaacttcatccaccctgcggcataatttttgtttatagtttagatttgtgggtgatcattttctgtagctaagcacacataaaaaccaacttggcctaagttgtgaagggaacccatagatgtgtagccttcttatgatttcaaacctttacagcaaattgtcaggatattcatagacctcgtccacgtgcctaaaaagctggaagccatcctctaaactctggggaaatgatacagtataagaacaagaaagcaataggagggaaaagggtgggttgagtctttgaagttgaaataataaggcaaaatgtattttactctaaaagagaaatgcctggaaagcttggatgaataaaactataattaaaagaaatgaaaatacggcgctc

SEQ ID NO: 55405 - DNA, 913 bp, Homo sapiens
tctctatgtgttcaaatttcttcctcttgaaggacaacagtcaggttggattaagacccacccaaaagcctttgttttaacttaatcacctctttaaaggctctgtcttgaagcaggagatgtgagaggaaaaacaaattttccctctttcctttggtatgagcagcttccccctcgaatccctccccattctgtgtgattggaccctgctgtgcaagtttttatgagtttatggtttcctgttttctgtaactacagtctgtaagtctctgtagcaccatggaggtcatgagacatgtttgagcgtgcttagattgcagccatctgggtaccatagcgaaggacacaagataaggctgtgcaggcatcttgagcaaacctagataatagccacctggcctgcatagcaagagtcacatgtaagcctgagttaggaacctgtcacagtttgattaactgccttgttctgcttctgtaagctcactttccctgccccacaagttttgtgccactggcaagccatcccacttcggttgcatggatgaaagtcaagccctgtcttcattcatggctcagcctttggatattaatctgctgagccggtggtcacctaaataaaatcctcctgttccacccatatggactctctggtttcctgattcccacaacagtctctataatataatcataattcatgtactaggagttagtgttaccaaactgaacttggatcygcctgcctgaagtagcaaagtcaaactctgacatcaagatttgcaatgtgagaagagtgaggcatttattgcggggtgccaagcaagcagaaccaggcggcttatgcttaagacccaaactcatagatggcttacatgtaagagtttttaaagtcagggaggcagaggttacagacaaa

SEQ ID NO: 55406 - DNA, 935 bp, Homo sapiens
tgcatgacagttctacaattaggattcagctcccttcccagagtgaagcgctaatgactgtmtgcgtttgagctcacagcaattagtttgaaactgagacttcttttctacgtgcagaatatcaatgccatcctggcagaagcaggcttcagcagccaggacgctggccaaacagatcaagctctgctggtttgcgtggggctcacagcccagcccagctctgccatggagcctcttgcagccttcatcaccctgcaagttacgtgactggcaaaggctggttctctcctttgtccccagtcttcccatccataaaatatacagagcactcgccttattagggagtgggaaagcaagtttaattagcgtttataagttgctctgctacctttgggcgaagactaaggcacgagcctgggaccttttctgctgttcattctgactcagcattctctctcgaaacaccgaagcccagaaacctcacgctcagcaagaatttatgatgcacttttggattggaggcatctgtgcttttgtgtaaaattctgtagaggggctcttgagggagagtgttgaacagactcaaagatgcagttaatgttggagcatcggtgctcatagaaattttggttaggctggcttgtacaggacaggctttagcagcaactgcggtccgcagagcaaatcactggaacataacaatgatcagggtccaagaggccttgataacgtccaggtcctgggaaaggccagagggtctttcaggatgcttggaggcagggagggggaagtggagaagcaggtgaactagggatgtatggattaaatgcaagcccagccagacggaagtacacacacaggtcgtttggcaactgatagctaaggctgccaggcacatctcacccattgggatctgtttctctatcgaaaatgca

SEQ ID NO: 55407 - DNA, 1201 bp, Homo sapiens
tagatgcattttgctgagggacagaagccagacccaataagctaccacagtaggattcccattcctaggccattctggaaaaggccaaaccacagggactgagaagcagtctgggtggccaggggctgacggatcggggagaggctgggtgcataggggccaccctggagacttggaggatgaaggagtcgccccaggaggggctggagcggtggccgggagactctgcacattggtttggaaccgtggaggaactgtacacccacagactgaactggsgtgtgtgcaaactgaaaaaaaaaaaaaaaatcattcagagtgaaaaggatcaggcactgtacaactgggctatttgcatgtcacagatgtggattttactgaaacatttcttcaagagtctcaggccctgaagagctcactgcttatccggtgaatcatctgaacctgaaatgggatttgctgttaggctttgtagacaaagtgaaattaacaacatctgcacaaaacaaaccaaagccccctttctctgtttcctaggcagcgggaactactttacatcctcctggcgtatgaggagtataacccggtgagtattcccggcagtgaggttcccgggccatatttccatattcacaggagtgggtgtctggtgggggtgtcgttgcttcttttaaaattagtatttgtgacccaccaggatataggaagtaggatgtcagctcactgctggcataaacctccaaggaagggggtggtctcaaggggtcaagctgatacacaaaggagtcagggcctggactcctggtgtcacctgggcctgaccaccacttctcagaacaagaaatgacgccgtcctcctggggctgccccaaagcccaggagcttggcagcatcgcacacaggatggtgctatcagcagacattttggacaaggtgctgaagtgcctgatggacttggctcttgtcatgaaatgaatgtgcatcctgaggaagcctctttttcagaggaagcctctccttcagaggaagcctctccagtcacctctgccctctccaatgacatgagtcctcccaggtgagctcagccctcccagctgatgtccttccatggtgactctggctcttgcaggaggtgggctactgcagggacctgagccacatcgccgccttgttcctcctttatcttcctgaggaggatgca

SEQ ID NO: 55408 - DNA, 1294 bp, Homo sapiens
gggtcatcccagggcaatggctggggctcaggcccagcctcatgggcagactgggccaggacccgacttgagagggctcagggaagcctcaagccctgggcaagcccctctctccaggagccacatccccactcaaatgagtgcctcccatgaggagcttcaagaccttgtctgacccagcgtcctggagggctcaggcgaccctcatggggaaggaaggtcactgactcaggagactgaagccccagtgtgcgcagctcgagccaccagccccagcctggaaggaccaggttctttcacacctgctgtccccacagatctctctcgggctcaccctgcgcctgtgggacgtgtatctggtagaaggcgaacaggcgttgatgccgataacaagaatcgcctttaaggttcagtagagtaagtctacgtgtgcccagcggggcctggggagccctggggtcagaccccgactggcccgagggcagcttcctcacactgtcctcatgatcctctgttctggcccagagggaggtctggccaggtgggctgggcaggacactgtgacaccgagcccatyccccacatgacccagatgaaagtcgagagtgtggtgagcacttccctgtccagatcaccccccagccacagtctcctgtgtatatctggacgcctggggtggccacaaaaggatccggcaccgcccagtgggagactgaagtggccacggggtatgagctgtgaccattcccaggtaactcccctggcctgatatccaccctgtccctagagcgcctcacgaagacgtccaggtgtggcccgtgggcacgtttttggaaccggttcgttgatgcctgggccagggatgatgacactgtgctcaagcatcttagggcctctatgaagaaactaacaagaaagcagggggacctgccacccccaggtgggctccagtgccatgtcccctcccatgtcaccctctggggtagtcaatagtaggggagtgcccgggacccgcaaccctactacctgggccttcctcttcaccttttcttcctcctcttcctcctggactctaagaaagtacaggaggcccaccggtcctcagggcaggcgctcagtgcgtgtatactggacatgctgtgcacgcaggagggggatgtgggcgagaccctccaacaagccccctcccactttctgcggtgtctccctctccccctcgcagggccctccaagttactagccgagcccagacccatttgtgggagaccccgcccctccctgcaagcacccacag

SEQ ID NO: 55409 - DNA, 1294 bp, Homo sapiens
gggtcatcccagggcaatggctggggctcaggcccagcctcatgggcagactgggccaggacccgacttgagagggctcagggaagcctcaagccctgggcaagcccctctctccaggagccacatccccactcaaatgagtgcctcccatgaggagcttcaagaccttgtctgacccagcgtcctggagggctcaggcgaccctcatggggaaggaaggtcactgactcaggagactgaagccccagtgtgcgcagctcgagccaccagccccagcctggaaggaccaggttctttcacacctgctgtccccacagatctctctcgggctcaccctgcgcctgtgggacgtgtatctggtagaaggcgaacaggcgttgatgccgataacaagaatcgcctttaaggttcagtagagtaagtctacgtgtgcccagcggggcctggggagccctggggtcagaccccgactggcccgagggcagcttcctcacactgtcctcatgatcctctgttctggcccagagggaggtctggccaggtgggctgggcaggacactgtgacaccgagcccattccccacatgacccagatgaaagtcgagagtgtggtgagcacttccctgtccagatcrccccccagccacagtctcctgtgtatatctggacgcctggggtggccacaaaaggatccggcaccgcccagtgggagactgaagtggccacggggtatgagctgtgaccattcccaggtaactcccctggcctgatatccaccctgtccctagagcgcctcacgaagacgtccaggtgtggcccgtgggcacgtttttggaaccggttcgttgatgcctgggccagggatgatgacactgtgctcaagcatcttagggcctctatgaagaaactaacaagaaagcagggggacctgccacccccaggtgggctccagtgccatgtcccctcccatgtcaccctctggggtagtcaatagtaggggagtgcccgggacccgcaaccctactacctgggccttcctcttcaccttttcttcctcctcttcctcctggactctaagaaagtacaggaggcccaccggtcctcagggcaggcgctcagtgcgtgtatactggacatgctgtgcacgcaggagggggatgtgggcgagaccctccaacaagccccctcccactttctgcggtgtctccctctccccctcgcagggccctccaagttactagccgagcccagacccatttgtgggagaccccgcccctccctgcaagcacccacag

SEQ ID NO: 55410 - DNA, 684 bp, Homo sapiens
tgagaggtcaacagatagtgccatatgaaatgggtgctgtggctcctgctgaagtccaagagctccaaggatcagaagcgtggtcctgtttaagaattttaggacttcagcattttgggaggctgaggcaggaggattgcttgaggccaagagttcaggaccagcctgggcaacatagggagaccccatctctctacaaaataaaaaaaattaaccaggcatggtggcacacacctgtggtcccagctacttgagggactgaggtgagagaatcacttgtgcccagaaggtcaaggctgtagtgagccatgatcatgccactgctctccagcctgggctacagaatgggacagttccatctgcagggaatccagaatggggaagtggctgcatacattccctcatccctctctctaaacagctctgaattctttctcagctcagagaratccttggctttcaacatcagaaggatgtgtcttgtgacctctggctcattcccataggacctacccatttgctaattttgctaggagctagaaggagaccctttctgcagcccacgttttccttttggcaaggaaagacccctaaatacatcaccatgactcctgaacaactcagatggcatcatggtagagtgaggggagagcttattgagaacagggagcctttcatagctat

SEQ ID NO: 55411 - DNA, 595 bp, Homo sapiens
acatctaacatttgtggagtgcttactatgatcccaacatataacatgacaatctcctgagtcctcttggctgatactaggatgtgagctcttaactaccatcctatactgttttttttttttttttttttttttgagacggagtctcgctctgtcgcccaggctggactgcggactgcagtggcgcaatctcggctcactgcaagctccgcttcccgggttcacgccattctcctgcctcagcytcccgagtagctgggactacaggcgcccgccaccgcgcccggctaattttttgtattttttagtagagacggggtttcaccttgttagccaggatggtctcgatctcctgacctcatgatccacccacctcggcctcccaaagtgctgggattacaggcgtgagccaccgcgcccggcccctatactgttaattggtctctgagaggagagtaatcccagacagtggttcccttctcagcaacaacaaaaaatgtgtaaaatgattgcattattggaattagatctgaggacagaagcatttaagaaatttttacttttggaaaatgtgtataaaattaaaacatgagtg

SEQ ID NO: 55412 - DNA, 595 bp, Homo sapiens
acatctaacatttgtggagtgcttactatgatcccaacatataacatgacaatctcctgagtcctcttggctgatactaggatgtgagctcttaactaccatcctatactgttttttttttttttttttttttttgagacggagtctcgctctgtcgcccaggctggactgcggactgcagtggcgcaatctcggctcactgcaagctccgcttcccgggttcacgccattctcctgcctcagcctcccgagtagctgggactacaggcgcccgccaccgcgcccggctaattttttgtattttttagtagagacggggtttcaccttgttagccaggatggtctcgatctcctgacctcatgatccacccrcctcggcctcccaaagtgctgggattacaggcgtgagccaccgcgcccggcccctatactgttaattggtctctgagaggagagtaatcccagacagtggttcccttctcagcaacaacaaaaaatgtgtaaaatgattgcattattggaattagatctgaggacagaagcatttaagaaatttttacttttggaaaatgtgtataaaattaaaacatgagtg

SEQ ID NO: 55413 - DNA, 1328 bp, Homo sapiens
tcccatgaggtccctctcccaacatgtggggattataatttggattacaattcaagatgagatttgtggtggggacacagccaaaccataccacctgcactcccttttttactacatcactattcacaatagtgcttctacccagtggaaccagccttcccaatcgcagggtctccagacctgggctgtctgcagcaaaagcagatacattcttctcatgcccctgttcaaggtaggaaactgctcgcctgctatatctaccaaattggtataagtaaaggtgaaaataaattttaatggaaaccttgccagcctcttccccttggctaaaagatatcagagacaaactaaggcataagaatacccaaattgcaacagaacaaaatgcatgtcactctgccttctctaaacccattctctatttctcaaggtggttaaaaaaaataaaggggataaagtcctataagtgccttttgctaacgctaatgcactgtataaaggtttcgctagccctaatgcagtgtataaatgcaccatccctccctcctcactcatgcacctgcagctggtgcctgcttttggggacgactccatttcccccagagcttctgattcacgctgcttctaccaaactcctggcccctgggccttaatttgttaccccagatgtggtcaagttttcctaaaaatttccacttaccctcactgttgctctttgccataggatcctaataggaccctatgccatagcaccctaatagaacaacccagaaagcaaragctgacaattagcctctgtctactcaagacatatgtggccagttgaaaatgtttacagaaaaaaacaaatttaaagttataggctatgaaaagagcagtcagctttaactgctaattgtcatgggtgagtggcgactatctgcggtcggtggtgcaggaataaaaagaatttaccaagacagttgtaggttaagaaaaaaaaaaaaaaaaagcagatttattagagagagtatgaaaatacgttgcaagcgtgcaacaggcaggtcagtgagagaagagctgactgcaaagagacaaagacttgctggggattttataggatggtgcttgtgctgtgtgctgaagagggctttgtgcagtaccgataatgccaaggttgcagtgagataacttgcaattttctatcagccaagggtctggagatagctgggtgtaggcagactgtgagttatttgcacaggagggctatctgttctggagcatgaagaaagggagacttataacttacctgccttctctttctactttccctccatccccctagcctg

SEQ ID NO: 55414 - DNA, 1043 bp, Homo sapiens
taattcatctttagatttctacacggtgttactttgttggcaagtgttcgtatatgtaggaggactttagttttattattaaatgtaactgttttaagcctcatgggcttagtgactaaagagtcctgtgaaacttctgtgtactgcagacttggtatagatagcagastggagattgatgggataccaggatgttattacttatcacatacaagcccaataatctggttttttaggcagaggtggtggactggttggagtgtatgtggtcctgctacattttgagtagccacaggaggatggcagttctaagagtatttgcagttatgagcaagctagttatgtagcaagctagctgatgtgcttacctaaattttaccactttgcagcactaagctagaagtcatatctaaactattaccaagcagaaagaagaaaacatattcagaactgttaactttggggcaaagatagaatagagatgacaatatagtgatttttttcattagttcttcatttttgttattttatttctagataaatgtagtattgagagaagactgtcggcgctctgccatagcaccgcaaccgtgtgagcagcaggctcatcccgtggaccggtggtgggaacgtgaggtgatgcctttgggattacagcttgagttctgtcaccccatccccaggaaactgtagcttcttaactggtgactaccaaagaacaagcagtgatttgaaaaaggaaaaacaatccaaaaactacatatttgtaggaaatctgccttattggagaaaatcaccctttccctttttctttgtagaagcaggagcaagagtgtttggctcccagtttggacttggtgaataaatgtaccttagaactaggataatcggtacagttattcttaaagataattaaaaatgaaacaaagtgagtgctcgtcactgggttcatcagagcagtgtgtgaaattccatgtgtttgctgaggtgtaaaggtaaatgtattcacccctcatccaggcagtttgatatttggagtaagt

SEQ ID NO: 55415 - DNA, 1043 bp, Homo sapiens
taattcatctttagatttctacacggtgttactttgttggcaagtgttcgtatatgtaggaggactttagttttattattaaatgtaactgttttaagcctcatgggcttagtgactaaagagtcctgtgaaacttctgtgtactgcagacttggtatagatagcagactggagattgatgggataccaggatgttattacttatcacatacaagcccaataatctggttttttaggcagaggtggtggactggttggagtgtatgtggtcctgctacattttgagtagccacaggaggatggcagttctaagagtatttgcagttatgagcaagctagttatgtagcaagctagcygatgtgcttacctaaattttaccactttgcagcactaagctagaagtcatatctaaactattaccaagcagaaagaagaaaacatattcagaactgttaactttggggcaaagatagaatagagatgacaatatagtgatttttttcattagttcttcatttttgttattttatttctagataaatgtagtattgagagaagactgtcggcgctctgccatagcaccgcaaccgtgtgagcagcaggctcatcccgtggaccggtggtgggaacgtgaggtgatgcctttgggattacagcttgagttctgtcaccccatccccaggaaactgtagcttcttaactggtgactaccaaagaacaagcagtgatttgaaaaaggaaaaacaatccaaaaactacatatttgtaggaaatctgccttattggagaaaatcaccctttccctttttctttgtagaagcaggagcaagagtgtttggctcccagtttggacttggtgaataaatgtaccttagaactaggataatcggtacagttattcttaaagataattaaaaatgaaacaaagtgagtgctcgtcactgggttcatcagagcagtgtgtgaaattccatgtgtttgctgaggtgtaaaggtaaatgtattcacccctcatccaggcagtttgatatttggagtaagt

SEQ ID NO: 55416 - DNA, 1352 bp, Homo sapiens
agacttggttccactgattctctgctgctccacttgggacaagtctttttttttttgagacggagtctggctctgtcgcccaggctggagtgcggtggcrcgatctcagaacactgcaacctccgcctcctgggttcaagagattctccttcctcagcctgctgagtagctgggattacaggtgcccgccaacacgcccggctaatttttgtaattttatttttattttatttttttttttttttgagacggagtctggctctctcgcccaggctggagtgccctggcgcgatctcaactcactgcaagctccacctcccgggttcacgccattctcctgcctcagcctccggagcagttgggactacaggcgcccgccatcgtgcccggctaattttttgtattcttagtagagacgggggtttcaccgtgtgagccaggatggtctcgatctcctgaccttgtgatctgcccgcctcggcctcccaaagtgccgggattacaggcgtgagccactgcgcccagcctgggacaagtcttttaacctcttggagcttgggtctcccctgatctagaacgggtacaggagttatataattggcctgccatggtggctcatgcctgtaatcccagcactttgggaggccgaggtgagaggattgtttgatcccaggagtccaagaccagcctgggcaatgtgctgaaaccctatctctataaaaaattttaaaaattaggccaggtgcggtggctcaagcctgtaatcccaacattttaggaggccaaggtgggcagatcacttgagctcaggagttcgagaccagcctgcccaacatggtgaaaacccatctctactaaaaatacaaaaatagctgggcgtggtggctgtgcctgtaatcccagctacttgggaggctgaggcaggagaatctcttgaacctgggagggctgaggttgcagtgagctgagatcgcaccactgcactccagcctgggcgacagagcgaagatccgtctcaaaaaccagaacaaaacaaaacccaaggctcaaacagccaaggggtccacggccccggctgcccacggtgatgcaggtcacacactgttttatgaaaactagactgaaaatgggcgggaggggtaaaagaggtcaagacacagaacctagaaaggaaggaggagagataaggggcagacgactcggggagataaagggttgaggagagataagaacctcaattccttcctctctgtttggcacgttcccacttagagtcctcctggcacgttcccctttagagtcctctgagggaaatgaaagatgactttttgaaatattagcctagggaccag

SEQ ID NO: 55417 - DNA, 1352 bp, Homo sapiens
agacttggttccactgattctctgctgctccacttgggacaagtctttttttttttgagacggagtctggctctgtcgcccaggctggagtgcggtggcacgatctcagaacactgcaacctccgcctcctgggttcaagagattctccttcctcagcctgctgagtagctgggattacaggtgcccgccaacacgcccggctaatttttgtaatyttatttttattttatttttttttttttttgagacggagtctggctctctcgcccaggctggagtgccctggcgcgatctcaactcactgcaagctccacctcccgggttcacgccattctcctgcctcagcctccggagcagttgggactacaggcgcccgccatcgtgcccggctaattttttgtattcttagtagagacgggggtttcaccgtgtgagccaggatggtctcgatctcctgaccttgtgatctgcccgcctcggcctcccaaagtgccgggattacaggcgtgagccactgcgcccagcctgggacaagtcttttaacctcttggagcttgggtctcccctgatctagaacgggtacaggagttatataattggcctgccatggtggctcatgcctgtaatcccagcactttgggaggccgaggtgagaggattgtttgatcccaggagtccaagaccagcctgggcaatgtgctgaaaccctatctctataaaaaattttaaaaattaggccaggtgcggtggctcaagcctgtaatcccaacattttaggaggccaaggtgggcagatcacttgagctcaggagttcgagaccagcctgcccaacatggtgaaaacccatctctactaaaaatacaaaaatagctgggcgtggtggctgtgcctgtaatcccagctacttgggaggctgaggcaggagaatctcttgaacctgggagggctgaggttgcagtgagctgagatcgcaccactgcactccagcctgggcgacagagcgaagatccgtctcaaaaaccagaacaaaacaaaacccaaggctcaaacagccaaggggtccacggccccggctgcccacggtgatgcaggtcacacactgttttatgaaaactagactgaaaatgggcgggaggggtaaaagaggtcaagacacagaacctagaaaggaaggaggagagataaggggcagacgactcggggagataaagggttgaggagagataagaacctcaattccttcctctctgtttggcacgttcccacttagagtcctcctggcacgttcccctttagagtcctctgagggaaatgaaagatgactttttgaaatattagcctagggaccag

SEQ ID NO: 55418 - DNA, 1332 bp, Homo sapiens
ttaggagaagagatgtgtgttatgttaggaaatttacaaagagctccctgtccccagctcctgtgcagtcagcaaaacggaggaaatcccaacacaggcatgagaaatgctttcttccttttctctcgacctacggaaacacaacaagagtttgatcaaattcatctaaactaggcagagtctaagtgagatgccagtggctggtgcagttcccattccaagggaccccaccttatgacaatggtgtcatcatgaggacacaggtgtatgtggaatggacagcaaacccatcagacagcacctgcctaggccgctgcacctggaggaggtcccrggaatgactggaggaccttagccccacagcaagatgaggatggagttggtagtaaaatgggtggaatgaacccatgggctttggggactgcacacttgtcctgcctctggccccctggtgagtcagtgtagagagcagatagaggagttgctcatccctgtcccatggccaagcatttacacagtcatgagactcaacacctgggtggcttcttttttttttaagatccagggatcttgctatgttgcccaggctggtcttgaactcctggctcaagacaccctcctgtctcagtctcccactggggtggctttaggggcaggggatgagagagggggaacatgggtctcagccccttggagggacagggaacaggtgccagagcctcctaggatcctgcatcaggttccagtctctgaagagattatggatcattcattccttcattcattccctccctccttcatgagagaactactgagcgagtgtgtttctcactttgggccctggcatgtgcagggtgtgagtggggagagaaagcaaagtcttctcctttatcctcctgtgggagtgacaccaacacatcaggaaacacaggatttcaggtccagtgagggtaggagtgtgaatctaagggagaggcctggacattcccagcactgactctgatagttgaggcaagagattcagttctaggtaaaaactaattctctatttgttcctcactccctagaccagaatctcccacttctggcttggatgcctaggaagcaagctctgtggctacaaagacctggggactctgatgtgactgtccggtccgtgagaccctgcctcagtggctgtatttccttctgcctcagtttcctttaacaaaatgagataaagcgtaaatggtctctggcttgccttgctgtctgttaattcatcttaaaataatcacaattacctggatgagagccctctgtagaagagctgcccaaacaagcaggatctct

SEQ ID NO: 55419 - DNA, 1332 bp, Homo sapiens
ttaggagaagagatgtgtgttatgttaggaaatttacaaagagctccctgtccccagctcctgtgcagtcagcaaaacggaggaaatcccaacacaggcatgagaaatgctttcttccttttctctcgacctacggaaacacaacaagagtttgatcaaattcatctaaactaggcagagtctaagtgagatgccagtggctggtgcagttcccattccaagggaccccaccttatgacaatggtgtcatcatgaggacacaggtgtatgtggaatggacagcaaacccatcagacagcacctgcctaggccgctgcacctggaggaggtcccgggaatgactggaggaccttagccccacagcragatgaggatggagttggtagtaaaatgggtggaatgaacccatgggctttggggactgcacacttgtcctgcctctggccccctggtgagtcagtgtagagagcagatagaggagttgctcatccctgtcccatggccaagcatttacacagtcatgagactcaacacctgggtggcttcttttttttttaagatccagggatcttgctatgttgcccaggctggtcttgaactcctggctcaagacaccctcctgtctcagtctcccactggggtggctttaggggcaggggatgagagagggggaacatgggtctcagccccttggagggacagggaacaggtgccagagcctcctaggatcctgcatcaggttccagtctctgaagagattatggatcattcattccttcattcattccctccctccttcatgagagaactactgagcgagtgtgtttctcactttgggccctggcatgtgcagggtgtgagtggggagagaaagcaaagtcttctcctttatcctcctgtgggagtgacaccaacacatcaggaaacacaggatttcaggtccagtgagggtaggagtgtgaatctaagggagaggcctggacattcccagcactgactctgatagttgaggcaagagattcagttctaggtaaaaactaattctctatttgttcctcactccctagaccagaatctcccacttctggcttggatgcctaggaagcaagctctgtggctacaaagacctggggactctgatgtgactgtccggtccgtgagaccctgcctcagtggctgtatttccttctgcctcagtttcctttaacaaaatgagataaagcgtaaatggtctctggcttgccttgctgtctgttaattcatcttaaaataatcacaattacctggatgagagccctctgtagaagagctgcccaaacaagcaggatctct

SEQ ID NO: 55420 - DNA, 1332 bp, Homo sapiens
ttaggagaagagatgtgtgttatgttaggaaatttacaaagagctccctgtccccagctcctgtgcagtcagcaaaacggaggaaatcccaacacaggcatgagaaatgctttcttccttttctctcgacctacggaaacacaacaagagtttgatcaaattcatctaaactaggcagagtctaagtgagatgccagtggctggtgcagttcccattccaagggaccccaccttatgacaatggtgtcatcatgaggacacaggtgtatgtggaatggacagcaaacccatcagacagcacctgcctaggccgctgcacctggaggaggtcccgggaatgactggaggaccttagccccacagcaagaygaggatggagttggtagtaaaatgggtggaatgaacccatgggctttggggactgcacacttgtcctgcctctggccccctggtgagtcagtgtagagagcagatagaggagttgctcatccctgtcccatggccaagcatttacacagtcatgagactcaacacctgggtggcttcttttttttttaagatccagggatcttgctatgttgcccaggctggtcttgaactcctggctcaagacaccctcctgtctcagtctcccactggggtggctttaggggcaggggatgagagagggggaacatgggtctcagccccttggagggacagggaacaggtgccagagcctcctaggatcctgcatcaggttccagtctctgaagagattatggatcattcattccttcattcattccctccctccttcatgagagaactactgagcgagtgtgtttctcactttgggccctggcatgtgcagggtgtgagtggggagagaaagcaaagtcttctcctttatcctcctgtgggagtgacaccaacacatcaggaaacacaggatttcaggtccagtgagggtaggagtgtgaatctaagggagaggcctggacattcccagcactgactctgatagttgaggcaagagattcagttctaggtaaaaactaattctctatttgttcctcactccctagaccagaatctcccacttctggcttggatgcctaggaagcaagctctgtggctacaaagacctggggactctgatgtgactgtccggtccgtgagaccctgcctcagtggctgtatttccttctgcctcagtttcctttaacaaaatgagataaagcgtaaatggtctctggcttgccttgctgtctgttaattcatcttaaaataatcacaattacctggatgagagccctctgtagaagagctgcccaaacaagcaggatctct

SEQ ID NO: 55421 - DNA, 1332 bp, Homo sapiens
ttaggagaagagatgtgtgttatgttaggaaatttacaaagagctccctgtccccagctcctgtgcagtcagcaaaacggaggaaatcccaacacaggcatgagaaatgctttcttccttttctctcgacctacggaaacacaacaagagtttgatcaaattcatctaaactaggcagagtctaagtgagatgccagtggctggtgcagttcccattccaagggaccccaccttatgacaatggtgtcatcatgaggacacaggtgtatgtggaatggacagcaaacccatcagacagcacctgcctaggccgctgcacctggaggaggtcccgggaatgactggaggaccttagccccacagcaagatgaggatggagttggtagtaaaatgggtggaatgaacccatgggctttggggactgcacacytgtcctgcctctggccccctggtgagtcagtgtagagagcagatagaggagttgctcatccctgtcccatggccaagcatttacacagtcatgagactcaacacctgggtggcttcttttttttttaagatccagggatcttgctatgttgcccaggctggtcttgaactcctggctcaagacaccctcctgtctcagtctcccactggggtggctttaggggcaggggatgagagagggggaacatgggtctcagccccttggagggacagggaacaggtgccagagcctcctaggatcctgcatcaggttccagtctctgaagagattatggatcattcattccttcattcattccctccctccttcatgagagaactactgagcgagtgtgtttctcactttgggccctggcatgtgcagggtgtgagtggggagagaaagcaaagtcttctcctttatcctcctgtgggagtgacaccaacacatcaggaaacacaggatttcaggtccagtgagggtaggagtgtgaatctaagggagaggcctggacattcccagcactgactctgatagttgaggcaagagattcagttctaggtaaaaactaattctctatttgttcctcactccctagaccagaatctcccacttctggcttggatgcctaggaagcaagctctgtggctacaaagacctggggactctgatgtgactgtccggtccgtgagaccctgcctcagtggctgtatttccttctgcctcagtttcctttaacaaaatgagataaagcgtaaatggtctctggcttgccttgctgtctgttaattcatcttaaaataatcacaattacctggatgagagccctctgtagaagagctgcccaaacaagcaggatctct

SEQ ID NO: 55422 - DNA, 1332 bp, Homo sapiens
ttaggagaagagatgtgtgttatgttaggaaatttacaaagagctccctgtccccagctcctgtgcagtcagcaaaacggaggaaatcccaacacaggcatgagaaatgctttcttccttttctctcgacctacggaaacacaacaagagtttgatcaaattcatctaaactaggcagagtctaagtgagatgccagtggctggtgcagttcccattccaagggaccccaccttatgacaatggtgtcatcatgaggacacaggtgtatgtggaatggacagcaaacccatcagacagcacctgcctaggccgctgcacctggaggaggtcccgggaatgactggaggaccttagccccacagcaagatgaggatggagttggtagtaaaatgggtggaatgaacccatgggctttggggactgcacacttgtcctgcctctggccccctggtgagtcagtgtagagagcagatagaggagttgctcatccctgtcccatggccaagcatttacacagtcatgagactcaacacctgggtggcttcttttttttttaagatccagggatcttgctatgttgcccaggctggtcttgaactcctggctcaagacaccctcctgtctcagtctcccactggggtggctttaggggcaggggatgagagaggkggaacatgggtctcagccccttggagggacagggaacaggtgccagagcctcctaggatcctgcatcaggttccagtctctgaagagattatggatcattcattccttcattcattccctccctccttcatgagagaactactgagcgagtgtgtttctcactttgggccctggcatgtgcagggtgtgagtggggagagaaagcaaagtcttctcctttatcctcctgtgggagtgacaccaacacatcaggaaacacaggatttcaggtccagtgagggtaggagtgtgaatctaagggagaggcctggacattcccagcactgactctgatagttgaggcaagagattcagttctaggtaaaaactaattctctatttgttcctcactccctagaccagaatctcccacttctggcttggatgcctaggaagcaagctctgtggctacaaagacctggggactctgatgtgactgtccggtccgtgagaccctgcctcagtggctgtatttccttctgcctcagtttcctttaacaaaatgagataaagcgtaaatggtctctggcttgccttgctgtctgttaattcatcttaaaataatcacaattacctggatgagagccctctgtagaagagctgcccaaacaagcaggatctct

SEQ ID NO: 55423 - DNA, 664 bp, Homo sapiens
tagagctggccccatgattgacaggaaggcaggacttggcctccattctgaagactaggggtgtcaagagagctgggcatcccacagagctgcacaagatgacgcggacagagggtgacacagggctcagggcttcagacgggtcgggaggctcagctgagagttcagggacagacctgaggagcctcagtgggaaaagaagcactgaagtgggaagttctggaatgttctggacaagcctgagtgctctaaggaaatgctcccaccccgatgtagcctgcagcactggacggtctgtgtacctccccgctgcccatcctctcacagcccccgcctctagggacacaactcctgccctaacrtgcatctttcctgtctcattccacacaaaagggcctctggggtccctgttctgcattgcaaggagtggaggtcacgttcccacagaccacccagcaacagggtcctatggaggtgcggtcaggaggatcacacgtccccccatgcccaggggactgactctgggggtgatggattggcctggaggccactggtcccctctgtccctgaggggaatctgcaccctggaggctgccacatccctcctgattctttcagctgagggcccttcttgaaatcccagggaggactcaacccccactgg

SEQ ID NO: 55424 - DNA, 664 bp, Homo sapiens
tagagctggccccatgattgacaggaaggcaggacttggcctccattctgaagactaggggtgtcaagagagctgggcatcccacagagctgcacaagatgacgcggacagagggtgacacagggctcagggcttcagacgggtcgggaggctcagctgagagttcagggacagacctgaggagcctcagtgggaaaagaagcactgaagtgggaagttctggaatgttctggacaagcctgagtgctctaaggaaatgctcccaccccgatgtagcctgcagcactggacggtctgtgtacctccccgctgcccatcctctcacagcccccgcctctagggacacaactcctgccctaacatgcatctttcctgtctcattccacacaaaagggcctctggggtccctgttctgcattgcaaggagtggaggtcacgttcccacagaccacccagcaacagggtcctatggaggtgcggtcaggaggatcacacgtccccccatgcccaggggactgactctgggggtgatggattggcctggaggccactggtcccctctgtccctgaggggaayctgcaccctggaggctgccacatccctcctgattctttcagctgagggcccttcttgaaatcccagggaggactcaacccccactgg

SEQ ID NO: 55425 - DNA, 1511 bp, Homo sapiens
agaggaatgaaaacactggagagagagagaagaagaaaagaataaggagaaatcattcttcctggtctcctgatggctttcctgttcctgattcctgttcttcagttccatgagacactccagctgccttataataaatcaccctttatttatttatttatttatttttttgctaaagttggcttgagtgaagttctgatacttacaacaaaagaaatctaaataatactaagagatataactaccctccttttccaatgaggaaaccgagagtcaatggggtgaagtaacttgcccaaggtcaaatggctttcctccccaggtttatttcactcccaagaccaggacctttccacagagctgatgaggacaagaaatgtctaagctgacagcagcctgaattatgagggcacgctgccttgctgatcttctctctctgcaagaagtcatctaataagaatctcattcctcatttatttgtttttcctgtgctttcttataattcgtcttcccatttttctggtcaggaggaaaaccctgcctccagccacagccctgaaaatctctgagttatggtgggttgatgagagagggatttggaaacgagattttgattctcctcctctccgatctgaggccaggcagcatgcttgctgtttaaccgctgttaattaattgtgtactatgagattaaatatatctattaggctactagcctttaccatcatcattacaagtccatgaatgttaaaatgtacaggaggaattgtgaagatttactgacatcaaaagttcttctggaaacaaactttgtaaaaaaaaaaaaagatgtattaaattattttaattgtgggaaaaaaaaagcaagtggcaaattttagtcttgtcagtcttccaaagatcaacacactctagcttcccttccaccttgtctcatacacaggcatttctgagatgaaagaagtgggccctgccattgaacagaatttatgcatttaaatattcatcatttctgtgaaaaagagaagaaagtaagtatcacccataaacctataatcttagygccatccgtgtttgaaatttggtacatttttttccccatcctttttcttatgcatcagtttcattcagaggtgttgtcaaatgtctatttaatttctaacatgcttttaaaaaacttaacatgacagtattagcattttccacactgctgcctgtttttttacacccataaatgtaaggacaggcaaaatttaagattgtagtgtaattatggtggacattcgcatgctgtatgtagccttcctctctccaaaggccaatacgcttattattaggagatgagccaaatattccttctccccactccacagaagccaggacaggggaacaggatgtaagttcagccacataatgctttaagcctagtgagaggagtgcaaaggtacaggaagatgaaaaatgattccgtgtagaggtggcactgagggtgtgtcaatggctgctgggtg

SEQ ID NO: 55426 - DNA, 1491 bp, Homo sapiens
cacatgccccaaactctgctttgaagcccaattctcaccacgtggcatgactgtcccagctggccaccttcctggaattcagcccaaatcagtacttttgggaacttcctgcaaggtttcaaagaagcttttctgacacacagccaccatggagggtgttccagtccccggaccctgctgtggacatgaggacacccatcccccaccagccgagccagctgcaaaggcctcataatccagcccyggccacccagaaggacagtgagcacagcctatctgagaatggtatttgaatctttaagaaaatgagactgactccaaaatctaaaactacctttattgtggttggctcgacataagatgccgccatcagcagaattataaaactgtacaggaggcacaaaaataggctgtttaacttagataatgaccctcatgtcttcaagctttaaaaatgcacataaaagttgtacaatctggcagtttataaaatataaagctaaaaagaggattttgggttccacaaagaagactgtatcacacaattaacacgtactaattaaacaattaaccatccacacagaagacataatggcacagaattcttaaaaatcacctaaaaattaacattttaccccgaccaaattaatcaccctttaataataagactactgtaaagcatccatcccatggaaggatacagtatcacttttccagttttaaaatggtcaagggtgttgtccaaaacaaatctgatgtgctttaagcaagtacaattgtaactggatacatttcagagtaaaaattaaataaatataaataggttaaataaataggtcattgcaaaaagaacactacacaaggtttacatctgagaatgcagagtaggtgactggtaatgctttctaggtaagtggggactccccatcacagctttagggacactgaaaaggaatactgtatccaccaaacacacacacagtacacaggggaggtgggggggctttggccaaagtgttggttaaggctgctccagtgggaggctcactgcagtcacgttctttgtggctttccaacgtctacagaaagaatttaagcgccggtacaaaaaatcagaaccagagttactcacgggaaatcactgtttcataaagaaggaggggagtagaccattgggtttaaaagatgatgtccaacctgggagggtggaatttcggctcacctggagaggatgcctgatgacttcctgccaggagaagccaaagccaggacatagtcaaccaaaataactccaggttggtgagggaagggacaaggaaaagaaacactgggaaattcaaagaaaggcaatctcagacactaaaagagcagagagagaaagcgacatgggggacttaaagaggctccttccagggcgctgggcttctcttccagcacagaaggctgcaaaagtggaactggcccccagttcccagaggatcacaaggccaa

SEQ ID NO: 55427 - DNA, 664 bp, Homo sapiens
tgggttcccacaagggcgtgactaattcctcatcctttctccccaccaacaaaaaatggagcagagaataattttcagttccctgcagtggcctctaggagtgactgctgtatcctctctggggacatctgagctgggatggaaagtcctgtgactgaacaggagccctgaccctgggggtctcacacccctcagtcaaggggaaacacatctcttggcttggtggcaaccatagccatggcttgcttccattcattcataccttaggttaaaccccatggctctctaccaggtcctgagcttcaacttctcttcatatgtccatcctctctgtctttagagtcttctctctccacctcaactcttctttaccctcctttctccatttttgtgtctgctcctctttcctcatcttcctggttctctttcactctaatctccttgccatgtcacataagaggactttgattatcttcctccatgcctgtcccgtcactgaaaacactatacctgatctttttttcatatgattggtggctacatgtatgtgttcttttgaaaagaagacatgtcctttgctcactctttatggagttgttgctttttttcttgtacatttgtttaagttccttacagatgcraatattagacctttgtcagatgc

SEQ ID NO: 55428 - DNA, 700 bp, Homo sapiens
gagacatggaatcaacctaaatgcccatcagtgatagaatggataaataaaatgtgggacatatacaccatggaatactatgcagccataaaaaagagaacgagattgtgtcctttgcaggaacatgggtggagctggaggccattatcctgagcaaactaacacagaaacagaaaaacaaataccgtatgctctcacttataagtgggagctaaatgatgagaacacatggacacatataggggaacaacagacactggggcctgtcggagggtggagggtgggtagagggagaggatcaagaaaaataactaatgggtagtaggcttactacctgggtgatgaagtaatttgtacaacaaaaccccatgacacaagtccacttatgtaacaaacctacacatgcaccccttaatttaaaataaaarttaaaaaaaagaaaacactatacctgaaatctgtttcccttcattcccttctaggaatgtctagacagcagagctaacatgcctcttaattgagatgaaggtgcactttgggaatcttgactcccaggacaggtttctttctcctcctccatctgaattcaagactctttactataatgtcatgaccatgtgttgcgcttttcctgggtaaatatgatacctggccccaggatactttgatgataaagatcttgcagtttggcaggaagaga

SEQ ID NO: 55429 - DNA, 861 bp, Homo sapiens
gaatggcatttttgatagtccaaaatgtaaaggctgcattacttatgatttgctcaaaacagtatatttaatcagtgtactttagcccctaaaatattataaatgcaaaaatatttcttttatgtgtgctgacaaggctaaatattagaaaaatgttttttaaaatcagattttactcacacaattagtttttatttttatttttcatgatcacataaataatagtatgggtactactaggtgattaaaattaaaactagaatatctctgtaattagacccattgttctgccttccactgctttccagagctttaaagggtacagttctaggaaaaatagtaggaagagctaatttttccagtgagtattgaatatacgaaaacacattgtctttaaagtttgtactgctaaggtttgaatttagcaaaatagggatttagataaatgaatgaggatatgcaaggaaatgtccttaagtgcatttcagaaaacatttaagaagtttgtttcaagaatgttctactggcgagtcctcagcttcttgctgtgactgcagtctaaggctgtgctagacactgtcaacatgtcgagatccatggaacatgtgatattcatgaaataatagaaatgaagktcagatttaaacttcaatcaatagccagtattgatcctcatggatatttctgagaagagaaaatttctactttctctatgagggtagtaaaaggtcacctttttctgaatgagaaaaaataaattcccagtgggctttgtattttcagtggaggggcttctatatgcccctttctgcttgctttgactttggccatgtggaagagagatgaggcagcacttccagg

SEQ ID NO: 55430 - DNA, 861 bp, Homo sapiens
gaatggcatttttgatagtccaaaatgtaaaggctgcattacttatgatttgctcaaaacagtatatttaatcagtgtactttagcccctaaaatattataaatgcaaaaatatttcttttatgtgtgctgacaaggctaaatattagaaaaatgttttttaaaatcagattttactcacacaattagtttttatttttatttttcatgatcacataaataatagtatgggtactactaggtgattaaaattaaaactagaatatctctgtaattagacccattgttctgccttccactgctttccagagctttaaagggtacagttctaggaaaaatagtaggaagagctaatttttccagtgagtattgaatatacgaaaacacattgtctttaaagtttgtactgctaaggtttgaatttagcaaaatagggatttagataaatgaatgaggatatgcaaggaaatgtccttaagtgcatttcagaaaacatttaagaagtttgtttcaagaatgttctactggcgagtcctcagcttcttgctgtgactgcagtctaaggctgtgctagacactgtcaacatgtcgagatccatggaacatgtgatattcatgaaataatagaaatgaaggtcagatttaaacttcaatcaatagccagtattgatcctcatggatatttctgagaagagaaaatytctactttctctatgagggtagtaaaaggtcacctttttctgaatgagaaaaaataaattcccagtgggctttgtattttcagtggaggggcttctatatgcccctttctgcttgctttgactttggccatgtggaagagagatgaggcagcacttccagg

SEQ ID NO: 55431 - DNA, 531 bp, Homo sapiens
ccaccagcatttgagtcttggaggttccacatagggctatcaggtctctgctgatcactgaaaccagatcatggccaactagccccttggcttcagccctcccaattcattaactactcaggtaaatctagggtcactttcaactctaccacctaccatctgagtgaccttgaaaacattcatctctctgagcctcaggtcccatgtctgyaaagcaggggcctcatggacttctttgggtttttttgtttttgtttttgtttctgaggattaaacaaatgctccctaccctatttcccagcatccagtaacacagtttttcatatttttgtgtatgttaagtcaggacccatctctttaatgataagtgcacttaatgtggtcatgttttcttttgtcttccaaagctgttagtgaatccattgaatttgggatgggtaaaataaagtatctattattaattgtaaatttcatctaaagtgacaaatcctacctgcataaccatttcttaatttcctttcatcatgtatc

SEQ ID NO: 55432 - DNA, 475 bp, Homo sapiens
ttggaaattcctctggctgctaataccagagactcaactcagtaatgtaagcaagctagggacttattcagccatggaaaaaaagtccagaggcagctagctgaggtgccttcaagaagagggtcagggactcartctcttctcctgtgcttcaccagccttggtgctgattcttctccagggtcataagatgacttctggagactgagccatcacattcaaattggaggtgggaagaagagaaaggagcaaaagggccgaccaccccggccaagtcagcttctccactcccagaagtcactcccagacacacccattaggactgctgctgtcaaaaaaaactgaaaatcataagggttggcaatgacatggagaaattggaacccttgtgcactatgggtgggagtgtaaaatggtgcagccaccgtgggaaatggtatggcagttcctaaaaacgttaatgataggattaccc

SEQ ID NO: 55433 - DNA, 1252 bp, Homo sapiens
cgtgacacaatcaacmtgctaggagatccctgccaccctgagaggctgcaggaagctgcctccatccaggcctcttcacagaaggagaattgcagagaccgtaggatttttctactcacaggaacagatggtgtccggtcaggaaggtaaaatgcttcaagaaaagtgcaatagggattataatactgatgatctgagactctgataatgactctgagatgattcccaattctatgatgaatcatctcagaatgactccgagatgatgattcctgattctacgatgattgaggcagagctcactggttggtgaatctagttggtagagctgaggcaccgcaataccatcatttctttctgaggtgagagctgtcccaatgctttgaaaatggtctactggctgctctacctgtggagtagccattctttattcctttactttcctaatagacttgctttcacggctgggtgtggtgactcatgcctgtaatcccaacacttcgggaggtggaggtgggcagatcacttgaggtcaggagttcaagaccagcctggtcaacatggtgaaatgccatctctactaaaaatacaaaaattcgccgggtgtggtggcacatgcctgtaatcccagctactcaggaggctgaggcaggagaatggcttgaacccgggaggtgaaggttgcagtgaaccgagattgtgccactgtaccccagcctgggtgacagagtgagactctgtctaaaaaacaaaataaaacaaaaacaaaaacaaacaaactaaacttgccttcattttaaaaaaatggtccacatctcttcatttatgttcttgcctcatagatagaatacacacttatcctcagacagggattatggattttcccatccatgcaagtgacttagagaatgccagccttttgccatggtgccaaagggtagttgactcagtgagtccttttaggaaagtggagctaagtgtacttgtgtggtggaaaaagcaggtttttttgtttttttggccaggcacatttagatgcaaatgtccgtgctgccagttaccagctgtgtgagtttagacaaggtacttgaatttgagtgtgattatgtgtaaaatgaagtgaataataatagcttcctcctcctagggttgtaaatactaaatgatgttgtaaagccctttgtagagtgcctagaatataacaggcaccctctaaatgtttgttcctttctggctacctggcgatataagg

SEQ ID NO: 55434 - DNA, 1252 bp, Homo sapiens
cgtgacacaatcaacctgctaggagatccctgccaccctgagaggctgcaggaagctgcctccatccaggcctcttcacagaaggagaattgcagagaccgtaggatttttctactcacaggaacagatggtgtccggtcaggaaggtaaaatgcttcaagraaagtgcaatagggattataatactgatgatctgagactctgataatgactctgagatgattcccaattctatgatgaatcatctcagaatgactccgagatgatgattcctgattctacgatgattgaggcagagctcactggttggtgaatctagttggtagagctgaggcaccgcaataccatcatttctttctgaggtgagagctgtcccaatgctttgaaaatggtctactggctgctctacctgtggagtagccattctttattcctttactttcctaatagacttgctttcacggctgggtgtggtgactcatgcctgtaatcccaacacttcgggaggtggaggtgggcagatcacttgaggtcaggagttcaagaccagcctggtcaacatggtgaaatgccatctctactaaaaatacaaaaattcgccgggtgtggtggcacatgcctgtaatcccagctactcaggaggctgaggcaggagaatggcttgaacccgggaggtgaaggttgcagtgaaccgagattgtgccactgtaccccagcctgggtgacagagtgagactctgtctaaaaaacaaaataaaacaaaaacaaaaacaaacaaactaaacttgccttcattttaaaaaaatggtccacatctcttcatttatgttcttgcctcatagatagaatacacacttatcctcagacagggattatggattttcccatccatgcaagtgacttagagaatgccagccttttgccatggtgccaaagggtagttgactcagtgagtccttttaggaaagtggagctaagtgtacttgtgtggtggaaaaagcaggtttttttgtttttttggccaggcacatttagatgcaaatgtccgtgctgccagttaccagctgtgtgagtttagacaaggtacttgaatttgagtgtgattatgtgtaaaatgaagtgaataataatagcttcctcctcctagggttgtaaatactaaatgatgttgtaaagccctttgtagagtgcctagaatataacaggcaccctctaaatgtttgttcctttctggctacctggcgatataagg

SEQ ID NO: 55435 - DNA, 1252 bp, Homo sapiens
cgtgacacaatcaacctgctaggagatccctgccaccctgagaggctgcaggaagctgcctccatccaggcctcttcacagaaggagaattgcagagaccgtaggatttttctactcacaggaacagatggtgtccggtcaggaaggtaaaatgcttcaagaaaagtgcaatagggattataatactgatgatctgagactctgataatgactctgagatgattcccaattctatgatgaatcatctcagaatgactccgagatgatgattcctgattctacgatgattgaggcagagctcactggttggtgaatctagttggtagagctgaggcacygcaataccatcatttctttctgaggtgagagctgtcccaatgctttgaaaatggtctactggctgctctacctgtggagtagccattctttattcctttactttcctaatagacttgctttcacggctgggtgtggtgactcatgcctgtaatcccaacacttcgggaggtggaggtgggcagatcacttgaggtcaggagttcaagaccagcctggtcaacatggtgaaatgccatctctactaaaaatacaaaaattcgccgggtgtggtggcacatgcctgtaatcccagctactcaggaggctgaggcaggagaatggcttgaacccgggaggtgaaggttgcagtgaaccgagattgtgccactgtaccccagcctgggtgacagagtgagactctgtctaaaaaacaaaataaaacaaaaacaaaaacaaacaaactaaacttgccttcattttaaaaaaatggtccacatctcttcatttatgttcttgcctcatagatagaatacacacttatcctcagacagggattatggattttcccatccatgcaagtgacttagagaatgccagccttttgccatggtgccaaagggtagttgactcagtgagtccttttaggaaagtggagctaagtgtacttgtgtggtggaaaaagcaggtttttttgtttttttggccaggcacatttagatgcaaatgtccgtgctgccagttaccagctgtgtgagtttagacaaggtacttgaatttgagtgtgattatgtgtaaaatgaagtgaataataatagcttcctcctcctagggttgtaaatactaaatgatgttgtaaagccctttgtagagtgcctagaatataacaggcaccctctaaatgtttgttcctttctggctacctggcgatataagg

SEQ ID NO: 55436 - DNA, 1115 bp, Homo sapiens
ttgtgactgttttctttgtcccaatacaggaagaaattcgatacatgacctataagacctctgaattattctaccaagtctccactctgccctacttttttttttcgaacggtgtatttatctgtatacctggctttaaaattcacagcatcacgccccatattctgctttctccggtttcagctactcttcctacaggccaaagaatgtctgtactctgatttctgcttagcaatgtttacttcatttacaaaatcaagacagttctagtaacaagggaagattattctaaggttagcatttttttttttttttttttgagaaggagtcttgctctgtcgcccagcatggagtgcagtggcatgatctcggctcactgcaacctccacctcccgggttcatgccattctcctgcctcagcctcccgagtagctgggactacaggcacccaccaccatgcccggctaatttttttttttttgtattttagtagagacggatttcaccatgttagccaggatggtctccatctcctgacctcgtgatctgcccgcctcagcctcccaaagtgctgggattacaggcgtgagccactgcgcccggccagcatttttttcaactctaaccatcaactcaacataaaaacatatatatatacttactgtttcactaccaggtttccagccagcagggcagactaaaagaaacaaaaagaggcagaagacattttaaaaacagaattcagttaccttcagcaactgactttttctgtttctatatgaaactgaatagaatatactaataagaacatttccagaccacygagcacatgacttctattagctgcctgttgacaccaaggaattttagtcatggagctcataagcaggcagctaatctattttcatttttaccaattatgtttagttacatttaaaatataagaaatcaaattgattgcccctctaatacagttggaaagtttgggaatctggtgagctgaaaggcctgggcatggcaaaaattcctccaaatttacataaacttccagtacgcttgtttgccatgtatactgcagtactttgtactgatgacatgattcactgtttgtcaaa

SEQ ID NO: 55437 - DNA, 1115 bp, Homo sapiens
ttgtgactgttttctttgtcccaatacaggaagaaattcgatacatgacctataagacctctgaattattctaccaagtctccactctgccctacttttttttttcgaacggtgtatttatctgtatacctggctttaaaattcacagcatcacgccccatattctgctttctccggtttcagctactcttcctacaggccaaagaatgtctgtactctgatttctgcttagcaatgtttacttcatttacaaaatcaagacagttctagtaacaagggaagattattctaaggttagcatttttttttttttttttttgagaaggagtcttgctctgtcgcccagcatggagtgcagtggcatgatctcggctcactgcaacctccacctcccgggttcatgccattctcctgcctcagcctcccgagtagctgggactacaggcacccaccaccatgcccggctaatttttttttttttgtattttagtagagacggatttcaccatgttagccaggatggtctccatctcctgacctcgtgatctgcccgcctcagcctcccaaagtgctgggattacaggcgtgagccactgcgcccggccagcatttttttcaactctaaccatcaactcaacataaaaacatatatatatacttactgtttcactaccaggtttccagccagcagggcagactaaaagaaacaaaaagaggcagaagacattttaaaaacagaattcagttaccttcagcaactgactttttctgtttctatatgaaactgaatagaatatactaataagaacatttccagaccactgagcacatgacttctattagctgcctgttgacaccaaggaattttagtcatggagctcataagcaggcagctaatctattttcatttttaccaattatgtttagttacatttaaaatataagaaatcaaattgattgcccctctaatacagttggaaagtttgggaatctggtgagctgaaaggcctgggcatggcaaaaattcctccaaatttacataaacttccagtacgcttgtttgccatgtatactkcagtactttgtactgatgacatgattcactgtttgtcaaa

SEQ ID NO: 55438 - DNA, 624 bp, Homo sapiens
atatttgttccttggaaacacagatttttctgcatttgctggtagttcaggttatgtccaagcatcccatttttattgttccttctgccaggaactgctctagccccagcctctagactttacttgtatgagtcaaatactatttcctgcaatccttaacctgcaggagataaaagccaagctttctgaagttttttgtcatttgcttgaggtaatggggaagcaatatttgttcctctctcattctagaagaagtcatctaccaggttgtgaggacatacaaacagcctttggagaggcccacgtgggaagaaacagatctctcattaactaccagcaccaccttgccagccttgtgactgtatctccttgaaagtagaccttccacctgcagtcaattttgatgttgcagccccagctgacatcttgactacagcctcacgagatgcactgggccagaacctcccagctccgccattccagaattcatgatctacacaaaccgtgagtttragaaatgtttgttattgtttaattttgcagttttggggaaatataattaatatacatacattttgctattttaaagtgtatagttcagtgatttttagtttattcattatt

SEQ ID NO: 55439 - DNA, 1505 bp, Homo sapiens
aaaaaataaaaaacaaaaaaaaatagccgggtgtggtggcgcaagcctgtagtcccagctactcaggaggctagggtaggagaatcgcttgaaccctagaggtggaggttgcagtgagctgagatcacaccactgtactcaagactgggtaacagagtgagactccatcttaaaaaaataaatgaataaataaaaaagaaatagccagttttagtaagaaagcagaacttgttctttccctgcaatcattgttggttattctctgatgaagaaatgttaaaattcaaaacatgggtcacagaaatcatagtaaaacaaatacaaactgtgactcaccccactcaaatggacatttgaggagtttagaataatgctgatgagtttcacagggcaaattgggagctcacatattctaaaaggtccagtgtgttaactatttgtttctgacattggcttgaaagtaataatscctcattttcagtatttctctatattctgtgtttgccacatgcatcgcctttttcaagaggctgtgtagtgtagtgaagtgactttccagatctgccatttactgtctgagggatcctggatcaagcatacagatcttctaagcctagttttctcacctgcactgtaagaaatagagcagcaccggccgggcgcggtggctcacgcccataatcccagcactttgagaggctgagatgggaggatcacaaggtcaaaagattgagaccatcctggctaacatggtgaaaccccatctctactaaaaacacaaaaattacctgggcgtagtggttcatgcttgtagtcccagctactcgggaggctgaagcaggagaatcgcttgaactggggaggcggaggtgcagtgagctgagattgtgccattgcactccagcctgggtaacagagtgagactctgtctcaaaaataaataaataaagaactggaacagcacctgttcaagaggtgaaacacacaaagcacgatgcctatccagagtccacagttatgaggatctgttattattcttcacgatagtcctatcaccagcttattttttaaccatgctcagaaacaagttgccagctctttagcatggcggcaataccctccatgctaacacctgcccatttatccatgagtaggtgtgactcttctattttcctacttactccttttaatcccaaaatttgggacaattcaggttctgcctgaggccatgctattccacgccttgtctggaagccactcctactgctgtctttggaacactgttactcatcctacaaggcctcaatcaagaatcttaggaggtcattggtgcctacctgcccatggcagagaccaccaacaccttctgagagctgccacagtgctgctttctaacatgtctacactagctcctcacagtgtgcggtgattgttgggtgaaagctctgtttctcatagtgaatgcatgccatctgcaaggggtatgcacatgcctttcttgtctt

SEQ ID NO: 55440 - DNA, 1505 bp, Homo sapiens
aaaaaataaaaaacaaaaaaaaatagccgggtgtggtggcgcaagcctgtagtcccagctactcaggaggctagggtaggagaatcgcttgaaccctagaggtggaggttgcagtgagctgagatcacaccactgtactcaagactgggtaacagagtgagactccatcttaaaaaaataaatgaataaataaaaaagaaatagccagttttagtaagaaagcagaacttgttctttccctgcaatcattgttggttattctctgatgaagaaatgttaaaattcaaaacatgggtcacagaaatcatagtaaaacaaatacaaactgtgactcaccccactcaaatggacatttgaggagtttagaataatgctgatgagtttcacagggcaaattgggagctcacatattctaaaaggtccagtgtgttaactatttgtttctgacattggcttgaaagtaataatgcctcattttcagtatttctctatattctgtgtttgccacatgcatcgcctttttcaagaggctgtgtagtgtagtgaagtgactttccagatctgccatttactgtctgagggatcctggatcaagcatacagatcttctaagcctagttttctcacctgcactgtaagaaatagagcagcaccggccgggcgcggtggctcacgcccataatcccagcactttgagaggctgagatgggaggatcacaaggtcaaaagattgagaccatcctggctaacatggtgaaaccccatctctactaaaaacacaaaaattacctgggcgtagtggttcatgcttgtagtcccagctactcgggaggctgaagcaggagaatcgcttgaactggggaggcggaggtgcagtgagctgagattgtgccattgcactccagcctgggtaacagagtgagactctgtctcaaaaataaataaataaagaactggaacagcacctgttcaagaggtgaaacacacaaagcacgatgcctatccagagtccacagttatgaggatctgttattattcttcacgatagtcctatcaccagcttattttttaaccatgctcagaaacaagttgccagctctttagcatggcggcaataccctccatgctaacacctgcccatttatccatgagtaggtgtgactcttctattttcctacttactccttttaatcccaaaatttgggacaattcaggttctgcctgaggccatgctattccacgccttgtctggaagccactcctactgctgtctttggaacactgttactcatcctacaaggcctcaatcaagaatcttaggaggtcattggtgcctacctgcccatggcagagaccaccaacmccttctgagagctgccacagtgctgctttctaacatgtctacactagctcctcacagtgtgcggtgattgttgggtgaaagctctgtttctcatagtgaatgcatgccatctgcaaggggtatgcacatgcctttcttgtctt

SEQ ID NO: 55441 - DNA, 753 bp, Homo sapiens
acgaggtcaggagatcgagaccatcctggctagcacggtgaaaaccccatctctactaaaaatacaaaaaattagccggtcgaggtggcaggcgcctgtagtcccagctactcgggaggctgaggcaggagaatggcgtgaacccgggaggcagatcttgcagttagctgagattgcaccactgcactccagcctgggtgacagagcaagactccgtctcaaaaaaaaaaaaawaaatatatatatatatatatatatatatatatttctatactaaaagtacactgattttttttaagttattccaaagttttgttgcctttgtgtttacaaaaggtggtttatttttataagattatttaaaataagtttaagttaaatttgtctctacatagtgttacttagctttatgaatatagcataaaatgagctattcatcgttttctttgactgttacgtcgatggaagtgtaaggcctaccttcccagcattatcaggtgttttttttttttttattgtttagcattatcagttttgaggccaatcaagatgattggcctagaagttaaatgcgaatgcatgtgtacatgctcctgttacctgtattgaagaatgctgtcattaactggcacccaggcagcaagtgtatgttgatgccattttggtgccgagtcctgttttctacaagggctacagagaaaagtacaacaaggcccggcgtggtggctcatgcctgtaatcccagcactttgg

SEQ ID NO: 55442 - DNA, 753 bp, Homo sapiens
acgaggtcaggagatcgagaccatcctggctagcacggtgaaaaccccatctctactaaaaatacaaaaaattagccggtcgaggtggcaggcgcctgtagtcccagctactcgggaggctgaggcaggagaatggcgtgaacccgggaggcagatcttgcagttagctgagattgcaccactgcactccagcctgggtgacagagcaagactccgtctcaaaaaaaaaaaaaaawatatatatatatatatatatatatatatatttctatactaaaagtacactgattttttttaagttattccaaagttttgttgcctttgtgtttacaaaaggtggtttatttttataagattatttaaaataagtttaagttaaatttgtctctacatagtgttacttagctttatgaatatagcataaaatgagctattcatcgttttctttgactgttacgtcgatggaagtgtaaggcctaccttcccagcattatcaggtgttttttttttttttattgtttagcattatcagttttgaggccaatcaagatgattggcctagaagttaaatgcgaatgcatgtgtacatgctcctgttacctgtattgaagaatgctgtcattaactggcacccaggcagcaagtgtatgttgatgccattttggtgccgagtcctgttttctacaagggctacagagaaaagtacaacaaggcccggcgtggtggctcatgcctgtaatcccagcactttgg

SEQ ID NO: 55443 - DNA, 555 bp, Homo sapiens
tgagagctccttgatacactgtagttgaggctgacacagggagagccctgggggtactccacaggaccaaggatttcaggatcctcttaaaatgatccagggagattcacatggggtcagaggcctggcagaaagcctcaagtagcctcttctacctgcagatggcaaaaaaaagcagagcacagctgcctgatggctcrttcctccatgattctgtgggtctgtgtgtgtgtgtgtgtgtgtgtagatttacattttatgggttcctacaggaatggcataatgaatatctatactcaaagttccctttgtctggaagatgccccacctcccaacctctacctctccacttcacccacttaaacacctactcacccttcagatctcaaggaaatagccttcctcagagaagccttccctgccccctcaggctggttgcccgagttgctcatactcactctcatcgtgccaaagcactgttcctccatagcctttgttaaagcttgcaaatatgcatttatttgcatcattttcctttatctctgcctgcctctc

SEQ ID NO: 55444 - DNA, 1250 bp, Homo sapiens
catattatccattgaatccccacagtaaaaccataatagtgatatttcacttataaatgaataaatacagattcaaaaggttaaacgagttactcaaattgaaactcaggtctctaagattacagaactcatgcttttatatcatatccagtgtacagtttaagaaacagggaacttttttatttgactttttattatgaaaaatgtcaaacatagttctaaggtaaaaagaatagtaagatgaacagtcatgatctgtcactcatctttaacagttgtcaactcacggccaatcctgtttatctctaactccccttcctccttaatcccatagattattttgaagcaaatcccacgtattttatccgtaaatactaagtatgtagcgctcatatttttatcagatataaaataaattttaacagtaatacctaatgtcattaagtatccaaatagtgttcacattttcctgatcgtgtaggccttttttttttttttttttttttttttttggagatgaagtcttgctctgttgcccagactggagtgctgtggcatgatcggggctcactgcaacctctgccttytgggttcaagtgattctcctgcctcagcctcccgagtagctgggattacaggcatgtgccaccatgcccggctaatttttgtatttttaatagagacagggtttcaccatgttggccaggctgttctcaaactcctgacctcaagtgatctgcccacctcggcctcccaaaatgttgggattacaggcgtgagccactgcgcctggcccctgtaggcttttttaatcacagacttttggtttgttttacatagcagtgatcatgctctgttcaacaatgtatcctgattttctttttttgagagagggtctcattgtcacccaggctggagtgcagtggtgcaatcttggctcactgcaacctccacctcccaagttcaagtgattctcgtgcttcagcctcccaagtagctgagactacaggtgcatgccaccacgcctgtctaatttttgtattttttggtagagatgggggtttcactgtgttggccaggttggtctcgaactcctggccttaagtgatccaccttctgtggccttccaaagtgctgggattacaggcgtaagccaccgtgcccagacctgattttctaaatagcagtttaacataagcattatcttgtattttatttcaactttgtaaattaatttagacttgaatgca

SEQ ID NO: 55445 - DNA, 1147 bp, Homo sapiens
ttctaaaaagctcaataacacatatataagcttttactatgtccacagaatttgatcagtggaacgtattaaaggcctaaaagcagtcaatatattaaagcaaaatgtaaccagcgttctctgattaaattgtaatgcacttagaccttacaaacaaacaggttacaacttctcctcaagtttttagaaattagaaaacacttgtaaataaatcttggattcctgagaaaattaaatttgcaattacagtatatttagtaattagcagcaatttgaacactgtgggctacagccaaggttagaatttacaacgttaagtaattcaactactcttattaatcacaaaatgaaaataattcaagaaacatttatctaaagaggctagaaagaaaacaagaaaaataaaaaggtaaaagttataggaagaataattcacaaatataaaatcagaaaataatggcttaggcaacatagaaagactacttgctaaggagatcctttatattttaactttttatataccaataatataaaaatataaaattctagggaaaaatgatgataaaactgctaataaaaatatatttttggccaggtgcagtggctggtgcctgtaatcccagcacttcggaaagccaaggcaggcggatcacttgagcccagaagtttgagaccagcctggccaatgtggtgaaaccccacctttaccaaaaaatacaaaaaattagccaggcatggtggcatgcacctgtaatctcagctactcaggaggctgaggcaggagaatcacttgaaccagggaggcagaggctgcagtgagccgagattgcacctctgcactccagcctgggtgacagagcgagattccgtctcaataaataaataaatraataaaatatattattaatatatactgaagttaccatgcatgactctatttgaaaatgtgatttgcccaggggtgttgtacagaaaaatataaattacataattgtctcatttaacatattcaatgatattaagcatgaacaatgaaaaggtaacgggaaaaattaatagaggaatgaaaggcacctacctttcctctaaatgaattagcctcatattaataatttacaatgaagtaatatgaagaccaggaaatata

SEQ ID NO: 55446 - DNA, 1372 bp, Homo sapiens
gaatttacttaatctggaatctcacacatgagtagtttaaatatatacttttggtttagaagttcattttaggaatttggggttgacccaaattttctgttaaaactctactttttctttggctttactccttgttatgagaaaaaattaaactaaaggaaaataaaaccgatatgatgtaaattgcaatctataaatctctaaaccttactggtgacggtgacacacacataaattacactcatgaatgaagacagttgggacaaaagttcagagttgttttattacacagagttcatgaccagtagctaagttcctcttcctttatgtaatggaggtgggggtagagggaaaaaaaggagagaaaaagaactctttagtgagggtttccttaacaacaaatcagcttcttagactcctgggcatttgcgataagtgtagtgcattactgcgaatatcacacactgtggcatgtctgaaacagattcacagtatttcaaaatgttcctgccgatgctatacaagtaaaggctctctatcaacaactgagcatatttatgatttcaaaaagactctagcatttagaataactcaagttgaaatttaagagctattactctattaattatggtgaacttttatggggcttgtatggtttcatcatctatttttattctttagwagtggtatttactgaaggttttgaaaactggtagtgatctagtcaaatttgtctagcattcctattttgtttggctcacccagcttttaaaaaaataatgaatttattaatgaataatccttttagacagtgctatagtccttacaatggcctattttgtaatatcagtttcattagaaattgttaacaaatatctttgagttttgcttctcccatcatttctattttctcttcatgaaatcttattgtctgagtattatgcatgtatacatgtataaatttatctattggcttcaattctctcttttgtgtctttaataatttttttaaagcattctttataactgtcctgaattttgggtgaatttatccacactattcttcagttctctgattttctctttgaaaatgtcttttcgagagtgtgccatctatggagtcttttatttcaatgactgcaatttttatttctagatttcaaattgtttatattttataaatacctttgtttcatttatgccagttttgtccaaaaaatgtttgtggttattattttaccttatctctgcaagaattttaaaattgttgggatgctgtcatccagagcctggacttatagtgatacttgggttgctctgctacagtgggagtggacatgttgcaggttgtgtggataagccagtagagaat

SEQ ID NO: 55447 - DNA, 715 bp, Homo sapiens
ctcggcctcccaaagtgctgggattataggcgtgagccaccgtgcacggcctgtcatcttgttcttaatgaaatgttctatggtagcccttcaccgacatggctgttgagcacttaaaggggacaactgcaaacaggaacagaatttttagttaatttccatttaagtagccactttgtgactaatggctactgtgctggatagtgcagaatcctagttcatacatttattatgtttttttttagatgctcgttgaaataaaatcaccagctgtgtgagtagggcaatgtatttaacctttctaaccctccgagcttttatctgtaaattggggatgacgagatataacacatttaatcacttagcayagtgcctggacaggaacagcacacaacctccagtgttgcaaatgggtgatgggcctgggggagggtctgtcctcatcaaagtttccattactgcttcctcaagccactcctgggcatgcttattttttgaaatacatgattgacgttttctccagcttatctgaagtgttattaaaggcctctttagatagtgttgcaattttgattaatctataacaggtaaactaaataaaaagagtgtgtttaccatgcaaatgtagtttccattagtcacttgccacgtagccttctgccttcctattagattaccccctacccaccacctccagtgagctgcttctgatctc

SEQ ID NO: 55448 - DNA, 715 bp, Homo sapiens
ctcggcctcccaaagtgctgggattataggcgtgagccaccgtgcacggcctgtcatcttgttcttaatgaaatgttctatggtagcccttcaccgacatggctgttgagcacttaaaggggacaactgcaaacaggaacagaatttttagttaatttccatttaagtagccactttgtgactaatggctactgtgctggatagtgcagaatcctagttcatacatttattatgtttttttttagatgctcgttgaaataaaatcaccagctgtgtgagtagggcaatgtatttaacctttctaaccctccgagcttttatctgtaaattggggatgacgagatataacacatttaatcacttagcatagtgcctggacaggaacagcacacaacctccagtgttgcaaatgggtgatgggcctgggggarggtctgtcctcatcaaagtttccattactgcttcctcaagccactcctgggcatgcttattttttgaaatacatgattgacgttttctccagcttatctgaagtgttattaaaggcctctttagatagtgttgcaattttgattaatctataacaggtaaactaaataaaaagagtgtgtttaccatgcaaatgtagtttccattagtcacttgccacgtagccttctgccttcctattagattaccccctacccaccacctccagtgagctgcttctgatctc

SEQ ID NO: 55449 - DNA, 938 bp, Homo sapiens
aaagagaataaaatacctaggaatccaacttacaagagatgtgaaggacctcttcaaggagaactacaaaccactgctcaacgaaataaaagaggacacaaacaaatggaagaacattccatgcccatggataggaagaatcaatatcgtgaaaatggccatactacccaaggtaatctatagaaaaacaaatgtattctagacatggtaagaatactttatcctctcttttatmcttttgttgtttatttatgtaatacacaagtgtattatcataaaagaatcacataactcagttatacagaacaaaacatgaaaatcactttacattattataaacctctgactttcctggaaaaaaaccactatcaacaatttaaggtaaccctctatctaactgttccccctttcccgttttcgtgaactattaaatacctaggaatttaatgtagtcactaacctccaaggaataataaagaatctgcacacattgactgcaggcttctacacaatacttcttttgaaattttaaaataattgtattaatatttagaatgtataaaaacatatttttacaaagtagcaaatccttgtgtcctgacccctttgtttaagccatgaaacacaaccaaaatctttgaaagtttgtggataccatttccccacccaactcctccatcccagaggtaattgttcttatgaaattatggtttctcattcgtgtgcatttatttacatttacagaataacaatgttatcactaaaaatgtatttttttatattttaacttatattaatgacattaaaaacctatattcatctacagcttttttctctcattcaaaattatgcttgcaagtttcatcaatgttaatccatgtagctgtagcttatttatcttcactgctgaatagtattccattgtgtgcgtgtgtgtg

SEQ ID NO: 55450 - DNA, 1439 bp, Homo sapiens
ggaatgaagagacagaccaattcagaaaatatttggttctcctagtcagaaaactgttatctttgattattctcctatgctttccatatcagatcaatcttacagtcatgccattttgataatctaattttattttatatgtctccaattttctgattcctacaactatgttgtggtctagcttaggttctgcaataaccagttacatgatcaattttcagtgccacatcacaagagatctcagtaatatattcttatcatatcaccccctgtttaaaatgtttcaatttttaaccatcctcatatagaataatgtaaaaactttctaacaygggttaagggtctcaataaaattcaaggactctaattaccttaagccatatcttttaactcctctcacctccaactgtatgctccagccatattgaattgtctcaagtccctctctccctcacaaattgggccttgttctcacttgcttccagccctttccgtgtgctagcccttcttcctgaacactgtccaacagccactcacagatgctccacatccctcccctcacatgcaaactagttatctcttgctcagccttcacttcttggtgcagttgtcacttccatttctgaggatcctttcctggcctctcgatcctttgtcctccaaagcactgcctagctctgtggaacaatttaccacactaagtgatattttctattaacaggtccttaactccttttagcttcttgaaggtgggaaatgcattttactcatctttgtatgttctgtgctttgacatgtagtaaacccacaataaaaatttaataaatgataaagaagtgaatggtgtcatcaatccttagtttaatctcagctttttttcttagcagctgcattatttcagtcaactcactagtcttgggaactttggtttcttcatctttaaatctgaggcgataataatacataactgaattcaaaattgtacaagagtcaaaaatggacacagttttctaaacattaactgtgtatatatatatatatatatcatgcttgtagttgacttcctggtaacttgatttcctcctgtgtagaacaaggaaggtttgaccaggactggcttttaaaaggagctgaataggtgagtgaacgagtgaatgaatgactgccagacaaatactctcaatttgatgttcctttgtcagcaaaactttgtaattatctatttcttgagtccttttgaaactctactactgaagccttaattgcctcattccctcaaaatccctagttattttcagtattatttatttgcattgttatttattcaacctcaaaaccagaaaaggaaaatccttccatctctcccaatctgagaaggagcttctgcttctgaaaaataaacaacaacaacaaataccaaccataaatatagcccctcc

SEQ ID NO: 55451 - DNA, 596 bp, Homo sapiens
accaacactgatgctgtcagaaaacctgttctctgggagccccctcacttgctccccagttcttaccctggggtaattgtaatgagatcttctcccctggaggcaggggaatgaataataagacagtttttatcccttaagatccttgccagtcctctaggttttgtgacttttgctgttttcttttggtttattgtaaggaaataaaaggaaatattgcatataaccaaaaacatacttctctttaagacatggataccaggtgtggtggcttacacctataatctcagcactttgggaggccacgacgggtggatcacctgagctccggagtttgagaccagccagggcaacatggtgaaaccccgtttctacaaaaaataaaaaaattatccaggcacagtggcatgtgcctgtagtctcagcctgggtgacagagcaagaccctgtctcaaaattaaaaaaaacaaaaaaaataataaaataaawagaaaagaaaaaagaaagattgattagctttaagtaataaatctttgttcacatgattaatttgaagttgtttcttggttggctgccagttgtagctattttgtctc

SEQ ID NO: 55452 - DNA, 980 bp, Homo sapiens
tcacaaaaggaaaagactcaaagcaacactggtgatgagccgtttcatattcttaggtagacgcaagatccccgtacttcctgaaaccttatctaatagtaaaatattttctgactgtttctccagtcttttaccactcttgtcaatggatacacaccaaatacataaataatgtatgcaggttcattttgggtaccatctagctacacagcccagtggagtggttgagtacaaaagccagcctagcttgaaatttcaagctttgacattttctagcttccttgggcaagttacttagcctttctgtgcctcagttttcttacctataaaatgagaataatgatagtaccctcataatagggtgattatgaggattgcatcmggtaactttgtaaaggttctggaacatatagcaagtactatataaatgtaatacgtatgcaattaaaataggcttcaagatacacagattacagataaagaaatagctgtagacagaacatatcactttattcactccacattattactttttacattttcaggcttcttactaccaactaacagggtatattattagttctcttgtctatgacatctgatataccttccttcctttcaaagagtgccaaacattttaaatgatacttacatttttctccaatgtatgctgcacaattaagtagattgatagatatttttcatcagcacaaagagaggatcgcaatacatataagactttatctctgctgcaaaatataccttgaaagaattacatgtataatgaaaataaccctgacaatgccaactttatctgcgaaatcactggccgttgactttctgtgaaagagttaagtacgttgctgtatcaaatattcagttactcattaattaaagtagaacaaagtcaatactttttttgttcagcagattaaccaaaaactaccatgtaccatgtttgcaatttatattcatcctat

SEQ ID NO: 55453 - DNA, 1204 bp, Homo sapiens
tgcatcataagaatctgaatgttttgtagttaatttcccactacattctcttaggaagggaataagtctgtagacatctggcttttgaaatcatcacaacaaaataacatgctttcttggcttatctcttaattaatagcatcttgcctttattgcagaccagttcattctacctgatttacaaacttaactggcacacacctgatattaaaaaatcttatcaatatttctcacaactctgagagatcagatgcaatgagactcagcacagcatgaagaagatgccattgagcaaaataccagagaaaaaaatgagatttaacaaaatacagatcatgttaaaaataaaacaacaaataaatatcaattttcttatgctgtcttgaaaaaacaaaacaattcaccattttcacggagctgtctacattttattttataaatctcattcggagagcttacaacatacagaaaactcagtaaagcaggtataataaaaattgaacaaataattgtgattgccttcctctcctatcacagcatttataataaatgtatacagtaaagcagagaccatttcaatgactgaagaaactrgcatctagatgcagtctttttttttgaaatatcataagccagagggaagagaagaatcaattagggaagaaaacagcttaatttctattttagacttccagaatggggttagcaaagagactttttgcaatttcatataattaagatggtttacataaagcaatggtaaaataggaataaaaacaaaaatagattcagaaccaaaataaggcataaagaaaaattctcagtttagtgtttggaatcttaagccttgaatatagtcaggcaatgtggttaacagcctgggagctaattctcatgacatacccttttaaattcagtgtcacatggttaaatttagaagactaataaccttgggaggcattctcttataactgaaataaaagatttttgatagtcatatagaaacagtctaataggtttccatagaatttgctttttaaaatcctccccataaaacttccatgtattacactgatttttttcctctaatttcaaaatcctttgaaactatttacactacatgttcatttttaattcccaaacctcctgcaatacatgattcttcaaagagaaaagtgaactttgtctttgaacctggtccttc

SEQ ID NO: 55454 - DNA, 552 bp, Homo sapiens
aacaatgaaatgcacygataacacctcaattaaccttctttatttcattcattagtaagatttggaaatgtgtgctttctatatttattaaattcatggtacacatgttagaattggcctgtaaaggttatttatgagtgtgtatgtttgttcttcatccctagaagaactgtaaaatccatcacaagagctgtccccacttgtttacttgtatccttaatatttgatgcacacaagactctcaggagatgctgtgaattactacaatgtagacttgctgtttgttcagcttcgccattaaatctgactccaaggcttgatgcagattgaagtgtcaacttcaatgcacccaggattttggttttattcagatacaatgagaccaacaggagatatttgccactgaaaagatattaggggctgggcgtggtggttcacacctataatcccagcattttgggaggctaaggtgggcagatcacttgaggtcaggagtttgagaccagcctagccaacatggcgaaatgctgtcacgactaaaaatataaaaat

SEQ ID NO: 55455 - DNA, 552 bp, Homo sapiens
aacaatgaaatgcaccgataacacctcaattaaccttctttatttcattcattagtaagatttggaaatgtgtgctttctatatttattaaattcatggtacacatgttagaattggcctgtaaaggttatttatgagtgtgtatgtttgttcttcatccctagaagaactgtaaaatccatcacaagagctgtccccacttgtttacttgtatccttaatatttgatgcacacaagactctcaggagatgctgtgaattactacaatgtagacttgctgtttgttcagcttcgccattaaatctgactccaaggcttgatgcakattgaagtgtcaacttcaatgcacccaggattttggttttattcagatacaatgagaccaacaggagatatttgccactgaaaagatattaggggctgggcgtggtggttcacacctataatcccagcattttgggaggctaaggtgggcagatcacttgaggtcaggagtttgagaccagcctagccaacatggcgaaatgctgtcacgactaaaaatataaaaat

SEQ ID NO: 55456 - DNA, 552 bp, Homo sapiens
aacaatgaaatgcaccgataacacctcaattaaccttctttatttcattcattagtaagatttggaaatgtgtgctttctatatttattaaattcatggtacacatgttagaattggcctgtaaaggttatttatgagtgtgtatgtttgttcttcatccctagaagaactgtaaaatccatcacaagagctgtccccacttgtttacttgtatccttaatatttgatgcacacaagactctcaggagatgctgtgaattactacaatgtagacttgctgtttgttcagcttcgccattaaatctgactccaaggcttgatgcagattgaagtgtcaacttcaatgcacccagrattttggttttattcagatacaatgagaccaacaggagatatttgccactgaaaagatattaggggctgggcgtggtggttcacacctataatcccagcattttgggaggctaaggtgggcagatcacttgaggtcaggagtttgagaccagcctagccaacatggcgaaatgctgtcacgactaaaaatataaaaat

SEQ ID NO: 55457 - DNA, 707 bp, Homo sapiens
aaacatcacaagcagtaagcctgtgataaacatgagccattgtggttaaaataattccccaaatggtggtgattctggcactggcaaagccgtttcccactttgtgatgactgggcactggaattctgtagagtcttgaagcacatctcttggaggagccatacccactaacaggaaaggagacacaaatcttgtctccaaaaagatgccccatgtctcctaagacctggagtggtggcacaaggtacaatgagaagctactttaaaagaatataacgtgagctccagatgtgctcttgtttatacatcagctgggtgaccttggggaaattcaaaaacactttcagttgggaaatgagggctttggacagttgctttctgctgtttctaagcttctggcgtcactcagttaaagtgactgcaggcccctccccactctctgtcccctcctcaatggctttgttccagccgccaacatctcctgtgttgctcacataccatgccactccttcttcctcaaagcctttacacttgttctcccctttccttgaaagctctcctccgggttatctgtatttcttgctccctcgcttccttcaagtttctgctcaaatatcacctcctcagagragccttatctaacccaccctggataaagcatcacgtaagcatacacatacaagtgagtcctcagttaaatacgtgac

SEQ ID NO: 55458 - DNA, 742 bp, Homo sapiens
tccaggckcacagaggcttgaaccttcatctctctgttctagaggcttccttactcttgtgtgtctctcccaaagggcctctctcactgccccgacacatctgctatcaatatgcaacagaagctttcatcaacagctttcttcctcttctgtttcacctccttcacactgtggcataagggttttcttctatttccataagtttaacgtcggttccatagttgaagctacaagttacacacactgactttagagccacacacagcctgaacttgaatcccagtttgcccaattactaaatgtgtggctttggccaattttctgaatctctgtcttgataccttcatctctgatgtagaagaaacgaaagtgacttcaccccaaagattgtgaagattctgtaaaataacacgtgtcaagtgcctggcactcagcccgtgatcactaattgttcactttatcattaccatgatcatctttttctttttcttttctatttatttatttatttttgagatggagtctagctgcgttgcccaggctgaagtgcagtgccacaacctcggctcactgcaacctctgcctcccaggttcaagcgattctcctgcctcagcctcccaagtagctggaattacaggtatgtgctaccacgcccagctaatttttgtatttttattagaaacaggctttcaccatgttgggcaggctgctctcgaactcctggcctcaagtgatccactt

SEQ ID NO: 55459 - DNA, 2007 bp, Homo sapiens
ggagttttgaatgagatggatcagttcatatgtattttacaagttctaggtttaccaagggctgtgttccagaacctcttttgtaagctagttgtgtggacacatcacagttaacaataaagtgctatcagctaagatttgggtctcaagcttgccttaaaggagatatgggagagtatagttgatgcatgcgtgagagcaggcggtgtgtatgggaactccctgtaccttccactcaattttgttgtgagactaaaactgctctacaaaaataaagtctgactggatgcggtggctcatgcttgtaatcccagcaccttgggaggctgaggcaggtggatcacctgaagtcaggagtttgagaccagcctgaccaatatggtgaaaccccatctctactaaaagtacaaaaattagccaggcatggtggcatgcgcctgtagtcccagctgcttggaaggctgagacaggagagttgcttgaacccgggaggcagaggttgcagtgagccaagattgcaccactgcactccagcctgggtgacagagcgagactccgtctcaaaaaaacaaacaaacaaacaaacaaaaactaaataaagtctagtaatttttaaaaagagtgagagagaacacagctgaaatacatatactttttaggaaaagggaaataattaaatatcagaaaaataatattgaagaagaaatatttctctttaatgtcagtgtttgaagaaaggtattttaattaaatcagatcgtgtgtgtttgcaggagacttttggacactatccaaggattttgagattgacaatattggatttttatattgccccaattttctttcaaaatatgtgactgttaagattattattacccttatattattagacgtgtttgggttggggataggaaaaagacagagggagattgattggttgactgattcattcgttcattggttaaatgggacagactgatttctctaactgtctgagcctgagagatggggaaggtagaacatggctcagaagaatatgcatttcctgtaagaaaacatttgtctgaaaggaattataataattgagaattaagctgtatgatacagaagcagtatctgaagggcagatggataatagaaggtagctgtggtgcaactcgaatcaatggctggaaagccacaggaggcagattcccaccaggccctaaggaaggacaccgtaccgaagccctccacatgtggacatccatggggcctgcgatttctctggtactggaggtattccagatgagtgccttgtgaagggactgccggagactggcatccaacagaacatggatgtgggaccagagcatctttaaggcttcttctcagagaggctggtagttctgagcgtgtttacagttccattgagggagaaaaaaggaagaagcagggaaaaagagttaggtggggattttccccgtcagctcaggagaccttgtttctcttcagagagagtaggatggtagaaaacaaattgttttttgtttcatggtctgtttattagtagattattggttaagatgcttttagcttcaagggacagaaaccaacacaaagtgtataaacaaaagggaaaactgactgactggttaacaagaagttctgaggtcatcagctccagggttggttgtaaaaaactgatgttctttctgtatttctgccccatggtttgtggtatgtcggtctgatggctgccacagttctaggcatcacatccaactcaacagtgtccatgggaaaaagagcatctctttaaagcaagaaaaccttttccagaagcttcctgcagacctcccttcacacctcgttgaccaggctgatggtgtgtgccagtgcctaagtcaagtcattgacaacaggaagaagatgagccctggctgagttaaactgacsaggatgtgcatcccccccatgctggaagtgaggccgtcttccctgagagtcagtatccgaacagaaaga

SEQ ID NO: 55460 - DNA, 2007 bp, Homo sapiens
ggagttttgaatgagatggatcagttcatatgtattttacaagttctaggtttaccaagggctgtgttccagaacctcttttgtaagctagttgtgtggacacatcacagttaacaataaagtgctatcagctaagatttgggtctcaagcttgccttaaaggagatatgggagagtatagttgatgcatgcgtgagagcaggcggtgtgtatgggaactccctgtaccttccactcaattttgttgtgagactaaaactgctctacaaaaataaagtctgactggatgcggtggctcatgcttgtaatcccagcaccttgggaggctgaggcaggtggatcacctgaagtcaggagtttgagaccagcctgaccaatatggtgaaaccccatctctactaaaagtacaaaaattagccaggcatggtggcatgcgcctgtagtcccagctgcttggaaggctgagacaggagagttgcttgaacccgggaggcagaggttgcagtgagccaagattgcaccactgcactccagcctgggtgacagagcgagactccgtctcaaaaaaacaaacaaacaaacaaacaaaaactaaataaagtctagtaatttttaaaaagagtgagagagaacacagctgaaatacatatactttttaggaaaagggaaataattaaatatcagaaaaataatattgaagaagaaatatttctctttaatgtcagtgtttgaagaaaggtattttaattaaatcagatcgtgtgtgtttgcaggagacttttggacactatccaaggattttgagattgacaatattggatttttatattgccccaattttctttcaaaatatgtgactgttaagattattattacccttatattattagacgtgtttgggttggggataggaaaaagacagagggagattgattggttgactgattcattcgttcattggttaaatgggacagactgatttctctaactgtctgagcctgagagatggggaaggtagaacatggctcagaagaatatgcatttcctgtaagaaaacatttgtctgaaaggaattataataattgagaattaagctgtatgatacagaagcagtatctgaagggcagatggataatagaaggtagctgtggtgcaactcgaatcaatggctggaaagccacaggaggcagattcccaccaggccctaaggaaggacaccgtaccgaagccctccacatgtggacatccatggggcctgcgatttctctggtactggaggtattccagatgagtgccttgtgaagggactgccggagactggcatccaacagaacatggatgtgggaccagagcatctttaaggcttcttctcagagaggctggtagttctgagcgtgtttacagttccattgagggagaaaaaaggaagaagcagggaaaaagagttaggtggggattttccccgtcagctcaggagaccttgtttctcttcagagagagtaggatggtagaaaacaaattgttttttgtttcatggtctgtttattagtagattattggttaagatgcttttagcttcaagggacagaaaccaacacaaagtgtataaacaaaagggaaaactgactgactggttaacaagaagttctgaggtcatcagctccagggttggttgtaaaaaactgatgttctttctgtatttctgccccatggtttgtggtatgtcggtctgatggctgccacagttctaggcatcacatccaactcaacagtgtccatgggaaaaagagcatctctttaaagcaagaaaaccttttccagaagcttcctgcagacctcccttcacacctcgttgaccaggctgatggtgtgtgccagtgcctaagtcaagtcattgacaacaggaagaagatgagccctggctgagttaaactgaccaggatgtgcwtcccccccatgctggaagtgaggccgtcttccctgagagtcagtatccgaacagaaaga

SEQ ID NO: 55461 - DNA, 564 bp, Homo sapiens
aatcaggattaggaaccagtaaaatgaaaaaaccaaaccgagaagattttacccacagattttccaattccgctcctcctggctgctcttataaccttttacaaaatgaaataattcatttaaaaaactgaacaaaaatatgagacctcaataattaatgtcgttactatatgcaagaaactagtttctgaaaacaatgaaccaaaacatgttgcctttcattttttaaggctatgttattcagttgtaatgtatttttgcttacacgttaaaaaaaaaaaaaaaaaccaggccaggcgtggtggctcatgcctgtgatcccagcactttgggaggccaagacaggtggatcaccttaggtcaggagttcgagaccgccctagccaacatggtgaaacccatctctactaaaaatacaaaaattagctgggcgtggtrgcgcgtgcctgtaatcccagctactggggcggctgaggcaggagaatcgtttgaacccgggaggcggaggttgcagtgtgccaagatcaccccactgcactccagcctgggcaacaagagcaaaac

SEQ ID NO: 55462 - DNA, 491 bp, Homo sapiens
gcagaaatctcatggagcatgaaaaactagttcaccagctgactcatagtagcactcaataaacacttgttggaatgatggacggatggacaattttacaaagataggtgataaggtgcttacccaggaactcatgaattttctgtcctccaatacaccctcccccatkgccagatgtgtagaaggttagaccagaatgatcccacatcccagtatgctcagaactaccctttactcttgctgtcccagcagccctttcactctctaaagtgccccagactaggggaagagtctggaactaaacagaagattcaggaacctaaaagggcaagcctgggtgaagttgctgtaaagacatactccacccaccaccctcctcccactggctgcagcaagaaaagcaccggagaggcccaggcagctgacactcaagacgccatctaggtaaggccctggaaggcaggcccagccccagctctccaaaagggatc

SEQ ID NO: 55463 - DNA, 491 bp, Homo sapiens
gcagaaatctcatggagcatgaaaaactagttcaccagctgactcatagtagcactcaataaacacttgttggaatgatggacggatggacaattttacaaagataggtgataaggtgcttacccaggaactcatgaattttctgtcctccaatacaccctcccccattgccagatgtgtagaaggttagaycagaatgatcccacatcccagtatgctcagaactaccctttactcttgctgtcccagcagccctttcactctctaaagtgccccagactaggggaagagtctggaactaaacagaagattcaggaacctaaaagggcaagcctgggtgaagttgctgtaaagacatactccacccaccaccctcctcccactggctgcagcaagaaaagcaccggagaggcccaggcagctgacactcaagacgccatctaggtaaggccctggaaggcaggcccagccccagctctccaaaagggatc

SEQ ID NO: 55464 - DNA, 570 bp, Homo sapiens
tcatttctgcattggaagagaaatgcagaatcacaaaattttaaggttggaagagaaaatagaactactgtgatctaaacttctcccagtgcaaatctcttcatcattgggaaatcaccaccattcactgactagatcataccagggacagggakctagctaattagctctatcttccactttctttgaattattaacattatttcacggaagaagagtaatagctcccattccagcttgtgttataaaccagatctaattggaatatccttccatactttgatcagctttgcatatttcacccactggctccagttctgcaatgtgcatttccttcttatggtaatgtcctcctggataaaatacacagacctgtctcagaggttattgaagtctgtgttagcaggacacaaagtgaacaccatccctagtgtagcttattttaaggtgaaagaatgggagggtttcaatgcatagaggtaaagaattatctactttgtctaagtgtgtctgggaagaagattctttttttttttaagaatggtaaattccaactttaatatttcagtt

SEQ ID NO: 55465 - DNA, 622 bp, Homo sapiens
atgaaaggacaaaaatttgtgtggatttccaaatgtttcctgcttgggtctggctggccctttgagctaataaggttcccctctagctggaagagaagcctgaagcctccaagtgatattttaattcaattagtgtcttaccaatttgatgcagcaaccaaggacctatggtgtctgattaatatgctgatgctaagacacaagagtgaacagaatgcccatttggataaggcctggcagcaaagcgtggcattgctatggaaaccacagaaggacattaattagctatcaaataaaatcattggaaaattctggaccctggcacatctgcccccttcaaagagaagggcaagaagaggtcacactaacagcaaagctcccttcagtgattaaaatcaaagttacatgtagtccagagactacatgttgcaaagtggaagaaagatgggggagcaaaacgggtgaacacaataggaatgaggctttgggattattcaagtccaagaatataatttggaatgtggagtatcttgttgggttgtctgtattgataaaatgatccaaatgacaartatgttatcctatactctgttatgtagaaagaaaatgataataatgatac

SEQ ID NO: 55466 - DNA, 1119 bp, Homo sapiens
tacacttaaaatctttaaatacagtagataaggagtaagactgaaaatcaatgatctaaacttttacctcttgatattagaaaaagaaaagcaaatcttgttgtgactctaaagaataaagaaacaaatagcaaaagcagaggttaatagaaaacaacaatttaatagagaaaaccaacaaatccaaatgttagacattaatatattaaggaaatgtatacgttattaacttctagttaagatgtatgcccttcctgccctaacaacataaaaaagccagataagctaaccctttggatggctgtagacccaaagaaacctatataaattaattttttaaaatgagatattcttaggaaagcagtagcttgcaactgctgtcgtcttgttcagaacagaaagaggcagaagaatctgccatacatgtgggtaaagtgaaagtagccagacattttaccaaacttttaatatctatgtatggattattctgatggattagaatctcaagacagcccagctacagagtaggcctgcacccactcaccaattctttcccattggcctttaccaagtaagtgagcaagacagggtaggattgctgagagacatcccttctttggtacgttgtgtcttacaaaagtacaagccggtggyctactgaatgcttagaagaggttaggagagttgaaagaaatttctcgaagtcacattcttgaaggtattttactgcacaagtaaaagaaataaagggcatattaattaggaaaaaaagtaaaatgtaaatatcctttttttttttttgagacagggtctcgctctgtcacccaggctggagtgcagtagtggcccagtcacagttcactgcagcctccacttcccaggctcagatgattctactacatcagcctcccaagtacctgggactacaggtgtgcaccaccatgtctcgttaatttttgtattttttttttttttatagagacggggccttcccctgttgcacaggctggtcttcaatgcctgggcttaagtgatctgccaaccttggcctctcaaagtgctgagattacaggtgtaagccactgtgtcaagcaactgtttctctttgcagatgatata

SEQ ID NO: 55467 - DNA, 773 bp, Homo sapiens
ctaaaaattaaaggaaaaagtcagtatgcttttcatctgcagcttcccaaatatgattgggttgcatgagcaaaggaatatgaagctacttartttgaggtacaaaggaagctatgatattatttttatattttttgacacttgccatagacagtcaatttcaatatgcgatcaagtctttctacagtgagactagagaacagtgagaaaacctagaagatcaagggacaataggatcagtaagcactgtgacctgcattgcccctgctccccactggagatgttccaaggtaataagtagcaggtttgcagaattacagccaccacactgaccaatccttatgcagaattgccgtgataagttttatttcagaatattatatgacagagcatataaactgaaaaatattagtatgccaatatgaaaagagactgtatttaagatccaagataacagaaagcaatataatagtggttgggcaaaggacagactgtaattacattaaataataataatgatctgtcataccgaatataggcaaattctgaagtttttttgcacaatcaaatgatatattaaatatactagctatacctgtgggaaatcttatgctggttttgtcttatctgaagactctggcacttctaatttttgtaattattttcctgcgagttggattttttctttctctataatattattatttttttatttccctttccccttttccattctctctaggggtgtgactctactgaatgctgggaagggt

SEQ ID NO: 55468 - DNA, 773 bp, Homo sapiens
ctaaaaattaaaggaaaaagtcagtatgcttttcatctgcagcttcccaaatatgattgggttgcatgagcaaaggaatatgaagctacttagtttgaggtacaaaggaagctatgatattatttttatattttttgacacttgccatagacagtcaatttcaatatgcgatcaagtctttctacagtgagactagagaacagtgagaaaacctagaagatcaagggacaataggatcagtaagcactgtgacctgcattgcccctgctccccactggagatgttccaaggtaataagtagcaggtttgcagaattacagccaccacactgaccaatccttatgcagaattgccgtgataagttttatttcagaatattayatgacagagcatataaactgaaaaatattagtatgccaatatgaaaagagactgtatttaagatccaagataacagaaagcaatataatagtggttgggcaaaggacagactgtaattacattaaataataataatgatctgtcataccgaatataggcaaattctgaagtttttttgcacaatcaaatgatatattaaatatactagctatacctgtgggaaatcttatgctggttttgtcttatctgaagactctggcacttctaatttttgtaattattttcctgcgagttggattttttctttctctataatattattatttttttatttccctttccccttttccattctctctaggggtgtgactctactgaatgctgggaagggt

SEQ ID NO: 55469 - DNA, 773 bp, Homo sapiens
ctaaaaattaaaggaaaaagtcagtatgcttttcatctgcagcttcccaaatatgattgggttgcatgagcaaaggaatatgaagctacttagtttgaggtacaaaggaagctatgatattatttttatattttttgacacttgccatagacagtcaatttcaatatgcgatcaagtctttctacagtgagactagagaacagtgagaaaacctagaagatcaagggacaataggatcagtaagcactgtgacctgcattgcccctgctccccactggagatgttccaaggtaataagtagcaggtttgcagaattacagccaccacactgaccaatccttatgcagaattgccgtgataagttttatttcagaatattatatgacagagcatataaactgaaaaatattagtatgccaayatgaaaagagactgtatttaagatccaagataacagaaagcaatataatagtggttgggcaaaggacagactgtaattacattaaataataataatgatctgtcataccgaatataggcaaattctgaagtttttttgcacaatcaaatgatatattaaatatactagctatacctgtgggaaatcttatgctggttttgtcttatctgaagactctggcacttctaatttttgtaattattttcctgcgagttggattttttctttctctataatattattatttttttatttccctttccccttttccattctctctaggggtgtgactctactgaatgctgggaagggt

SEQ ID NO: 55470 - DNA, 773 bp, Homo sapiens
ctaaaaattaaaggaaaaagtcagtatgcttttcatctgcagcttcccaaatatgattgggttgcatgagcaaaggaatatgaagctacttagtttgaggtacaaaggaagctatgatattatttttatattttttgacacttgccatagacagtcaatttcaatatgcgatcaagtctttctacagtgagactagagaacagtgagaaaacctagaagatcaagggacaataggatcagtaagcactgtgacctgcattgcccctgctccccactggagatgttccaaggtaataagtagcaggtttgcagaattacagccaccacactgaccaatccttatgcagaattgccgtgataagttttatttcagaatattatatgacagagcatataaactgaaaaatattagtatgccaatatgaaaagagactgtatttaagatccaagataacagaaagcaatataatagtggttgggcaaaggacagactgtaattacattaaataataataatgatctgtcataccgaatataggyaaattctgaagtttttttgcacaatcaaatgatatattaaatatactagctatacctgtgggaaatcttatgctggttttgtcttatctgaagactctggcacttctaatttttgtaattattttcctgcgagttggattttttctttctctataatattattatttttttatttccctttccccttttccattctctctaggggtgtgactctactgaatgctgggaagggt

SEQ ID NO: 55471 - DNA, 576 bp, Homo sapiens
cagaacaagtagaactgaactcctgcctcccagatttctcattcaatgcccttcagtcttctgacttcgaagaaaaatatgaatacaattcttagtatttccacatacatatcctgttttgaaatttcctcctttgccattttcagtagaatctaaacaaattcctttcatgaaagtaattatataacttacccaacccccccmaaaaatggaaagttttctcactttacttccaacttcatttagtccaattgttggcaaatttataatcttacttcctcctctgtcacaaacaaaaagaaacctcaaatgccagtatttcattcatctcatatgtaaaaaggctaaattggtgataacatattacttggcttagaatacattcatattaaggaagaaaattaatgtttttaatatcctaaaatacctacattagacccaaatgttgcagtgatctaagaagactgcttcagtttcactccctttcagccacaactacccatgcaattttactaagtccaaaatatatacagaaataaaacatacacacacatacacaggaatctcataagaatg

SEQ ID NO: 55472 - DNA, 1225 bp, Homo sapiens
atagggagctaaacacagaaaaagaaatttatggtatccaggtwtggtggaaattggatgattaatattttgagggtgtaaagcttatgcaattagggaatattttctttacaaaaaataattcaaaattactaattcaaacccacatacaaggccttgaaaagagcctgtataatcagtggctgtaaagctagatactcagtaaattcatgaccaagctacttggatggtatcttatactctactcagtatctgatacggtattatcatttgccatatccttatgttgactctccatagctattgtcttcatgatgtatcacaataatattaataatcagagattattcctgactttcctacttcagtgcctcaattgagcacatgcacccatccctccacaatgaaggaatctggaggtgtttatagtgatacagagtagccactcaatatttggaactctagacaaaacctaggttcattaagagatttggcacatttttactactataagatacttctgaactgtgacccaaagaatattttataaatataattaagttagaacagtagggttttgttttgctttttcaatctccaagtatatgtcctagtctgttctcagtactctttaaattgctcttgattttcaccatgctttatatttactgttcttagaaattttactaaaaatataatctcttaatgttcattctcattgatttttgaggtcaaaaatggaaataatgattttcagtatttttaaggttgtcaaatcttcacacagccattcaccaaatgattgtaagtttgaaatacactatctgaaacaaatgccttctactatgtaagaataggtctatgggatatatttattaaagtttgaatgcagattaaactctgcaaggttaaatgacaaggttaagtgtctaattttgcagtctttttatacctggtgagtgcaaaggcttcctaatgataggattaaatatggttcctagctacaaacagttgcttgtcgttccctataggttagcctctatattctgtacttatcacaaacagagaggaaataactttctgggtcttttgtgagtctttttaaaatacacagactttagggaaatcatattttcttgaaggaaatgaggcatgaccaatcacacaaaacgtgagaaaatcccttgatagatgacctttgccacatgtagaagaaactgttcag

SEQ ID NO: 55473 - DNA, 1225 bp, Homo sapiens
atagggagctaaacacagaaaaagaaatttatggtatccaggtatggtggaaattggatgattaatattttgagggtgtaaagcttatgcaattagggaatattttctttacaaaaaataattcaaaattactaattcaaacccacatacaaggccttgaaaagagcctgtataatcagtggctgtaaagctagatactcagtaaattcatgaccaagctacttggatggtatcttatactctactcagtatctgatacggtattatcatttgccatatccttatgttgactctscatagctattgtcttcatgatgtatcacaataatattaataatcagagattattcctgactttcctacttcagtgcctcaattgagcacatgcacccatccctccacaatgaaggaatctggaggtgtttatagtgatacagagtagccactcaatatttggaactctagacaaaacctaggttcattaagagatttggcacatttttactactataagatacttctgaactgtgacccaaagaatattttataaatataattaagttagaacagtagggttttgttttgctttttcaatctccaagtatatgtcctagtctgttctcagtactctttaaattgctcttgattttcaccatgctttatatttactgttcttagaaattttactaaaaatataatctcttaatgttcattctcattgatttttgaggtcaaaaatggaaataatgattttcagtatttttaaggttgtcaaatcttcacacagccattcaccaaatgattgtaagtttgaaatacactatctgaaacaaatgccttctactatgtaagaataggtctatgggatatatttattaaagtttgaatgcagattaaactctgcaaggttaaatgacaaggttaagtgtctaattttgcagtctttttatacctggtgagtgcaaaggcttcctaatgataggattaaatatggttcctagctacaaacagttgcttgtcgttccctataggttagcctctatattctgtacttatcacaaacagagaggaaataactttctgggtcttttgtgagtctttttaaaatacacagactttagggaaatcatattttcttgaaggaaatgaggcatgaccaatcacacaaaacgtgagaaaatcccttgatagatgacctttgccacatgtagaagaaactgttcag

SEQ ID NO: 55474 - DNA, 963 bp, Homo sapiens
tgcataacacttgaaaagagatagagaactggaatactattacttgtaagagaagttgcatatggcaatatgtaatctacaataaaaatttaacagagcattttaatttctgttacgcccatcagttaatttttacatgctgataaaaaaaaatgacaaatatatcttttgaaaggtacttttgaattaaaaaaggtacaaagtggcaggttgccgtggctcacgcctgtaatctcagcactttgggaggctgaggcaggcggatcatgtggtccagagattgagaccatcctggccaacacggtgaaactctgtctctattaaaactacaaaaagtatctgggccgtggtggcacatgcgtgtagtcccagcttttgggaggctgaggcaggagaatcacttgaacccgggaggcggatgttgcagtgagctgagaccgcgccactgcactccagcctcgtgacagagcaagactctgtctcaaaaacaaacaaacaaacaaacaaacaaacaaaaaaaagccacaaagtatccaatttaaagaaaataccgcttggtttagcttgaaaagccaaactttattcatagtttacttcttgcctagggataagagaaaaataaatgcttcagaatggcttgtaatctttgattttacatagaacagaaagaaaaaaatgcaatggcttttgttcctaggtctcatataaatgtccgacttgttaacaacaatccataaatacaaattaataggcaggcatggtgttcaactattcctatcaaagcctacacacacacacacacacacacacacacacacacacacagacacacaaagttaagataagtttaatactgttgtagaattaayagtgaaaaaatggaggcattttctaaactataggattaatatatagaagaatatcatcatggaagaaagtaaaataaataaaatttttaaatag

SEQ ID NO: 55475 - DNA, 613 bp, Homo sapiens
cttcaaattgagatcacgtagttgtcctctggatcacagaaatccctggttttgttgtttgaagttttagctttgttaataaaattcarttacgctcattgatttgaaaaatattttaactgacaaagctcagagtaaattagataagtgatttcaaacatctatatttgatacttaataaaatttgacatttaataattacaattttagtagtaatttgtactaattttatttttagagttttacataatctcatttttatatcaaaatatgtttacagggaaaataagagtgaataagataaattccagacatagtcataatacatgcttattacttaagtatgattaagtattagcataagttaaaattttcaactcatattattcctctttttaatctgcaacaaacagttttataaaaatagtacagctctaaaaactgggaagagcaaacttggagaaaaagagggacacgattatagaataaataaatctgaagcttttacaggattaaaaactgcacatctgtaaatctcagctttattttattttatgctattaaagattctttgaaaaccaaactcaataaatgattgtctgaaattttataa

SEQ ID NO: 55476 - DNA, 590 bp, Homo sapiens
catggcttgaagttcttagagacttctgccctttctctagaagggctaagccttgtttgaaatgcttgttccctggtaccataaagaaatagcacttgaatataaatttaatttcctcagccaggccrtttttatactttctgcagaaagggtacactcgccagcagttttgccacgagagtatactgaacaaaggagacaaggtcatttataacctgatgtgtccaccctactgctgggtccggtttccactggctggaacgggaccgcacattccgtgtttgtcctgattggctagcaacttagaactttttaaaagaggcaaaggcagaggagaacaaaggaaggagaaagtaacttgtggaatgttgagaaaggtaaaaacaccttcaaataaggaagaggaacaggctatgacctaatgcttgcttggaccagtataagcatgccagggcaaatatttaggctaaattgtgagagctaaaaacataaagtacattgatttctttattacggctagcagatatttaagaatgttagcacaggtctttgaataaattttgcttctaagggaagttactatttattcc

SEQ ID NO: 55477 - DNA, 622 bp, Homo sapiens
aagtggcggcatggctgtgcaagggaggctggaagatgcctgggagacaagtgattcttcaggcctcaggctctgctctgtgttggctgggggtgatcaccagcacagctcatgggctggctctaagtgatgatgagctgatgtgaagtctgccagtggttaagcaaccaggcctacatagcagatggaaagaaatgcaagaaagtggactgaaggcttttgagccttagcaataaaccaacagtccagctaagtcccctatggaggggtattcccggaaggagtgatattccaccttggcctctgagtccacccaagaggtctggaagcaaaagggrtaccctctaaagggaacgatccagtttatgtttctaccacacataagacccagctatgagtatcccaagtacagctggtcccaagaaagggtcctgcggatctattctctacatcagtgtttaccagcccacatggtgagttcctaggcaggctgaagaaatgaagagaaatgcacagaaaggtaggaacaagactctgactggcatgtcgctgatgccaagagcagagggaagtgcccaaatggaaagcgccccaggctgtggctcctcacacagtggaggga

SEQ ID NO: 55478 - DNA, 817 bp, Homo sapiens
tacgactgcctgaaacttgtgactctcattcctgcagtgtggagccaacagacaattagctccctgttacgcacccagagtcccctagttctagacttgcgcacttgaatcaactttgcacccttcccctccctcatcctttcatccacaaatttgcatgtcctccgattcctgcctctaaatatttcctcccaaaattccagactattctgagacccgaatattcttactattctgagacagatgcagataaagacagatctttatcactggttctcttgcctccagaccctcacagttcccatctaccctacccagtcctgcaggttataaccataccattccttgcctcaatcttccattgctctcatggtccaccaatttaagaataaactttctaccatgactttttactctatggtcccacttaccttttcaggtgtaactcttgcttttctggcttagtctgatagatgatatgaggtttctcaacaacagctgacygtccagcctgccttccctgtatgtgcaggatattctctccctagccccaccctgtctccactggctccatatagcccccacccagatatgattcttccaacttacataatctcgtattttataaatgtgtctttctttgctataggtttttcttagtgttatttttagcagcattatacccatttttatccagcattaaggaccaacaaaagtatcttgcaaaaatcaaatgctctataaatgtctttggaagtgaatgggattactctatttggctcctgggctcatgaggagaaatgaacgtcattatcca

SEQ ID NO: 55479 - DNA, 560 bp, Homo sapiens
caccgtgcccggacaatgtgcaattacttttaatgcaaaaaattgtaattccttttgcaccaacctaatagagtgtgtctgtcttggtggagctgttattcccccgaccacagtagatacaacagcataggtaggtttttccaatgaggaagagaatagtgaggcttctcctgtcatttctctagctcgtgtccaggagcatagcatgtcctcaccctcaggtaccatgtctttttggtgtcttcctcttgcctattctggctattggctaaagtccacccttatgaagaaaaacaaacaaacaaacatgtaacccagaatcttttccccaatctttgccccaaattagtgcagaggagggtctgtagwacaaggctcagccacgtgagggattgttacaaggagacaggggggttctgatgttagggagactggcctagacaatcacattcttgtggaagaacaaggacaaggttgtctgccagtgtgggatgagcccgggtggatcacgatggactcagagctgctgatgtttaactgaagaaaagggagatggaggc

SEQ ID NO: 55480 - DNA, 772 bp, Homo sapiens
tgtgacattcccttaaagaataatctatagggaaaagatccaaatctattattatattaagggttttctctacttcttccccgctctcaatctcatgtgcagatataccaaataatcaacactctacccagtttatttcatatataagtacattcagtaaagctgcccaatgttatcaaaactgtgaggggttgtaaccatcacagaggatatacttaaactcatatttcattttgttgactctctaacaagcttcagaaacatggaaaaaatttaacctgggtagaaggaaggagaaatctggaagataaaaggagatgaggccaatgagctttaacagagtaaccctgggaaaaagactttgaagcagagagtgaagactattagctgtaatacacagggtcttgtgaatccacaaaaattttaaggactgacttggtagaacctataattgaaagaaaaacaccacaataataagaggcaataaggacagtctgcagagagtagtgcccaatgctacaatactacagaaagaaaactacaattgaccaaaccagacatggaagtccccgagctaaagccacattagagaactagmagagagggatagaggagtgtttagaagcaaaatttggcagcagtgaacttgaggaataaaggagatgatttaaagactatttttgattgcttatttgagagataataacactgtacagggtttagaagtcatggaaatttatatattcatcatatttagcttgaacaatggaaa

SEQ ID NO: 55481 - DNA, 729 bp, Homo sapiens
tgatccagaccccaagagagtgtgagtccatatggtaaagtgaaagcaagtttgttaagaaagtaaaggaataggctgggcgtggtggctcacacctgtaatcccagcactttgggagcctgaggcagatggatcatttgactctgttctttgtgttctaaatgacttcatctctcaggccatcttcatctctcaggttggttcagggatgggtacctgacctaggtccccccgcaatttcttgggatttctggatttgagactgagatttgggtttagtctgttgctgatggtggagaagatgtaacacaacaatcctgagagttgtcagcaaccattttttctgcctctgaagaaagtccgtggccagagcatcaggatgataagagggagttgaccaacatgggrgtcccttctccagtcgctcctttggctcaagttcaccttcctgccctggtcaaggttgagctgtaatgttccagcattcccatcagttcaatgtgggtttctgtcacgctatcaactaaagaagatcttaactaagacactctgcctgttatgttacaaatcccattttagagaataagggtcggacagggtatgtagcttggctaatgccaaagagaagtgagtggcagagatgaggtctgagtccaggcccaggacactccaaaagccatgctccttgtggccttccccaaaagaactcaatgtcgttggccaacctgt

SEQ ID NO: 55482 - DNA, 729 bp, Homo sapiens
tgatccagaccccaagagagtgtgagtccatatggtaaagtgaaagcaagtttgttaagaaagtaaaggaataggctgggcgtggtggctcacacctgtaatcccagcactttgggagcctgaggcagatggatcatttgactctgttctttgtgttctaaatgacttcatctctcaggccatcttcatctctcaggttggttcagggatgggtacctgacctaggtccccccgcaatttcttgggatttctggatttgagactgagatttgggtttagtctgttgctgatggtggagaagatgtaacacaacaatcctgagagttgtcagcaaccattttttctgcctctgaagaaagtccgtggccagagcatcaggatgataagagggagttgaccaacatgggggtcccttctccagtcgctcctttggctcaagttcaccttcctgccctggtcaaggttgagctgtaatgttccagcattcccatcagttcaatgtgggtttctgtcacrctatcaactaaagaagatcttaactaagacactctgcctgttatgttacaaatcccattttagagaataagggtcggacagggtatgtagcttggctaatgccaaagagaagtgagtggcagagatgaggtctgagtccaggcccaggacactccaaaagccatgctccttgtggccttccccaaaagaactcaatgtcgttggccaacctgt

SEQ ID NO: 55483 - DNA, 1545 bp, Homo sapiens
atggtttagccagccctacaggtgattctaactcatgctaaagtctgaraaccattagcctatattatccaggctctttcattttgtttccagttccctgcagctctaattcattactaacagaggaggcaggcttttattttatcaaaattataatcataaagcatacttctcacaattaaaccacaaggggggtgtcttttagaaaatatggcctacagaaggaaaaatgagaacatttagccgaagaattagatttttttttcttttttttcttttttttttttttgagatggagtctcactctgtcacccaggctggagtgcagtggcctgatcttggttcactgcaacctccacctcccgggttcaagcgattctgccgcagcctcccgagtagctgggactacaggcatgtgccaccacgcacagctaattttgtatttttagtagagatggggtttcaccatgttggcgaggctggtctcgaactcctgacctcaaatgatccgcctgcctaggccttccaaagtgttgggattacaggcatgagtcaccatgcccggcccaaagaattagaatttttaccaaaactatagccctctattgctatctattgtactcagtgttaaggctacaatacagtccttaaccttgagaatcttggaagaagacagcctgggcaataaattattatcaaacaatgtaatgaatcctatatgagtatagaacacatttatgaggatagaatggagataattaattctgcagaagacttggtttggatggacaggaaaagctttagaaagagagggatgtgcttgaatgagcctttataaatatattactgtattattattattttttgagacagggtctcattctgttgcccaggctggagtgtagtggcgtgatcatagctcctcaaaatcctgggctcaagtggtcctctcacctcagcctcctgagtagccgggcctacaggtgcatgccatcatgctcagctaatttttaagttgtttttttttgtagagatggggtctcactatgttggccaggctggtcctgaactcctggcctcaagtgatcctcccaccatggcctcccaaagtgttaggattataggcatgaggcactatgtccagcctctctattttttttgaaggtagaagaactacaaaagctagcctgggtgtggtggctcacacctgtaatcccagcactttgggaggttgaggtgggtggatcacttgaggccaggaatttgagaccagcctggccaatatggcgaaaccccgtctctactaaaaaaatacaaaaattagctaggtgtggtggcatacacctgtaatcccagctactcgggaggctaacgcacgagaatcacttgaacccaggaggcagagtttgcagtgagccaaaatcgcaccactgcactccagcctgggcgacagagcaagaatctgtcgcaaaaaaaaaaaaaaattattttaataaagagtacttattaattaagtccccactaatctagctttgatttgattaa

SEQ ID NO: 55484 - DNA, 512 bp, Homo sapiens
gccctatcttctctctggggtggtctagccccacctggcactcccccartctttgtccccgtgtctgccttgcctgatggtggccagggggcctttccggaataacgatggtattggctcagattaagggcaactagctggctcttggcttttcatttttatataacaactaatctccttctaatcagccattattaaattatattccatttttaattcattcacagatcaccgttgggacagctggatggataattggagagagataatttatgtaaatgaggagcagcagaaggtgggggagagggaggcccagggcgccaaacggagccccctctgtgtccaggctggggagggggcagtggcctggctcctcctggaaacccgcgcctggggatgctgggaggattgggggctgccatgggacctcagggctcctgaccggtggttcctggtgtggcccctcagcatcaccttgaacacttttggcaaatgggaagctcactactttg

SEQ ID NO: 55485 - DNA, 512 bp, Homo sapiens
gccctatcttctctctggggtggtctagccccacctggcactcccccagtctttgtccccgtgtctgccttgcctgatggtggccagggggcctttccggaataacgatggtattggctcagattaagggcaactagctggctcttggcttttcatttttatataacaactaatctccttctaatcagccattattaaattatattccatttttaattcattcacagatcaccgttgggacagctggatggataattggagagagataatttatgtaaatgaggagcagcagaaggtgggggagagggaggcccagggcgccaaacggagcccccyctgtgtccaggctggggagggggcagtggcctggctcctcctggaaacccgcgcctggggatgctgggaggattgggggctgccatgggacctcagggctcctgaccggtggttcctggtgtggcccctcagcatcaccttgaacacttttggcaaatgggaagctcactactttg

SEQ ID NO: 55486 - DNA, 706 bp, Homo sapiens
aagaccttctaggaactcaaaggcaggagcaaaggcactcaagtgagaaactgggaactgttcagagtaactgcaacagagacttcatatataggagaggaagaaaacgaaacggaagggttgcttaggattacatgtagagagtcttaaaatgcygggtcaagagattgagactttattagtagacacgggaaggtattaagggtttctaaatactactttcgggtgttgggcagtggtaggatagaatggaaggcaggagaccaagtagatgactgtaaagcccccaactatccattaagtatattaagggggaaaacagtagattatttatcattacagttgtactttctggggaggtctgtgctttaaatatccaactcggccctctgaggaaaaactcaccctcctgtaaaagggacatatttattatgaagacacaaaaaccatcacatacaaagtacaatactataacatcctgaaatacatatacacacatactgtacataaatttatattatcaatataaaaatacatcattaacatttctaaggatgacaaatactaaaccaataaatattgcaattctaaaacatctacttacattaagtgctggtgaataggatgacggtaaaagaaagaggacaaagcggaccagaaaaccaaccacctggcttccagttacagacttgagttggtttggggg

SEQ ID NO: 55487 - DNA, 731 bp, Homo sapiens
aatttcggctcactgcaacctccacctcccgaattcaagcgattctcgtgcctcaggcccccaagtagctgggactayaggcatgcaccatcatgcccagctaatttttgtattttagtagagacagggtttcaccatattggccaggatggtctcgatcttttgacctatgatccacctgcctcggcctcccaaagtgctgggattacaggcgtgagccaccatgcccggccccaggatattcttttgtgcaaagtttaggaaactccatgcacttctcaaaacatcagatgctggggactggcttatacaagaaatatggagaacacatataatagattttagccatgggctagattttcagattttaacagagacagataagtggtgaagaactccatgaaagttgtatttaagtcagaagattctttttcgtgtgtgtgcgtttctattatatagatgaactatttcatatgtgctgtcagaggggacaatcccaccatcccatagcatgttactttaaggtcaattagggcttctagctttcaaccaaatgggaactcctataaaccatcccgtttctcttgtctttcaggctatactgactttcttgcttgaagctgtaacagattaattagaactcaaaagtcctttctgtcaccttcacattggtctttagacaaccttggatgggcctttcactatacaagctaattccaggagggactcag

SEQ ID NO: 55488 - DNA, 731 bp, Homo sapiens
aatttcggctcactgcaacctccacctcccgaattcaagcgattctcgtgcctcaggcccccaagtagctgggactataggcatgcaccatcaygcccagctaatttttgtattttagtagagacagggtttcaccatattggccaggatggtctcgatcttttgacctatgatccacctgcctcggcctcccaaagtgctgggattacaggcgtgagccaccatgcccggccccaggatattcttttgtgcaaagtttaggaaactccatgcacttctcaaaacatcagatgctggggactggcttatacaagaaatatggagaacacatataatagattttagccatgggctagattttcagattttaacagagacagataagtggtgaagaactccatgaaagttgtatttaagtcagaagattctttttcgtgtgtgtgcgtttctattatatagatgaactatttcatatgtgctgtcagaggggacaatcccaccatcccatagcatgttactttaaggtcaattagggcttctagctttcaaccaaatgggaactcctataaaccatcccgtttctcttgtctttcaggctatactgactttcttgcttgaagctgtaacagattaattagaactcaaaagtcctttctgtcaccttcacattggtctttagacaaccttggatgggcctttcactatacaagctaattccaggagggactcag

SEQ ID NO: 55489 - DNA, 731 bp, Homo sapiens
aatttcggctcactgcaacctccacctcccgaattcaagcgattctcgtgcctcaggcccccaagtagctgggactataggcatgcaccatcatgcccagctaatttttgtattttagtagagacrgggtttcaccatattggccaggatggtctcgatcttttgacctatgatccacctgcctcggcctcccaaagtgctgggattacaggcgtgagccaccatgcccggccccaggatattcttttgtgcaaagtttaggaaactccatgcacttctcaaaacatcagatgctggggactggcttatacaagaaatatggagaacacatataatagattttagccatgggctagattttcagattttaacagagacagataagtggtgaagaactccatgaaagttgtatttaagtcagaagattctttttcgtgtgtgtgcgtttctattatatagatgaactatttcatatgtgctgtcagaggggacaatcccaccatcccatagcatgttactttaaggtcaattagggcttctagctttcaaccaaatgggaactcctataaaccatcccgtttctcttgtctttcaggctatactgactttcttgcttgaagctgtaacagattaattagaactcaaaagtcctttctgtcaccttcacattggtctttagacaaccttggatgggcctttcactatacaagctaattccaggagggactcag

SEQ ID NO: 55490 - DNA, 731 bp, Homo sapiens
aatttcggctcactgcaacctccacctcccgaattcaagcgattctcgtgcctcaggcccccaagtagctgggactataggcatgcaccatcatgcccagctaatttttgtattttagtagagacarggtttcaccatattggccaggatggtctcgatcttttgacctatgatccacctgcctcggcctcccaaagtgctgggattacaggcgtgagccaccatgcccggccccaggatattcttttgtgcaaagtttaggaaactccatgcacttctcaaaacatcagatgctggggactggcttatacaagaaatatggagaacacatataatagattttagccatgggctagattttcagattttaacagagacagataagtggtgaagaactccatgaaagttgtatttaagtcagaagattctttttcgtgtgtgtgcgtttctattatatagatgaactatttcatatgtgctgtcagaggggacaatcccaccatcccatagcatgttactttaaggtcaattagggcttctagctttcaaccaaatgggaactcctataaaccatcccgtttctcttgtctttcaggctatactgactttcttgcttgaagctgtaacagattaattagaactcaaaagtcctttctgtcaccttcacattggtctttagacaaccttggatgggcctttcactatacaagctaattccaggagggactcag

SEQ ID NO: 55491 - DNA, 731 bp, Homo sapiens
aatttcggctcactgcaacctccacctcccgaattcaagcgattctcgtgcctcaggcccccaagtagctgggactataggcatgcaccatcatgcccagctaatttttgtattttagtagagacagggtttcaccatattggccaggatggtctcgatcttttgacctatgatccacctgcctcggcctcccaaagtgctgggattacaggcgtgagccaccatgcccggccccaggatattcttytgtgcaaagtttaggaaactccatgcacttctcaaaacatcagatgctggggactggcttatacaagaaatatggagaacacatataatagattttagccatgggctagattttcagattttaacagagacagataagtggtgaagaactccatgaaagttgtatttaagtcagaagattctttttcgtgtgtgtgcgtttctattatatagatgaactatttcatatgtgctgtcagaggggacaatcccaccatcccatagcatgttactttaaggtcaattagggcttctagctttcaaccaaatgggaactcctataaaccatcccgtttctcttgtctttcaggctatactgactttcttgcttgaagctgtaacagattaattagaactcaaaagtcctttctgtcaccttcacattggtctttagacaaccttggatgggcctttcactatacaagctaattccaggagggactcag

SEQ ID NO: 55492 - DNA, 731 bp, Homo sapiens
aatttcggctcactgcaacctccacctcccgaattcaagcgattctcgtgcctcaggcccccaagtagctgggactataggcatgcaccatcatgcccagctaatttttgtattttagtagagacagggtttcaccatattggccaggatggtctcgatcttttgacctatgatccacctgcctcggcctcccaaagtgctgggattacaggcgtgagccaccatgcccggccccaggatattcttttgtgcaaagtttaggaaactccatgcacttctcaaaacatcagatgctggggactggcttatacaagaaatatggagaacacatataatagattttagccatgggctagattttcagattttaacagagacagataagtggtgaagaactccatgaaagttgtatttaagtcagaagattctytttcgtgtgtgtgcgtttctattatatagatgaactatttcatatgtgctgtcagaggggacaatcccaccatcccatagcatgttactttaaggtcaattagggcttctagctttcaaccaaatgggaactcctataaaccatcccgtttctcttgtctttcaggctatactgactttcttgcttgaagctgtaacagattaattagaactcaaaagtcctttctgtcaccttcacattggtctttagacaaccttggatgggcctttcactatacaagctaattccaggagggactcag

SEQ ID NO: 55493 - DNA, 801 bp, Homo sapiens
gatccagccaaagggagaaacctcagtgaacactgggcatttatgtgcaaactcagaaaaaaaatcttgaaataagatcaaatatctagsagtaagaacaatgctaaaataagctttccctaacaaagcctaaaactaagtctcaacagcatcaaagtatttcagataatttaatagattttcaggaaaaaaaaaaccacataccactttctagcaaaagataaatatccagagcctgtacagtatatcattacaatgttcagcataccatcaaaattactagatatgcaaagaatacaaccaaagatgatctagatattacagttaacagataagggcttcaaaataattatgcttaatgagttgaaaaaagaaaaatatgagtaaaatctatgtatgaaagtgtagtaatttacacagcagaaggtaagaatactgtatttaaatagaaaatgtttattgtgacgcataaagagaaaaaaatggaaagaaccgataagaatatgaaaatgtgggtagaacacagtcagaagatctaacagatatataaggagttccagaaagaaagaagagagagaaagggacagaattaatatctgaagaaatagtagctgagaatttttcaaatctgataaaatatattatctcatggattcaagcaactaagcaaaccatcaaaacaataaatacagcaaaaactacaactaagcacaaaagaacacagctgacaagatctacgaaaaagagaagaccttataagacaggttacttttaacgatgcaataatcaacaataaagctt

SEQ ID NO: 55494 - DNA, 1193 bp, Homo sapiens
taaaatacctataattggccatacgaaacaattggtacttgacatatactgagatcgttttattttgtgctagacaaatgaagtcatagaacagaatgtgctttaaatattatgaatagtgcttgcatgtgtgtgtgtctatagatgcatattaggccgctgaaaagttttattattctttccaggagagagactgccaacttttgaacctaactagaacaagtatattgcttcttcatatttttattaaggcaaagagagtctagttaaaaataattcaaattgtgttggaaatgctataaattgctgtgaagagagttgctggctgtggcttgtcagagcaaacatattgtacaaatcttaggggagaattagtgcttgtgcattaaaatcaaatcatcttgcagyacaccgagaaaaaggttagatttttaaaataatttcaaagtcatgaaaagagcaaatatgctccacaaagagcctagcaaccctcaatgaccaatgccccttttatgtagtttggtatctgaattagaatcctagaatctacaaattcctctgggtgtgggtgctgcatcttgaggattttataacactgccatcaccaagctctcttttgatattcactttaaggagataatttatgggcaaccagagagcataaaccaaagtagatatctatctggatagctagatacatctccatatcattgacaggatacattctggctgagtgtgagtacaacctatggatgtggttggagagaacaagtgttccacctgaatagcagatcaggattattccttctcatctgctgcaatggctcaatgtgttaaggagaggagcgagacagcaagaaccgcattcattcagtcatacagaccaaaaggaggaatgtcgcccagccctctaaactgacccagaacccagctcatgtctcaactgctacctctcctacttagaaagaagtaactcaaccaaagcagggctctggacaaatatatttttattgatcatatacaaatagatgaagatggacttggatgttaagaaaaataatactatacaaaatcgagagtagacagtcgcccctagacttaaattaagggtgtgtacattagatagtttaatccaatatatcaggtaaaaacttgaacaaaacttttggcctcttccttaaaattccaggatg

SEQ ID NO: 55495 - DNA, 1193 bp, Homo sapiens
taaaatacctataattggccatacgaaacaattggtacttgacatatactgagatcgttttattttgtgctagacaaatgaagtcatagaacagaatgtgctttaaatattatgaatagtgcttgcatgtgtgtgtgtctatagatgcatattaggccgctgaaaagttttattattctttccaggagagagactgccaacttttgaacctaactagaacaagtatattgcttcttcatatttttattaaggcaaagagagtctagttaaaaataattcaaattgtgttggaaatgctataaattgctgtgaagagagttgctggctgtggcttgtcagagcaaacatattgtacaaatcttaggggagaattagtgcttgtgcattaaaatcaaatcatcttgcagtacaccgagaaaaaggttagatttttaaaataatttcaaagtcatgaaaagagcaaatatgctccacaaagagcctagcaaccctcaatgaccaatgccccttttatrtagtttggtatctgaattagaatcctagaatctacaaattcctctgggtgtgggtgctgcatcttgaggattttataacactgccatcaccaagctctcttttgatattcactttaaggagataatttatgggcaaccagagagcataaaccaaagtagatatctatctggatagctagatacatctccatatcattgacaggatacattctggctgagtgtgagtacaacctatggatgtggttggagagaacaagtgttccacctgaatagcagatcaggattattccttctcatctgctgcaatggctcaatgtgttaaggagaggagcgagacagcaagaaccgcattcattcagtcatacagaccaaaaggaggaatgtcgcccagccctctaaactgacccagaacccagctcatgtctcaactgctacctctcctacttagaaagaagtaactcaaccaaagcagggctctggacaaatatatttttattgatcatatacaaatagatgaagatggacttggatgttaagaaaaataatactatacaaaatcgagagtagacagtcgcccctagacttaaattaagggtgtgtacattagatagtttaatccaatatatcaggtaaaaacttgaacaaaacttttggcctcttccttaaaattccaggatg

SEQ ID NO: 55496 - DNA, 1193 bp, Homo sapiens
taaaatacctataattggccatacgaaacaattggtacttgacatatactgagatcgttttattttgtgctagacaaatgaagtcatagaacagaatgtgctttaaatattatgaatagtgcttgcatgtgtgtgtgtctatagatgcatattaggccgctgaaaagttttattattctttccaggagagagactgccaacttttgaacctaactagaacaagtatattgcttcttcatatttttattaaggcaaagagagtctagttaaaaataattcaaattgtgttggaaatgctataaattgctgtgaagagagttgctggctgtggcttgtcagagcaaacatattgtacaaatcttaggggagaattagtgcttgtgcattaaaatcaaatcatcttgcagtacaccgagaaaaaggttagatttttaaaataatttcaaagtcatgaaaagagcaaatatgctccacaaagagcctagcaaccctcaatgaccaatgccccttttatgtagtttggtatctgaattagaatcctagaatctacaaattcctctgggtgtgggtgctgcatcttgaggattttataacactgccatcaccaagctctcttttgatattcactttaaggagataatttatgggcaaccagagagcataaaccaaagtagatatctatctggatagctagatacatctccatatcattgacaggatacattctggcygagtgtgagtacaacctatggatgtggttggagagaacaagtgttccacctgaatagcagatcaggattattccttctcatctgctgcaatggctcaatgtgttaaggagaggagcgagacagcaagaaccgcattcattcagtcatacagaccaaaaggaggaatgtcgcccagccctctaaactgacccagaacccagctcatgtctcaactgctacctctcctacttagaaagaagtaactcaaccaaagcagggctctggacaaatatatttttattgatcatatacaaatagatgaagatggacttggatgttaagaaaaataatactatacaaaatcgagagtagacagtcgcccctagacttaaattaagggtgtgtacattagatagtttaatccaatatatcaggtaaaaacttgaacaaaacttttggcctcttccttaaaattccaggatg

SEQ ID NO: 55497 - DNA, 706 bp, Homo sapiens
ccccccacccccaatagcaacaagtctgtttccaagcaatgggcaagcagggctgagaacttgccccaggatacctgcctcccagctgcaaaagcaagtagggcttttgtgcttcccctacctgtgaattctgcacaccggattcataccctcccccaggttctggccagaagacttctcaatggcttcaaattgttacaaagttcagctggaggtttccttcttcctgttcccttttcccagtgcctctggcagcctgcctcaaggacccctgtgaggcaaggcagaaacgacttgctagggcaccmagcgagcccacagggcttttcccgctgcttcttctacgcctgtattttgctcagctctctaaattgactcagctccgggtaaggtcagaatcttctcccgtgacctagactttcaggtttcccagtgagggtgtgtgttcggagcagatgattcccctttcctactttcacagtttgggcactcacagtatttggggtgtctcccgggtcctgcaggagcaattcgcttccttcagagggtctgtgggttctctcagctttcccgatttattcctgcagtcattctggagcagaagttcaacaacgcgagcctccacatgctgctctgtccgtccgagtggtagctgcaattcctacttccacattctcacttgtcagatcaaaacttttcttgggga

SEQ ID NO: 55498 - DNA, 706 bp, Homo sapiens
ccccccacccccaatagcaacaagtctgtttccaagcaatgggcaagcagggctgagaacttgccccaggatacctgcctcccagctgcaaaagcaagtagggcttttgtgcttcccctacctgtgaattctgcacaccggattcataccctcccccaggttctggccagaagacttctcaatggcttcaaattgttacaaagttcagctggaggtttccttcttcctgttcccttttcccagtgcctctggcagcctgcctcaaggacccctgtgaggcaaggcagaaacgacttgctagggcaccaagcgagcccacagggcttttcccgctgcttcttctacgcctgtattttgctcagctctctaaattgactcagctccgggtaaggtcagaatcttctcccgtgacctagactttcaggtttcccagtgagggtgtgtgttcggagcagatgattcccctttcctactttcacagtttgggcactcacagtatttggggtgtctcccgggtcctgcaggagcaattcgcttccttcasagggtctgtgggttctctcagctttcccgatttattcctgcagtcattctggagcagaagttcaacaacgcgagcctccacatgctgctctgtccgtccgagtggtagctgcaattcctacttccacattctcacttgtcagatcaaaacttttcttgggga

SEQ ID NO: 55499 - DNA, 706 bp, Homo sapiens
ccccccacccccaatagcaacaagtctgtttccaagcaatgggcaagcagggctgagaacttgccccaggatacctgcctcccagctgcaaaagcaagtagggcttttgtgcttcccctacctgtgaattctgcacaccggattcataccctcccccaggttctggccagaagacttctcaatggcttcaaattgttacaaagttcagctggaggtttccttcttcctgttcccttttcccagtgcctctggcagcctgcctcaaggacccctgtgaggcaaggcagaaacgacttgctagggcaccaagcgagcccacagggcttttcccgctgcttcttctacgcctgtattttgctcagctctctaaattgactcagctccgggtaaggtcagaatcttctcccgtgacctagactttcaggtttcccagtgagggtgtgtgttcggagcagatgattcccctttcctactttcacagtttgggcactcacagtatttggggtgtctcccgggtcctgcaggagcaattcgcttccttcagagggtctgtgggttctctcagctttcycgatttattcctgcagtcattctggagcagaagttcaacaacgcgagcctccacatgctgctctgtccgtccgagtggtagctgcaattcctacttccacattctcacttgtcagatcaaaacttttcttgggga

SEQ ID NO: 55500 - DNA, 706 bp, Homo sapiens
ccccccacccccaatagcaacaagtctgtttccaagcaatgggcaagcagggctgagaacttgccccaggatacctgcctcccagctgcaaaagcaagtagggcttttgtgcttcccctacctgtgaattctgcacaccggattcataccctcccccaggttctggccagaagacttctcaatggcttcaaattgttacaaagttcagctggaggtttccttcttcctgttcccttttcccagtgcctctggcagcctgcctcaaggacccctgtgaggcaaggcagaaacgacttgctagggcaccaagcgagcccacagggcttttcccgctgcttcttctacgcctgtattttgctcagctctctaaattgactcagctccgggtaaggtcagaatcttctcccgtgacctagactttcaggtttcccagtgagggtgtgtgttcggagcagatgattcccctttcctactttcacagtttgggcactcacagtatttggggtgtctcccgggtcctgcaggagcaattcgcttccttcagagggtctgtgggttctctcagctttcccgatttattcctgcagtcattctggagcagaagttcaacaacgcgagcctccacatgctgctctgtccrtccgagtggtagctgcaattcctacttccacattctcacttgtcagatcaaaacttttcttgggga

SEQ ID NO: 55501 - DNA, 552 bp, Homo sapiens
aaatctaaaatttgtagggcagcctggcaggctggagacccagagaagagttgatgttgcagctgaagtgggaaggaagataggaggcagaattccgtcttcctcaggagacttcagttgtttctcttaaggccttcaattgtttggatgaggcccacccacaccacaaaaggtaattggctttactcaaagtctgctgattgaaatatccttagatctaaaaaacatctttatagcaacatctagaccaacgtttgaccaaacatctgggcactgaaatctgggcaagttgacacaaggaattaaccatcacacatatcaaaatgggacattttcatcattccagttatcttttgaaagttctctgatttctttcaytatttaaaatattctccaaataacaaacagttcgccaatgctgataattcttttttttttttcctttttctgtttttttctctctttcataagacagggtctcacttggtcacccaggctagagtgcagtgatgtgatcatagctcactgctgccttaaactcccgagtgcaaa

SEQ ID NO: 55502 - DNA, 552 bp, Homo sapiens
aaatctaaaatttgtagggcagcctggcaggctggagacccagagaagagttgatgttgcagctgaagtgggaaggaagataggaggcagaattccgtcttcctcaggagacttcagttgtttctcttaaggccttcaattgtttggatgaggcccacccacaccacaaaaggtaattggctttactcaaagtctgctgattgaaatatccttagatctaaaaaacatctttatagcaacatctagaccaacgtttgaccaaacatctgggcactgaaatctgggcaagttgacacaaggaattaaccatcacacatatcaaaatgggacattttcatcattccagttatcttttgaaagttctctgatttctttcactatttaaaatattctccaaataacaaacagttcgccaatgctgataattcttttttttttttcctttttctktttttttctctctttcataagacagggtctcacttggtcacccaggctagagtgcagtgatgtgatcatagctcactgctgccttaaactcccgagtgcaaa

SEQ ID NO: 55503 - DNA, 552 bp, Homo sapiens
aaatctaaaatttgtagggcagcctggcaggctggagacccagagaagagttgatgttgcagctgaagtgggaaggaagataggaggcagaattccgtcttcctcaggagacttcagttgtttctcttaaggccttcaattgtttggatgaggcccacccacaccacaaaaggtaattggctttactcaaagtctgctgattgaaatatccttagatctaaaaaacatctttatagcaacatctagaccaacgtttgaccaaacatctgggcactgaaatctgggcaagttgacacaaggaattaaccatcacacatatcaaaatgggacattttcatcattccagttatcttttgaaagttctctgatttctttcactatttaaaatattctccaaataacaaacagttcgccaatgctgataattcttttttttttttcctttttctgtttttttctctctttyataagacagggtctcacttggtcacccaggctagagtgcagtgatgtgatcatagctcactgctgccttaaactcccgagtgcaaa

SEQ ID NO: 55504 - DNA, 552 bp, Homo sapiens
aaatctaaaatttgtagggcagcctggcaggctggagacccagagaagagttgatgttgcagctgaagtgggaaggaagataggaggcagaattccgtcttcctcaggagacttcagttgtttctcttaaggccttcaattgtttggatgaggcccacccacaccacaaaaggtaattggctttactcaaagtctgctgattgaaatatccttagatctaaaaaacatctttatagcaacatctagaccaacgtttgaccaaacatctgggcactgaaatctgggcaagttgacacaaggaattaaccatcacacatatcaaaatgggacattttcatcattccagttatcttttgaaagttctctgatttctttcactatttaaaatattctccaaataacaaacagttcgccaatgctgataattcttttttttttttcctttttctgtttttttctctctttcataagacagggtctcacttkgtcacccaggctagagtgcagtgatgtgatcatagctcactgctgccttaaactcccgagtgcaaa

SEQ ID NO: 55505 - DNA, 720 bp, Homo sapiens
ttgttgccggtgatgggacctgggcacatgtttcagctctttggttctgttactcatgtgaaaaatgacaatttggactagatggaatttaagaccaagtccaaggctaagattctaatttttatatcagtgatagaaattgcacaggttttcattctattgctgttattaacaaggattaggtttggctgcatttgacaggaaacccccaaataagtggcttatagaagttacaggtgatttctctttttcrtaagaaaaagaggtttgcaactaggagttcagggctgataagagggcaatgagtgtcgtcattagggatctaggcctccatctttctgctctgttatcctcaggacatgacttctatcctcaaggtgacttcagggtcacctcatggatcaatagggctgctggggttccagcatcaccatcatttaacaggtaagcaataggaagaaatgggaagggtagcacttgcctcttcctttttgaaagacattttattttgaaataattttagattaatagaaaatttacaaaaatagtacagagagtttccgtgtatccttcctttaactttccctaatgttaacatcttacaaaaccatggtacagctttcaaaatgcagaaattaacattggtacaatattatcaacctgataatattatttattagaattttgcttatttttatactaatgtcctttttggctcca

SEQ ID NO: 55506 - DNA, 780 bp, Homo sapiens
cttgcgttcaggagttggagaccagccaaggcaacattgtgagaccctgtctctggaaaaaaaccaaaattttagactttttactatgtgataggcagtgttctaagtgcttacacacattatcttactttgtttatataacaatgctatgatgtaggtacttctgtgaaatcgtttttactgactgggaaacagtctgggagctcaagtaacttgcccacaatcacttagctggcaagtgatggagacagaattagaactcaggtcttttgactgttctgctagttggtgtttctgggctgtgggttggccagactcacgcctattatttattctgaagtggggatgcacgaccaccttgccaggcctcggtctcccgcatgacactgtcttctgagtgatgcatgcaaattccagacagaggggatggctgtggtgtcacagcagagagccagcagacaaagacagtgtcttagacagggcagggggtagagaggcgacagttaagcaaggcagtgtgaacatgtgcaaatgtggrccagcttaacaccatgaacccagtgcctaacactgtgctagcatttatcaggctctcaatacacatttgtgaatgaatgaatgaatgaatgaatgaagggcaatggcaagaggcatgtgtgccttcaggtcttgttggagcctctacacattaattctcaacaggtaattgttgagtacctattgtgtgctagtgctgtgattgcgaccatttattgtgtacttactatgagacaggcaccg

SEQ ID NO: 55507 - DNA, 962 bp, Homo sapiens
agatgttgtttagaaaatattacatgagttgtgggtggtgagatccccatgtctgttaaccaacaaaacactctaagtttgtttaatcaacataatcacctattattagccagtaatgatgattttgttttgatttgcaactgaaaaatagtgcattgaagtattatgattgagctattgaattactaatataggtgattattgtacgctttcaaatgatagctcatcagtgtctgtctataggtctgctgttaacaattctctgtactgcatccttataaatagtggttagctggcccataagaggggagcactggagagcctgggaaatggaattcccagcagtataacccttggtatcatcttcgttttgggcacttccatagttgttagaaaacctcacgggttttccatggggagcttcaggcccatctctcctcactggtccaagactgaacacaactgaagcctcatagttcttcattgctttctaatttccagccccaatgtcatgtcctcttgaagtttcccaaagattcttatttttaaaaaaggatagtgagactatggggagaggctttcagcttttattacttaggtcctgtagaaaaaaccaaggtgcatataaagagatgctggtcattggtctttgcttttttttttttttttgacaagagtctcactctgtcacccaggctggagtgcagtggcatgatctcagctcactgcaacgttcacctcccgggttaaagcgattcttccmcctcagcctcctgagtagctgggattacaggcatgcgccaccatgcccgactacattttttttttttttgtatttttagtagagatggggtttcaccatgttggccaggctggtctcaaactcctgacctcatgatccacctgccttggcctcccaaagtgctggattataggcatgagcctccatgcctgactgttca

SEQ ID NO: 55508 - DNA, 616 bp, Homo sapiens
ccactgtgtatgtgtcactgcttcaagggatacacatactcctacacacattcacaaataaatagaaacaggtttatagaccatactgttataacttttaagtcatttttaaaaatgtgaatatttatccatgtcatcaaatatcattttaaaatatagattttagtgaatgaccaatatttcttgttctggatattacataccacttatgtttaagatttaggctgtcatacatataagttgtttctcttctttataactgaccctgtgtttaacatctttattaataaataattgtttatatctttgactgtttcctcacagtaaattcatagaattagagttagtaagtcaaacattatagaaaawttttaagaattttgatgaatattgataaattacctattaaaaaggatgtaacaggtaacattctcactagtgacatataaatatccactgtcttataacctcactaataatgagtattattgtaaaacaattgcttatatgatgtgttaaaaatgagcccagcatttaaagtcctttgatttgaccataagttgaacttgaagaaatatttttattgtccatatgtatttttttatcttgtgcatca

SEQ ID NO: 55509 - DNA, 616 bp, Homo sapiens
ccactgtgtatgtgtcactgcttcaagggatacacatactcctacacacattcacaaataaatagaaacaggtttatagaccatactgttataacttttaagtcatttttaaaaatgtgaatatttatccatgtcatcaaatatcattttaaaatatagattttagtgaatgaccaatatttcttgttctggatattacataccacttatgtttaagatttaggctgtcatacatataagttgtttctcttctttataactgaccctgtgtttaacatctttattaataaataattgtttatatctttgactgtttcctcacagtaaattcatagaattagagttagtaagtcaaacattatagaaaatttttaagaattttgmtgaatattgataaattacctattaaaaaggatgtaacaggtaacattctcactagtgacatataaatatccactgtcttataacctcactaataatgagtattattgtaaaacaattgcttatatgatgtgttaaaaatgagcccagcatttaaagtcctttgatttgaccataagttgaacttgaagaaatatttttattgtccatatgtatttttttatcttgtgcatca

SEQ ID NO: 55510 - DNA, 616 bp, Homo sapiens
ccactgtgtatgtgtcactgcttcaagggatacacatactcctacacacattcacaaataaatagaaacaggtttatagaccatactgttataacttttaagtcatttttaaaaatgtgaatatttatccatgtcatcaaatatcattttaaaatatagattttagtgaatgaccaatatttcttgttctggatattacataccacttatgtttaagatttaggctgtcatacatataagttgtttctcttctttataactgaccctgtgtttaacatctttattaataaataattgtttatatctttgactgtttcctcacagtaaattcatagaattagagttagtaagtcaaacattatagaaaatttttaagaattttgatgaatattgataaattacctattaaaaaggatgtaacaggtaacattytcactagtgacatataaatatccactgtcttataacctcactaataatgagtattattgtaaaacaattgcttatatgatgtgttaaaaatgagcccagcatttaaagtcctttgatttgaccataagttgaacttgaagaaatatttttattgtccatatgtatttttttatcttgtgcatca

SEQ ID NO: 55511 - DNA, 1048 bp, Homo sapiens
agaatggatgccaaggcaacataaaattataagcattcagcacagcccttctatgctttccacagtacgaatatgctgtcagtctgtgacttctccatccttctcccctgccattactgcatggtctcatgacactatggccctgtgatatcaggaaagggccgcaaaaaatggtgctaaaggtgccgtgaagatgccaaggaaatctataaacaatagatgtaaaaaatgcaaaattcacaggaaactgctctttaggaagtggccaggaaaacagcatgaaaatcaactggtgatagggctgtggtgatagggctgtggtgcaagtcacctagcatcctgcgggcaccacaaacatcacagctggaagaattaactaaccattgtgtagaaaagtaagtggagggtatgagaaaatatagctagagaaatgacatggctttgagggcttagaatacacagaggagggttgccagcgtgctgatgcagaactttatctccataagtcctgggctataaggatcccgtataagtggcttagttagcccttctatttctaggaattcattttccaaacatggtgagtatacacacacacacacacacacacacacacacacacacaccccaaatttgctaaaactggctrtgcacatgagttttatattggggagtgaggtcacatatttttaaaacaagggaagaacagaggaaggaaggatggaaaagaaggagagagagagggcaggagacaaggagaaagagagaaagaaggggttggggggaaagagagaggaagagagggaagaaaatggacagacaaaaacaagaaagtgcttttccagtgaactgtcaatgtcacaccctggtttcaggtggttgttttggatctgctggacaagtatggtttggaaactgaaagttaggtgagttcatgattttgtagattgtagatgtcacctggctgggacctggggaaatcactgtcacatgaaaagagcttgtttctgtaaatgtgcatttgggatgtgggccttgttctaacctt

SEQ ID NO: 55512 - DNA, 821 bp, Homo sapiens
ttagcactgctcaaaacaaagttgacataactaaaaactgctgattatgattaagcttgtatatttatttacagctattgtctaccaactttgtatcaggtatagtgctgagtactgagtaaacagcactgataagatacagtcctgctctcaggcagtttacaatctagtggaagaaatagttaagtaaataaattacactgcactgtaataattgtaccaataaggcattataagagttcagaggcagtgtgcwttcgttcaacacatttattttcagtatcctaggccaagtcctggatataaaacagtaatctgaatttagttcatgcctttgaggtatttacattttaatgtggaagacaggaaagtaaacaagtcattataatacaatatgatacacacaacagggttaattgagggtgcaattaatccaatcactggtagtgtggggagcagtggccagaaggtttactagaggacatgctagctaatgggtaatgtcagatgaaatggacaattgtgtggaagaaggattagagaagacaagggtagaaataaggagatgcgtgaggagacaactgcaggcctttgaactcattccttgccttctcattggaaaaccagtgctttaagcccatctaagaagagtatggctcgaggactcagcccatcactgttttcagtggtatagaggaagtgtttccttaaaatgtgttgaatagaaaactttaaaaagaaaacttttcttcctgtttattaatgtttgttttatagtacagatattttaggataaaaatagtggcttaatatagtgtatc

SEQ ID NO: 55513 - DNA, 553 bp, Homo sapiens
ctcccaaagtgctgggattacagatgggagccactgcgcctggccaaattatacactttaagtgggtaaattgtatggtgtgtgaattgcatctttaaaaagctgttaccaaaaaactccaagctttgctgctcctcactagccatgtgaccctgaagagtgacctcacctctctgagcctcagtttctttatctgtaaaatgggcaggataaaagtagctgcctcaggaggttgttgtgaggttttaaggggaggaattatgtaacaagttagcatggtacttgatatacaataaaaccttgataaataataacactagctagtgtttactgagggctcactcgtacctggcactctgctaagctcttaggtccatgatctcatttaatcctctaaccactctcatgccaattgtgtagtggaggagaccgaagcttggacagatgaggcacrgattagaaccctgaagcttgggttctgaaccatgagacagtgttggtttttgtgtagttttatgtttgtatggttctttttttttttttcttttttttt

SEQ ID NO: 55514 - DNA, 1327 bp, Homo sapiens
ccctggacatcaggctcctgatccctgggccacagtttgctgcaagaagagggctttggctgaaaggagccaggcacttcccagtggaggtagagagggcggctgagcaacgagactcctctgcaggtctcagggccccgtgtgtaaacaagaggatttgattttgagcagtgactcctgcctgtttggattcgtggaccaatacgagtgtgtttttttttaaattgagagattaacaaagagattgtcatctttttaattttacttagcaaaggctttgccaaaaactatcatctacgattacatcctttcatttatataaagacatgcataggacagacgcaatctcagagtaaaagtttggttttataaatggaaagaatttagtttacataaactgatttatagaattgccttatttttatcattttgtcatgagctggtgggaatggatcagttctggatagcatgtgggaacctctgagcaggacatgtaacctatgagggtccttccagcttgggagggccagggttctaaattgtagctcctgaaaatgtctctctggcctatcacacttccaaatgtgtctcttattcctagaagcaccgtttgacagagctcaggacgtgagctgataatggtctctccccacctaaaggcaaacagaggcagacagaaccatctagatgaggagtttgctaaccttttttatgtaaaggggtggatagtaaatattttgggctatgaagtctttgttgcaagtactcaattttatataattttcatgtgtcccaaaatatctttttttgtttttttgagacagggtctcattctgctacccaggctggagtgtagtggcacgatcatggttcactgcagcctcgacctccccaggctcaggcgactctcctacctcagcctccagactaactgggactacaggcatgtgccaccatgccaggytagtttttatattttttgtaaacatgtggtttcatcatgttgcccaggctagtatcaaactcctgggctcaagctctccgcccacctcggcctcccaaagtgttagaattacaggcatgtaattctatgtaatttgaattctaacacttcagaattacaggcatgtttgtcatttaccaaggggtttatatttgttattataagaacttttttgattattattgattggggctcataacaattctgtgatgcagaaaacagttttacagacaagcaagctgtggcttgagaacattagcagtgcagcaggccacacagtgagagagtggcctcacagcctcgagaattacaggtcattatgca

SEQ ID NO: 55515 - DNA, 607 bp, Homo sapiens
tctggttttaacttgggaggtggtgcctgacagtaagaaatctatgggttacccttatwatccattttgcctgaagctgggtttggttctatgacactttgttcagtgaaaacgtagtccatccatacatattacttaatctcccacactctagatttcaagtatcttccactaatcaatagtatgaacacatgattttacagtagacattctccagtataaagaagctcattggtcaacattcactctacctcactactttattcaacactctatatttttaaaactgtaacatggtactggtaccaaaacagagatatagatcaatggaacagaacagagccctcagaaataacgccgcatatctacaactatctgatctttgacaaacctgagaaaaacaagcaatggggaaaggattccctgtttaataaatggtgctgggaaaactggctagccatatgtagaaagctgaaactggatcccttccttacaccttatacaaaaatcaattcaagatggattaaaggcttaaacgttagacctaaaaccataaataccctagaagaacacctaggcaataccattcagaacataggcgtgggca

SEQ ID NO: 55516 - DNA, 570 bp, Homo sapiens
aaagagcaaggggggaagtgtcccacacttttaaactatgagatcttgtgagaactcattcgctatcatgagaacagcatgggggaaatccacccctgtggtcaattgcctcccatcagttccctcccccaacattggaaattacaagtcaacatcagatttgggtggggacacagaaccaaaccatgccagatggtttttaacygtattctgttaagtgaagaatctggacatatatggctatatgttactttacactctttttattcttttctggagggaaaaaaaagggaatgcaaaactagttaattattgccatggactgggttagtggaacagtaaatacgtgaagtacagagaatttcttgggtgacggtactgttctacattgtacactggtggtgggtacctgacttcatgtctttgccaaatttacaaaaatgttaaccacaaaggatgtagtttactttctgaaaaacaaaagatgttaggggaataagatttacaacagagtgtgataaatgtttttaaccatattatcaatgtatgatgtgtaacctcaattaaagg

SEQ ID NO: 55517 - DNA, 1057 bp, Homo sapiens
gtcycttcctctctactagtccgcatcccagtcattctgtcaatcctcatcggtacccagcccctcctgtctcctccaagcctgggtctcccactgggtgatgacaacgctgagagtctgtctctgagggacaccctgccctaggctgcctgtcccctgggggacaggggcctggagagcgccctcaccttcagggcaccctatctcacaaaacaccttccacccaggatctggcctgtgtccaggagcagggcaagtgattcccagctccccaccctgatgcagagccctgagccccacatcctggggagaggtctttcccctgcatggttctctctcctctcccagccagttctgtcaggaacactcctcctccctcaagtggcaaagtcctacgtgtccttaaggaccactaaaggggcacttgctctgggaagcgtgttccttccccggggagaacggaccacaacaacactttctataccctcctcatgctcagggcagctgtggagcctcagctgtagctccagagcccagtagagatcacagcctagaatgaatgcaggaatgagtgaacagtgggtgggtagcggtgggtgggtgggggagtgggtgagtagatgaatgggtgggtgagtgagtgggtgggtatgggtggataggtagtggctgagtggatgggcaggtgcatgagtgaatgggttaatatgtggatgggtggaagggtgggtggggtgatgggtaggtgtatggatgggtggaagggtgggtggggcgatgggtaggtggatggatggttgggtaagtgggtgtatggatgggtgggtggatggacgggtgggtaggtgggtgggtgggtggacaagtcgatggtgagtgaagagacacatcaggctctgggcatagctcaatgcaaaggagagaaagcagctagtttaggggctcagttcttgggcaggtagaaggtcatcctggtttctagtccttgtagcagcagcactgtgcctgcacagccctggggcccctgggcatgactgagtgacagcccatcccatgg

SEQ ID NO: 55518 - DNA, 1057 bp, Homo sapiens
gtctcttcctctctactagtccgcatcccagtcattctgtcaatcctcatcggtacccagcccctcctgtctcctccaagcctgggtctcccactgggtgatgacaacgctgagagtctgtctctgagggacaccctgccctaggctgcctgtcccctgggggacaggggcctggagagcgccctcaccttcagggcaccctatctcacaaaacaccttccacccaggatctggcctgtgtccaggagcagggcaagtgattcccagctccccaccctgatgcagagccctgagccccacatcctggggagaggtctttcccctgcatggttctctctcctctcccagccagttctgtcaggaacactcytcctccctcaagtggcaaagtcctacgtgtccttaaggaccactaaaggggcacttgctctgggaagcgtgttccttccccggggagaacggaccacaacaacactttctataccctcctcatgctcagggcagctgtggagcctcagctgtagctccagagcccagtagagatcacagcctagaatgaatgcaggaatgagtgaacagtgggtgggtagcggtgggtgggtgggggagtgggtgagtagatgaatgggtgggtgagtgagtgggtgggtatgggtggataggtagtggctgagtggatgggcaggtgcatgagtgaatgggttaatatgtggatgggtggaagggtgggtggggtgatgggtaggtgtatggatgggtggaagggtgggtggggcgatgggtaggtggatggatggttgggtaagtgggtgtatggatgggtgggtggatggacgggtgggtaggtgggtgggtgggtggacaagtcgatggtgagtgaagagacacatcaggctctgggcatagctcaatgcaaaggagagaaagcagctagtttaggggctcagttcttgggcaggtagaaggtcatcctggtttctagtccttgtagcagcagcactgtgcctgcacagccctggggcccctgggcatgactgagtgacagcccatcccatgg

SEQ ID NO: 55519 - DNA, 1057 bp, Homo sapiens
gtctcttcctctctactagtccgcatcccagtcattctgtcaatcctcatcggtacccagcccctcctgtctcctccaagcctgggtctcccactgggtgatgacaacgctgagagtctgtctctgagggacaccctgccctaggctgcctgtcccctgggggacaggggcctggagagcgccctcaccttcagggcaccctatctcacaaaacaccttccacccaggatctggcctgtgtccaggagcagggcaagtgattcccagctccccaccctgatgcagagccctgagccccacatcctggggagaggtctttcccctgcatggttctctctcctctcccagccagttctgtcaggaacactcctcctccctcaagtggcaaagtcctacgtgtccttaaggaccactaaaggggcacttgctctgggaagcgtgttccttccccggggagaacggaccacaacaacactttctataccctyctcatgctcagggcagctgtggagcctcagctgtagctccagagcccagtagagatcacagcctagaatgaatgcaggaatgagtgaacagtgggtgggtagcggtgggtgggtgggggagtgggtgagtagatgaatgggtgggtgagtgagtgggtgggtatgggtggataggtagtggctgagtggatgggcaggtgcatgagtgaatgggttaatatgtggatgggtggaagggtgggtggggtgatgggtaggtgtatggatgggtggaagggtgggtggggcgatgggtaggtggatggatggttgggtaagtgggtgtatggatgggtgggtggatggacgggtgggtaggtgggtgggtgggtggacaagtcgatggtgagtgaagagacacatcaggctctgggcatagctcaatgcaaaggagagaaagcagctagtttaggggctcagttcttgggcaggtagaaggtcatcctggtttctagtccttgtagcagcagcactgtgcctgcacagccctggggcccctgggcatgactgagtgacagcccatcccatgg

SEQ ID NO: 55520 - DNA, 619 bp, Homo sapiens
ggcagcatttgtcatggcaatgaactgggagcagcccaatgaccatcaataagaggaggctaataaaatgtggaattttcatataatactaaagtaggacagaacgaatagatgaagagagccagagatttttctgtagaaatgcccaactcccaaagactggctgttaagtaaaacaaaaccaaaaaaccagccaagcaaaaacaaagttgcagaatgatgtattataaacaatcccataagacaatcttttttccatgggcacacacggctaagctacagtacagcaaagggctggagggagtaacttagaggtgactgaggggcaggagaggctcacggtattgacgacagaagcctctaagatgggagtgtggattctccccactgctcttccatatgttttaagtgttaatttttttggatgagaaattawttcttttaatcagaaaaaaagatggcaaaaactaggggaacacttctcaatgtggttgggagagtagaagagacacacgtatgaaagcatccagcgtggtggtgcttggtgctgaagggacaccttgttttctatataatgtgtctgctggtggacaaagaccagaggtcatgtacaaaggag

SEQ ID NO: 55521 - DNA, 591 bp, Homo sapiens
ggcatggggtggggtcacaggggccctccctgagccatgctgcctttgctggccagcattaaatcccgctccactggagaactctcactgccgcactaccctgtgatctgttgcttggaggaaaggtaggcaaatgagagctgggagagaaatttcctggtttccttttgagaacacaatttaatggaattcacggtacacttgggtacgtggttaataacactgttaataaatgaaacacagtgctggctgctgattctacccagttcactaaaaccacagataaattaatatggcaatgaaaataaaccacaacaacaacaaaatgaggaaattccaaacaggaatgtaaattacttgtgctcactcagcaaatggaaactacgactagacttacattttctttggaaaatgatcttgtgaaacacaggtatctggtaaccttggatttaaataagccgtctttccagaggtcagcatccacaccatctgctgtctgtgcaacctacaccggagagacagagaaaaggatygcaggtaaggcaggaaggaactgaaggtgcgcgtgggccacttcttccacgcctgttc

SEQ ID NO: 55522 - DNA, 711 bp, Homo sapiens
cttcccgtttgtctgcaggccctcctcacatctgccctccagaggtgaagccctccctcccagaccttctggggcaccctggggagttggtggggcccatggccaacctgctccacatgcaggcattgaggtgcctgggtgagggcaccttctggccctcaggcaggctcagcggtaacaccttagtgaggaggcaaagatgagatgtgagaccattgcgggatgccgcacagcagccactgggagggaaggaagacgcattcctgaaatgtctgaggagcaagatgcagcagcaaggggggccctcaggactttgacggcctcgctccacccctcggcccatgtgctcctgactggaccagcagcagagatgaggagacctgctctgacctaatcctaactgcaaggaggagctgtctggtcaagtgacagagacgggagcctcaggacagaccaccaccgtctgagagttcacgacagaaggaggggcatagtcagatgctccctatgttcttctagaaaatagayttttattttttgtagagatgggggtctcactgtccaggctgtccaggctggtcttgaacttctggcctcaagtgactttcccagcccgacttcccaaagtgttgggattacaggtgtgagccaccacacatggcctagaaaacagattttaacaaactcagaggaaagaaagaggaggtgata

SEQ ID NO: 55523 - DNA, 569 bp, Homo sapiens
ccacctcccaaagtgctgggattacaggtgtgagccacggttcccagcctttgtttgcatttttttcttccttttttttttttttttttttttttgagacggagtcttgggctgtcgcctgggctggagtgcaatggtgcgatcttggcttgctgcaacctctgcctcctgggttcaagtgattctcctgcctcagcctcccgagtagctgggattataggcatgcaccaccacacccggttaattttatatttttagtagagttggggattctccatgtttgtcaggctggtcttgaactcctgacctcaggtgatcacctgcctcggcctcccaaagtgctgggattacaggcgtgaaccactgcgcccrgcctcatcttttaatagttatacaagtgctttatatattgaggacattaacttttattcatgttgtaagtaccatggtttttcctgtcttctgcctgtttgcaatacataagtttcattttgtcatgtcagatttttgaatggtttttgtccattgagatatttgtacatagaaagtctttccctaacacaatagtg

SEQ ID NO: 55524 - DNA, 621 bp, Homo sapiens
gatgaccattctgccagcccatccggccagtgtcacccttcacagtgcttgactgacacttggttcaggccgggtgttccgcaggtgtgaaacaatttgctttctggctttgtcatctcataatgttcatgttctgtgaatgggctttcctttcaggtgcagccctttcttctctagacaaagagggtctgtcagcattaagctgggcttgtctgaaaggtcacagggcagtggtccagtatctggttgaagaaggagctgcaatagaccagacagacaagaatggccgcacacccttggacctggctgccttctatggcgatgccgagactgtgagtaccagcaggtgttccccacctccacctgcattggaaagaaaccccaggaagtgaacagctcaatccagggcctgcatgaggttgtgtctcagtgtcatcagagagtgtgtgtgtgtgtgtgtgtgwgtgtgtgtgtgtgtgtgtgtgtcttgtcagggatctttcatttttctctaattctgtgacatgcagtctattccaggacttaagattttagtcgactcttaaaagcttaaaaatacctgcttgcaaatagcacatacaacagacacatacgtgaata

SEQ ID NO: 55525 - DNA, 621 bp, Homo sapiens
gatgaccattctgccagcccatccggccagtgtcacccttcacagtgcttgactgacacttggttcaggccgggtgttccgcaggtgtgaaacaatttgctttctggctttgtcatctcataatgttcatgttctgtgaatgggctttcctttcaggtgcagccctttcttctctagacaaagagggtctgtcagcattaagctgggcttgtctgaaaggtcacagggcagtggtccagtatctggttgaagaaggagctgcaatagaccagacagacaagaatggccgcacacccttggacctggctgccttctatggcgatgccgagactgtgagtaccagcaggtgttccccacctccacctgcattggaaagaaaccccaggaagtgaacagctcaatccagggcctgcatgaggttgtgtctcagtgtcatcagagagtgtgtgtgtgtgtgtgtgtgtgwgtgtgtgtgtgtgtgtgtgtcttgtcagggatctttcatttttctctaattctgtgacatgcagtctattccaggacttaagattttagtcgactcttaaaagcttaaaaatacctgcttgcaaatagcacatacaacagacacatacgtgaata

SEQ ID NO: 55526 - DNA, 675 bp, Homo sapiens
tgaggaaagcaggaataatgcagaaatgcagttcccctcaataagctaacggagtttatagcrtctactccctggtgtcagaggaactgagcaaaagccaggtttttaagctggatgctctgtttctagctgtgtaacagccaagcttggttctttaacaagaagaatttcagagctacctaatctctttcactaaatgctactctgctgcaacttgttatatgagatcttatttctcgcaaataaaaaccctgaaagatgatctatgctaacaactttttcattctcaatgatctgaaccaagagacacctcctcttccagatgatgaatataagtgtggttattcaggaacactgggtcatatttaagatgaggttccaggggaagttgtgcaagataaacaaagaaacacatttacagagaaatgcagaaagagggaaaagcatgagagaaactagtctccaagagacagagtgaaacatttgccttacttctctattccactttccaaagaacaagttttatttaactatttgtctaactttattcttaagttaaaagtataacatacccttattatactcttagcaattaagttctattttctcatgttagctttagtgacctacaaccttacaatctgaagaaagtgaactaaactacattatcgttta

SEQ ID NO: 55527 - DNA, 1250 bp, Homo sapiens
atccagtcaagttatccctaaggcagaatttttcagaaagacagtggacaaaaataaagaaacaaatagcaatgggcatttgttttctatcatgacttgggccttaagaaaatatatataatgctgtttcactgaaaaatttgtaacacaataaaatttctctaatagcccamtttgcccattctacagccacttttttattcaggctatgatctttactctattggaaaaatgccatagtccattgctaccctatagctttcctgtgtagtaaaaccttcaatgtatgttaaactaaaaattctaaaatacgatcatatgattatatcattttctagcttaaaaatctctcagtggctctctgatatggttctaagaatatgaaaactcttttgtgaagtacctgagtttcattcccagccatgtcagtaaatgcatggtgaaacctctttgaaaatttcaaaacggaccatatactgttttacactaacccacatactgttctctcttactggaatgctcatctttttctaacttaattcttaccgtctttaaaacaaagtttaatgatcagctcattaagaaagctttccctgacccttaagactagtgtaggtttgttccactgtgctttgtcaggttccggggaagacctccctcacatcacctttcttattctactctgttaaaaatgttggctactgtttctttccctcaagtgtggctgttactttgtttccagatcctagcacaataactgacctatagtaacctctgaatgtgttttttgagcaattaagggcagtgtgtttgttgattgaataaataaattaaaattattgatggccgggagcggtggctcacgcctgtaatcccagcattttcggaggccgaggcgggcggatcacgaggtcaggagatcgagaccatcctggctaacacagcgaaaccccgtctctactaaaaatacaaaaaattagctgggcgtggtgaagggcgcctgtaatcccagctactcaggaggctttggcaggagaatggcatgaacctgggaggcggagcttgcagtgagccgggatcgcgccactccactccagcctgggcaacagagcgagactcagtctcaaaaaaaaaaaaaaaaaaaaaaaaaaagattgatgaaaagttgtgacaaaaatacaattaacttgataatattaggatgctttaaaaatagtgtctggcacatttttttaattgtttttccatga

SEQ ID NO: 55528 - DNA, 1250 bp, Homo sapiens
atccagtcaagttatccctaaggcagaatttttcagaaagacagtggacaaaaataaagaaacaaatagcaatgggcatttgttttctatcatgacttgggccttaagaaaatatatataatgctgtttcactgaaaaatttgtaacacaataaaatttctctaatagcccaatttgcccattctacagccacttttttattcaggctatgatctttactctattggaaaaatgccatagtccattgctaccctatagctttcctgtgtagtaaaaccttcaatgtatgttaaactaaaaattctaaaatacgatcatatgattatatcattttctagcttaaaaatctctcagtggctctctgatatggwtctaagaatatgaaaactcttttgtgaagtacctgagtttcattcccagccatgtcagtaaatgcatggtgaaacctctttgaaaatttcaaaacggaccatatactgttttacactaacccacatactgttctctcttactggaatgctcatctttttctaacttaattcttaccgtctttaaaacaaagtttaatgatcagctcattaagaaagctttccctgacccttaagactagtgtaggtttgttccactgtgctttgtcaggttccggggaagacctccctcacatcacctttcttattctactctgttaaaaatgttggctactgtttctttccctcaagtgtggctgttactttgtttccagatcctagcacaataactgacctatagtaacctctgaatgtgttttttgagcaattaagggcagtgtgtttgttgattgaataaataaattaaaattattgatggccgggagcggtggctcacgcctgtaatcccagcattttcggaggccgaggcgggcggatcacgaggtcaggagatcgagaccatcctggctaacacagcgaaaccccgtctctactaaaaatacaaaaaattagctgggcgtggtgaagggcgcctgtaatcccagctactcaggaggctttggcaggagaatggcatgaacctgggaggcggagcttgcagtgagccgggatcgcgccactccactccagcctgggcaacagagcgagactcagtctcaaaaaaaaaaaaaaaaaaaaaaaaaaagattgatgaaaagttgtgacaaaaatacaattaacttgataatattaggatgctttaaaaatagtgtctggcacatttttttaattgtttttccatga

SEQ ID NO: 55529 - DNA, 1250 bp, Homo sapiens
atccagtcaagttatccctaaggcagaatttttcagaaagacagtggacaaaaataaagaaacaaatagcaatgggcatttgttttctatcatgacttgggccttaagaaaatatatataatgctgtttcactgaaaaatttgtaacacaataaaatttctctaatagcccaatttgcccattctacagccacttttttattcaggctatgatctttactctattggaaaaatgccatagtccattgctaccctatagctttcctgtgtagtaaaaccttcaatgtatgttaaactaaaaattctaaaatacgatcatatgattatatcattttctagcttaaaaatctctcagtggctctctgatatggttctaagaatatgaaaactcttttgtgaagtacctgagtttcattcccagccatgtcagtaaatgcatggtgaaacctctttgaaaatttcaaaacggaccatatactgttttacactaacccacatactgttctctcttactggaatgctcatctttttctaacttaattcttaccrtctttaaaacaaagtttaatgatcagctcattaagaaagctttccctgacccttaagactagtgtaggtttgttccactgtgctttgtcaggttccggggaagacctccctcacatcacctttcttattctactctgttaaaaatgttggctactgtttctttccctcaagtgtggctgttactttgtttccagatcctagcacaataactgacctatagtaacctctgaatgtgttttttgagcaattaagggcagtgtgtttgttgattgaataaataaattaaaattattgatggccgggagcggtggctcacgcctgtaatcccagcattttcggaggccgaggcgggcggatcacgaggtcaggagatcgagaccatcctggctaacacagcgaaaccccgtctctactaaaaatacaaaaaattagctgggcgtggtgaagggcgcctgtaatcccagctactcaggaggctttggcaggagaatggcatgaacctgggaggcggagcttgcagtgagccgggatcgcgccactccactccagcctgggcaacagagcgagactcagtctcaaaaaaaaaaaaaaaaaaaaaaaaaaagattgatgaaaagttgtgacaaaaatacaattaacttgataatattaggatgctttaaaaatagtgtctggcacatttttttaattgtttttccatga

SEQ ID NO: 55530 - DNA, 1250 bp, Homo sapiens
atccagtcaagttatccctaaggcagaatttttcagaaagacagtggacaaaaataaagaaacaaatagcaatgggcatttgttttctatcatgacttgggccttaagaaaatatatataatgctgtttcactgaaaaatttgtaacacaataaaatttctctaatagcccaatttgcccattctacagccacttttttattcaggctatgatctttactctattggaaaaatgccatagtccattgctaccctatagctttcctgtgtagtaaaaccttcaatgtatgttaaactaaaaattctaaaatacgatcatatgattatatcattttctagcttaaaaatctctcagtggctctctgatatggttctaagaatatgaaaactcttttgtgaagtacctgagtttcattcccagccatgtcagtaaatgcatggtgaaacctctttgaaaatttcaaaacggaccatatactgttttacactaacccacatactgttctctcttactggaatgctcatctttttctaacttaattcttaccgtctttaaarcaaagtttaatgatcagctcattaagaaagctttccctgacccttaagactagtgtaggtttgttccactgtgctttgtcaggttccggggaagacctccctcacatcacctttcttattctactctgttaaaaatgttggctactgtttctttccctcaagtgtggctgttactttgtttccagatcctagcacaataactgacctatagtaacctctgaatgtgttttttgagcaattaagggcagtgtgtttgttgattgaataaataaattaaaattattgatggccgggagcggtggctcacgcctgtaatcccagcattttcggaggccgaggcgggcggatcacgaggtcaggagatcgagaccatcctggctaacacagcgaaaccccgtctctactaaaaatacaaaaaattagctgggcgtggtgaagggcgcctgtaatcccagctactcaggaggctttggcaggagaatggcatgaacctgggaggcggagcttgcagtgagccgggatcgcgccactccactccagcctgggcaacagagcgagactcagtctcaaaaaaaaaaaaaaaaaaaaaaaaaaagattgatgaaaagttgtgacaaaaatacaattaacttgataatattaggatgctttaaaaatagtgtctggcacatttttttaattgtttttccatga

SEQ ID NO: 55531 - DNA, 1717 bp, Homo sapiens
taaaatacacgttaaaatttgaagaaactaaaataaatgtctataataagtatctgtgctatgttcaattttatttattaggttggattttgtttttttaaaaatgaacagctttggatgggcatggtggctcacgcctgtaatcccagcactttgggaggccgaggtgggtggatcacttgaggtcaggagttccagaccagcctggccaacatggtgaaaccctgtctctactaaaaatacaaaaattagacgggtggggcagtggtcacctgtaatcccagctactcgggagactgaggcaggagaatctcttgaatctgggaggcacaggttgcggtgagccgagattgccaagatcgcactatttcactccagcctgggtgacaagagtgaaactccaccaaaaaaaaaaaaaaattgagcagctttgttcagcacagtgagaagataattatgctgttggaggctggtgctccagtgtcaccattgcttttctatgtaattgttcccattacccttatttctcagttttccctcttgtttcctccaatcctaacagtaatcttaggatcttggatatttaggcactgaactcctgggaggcagaaaagaaagtggagaataatacatggactgtaaaggatttattttagaaaacaacagagtcttaaaatctttgaaaatacatctatatcagtatccatttatttttctctacagaactggcctttcccatcatctcgattttcttgctgtcaaatttcttacagctcatatgttggaaggactaattcgggtttttttagtagtttcattttttcatgaatcaaattaaaagtcaaatttgttatgactatagagaacagcagactttcttgaaacaacaaagatattgtttagaaagctttgatatgatttttttcatataattatagcaaagtccttcagataacttatatcttaattgtcttgtaatgtaattgcattactgtttgtgtaggaattacagatgtaaccacagtttatttctggctctattgtagagttaaaaaggccacttatatgtacaaaatcttaacttcatgatctatataaagttttctaataaacacatctggtcatcttaactatccagtgtcttctgttgtttataaataacaaactaaccaaacaggtttttccaaggacaattattgcctcaagaagaatttagccatcatgagtcaaggagttagtttttgaactatctttagaatttccatttccaaaggtacattacacaactctccaaggttacatgctctccaaggcacattagtaaatatctgcaaggtttccattttcckgacagaaacaattacaaatgccatgcaagaataatttcacacagagagttgaggcagctatcagaattctcttaggtaacagttgcaaacgtttatgctaatattatttagctttttcacttttaactaaaaaatcaggttacagaactcactgaatttcttttgctgtcagtgtacttatgaaaaagagaacaaacattaaaaaaggtgaaagcaagcttatgtttacctcaaaactatatgttttaaaacaaaatactgcagtctgttgtcaccagggaactcttggatttcctatttcatttcagtaatgaagagaaaagttgccatctggctgtttcaaatgtatagagtttgtgcttctatat

SEQ ID NO: 55532 - DNA, 1139 bp, Homo sapiens
atctctcccattagaatgtttgggtttgctcatgtgtctctatcattagactgctgggttcagccagcagtctctcccataagaatgtctgggattgcccaggtttctctattattagactgcctggtgtcagtcaggagtctcttccattagaattgcctgtggttggccaggagtcttacccattagaattaccaaggtagcccagatgtctttataattagacagcctggggtcagctcgaagtctcttctattagaatgcttggggtccatcargtgtctctattattagactgcctggggtcagccagaagtgtctcccattaaaatacttgcagtcgttcagatttctctgtcattatactgcctgcgattggccgggagtctctttcattagattgcctgtggttacacagatgtctctatcattagactgcctgggctggcttggtgtctttcccattagaatgccagggttcagatggaagtctctcccattagaatgccttaggtcacccaggtttctgtattattagaatgcctggggtcagatgatagtcttttccattagaatgtctaggatcacctaagtgtctctactattagactgcctgtgttcgaccattagtctctcccattacaatcactgggctcaatcagtgtctctagcattagactgcctggggttgaccacgagtatctcccattagaatgctttctgtcatctgtgagtctctcccattggagtgactggggtcacccacgtgtctctaacattagactgtttgtggttgcacagctctctctaacattagattgcttggggtcatctgagagtttcccccattagaatgcctggagtggagtcccccaggtgtctctattatgagaatgcctggtgtcagccagcagtctctcccattagaatgcctgtggtatcccaggtgtcactattattagaattcctggggtcagtggagggtatctcccataagaatgcctggtgtcacccaggtgtctctaacattagattggctggggtcctttggaagtctccactattaggatgcctggggtcacccaagtgcctctaccattagactgcctgtggtcagttgggaatctcccccattagaa

SEQ ID NO: 55533 - DNA, 1139 bp, Homo sapiens
atctctcccattagaatgtttgggtttgctcatgtgtctctatcattagactgctgggttcagccagcagtctctcccataagaatgtctgggattgcccaggtttctctattattagactgcctggtgtcagtcaggagtctcttccattagaattgcctgtggttggccaggagtcttacccattagaattaccaaggtagcccagatgtctttataattagacagcctggggtcagctcgaagtctcttctattagaatgcttggggtccatcaggtgtctctattattagactgcctggggtcagccagaagtgtctcccattaaaatacttgcagtcgttcagatttctctgtcattatactgcctgcgattggccgggagtctctttcattagattrcctgtggttacacagatgtctctatcattagactgcctgggctggcttggtgtctttcccattagaatgccagggttcagatggaagtctctcccattagaatgccttaggtcacccaggtttctgtattattagaatgcctggggtcagatgatagtcttttccattagaatgtctaggatcacctaagtgtctctactattagactgcctgtgttcgaccattagtctctcccattacaatcactgggctcaatcagtgtctctagcattagactgcctggggttgaccacgagtatctcccattagaatgctttctgtcatctgtgagtctctcccattggagtgactggggtcacccacgtgtctctaacattagactgtttgtggttgcacagctctctctaacattagattgcttggggtcatctgagagtttcccccattagaatgcctggagtggagtcccccaggtgtctctattatgagaatgcctggtgtcagccagcagtctctcccattagaatgcctgtggtatcccaggtgtcactattattagaattcctggggtcagtggagggtatctcccataagaatgcctggtgtcacccaggtgtctctaacattagattggctggggtcctttggaagtctccactattaggatgcctggggtcacccaagtgcctctaccattagactgcctgtggtcagttgggaatctcccccattagaa

SEQ ID NO: 55534 - DNA, 1139 bp, Homo sapiens
atctctcccattagaatgtttgggtttgctcatgtgtctctatcattagactgctgggttcagccagcagtctctcccataagaatgtctgggattgcccaggtttctctattattagactgcctggtgtcagtcaggagtctcttccattagaattgcctgtggttggccaggagtcttacccattagaattaccaaggtagcccagatgtctttataattagacagcctggggtcagctcgaagtctcttctattagaatgcttggggtccatcaggtgtctctattattagactgcctggggtcagccagaagtgtctcccattaaaatacttgcagtcgttcagatttctctgtcattatactgcctgcgattggccgggagtctctttcattagattgcctgtggttrcacagatgtctctatcattagactgcctgggctggcttggtgtctttcccattagaatgccagggttcagatggaagtctctcccattagaatgccttaggtcacccaggtttctgtattattagaatgcctggggtcagatgatagtcttttccattagaatgtctaggatcacctaagtgtctctactattagactgcctgtgttcgaccattagtctctcccattacaatcactgggctcaatcagtgtctctagcattagactgcctggggttgaccacgagtatctcccattagaatgctttctgtcatctgtgagtctctcccattggagtgactggggtcacccacgtgtctctaacattagactgtttgtggttgcacagctctctctaacattagattgcttggggtcatctgagagtttcccccattagaatgcctggagtggagtcccccaggtgtctctattatgagaatgcctggtgtcagccagcagtctctcccattagaatgcctgtggtatcccaggtgtcactattattagaattcctggggtcagtggagggtatctcccataagaatgcctggtgtcacccaggtgtctctaacattagattggctggggtcctttggaagtctccactattaggatgcctggggtcacccaagtgcctctaccattagactgcctgtggtcagttgggaatctcccccattagaa

SEQ ID NO: 55535 - DNA, 1139 bp, Homo sapiens
atctctcccattagaatgtttgggtttgctcatgtgtctctatcattagactgctgggttcagccagcagtctctcccataagaatgtctgggattgcccaggtttctctattattagactgcctggtgtcagtcaggagtctcttccattagaattgcctgtggttggccaggagtcttacccattagaattaccaaggtagcccagatgtctttataattagacagcctggggtcagctcgaagtctcttctattagaatgcttggggtccatcaggtgtctctattattagactgcctggggtcagccagaagtgtctcccattaaaatacttgcagtcgttcagatttctctgtcattatactgcctgcgattggccgggagtctctttcattagattgcctgtggttacacagatgtctctatcattagactgcctgggctggcttggtgtctttcccattagaatgccagggttcagatggaagtctctcccattagaatgccttaggtcacccaggtttctgtattattagaatgcctggggtcagatgatagtcttttccattagaatgtctaggatcacctaagtgtctctactattagactgcctgtgttcgaccattagtctctcccattacaatcactgggctcaatcagtgtctctagcattagactgcctggggttgaccacgagtatctcccattagaatgctttctgtcatctgtgagtctctcccattggagtgactggggtcacccacgtgtctctaacattagactgtttgtggttgcacagctctctctaacattagattgcttggggtcatctgagagtttcccccattagaatgcctggagtggagtcccccaggtgtctctattatgagaatgcctggtgtcagccagcagtctctcccattagaatgcctgtggtatcccaggtgtcactattattagaattcctggggtcagtggaggktatctcccataagaatgcctggtgtcacccaggtgtctctaacattagattggctggggtcctttggaagtctccactattaggatgcctggggtcacccaagtgcctctaccattagactgcctgtggtcagttgggaatctcccccattagaa

SEQ ID NO: 55536 - DNA, 1139 bp, Homo sapiens
atctctcccattagaatgtttgggtttgctcatgtgtctctatcattagactgctgggttcagccagcagtctctcccataagaatgtctgggattgcccaggtttctctattattagactgcctggtgtcagtcaggagtctcttccattagaattgcctgtggttggccaggagtcttacccattagaattaccaaggtagcccagatgtctttataattagacagcctggggtcagctcgaagtctcttctattagaatgcttggggtccatcaggtgtctctattattagactgcctggggtcagccagaagtgtctcccattaaaatacttgcagtcgttcagatttctctgtcattatactgcctgcgattggccgggagtctctttcattagattgcctgtggttacacagatgtctctatcattagactgcctgggctggcttggtgtctttcccattagaatgccagggttcagatggaagtctctcccattagaatgccttaggtcacccaggtttctgtattattagaatgcctggggtcagatgatagtcttttccattagaatgtctaggatcacctaagtgtctctactattagactgcctgtgttcgaccattagtctctcccattacaatcactgggctcaatcagtgtctctagcattagactgcctggggttgaccacgagtatctcccattagaatgctttctgtcatctgtgagtctctcccattggagtgactggggtcacccacgtgtctctaacattagactgtttgtggttgcacagctctctctaacattagattgcttggggtcatctgagagtttcccccattagaatgcctggagtggagtcccccaggtgtctctattatgagaatgcctggtgtcagccagcagtctctcccattagaatgcctgtggtatcccaggtgtcactattattagaattcctggggtcagtggagggtatctcccataagaatgcctggtgtcacccaggtgtctctaacattagattggctggggtcctttggaagtctycactattaggatgcctggggtcacccaagtgcctctaccattagactgcctgtggtcagttgggaatctcccccattagaa

SEQ ID NO: 55537 - DNA, 520 bp, Homo sapiens
cacccagttgtctctatcattagatttcctgcagttggtcgggtgtctctcccactagaattcctggggtttttcaggtgtctctatcattagactgcctggggtaggccacgagtctctcccattagaatgcccagggtcggcggtgagtccctcccattagaatgcctagggtcacccaggtgtctctatcattagacggcctggagtcggctgggwgtcactccccttaaaatgcctggggtcgatttggcatatataattatactgcctaggtttggccagaagtttctcccattagaatgcctgggtttgcccaggagttctatcattagactgcctggggtcagctgggagtctcttccgttagaatgcctggggttgctcaggtgtctttattattagactgcctgggatccaccaggagtctctttccttagaatgccttgggtcaccgaaatgtctttataattagactgcttgggttcggcaggagtctatctcattagaatgactgagg

SEQ ID NO: 55538 - DNA, 520 bp, Homo sapiens
cacccagttgtctctatcattagatttcctgcagttggtcgggtgtctctcccactagaattcctggggtttttcaggtgtctctatcattagactgcctggggtaggccacgagtctctcccattagaatgcccagggtcggcggtgagtccctcccattagaatgcctagggtcacccaggtgtctctatcattagacggcctggagtcggctgggagtcactccccttaaaatgcctggggtcgatttggcatatataattatactgcctaggtttggccagaagtttctcccattagaatgcctgggtttgcccaggagttctatcattagactgcctggggtcagctgggagtctcttccgttagaatgcctggggttgctcaggtgtctttattattagactgcctgggatccaccaggagtctctttccttagaatgccttgggtcacygaaatgtctttataattagactgcttgggttcggcaggagtctatctcattagaatgactgagg

SEQ ID NO: 55539 - DNA, 730 bp, Homo sapiens
gcaccaccacacccagctaatttttgtattttttagtacagacagggtttcaccatgttggccaggatggtctcgatctcttgacctcgtgattcgccctcctcagcctcccaaagtgctgggattacaggcatgagccaccatgcctggccaagtagtagttttttacatttacatttaagctaattaagattaaaattaaatagtcatttcctcggtcacactagccatattttgagttctcagaagccacattttgaccagtggctactactgcgttggaaagcatacttctacaaccttgatgtttgagctcatttttaatcaaattccccgtcaccaaggacacagtactgtgttagcaagcgaccacctctctttagatggcgcacaaaatctaccgctacaagactggagacctgccttatagttgtttccctgtttccagtcaagrgagtcactctaattctctgggcctctatttattcatttgtcaaagagggactattatctcaaacatctcctccagctctcaaatgctgtattatttctctcttctaaaagaggaaggaatgagggcattggtaaagccctgggcctgaaggtacacacacaagctctcttcaataaaatctgtaaagagtggaatatgttgccactctttagcacctgccaacgtgctgtggcaatctggaggcgcttggtgctctctccttttatgcagtactaa

SEQ ID NO: 55540 - DNA, 1080 bp, Homo sapiens
gaaaggagcacaattaaggagcggcaataaaaatgtatgacaaagaaaaatgagaaaccagttactgtagctcaggtccactttaccatgagccaaagtaaaatctaaaaagactttaactaggcaatacaggcctaacacttgcgttgaggagacaagaagagaagcatgagctctgaaattcttcgaggaaagggagtgtaaagatgagcatttctgagttgtaaagggatagaaaagatgtattcagtagtttgctactaggtcctaataatatttaaagatatgcatccaaaataaatgagataactggggaaaaatgagaatagactattaagaaaactatattttttgttagagaagatttggttttaaattccatttatacagctaagatttcatatcatgcaggcaatttttctacatgtcagcattctgacaaatgtctgcctcagtttattatttaaaacaattaaaataagtgagtgacccaaggggtagagaattgctgcaatctctccaaactccacagctaacttgtattttgtcataagatagctaaaggtcatcaaaatagaagaaatatagtataggaaaaaaaagaagataaatgaagtcatagttttaatggctctcacatgaacttctgtgctggggtctctactgccggtagcatagagttttatttgcttggtatgtctccataaagatcttactaaaaggaaaaatgatatcagtgacacaataaatgggacaattgcaaacaggttaaagagagtyaagggttcaaagtatggtattttactcacatggaacatttcagtaatgtttcttttatgtttggcaattgcatgaaacctataatcacaactcagtactattgctgctataaggctgaccaacaaggaaatggcaaagcatcccagcaggatccagtgcaccaccatatcaattttccacttcagccagagaaaaagtggatgagaggaactggctatcttcagaaaatagaagacattaaggcaggtggtaatccacatatttaagtagttggcaaatgtccagaaggtaaaaatgact

SEQ ID NO: 55541 - DNA, 700 bp, Homo sapiens
attcagtttaggtcttacttcttgtaccaaatattttaatcacactggttattgagtggacacaataatacaatctaattagatagtatgatagcctgttgaaagcctcaagtattacattgattttctattttttaattagtttccattctatttgcttctcagattgcctttaccaaagattattttctctgcaatattcttatactcattcttcttcactcttgtgctgaaccttacttgttgatatgttatattgtgaatcaatcctccctatgtctatgttttatatcttactgctttcttcatgcgttctgggagaaatctttatttgattttctaaacaaggttctgtacttctctttgcttgctttcttcttttttgtttttaaaatttggcaccaaggttttgtgtttctgaaaagtttggtagggtcctgagttggtagcttaatcttcacctgctgatttttctgtcctatctagtagttttctgcttatattttcatggaacccctagatcaatcagtatcaccagctgccacttttcattacaggcrttgtataggtctcgtattattgttacatttttgtacagggctggtgataatttgaggatagcttggttggaagtatgacagggtcgggggaatgtgactggaaatcttaaagacaggcctcttgaccattgtggataagt

SEQ ID NO: 55542 - DNA, 1276 bp, Homo sapiens
ctcaaaccctaatgctaatttaggcacacttctctgggtattttcatgtcatattttagatctttaccttcttccttctttaaatattttgatcatattcacaagcttgcccaagaggagcaaccaggagtaaatatttggatataatcttacacatrctgcctgcaacatattgaaattttaaatgtgattggaagaaaaatgggaatttggggacctgatatttctataccactatgtagaaagacacaaatgtattatccagtcctctatgtctgacagtactctgatgtttgtttatctctttcattgattctgcatcccctgtacagcaaggacaccatcatcgctgtccactgagattactgtagcatcttcatagctggacttccctggatcagtcttgcattctccactgcatccttcacagcacagccaggtctttctaaaaatacaaatcttactttgtcattcctctaattgaaattctctattgggttccaagtgtatatcaaataaagtataaggccttggcatggaatgagggcacaacagatgtcatccttggaatgagagctccaaagccctacccttcttctcaacctccttcctcccctcctgctcttccgctgcagtggtgtagggtgaacccctgaggccctagaagagtcatggcccctcatcccactccccatctccttttttaaaaaaataatttttttaccattatctgtgctctgagctgagctcagagccagaaggaccactgagagcaggaccagcagcatcttgaaggaggctctggagttgctcccaactctgcgttgagagaaacatggcagctccctttataaacatgagcagaacaatggcacctttgagctccatactgggtggacctcaccacctgaaagattaggttttgctttcctctcataaagttgaatgcgtctcttattactttttgggattttagcccagcaggatgtggtggtaggatgtggttaggtacaaactgtgacttgagcatagtttctgaagaaacagtatccaagcaatcagcacaaatactacaattgaagtttggtcatcatttgattttcaattgggttagacagttagtctttccccttcattggttgtctgtgtgcacacgtgcttacgtttgtatatgtttgtcagcagtgatcttatagccagaagtgaaaatgattaatatctctagctattagtgtagcataaattccatttttatagcatatatacctatatggat

SEQ ID NO: 55543 - DNA, 547 bp, Homo sapiens
aacagagttggatctagagctcaggtctcctracactcagttactatttctattgtaccacgctatacatacaaacaggaaaacaagacaggaatggttatagaacgggaattcttagatttgaacaaataatcacaccaacaagaataacctggcttaacataaagaataaatacaattaacaactctagtccaagtgaaaagtttctttctctttctctctgctccctccctccctcctttcttctcatttgttcaacttaagccaagggaaaatgaatacgtgaatgaaaaaaagcacagaatggctttgctaacgataaggaaaaatagtgacttcaggctaggaaattccgacctatcatgatgagtcttgaagagaagtttaaagtggagattgagctgaggaagtgcaaggcaattccagaagtgaggacagtgaatgaaaaagggtttgcatctagtttctttcaaaacaatctggataccatcagtaggaacaatctagttgatcttagtgtttgtaatggttcagaggaagaagtat

SEQ ID NO: 55544 - DNA, 547 bp, Homo sapiens
aacagagttggatctagagctcaggtctcctgacactcagttactatttctattgtaccacgctatacatacaaacaggaaaacaagacaggaatggttatagaacgggaattcttagatttgaacaaataatcacaccaacaagaataacctggcttaacataaagaataaatacaattaacaactctagtccaagtgaaaagtttctttctctttctctctgctccctccctccctcctttcttctcatttgttcaacttaagccaagggaaaatgaatacgtgaatgaaaaaaagcacagaatggctttgctaacgataaggaaaaatagtgacttcaggctaggaaattccracctatcatgatgagtcttgaagagaagtttaaagtggagattgagctgaggaagtgcaaggcaattccagaagtgaggacagtgaatgaaaaagggtttgcatctagtttctttcaaaacaatctggataccatcagtaggaacaatctagttgatcttagtgtttgtaatggttcagaggaagaagtat

SEQ ID NO: 55545 - DNA, 703 bp, Homo sapiens
ggcagagggcaggaaaggcacaattcttggaacttgaataaggaacagaaattcctaatttagcctcagaagagacatctctgaaaaatactctaccaggaaaaactgaagtgtaaaatgatacctcaaagaaatcaatgctggaacccataggatcatatgtttcatggatgtgcttcaaaactatttctcaaagcaatctgttgcatcagtctttgggctaatgaaggctgccagtcacagttccatcatggaatgactggcatactctgtaatgatctataatactacaactacatcagaactgctctgccatacagatagtaccagatggtgatgtgattattgtaaaggcctcacactatccacctgtccttgcaaaaactcccttagcagacatgcacctagttgacatgaaagaacaattttgaaatgtgatttggaagtgttttatatctggcckactttgctttgaattattctttcatttgccaaagagctcttgcaaggtactgcacaatggctaggcaattattattattaatagtaaaaactgcaattgcttttgcaccaacttaaagagctaaagtctaagcttccagtctcccagcatccctcacacgatggagggcagcacttgagtctaatcatgcttgagatggtgattgcctgatatgtatattaaatactatgctgaagagac

SEQ ID NO: 55546 - DNA, 1052 bp, Homo sapiens
tgcatctaaagttctgactcacaaaaagcatttaataaatagtagctttaatatcctcacaggaaccccaaggggtgggtattatcattagctccattttgctgttggaaacaaagaatgacagatttccagaattagcgggagtctcacaaatgttacccctggccaaactcaacagcgtaaatgttgatcaaactcgctctctaaccccaaacagctcagctcctaaccggtgccatgctcagtgaaacaggggaggaagtcgccagcccacttytcctgaccatgatgctgttctctctttgtctacgtagactagtcacttcatctcttggcattgattttgtattttgggcttctgatcagacacatctgtgtttctagcttttgtccccactgatttatagtataacttgacagatgtcccatctgtattttttgaatcctcatccattttcagtgagatgacaatgcctcaatgcaaagcctccatgtcattttggtaatgaaactcaaatcttcgggtaaagaaaatgtggtatatatacacaatgaaatactatttagccataaaaaagaatccaatcacgtcttttgcagcaacatggatggaactggaggccatgatcataagtgaagcaactcagacacagagagacaaatactaggacagatgtggtggctcacgcttttaatcccagcacttagagaggccaagtggaggggtgggggaatcacctgagctcaggagtttgagactagcctgagtaacatggcgaaaccctatctctacaaaaacaaaacaaaataaaaacaaaaaaactagccaggcatggtggcacttgcctatagttccagctacttgtggggctgaggtgggaagatcacttgagcccaagagttcgaggctgcaatgagccatgattgcaccactattctccagcctgggcaacaaagcaagaccctgtgtcaggtgttagaaaaaagaaagaatgaaagaaaaagaaataaggacaaatactgcatgttctcacttgtaagtgggagctaaa

SEQ ID NO: 55547 - DNA, 1078 bp, Homo sapiens
tacagcactcaggccttgatgggggcactgtgaaggtgaccatttattgaagactatgaggctctccggtcacggtgcaggaccggagagctatccatccaggtggtaactatgctacaaaactacaaaacatttctgtgatcccttttccctttggctagataaagtttccctcaagtgtgatcactggggtacatgggtttggattgacagatatatttatttatccaacttgtacttactgagtgtctaccacattccaggcattggggatatagtggtagccaagacagacacattccctgaactgaggaactcacagtccaagtggggcactaaacagataataatacaartaataaactctgggattctgatcactttcctgaatgaagaatacaaggtgctatgagagtgattcacttaatcaagggatcagagaaaggctctttaaggaagtataaaagttaagctgagacctggaggatatataggaattagtaaggcaaagtgaggaaagaaggggattctaagcaaaggaaacagcttgaaaactagcaaaggatacggagaaagaccagcaagttggaagaaaatcggaacagtgtgaaattgtggaagccaagggatatgccaatctccaaaaggagtatggaaccaagtgtataaaatgttgcttagtgaaaccaaagtcattggcatgactagatctaggttttgtgggtgcctgaactatacaattttgaggcactctttaagacagagaacacagaatttcaaaaataagactaggtataaaagtgaatctttatccagaaggataaaagaaatttccttctctccagcaaatactagactgtttggaattttgggtcccctttcctccagaaatttctttagaaagtttgcgagaaatgcttcctgactgcaatccagcttcccttccctaaaacactgtgggttccacacttacaggggtcccacactcatagctcatgcaagtgaggggtcctgaagctccagctttggcagcatcatctgcttctggtttctggtgcccttaaagagcagttttgta

SEQ ID NO: 55548 - DNA, 1078 bp, Homo sapiens
tacagcactcaggccttgatgggggcactgtgaaggtgaccatttattgaagactatgaggctctccggtcacggtgcaggaccggagagctatccatccaggtggtaactatgctacaaaactacaaaacatttctgtgatcccttttccctttggctagataaagtttccctcaagtgtgatcactggggtacatgggtttggattgacagatatatttatttatccaacttgtacttactgagtgtctaccacattccaggcattggggatatagtggtagccaagacagacacattccctgaactgaggaactcacagtccaagtggggcactaaacagataataatacaagtaataaactctgggattctgatcactttcctgaatgaagaatacaaggtgctatgagagtgattcacttaatcaagggatcagagaaaggctctttaaggaagtataaaagttaagctgagacctggaggatatataggaattagtaaggcaaagtgaggaaagaaggggattctaagcaaaggaaacagcttgaaaactagcaaaggatacggagaaagaccagcaagttggaagaaaatcggaacagtgtgaaattgtggaagccaagggatatgccaatctccaaaaggagtatggaaccaagtgtataaaatgttgcttagtgaaaccaaagtcattggcatgactagatctaggttttgtgggtgcctgaactatacaattttgaggcactctttaagacagagaacacagaatttcaaaaataagactaggtataaaagtgaatctttatccagaaggataaaagaaatttccttctctccagcaaatactagastgtttggaattttgggtcccctttcctccagaaatttctttagaaagtttgcgagaaatgcttcctgactgcaatccagcttcccttccctaaaacactgtgggttccacacttacaggggtcccacactcatagctcatgcaagtgaggggtcctgaagctccagctttggcagcatcatctgcttctggtttctggtgcccttaaagagcagttttgta

SEQ ID NO: 55549 - DNA, 1694 bp, Homo sapiens
agcatagtataaatacagcaaattctatcgtggtagtatcattagggttaacaggattcagaataacttttctcattgtcttaaggtttggcatttactatagaacttgttcttgtttactaattgagaaatgtacctgaaggggtcctagtaactgcgttcagggaagatagtcattatttccatttcgtatcccactctgtattactttgatatgaaactcgtacacagtaggtactcaataaatacttcctgatttaaaaattctaggtttaaatgaaatttgcttgagctgctgatacaaacttatacaggctgtatataatgcaatttgttgatatatgaaataactaatttccaaatttctgtaattccccacattactcagaacatctttttgtttgatgaaatcagctaacataatgtgtgacacgtatatgcttaataaacatttattgaatgatgaattattgcataaaccctatagaggattaaaagagacctagacaaggaaaagattttacattaaaaaaaattaacttttctcttagatttcagtaaaaaaaaaaaattcatgaattgaattagaaatataattgcttgcaagctatagaaaatgtgtcttcctaacttaaaagaaaataatttgtagaagatttgggacagttctcagggtctatgggaatgctggacaaccatgcttgccaaaatgcaggatgcaggcagcaacacagatgtgagagcagaaactttaccagcttcactgatcagcaccatgagtaagtttctgttgttattttcatcctagttccacttcaaagtcaaaatcccagaaaagagtctgattggcctagcttgggtcacatgtccaccccacccccaagtgtagtcagggcagggggtcttatttagagtctcaccaagaatacataaaactaaggagaggtagttctcccctacctaaaagaagtcaggattctgtaaccaaatttaaaatgtccacattataaacttaataatatctatacataataagtatgcatctatgtttatttgcttagggccgcctcacaaactaccatagactgagtggcttcagcaaccgaaatttattgtctctcagttctggaggctggaagcccaagatcaaggtgtcaagagggttggtttcttctgaggactatgagggaagggtctgttttaagctcttcttctggcttatagatggccatcctgtcgttgggtcttcgtgtggtccttcttccatacatatctgtccacatttcctcttgttataaggacacagtcatattggagtagggtccactttaatgactttgttttttaacttaagtacttctttaaagaccctatctccaaatagaattatattctgaagtactggggtgtggaaattcaacatatggatttgggtgagggaacaaaatttaggctgtaactgcatgttgtaaacacaaatgagtggaaatatcaattagcaaacacctattttatctataacacttttagtaaaaatggagtaatcagccaggcgcagtgactcacgcctgtaatcccagcactctgrgagactgaggcgggtggatcacctgaggtcaggagtttgagaccagcctagccaatatggtgaaaccctgtctctactaaagtacacaaattagccaggcatgctg

SEQ ID NO: 55550 - DNA, 1109 bp, Homo sapiens
atatatagtatatatgtatatataagggagagtgaaatatgaataataaagtgataaaaatatgacagaaaatacagcattggtgtttaaaggaaaagataattactgtgattgtcaatattattggaatcccaaggctggttttctaagttaaataaaattcagaaaaattatgtataaataagccattttagtactcggccaaataagagattctgcaatttgatcccctaaagggaggaaattagtgattttaaatttaacataattattgacctattaatgtttatgactattgcaatttattttatatattattaagtttgctgtttccttttctatcatttatttcatctttggactaaataccttttggtatttacttatcttctattggtttgttagtgattaattcttttctattttttagtcattatcctagtgctcaataggcacaaatgrctagtgtctaccgtattggacaggacaaaatagaatatttacataatgctgacaattctattgaaagtcactgtgtcaggtgcggtggctcacgtctgtaatcctagcactttgggaggccgaggcaggtggatcacgaggtcaggagttcgagaccagcctgaccaacatggtgaaatcctgtctctactaaaaatacaaaaattagccaggtgtggtggtgtggcgtgtgcctgtaatatcagctactcaggaggctaaggcaggagaatcgcttgaacccaggaggcggaagttgcagcgagccaagattgcaccactgtactccagcctgggctacagagtgagactgtgtctcaaaaaaagaaaaaaaaaaaaaagaaagtcactgtgtcagagcctttttaatgctttttcctactttcccaaattttgtattattattgtcttgcatatttgatttacatatatttaaactctactagatttgatattattgcttttgtatagtcaatgtttatttacatttacctacatatatgactttcctattgtcctttcttcttttctttctacattgccataatttatttataatacttttattttaacctgaagaatgctctttagtgttagtttacttcagg

SEQ ID NO: 55551 - DNA, 1048 bp, Homo sapiens
ttttttttagttctgaaattttcatttggattttttttatggtttcaatttctctgctgaagttctccattttctcactaatttttctccatcttttcatctaaatattttaatgttgtataaatgtttttgttttctaattctaaygtttagatcatctgtggatctgctattgacaggatttttttccccttgataagctccgtgttttcctactttttcacatgtcttgtaattttttaactgtaggccagatattatattataaaagaacagtagagactgaaataggtaataccttgttcttttgtctttcagacagtatagattagggactggtctcttatgtaatcagaaacagctgaaattaggctatggatagatttggttcaagttttgttttaaatgctttgagaatggtttcaggccccacttttgagcagaactttgagatctaagtactgcacgtctacaagatttctctctgctttttagacatgtcttcaaccatcacttctcagcaaaattcctgttggggagaattggcaggtagggagagctagctctgcctctgcttcttgagatgcctgtctacctcagcctgggctcaaccattgaaggctcaactggtttctccttttccctgcaaaatttgttgcttatggcaaggttgctcctctgctaagttgctaagaatattttcttacatgtttaggttccttttctttaaaaatacttctttttggccaggcacagtggctcatgcctgtaatcccagcactttgggaggccgaggcggctggatcacttgaggtcaggagctcaagacctgcctggtcaacatgatgaaaccccatctctattaaaaatacaaaaattagccaggtgtagtggtgcatgcctgtaaccccaggattacaggagaggctgaggcacgagaattgcttgaacctgggaggcggaggttgcagtgagccaagattgtgccactgcagcctgggtaacagaatgagactctgtctcaaaaacaaaacaaaacaaaacactt

SEQ ID NO: 55552 - DNA, 1048 bp, Homo sapiens
ttttttttagttctgaaattttcatttggattttttttatggtttcaatttctctgctgaagttctccattttctcactaatttttctccatcttttcatctaaatattttaatgttgtataaatgtttttgttttctaattctaacgtttagatcatctgtggatctgctattgacaggatttttttccccttgataagctccgtgttttcctactttttcacatgtcttgtaattttttaactgtaggccagatattatattataaaagaacagtagagactgaaataggtaataccttgttcttttgtctttcagacagtatagattagggactggtctcttatgtaatcagaaacagctgaaattaggctatggatagatttggttcaagttttgttttaaatgctttgagaatggtttcaggccccacytttgagcagaactttgagatctaagtactgcacgtctacaagatttctctctgctttttagacatgtcttcaaccatcacttctcagcaaaattcctgttggggagaattggcaggtagggagagctagctctgcctctgcttcttgagatgcctgtctacctcagcctgggctcaaccattgaaggctcaactggtttctccttttccctgcaaaatttgttgcttatggcaaggttgctcctctgctaagttgctaagaatattttcttacatgtttaggttccttttctttaaaaatacttctttttggccaggcacagtggctcatgcctgtaatcccagcactttgggaggccgaggcggctggatcacttgaggtcaggagctcaagacctgcctggtcaacatgatgaaaccccatctctattaaaaatacaaaaattagccaggtgtagtggtgcatgcctgtaaccccaggattacaggagaggctgaggcacgagaattgcttgaacctgggaggcggaggttgcagtgagccaagattgtgccactgcagcctgggtaacagaatgagactctgtctcaaaaacaaaacaaaacaaaacactt

SEQ ID NO: 55553 - DNA, 1048 bp, Homo sapiens
ttttttttagttctgaaattttcatttggattttttttatggtttcaatttctctgctgaagttctccattttctcactaatttttctccatcttttcatctaaatattttaatgttgtataaatgtttttgttttctaattctaacgtttagatcatctgtggatctgctattgacaggatttttttccccttgataagctccgtgttttcctactttttcacatgtcttgtaattttttaactgtaggccagatattatattataaaagaacagtagagactgaaataggtaataccttgttcttttgtctttcagacagtatagattagggactggtctcttatgtaatcagaaacagctgaaattaggctatggatagatttggttcaagttttgttttaaatgctttgagaatggtttcaggccccacttttgagcagaactttgagatctaagtactgcacgtctacaagatttctctctgctttttagacatgtcttcaaccatcacttctcagcaaaattcctgttggggagaattggcaggtagggagagctagctctgcctctgcttcttgagatgcctgtctacctcagccygggctcaaccattgaaggctcaactggtttctccttttccctgcaaaatttgttgcttatggcaaggttgctcctctgctaagttgctaagaatattttcttacatgtttaggttccttttctttaaaaatacttctttttggccaggcacagtggctcatgcctgtaatcccagcactttgggaggccgaggcggctggatcacttgaggtcaggagctcaagacctgcctggtcaacatgatgaaaccccatctctattaaaaatacaaaaattagccaggtgtagtggtgcatgcctgtaaccccaggattacaggagaggctgaggcacgagaattgcttgaacctgggaggcggaggttgcagtgagccaagattgtgccactgcagcctgggtaacagaatgagactctgtctcaaaaacaaaacaaaacaaaacactt

SEQ ID NO: 55554 - DNA, 1048 bp, Homo sapiens
ttttttttagttctgaaattttcatttggattttttttatggtttcaatttctctgctgaagttctccattttctcactaatttttctccatcttttcatctaaatattttaatgttgtataaatgtttttgttttctaattctaacgtttagatcatctgtggatctgctattgacaggatttttttccccttgataagctccgtgttttcctactttttcacatgtcttgtaattttttaactgtaggccagatattatattataaaagaacagtagagactgaaataggtaataccttgttcttttgtctttcagacagtatagattagggactggtctcttatgtaatcagaaacagctgaaattaggctatggatagatttggttcaagttttgttttaaatgctttgagaatggtttcaggccccacttttgagcagaactttgagatctaagtactgcacgtctacaagatttctctctgctttttagacatgtcttcaaccatcacttctcagcaaaattcctgttggggagaattggcaggtagggagagctagctctgcctctgcttcttgagatgcctgtctacctcagcctgggctcaaccattgaaggctcaactggtttctccttttccctgcaaaatttgttgcttatggcaaggttgctcctctgctaagttgctaagaatattttcttacatgtttaggttccttttctttaaaaatacttctttttggccaggcacagtggctcatgcctgtaatcccagcactttgggaggccgaggcggctggatcacttgaggtcaggagctcaagacctgcctggtcaacatgatgaaaccccatctctattaaaaatacaaaaattagccaggtgtagtggtgcatgcctgtaaccccaggattacaggagaggctgaggcacragaattgcttgaacctgggaggcggaggttgcagtgagccaagattgtgccactgcagcctgggtaacagaatgagactctgtctcaaaaacaaaacaaaacaaaacactt

SEQ ID NO: 55555 - DNA, 587 bp, Homo sapiens
gcccttagttgtcttcagtttctctttatgggtgctgcaatctctttaacccctgtccatacaggaactttgtacactctgctgtattctccatctagggttcacatatcacccaaattctcttctatgtctctgggaagggaagcaattctttttgcaggtcttcactattgtctttttcttttttccattgctttttctgtgctgtctggagaatcactttccataccattgggtcttcttttccccagttaatataccagagcctttctgctcattcattstctacatttcatgcctctctgaagtattaatacctttctctttacactggttacagatgtatatgcaaagatcaagtggatagattgtgtttgctgagaaactttagtgttgaaaatgcaatgcaaatctttaatgtaagtttactgtatatttgagtgtattgtatatttattctccaatataaatttagcaactttcacattatgaatcactaagccttatgtttctccaaagaagggagcatgacttctcaaaatacaatattgttttagaatgaaaatttgtttcatgaccaatgcaaa

SEQ ID NO: 55556 - DNA, 906 bp, Homo sapiens
actcttggcttcagtaactccctgacattcttatctacccttcgacagtgataaacttttaacatctgcatagaattttggactttagaaggcatttctgtaagtggcacatttattcgttaataaacattgcaaatgaatgtgtcatttgatcctaacaaccccatgggatttactaggtaggtgtcagctcattgcagagacgagaaaaataagacccatagtcaaggtaattctgtgacaggtcacacagaaagggtcaaaatcagtactcgaatcatgctgtcaactttaaaagccatgatccctccagtattgccatcatatgagccactagaagcactcaagatccgcatctaagaaaaaatgaagacatactgattatcttgcaaaaggaccagaggccaatgatgtacaataccctctgaaggaaaaaaaaaaaaaaaggctggttaaaaccgctcagatcctcttttttttcatcttttttttgggataaagagtctccctctatcacccaggctggagtgcaatggcgcgatctcggcttaatgcaacccccacctcccaggttcaagcaatkcttctacctcagcctcccgagtagctgggattacaggcacgtgccaccacgcctggctaatttttgtatttttgtagagacgaggttatgcttgagattatgtatgaaaatcttcttttcatattcatacataatctcaagcatcttttaaattgttcatgcttaaaatttccaaggctcaaatagtatcctaatagcagacatccggtgaataaagacagtagcttcagtagttaatcaactactgctacaaacaacatgtgtaaatcatttctaaagaaaaagtcagcagctgtttgctaaaaattttttttattgtgact

SEQ ID NO: 55557 - DNA, 906 bp, Homo sapiens
actcttggcttcagtaactccctgacattcttatctacccttcgacagtgataaacttttaacatctgcatagaattttggactttagaaggcatttctgtaagtggcacatttattcgttaataaacattgcaaatgaatgtgtcatttgatcctaacaaccccatgggatttactaggtaggtgtcagctcattgcagagacgagaaaaataagacccatagtcaaggtaattctgtgacaggtcacacagaaagggtcaaaatcagtactcgaatcatgctgtcaactttaaaagccatgatccctccagtattgccatcatatgagccactagaagcactcaagatccgcatctaagaaaaaatgaagacatactgattatcttgcaaaaggaccagaggccaatgatgtacaataccctctgaaggaaaaaaaaaaaaaaaggctggttaaaaccgctcagatcctcttttttttcatcttttttttgggataaagagtctccctctatcacccaggctggagtgcaatggcgcgatctcggcttaatgcaacccccacctcccaggttcaagcaatgcttctacctcagcctcccgagtagctgggattacaggcacgtgccaccacgcctggctaatttttgtatttttgtagagacgaggttatgcttgagattatgtatgaaaatcttcttttcatattcatacataatctcaagcatcttttaaattgttcatgcttaaaatttccaaggctcaaatagtatcctaatagcagacatccggtgaataaagacagtagcttcagtagttaatcaactactgctacaaacaacatgtgtaartcatttctaaagaaaaagtcagcagctgtttgctaaaaattttttttattgtgact

SEQ ID NO: 55558 - DNA, 761 bp, Homo sapiens
gttgaaaccactgaaaatgaaataatcagacctacttaaatgtttttaccatctgggcaaataacaccccaagggccaagatttacctaagaaagtgtctgaagtatgttacccaagcctgagaggcaacaggtaggtggattttgtgccaattagaaagtgttatgattggcaaaccactgcaaaactctgaaattgcagtgaaatggaaatgctggctgtcatccccaaagtacatttcaaggaatcacaaaacttcagaattagaagcaattatttagaatgaacgttttcacccayatgaaagttggaagatgaggtggtaacacgagagcttttgcaggcgtccctactcttaatcctgcgccccttccaccttggtacccttcattcttcaggacctgatggagtggtacaaagcagaggtcacttgacaagctcagcccagctcctggatggggcaaagctgacaaggaataggcacagggagcctggagatctcagggtccaggaaacagcctgccccattagaactgcacagcagagcacagcactgggatcagagagcaggctcatccccagtcttgtacaaaaaataacatttgatgattcccaaggggtaggtaaagcaagtagcatttggggttccagcagcctctagaactgtttcccaaatgtttggagcttgactttgcagtatacactttgccctggactgtttttctcttaatttttaggcccaagtgtattttaaggtaaat

SEQ ID NO: 55559 - DNA, 761 bp, Homo sapiens
gttgaaaccactgaaaatgaaataatcagacctacttaaatgtttttaccatctgggcaaataacaccccaagggccaagatttacctaagaaagtgtctgaagtatgttacccaagcctgagaggcaacaggtaggtggattttgtgccaattagaaagtgttatgattggcaaaccactgcaaaactctgaaattgcagtgaaatggaaatgctggctgtcatccccaaagtacatttcaaggaatcacaaaacttcagaattagaagcaattatttagaatgaacgttttcacccatatgaaagttggaagatgaggtggtaacacgagagcttttgcaggcgtccctactcttaatcctgcgccccttccaccttggtacccttcattcttcaggacctgatggagtggtacaaagcagaggtcacttracaagctcagcccagctcctggatggggcaaagctgacaaggaataggcacagggagcctggagatctcagggtccaggaaacagcctgccccattagaactgcacagcagagcacagcactgggatcagagagcaggctcatccccagtcttgtacaaaaaataacatttgatgattcccaaggggtaggtaaagcaagtagcatttggggttccagcagcctctagaactgtttcccaaatgtttggagcttgactttgcagtatacactttgccctggactgtttttctcttaatttttaggcccaagtgtattttaaggtaaat

SEQ ID NO: 55560 - DNA, 584 bp, Homo sapiens
atgctaggacctattctcagagattctgattttggttgtctggggtagaccagggcatcattattttaaaagggctccagttgattcaatgtacaatgaagtgttgagaatcacagggctccatgagatcccaagtcccgctagccttgtctgccctgtagtaagccaccctctgttcatactgtggcggatactgtaagtgactcattcaacactgctcctattccttttatccctcaccttcctctactacagaggctagaaagctaaatacttcatatctctaatggccatgcagctggaaatgcccctgtaacactgctctggccaaagraacctaagcagaattctgctggctgtgtcccatcagccaccttcttcctgcctaagatgaaaccaggtatctagtgttgtggcagccatgagggaagactggaagagttgcagtcagtttgccttgatatcatgctaaagacacaaacccagcaactgcctgcttctagacattttgttttggaaaacaataacaacctatttccttaagtcattctagttatattttctgtttcttacattctgaagca

SEQ ID NO: 55561 - DNA, 584 bp, Homo sapiens
atgctaggacctattctcagagattctgattttggttgtctggggtagaccagggcatcattattttaaaagggctccagttgattcaatgtacaatgaagtgttgagaatcacagggctccatgagatcccaagtcccgctagccttgtctgccctgtagtaagccaccctctgttcatactgtggcggatactgtaagtgactcattcaacactgctcctattccttttatccctcaccttcctctactacagaggctagaaagctaaatacttcatatctctaatggccatgcagctggaaatgcccctgtaacactgctctggccaaagaaacctaagcagaattctgctggctgtgtcccatcagccaccttcttcctgcctaagatgaaaccaggtatctagtgttgtggcagccatgagggaagactggaagagttgcagtcagyttgccttgatatcatgctaaagacacaaacccagcaactgcctgcttctagacattttgttttggaaaacaataacaacctatttccttaagtcattctagttatattttctgtttcttacattctgaagca

SEQ ID NO: 55562 - DNA, 630 bp, Homo sapiens
agtgaataagtctcacaagatctgatgattttgtaaggagaaaccccttttgcttggctctcattttctcttgtctgccaccatgtaagacatgcctttcaccttccaccatgattttgaagcctccccatgaggccatgtggaactatgagtccatcaaacctctttttctttataaattaaccagtctccagtatgtctttatcagcagcatgaaaatggactaatacacacctaaattaggtctcccctattctcttccttcataggctctatcaaaatttgcaattgcatactcatgtatgcattcttttaatttaatatctgtctgcaatgaaagtggggatcatgtctgtcttggtcattgttttattattgatgcccagcacatagtaggttctcagttaatactgacagaattaactgacaagtagctgaacatgagggtacatgaacacatgaatgaatgccattttgagctgccaacacatggagtcatataaagtagaaccggtttgagactttagagaaggccactcaagcctaygccatttcagccactgtaggaacgtgtgttattcatgtcataaagacatagcttgagtaagtttacgtctcaacaaggatttt

SEQ ID NO: 55563 - DNA, 999 bp, Homo sapiens
tgttatcatgtgtacatgtgtacaagaggcacctccttttctgtggtattatgcacagagaacacaaacacagagggagcgagggagtcctgcctgcacttgggtccagcgagcatggaatgcgttagagaagaactagctcatcctagtgagtaggaccaccccgcggtcaagcctacaagtcaagcctctcctcagctctctaacctcatttctctgagtgtcttcagaacatcaagctttcggcgctcccccaccccatcccactgcttttcctcacatcctttcccttgcccgggatgctgtttcttctgcccttgctctctctcatctgccttttctttcaaagtccagattaagttctatctccccagttaagccattctccatcttcctcttccctcctgccattggcttcatgcagccagcactttactgtctacagtggccatactggttggtgctgttgcctgggtgttcgttttatctcccagcacgttggaagctcctgcagggcaggactttyagtgatcttcccttagctctgttcttcccccagtgtctagcacagggctaagccagcaggacatacttcctgatttgctaattgatggatggcttcttaatggagttagatttcccatatgtgctctacttctggacaagtcaggtggctttgttttttttttttttttttttgagatggaatctctctctgctacctaggctggagtgcagtggtgcaatcttggctcactgcaacctctgccttgcgagttcaagcgattctcctgcctcagcctctcgagtagctgggactacaggcgtgtgccaccatgcctggctaattttttgtatttttagtagagacagcgtttcaccgtgttagccaggatggtctcaatctcctgacctcatgatccacccacctcggcctcccaaagtgttgggattataggtgtgagccaccgcgcccggccaggcgacttttaaagttga

SEQ ID NO: 55564 - DNA, 999 bp, Homo sapiens
tgttatcatgtgtacatgtgtacaagaggcacctccttttctgtggtattatgcacagagaacacaaacacagagggagcgagggagtcctgcctgcacttgggtccagcgagcatggaatgcgttagagaagaactagctcatcctagtgagtaggaccaccccgcggtcaagcctacaagtcaagcctctcctcagctctctaacctcatttctctgagtgtcttcagaacatcaagctttcggcgctcccccaccccatcccactgcttttcctcacatcctttcccttgcccgggatgctgtttcttctgcccttgctctctctcatctgccttttctttcaaagtccagattaagttctatctccccagttaagccattctccatcttcctcttccctcctgccattggcttcatgcagccagcactttactgtctacagtggccatactggttggtgctgttgcctgggtgttcgttttatctcccagcacgttggaagctcctgcagggcaggactttcagtgatcttcccttagctctgttcttcccccagtgtctagcacagggctaagccagcaggacatacttcctgatttgctaattgatggatggcttcttaatggagttagatttcccatatgtgctctacttctggacaagtcaggtggctttgtkttttttttttttttttttgagatggaatctctctctgctacctaggctggagtgcagtggtgcaatcttggctcactgcaacctctgccttgcgagttcaagcgattctcctgcctcagcctctcgagtagctgggactacaggcgtgtgccaccatgcctggctaattttttgtatttttagtagagacagcgtttcaccgtgttagccaggatggtctcaatctcctgacctcatgatccacccacctcggcctcccaaagtgttgggattataggtgtgagccaccgcgcccggccaggcgacttttaaagttga

SEQ ID NO: 55565 - DNA, 824 bp, Homo sapiens
gcatcataaaataaaattgaggaacatatacacaagcaggaaaactcacctgcaatgtgttcattttctgctgctcttggaaacwtgcagagactgtggctgatagacctagaggggcagaagcaggtcactgaagtcatgagggctccggcctgcaaaggcagaaatcacctgcataagaaccgcaaaagaaagctcaataggctaacaccctgtgaacactcaacctgcaaacactcagaagggtctaaaagagtgatacagggtttcgccatgttggccaggctggtctcaaattctggcctcaagtgatccgcctgcctgggccaacatggcaaaaccccgtctctacttaaaaataacaaaaaaaattagccaggcatagtgtcacatgcctgtagtcccagctactcaggaggctgaggcacgagaatcctttgaacctgggaggtggaagttgcagtgagccgagaccacgctgttgcattccagactgggtgagagacactgtctcaaaaaaaaaaaaaaaaaaaaagtgataggggaagcatgcgcctgtaactctaagataatcaggtagtaattagatgagttagactctcatgggtaacacgactccttttacaaatagtctgccatcatcaaatacaaggtgcaaaaagaaaaaaaattcccattatacggctcatgttttttgtggtttgttggttgagacagggtctcaatctgccacccaggctggagtgcagtggtgcattcacggctctctgcagcctcgacctcctgggctccatccatcctcccacttcagcctcctgagtagc

SEQ ID NO: 55566 - DNA, 824 bp, Homo sapiens
gcatcataaaataaaattgaggaacatatacacaagcaggaaaactcacctgcaatgtgttcattttctgctgctcttggaaacttgcagagactgtggctgatagacctagaggggcagaagcaggtcactgaagtcatgagggctccggcctgcaaaggcagaaatcacctgcataagaaccgcaaaagaaagctcaataggctaacaccctgtgaacactcaacctgcaaacactcagaagggtctaaaagagtgatacagggtttcgccatgttggccaggctggtctcaaattctggcctcaagtgatccgcctgcctgggccaacatggcaaaaccccgtctctacttaaaaataacaaaaaaaattagccaggcatagwgtcacatgcctgtagtcccagctactcaggaggctgaggcacgagaatcctttgaacctgggaggtggaagttgcagtgagccgagaccacgctgttgcattccagactgggtgagagacactgtctcaaaaaaaaaaaaaaaaaaaaagtgataggggaagcatgcgcctgtaactctaagataatcaggtagtaattagatgagttagactctcatgggtaacacgactccttttacaaatagtctgccatcatcaaatacaaggtgcaaaaagaaaaaaaattcccattatacggctcatgttttttgtggtttgttggttgagacagggtctcaatctgccacccaggctggagtgcagtggtgcattcacggctctctgcagcctcgacctcctgggctccatccatcctcccacttcagcctcctgagtagc

SEQ ID NO: 55567 - DNA, 1352 bp, Homo sapiens
caactgcccagggctgcccaattcccagaggggaggaggagagagaggcaggcagggggagccccggcttcaggtggggcacaccccacaccctcaacaaacctcccagcctctcgggctgggcacttcctgcctggccacccagccagccatggggcagcggggtggccaccaraggcgggcgtgctggggtgcgaggtcactgctgctccaggcagtcctcggtcaccccctgggcagccagctcagccagcacgttctgcaggtagttggggtcgggatagccgtggcccgtaatgttgcggtccatctctgtcttgtggtggatctcgttccataccacggtgtccgtctcacccgtggtgctggacgtgcccactgtgaagatgagccgcctcttccaggccaccttcaggagctctaggacctgcccggggaggaggagggggaagaggaaggaggggacggagagtgagaggggctcagtgagcaggcacgggttggcaccatgttcttcccatcccagcccctcccaggtgactcatccactccctggcactcaccccatctgcagggaccccaaaactgcccactggatagtacattaggatcccacatgaacctgggctccagcccaccccgcctcagtgcctggcactgccatccgtttggtcctgatgcccaggcaccatgctcgagtcctccctgcttccacagccgttgctggacgagcgcccgcccacccaccctccctggtggaatccaggcctccctgccctctccctgccctctccccgcctccagctccgccacctcaagcccattctcacacggccagagcttttccaaagctccatcagcagctccacctccgtggcttcgctgggcgctcagaaccagctctacccctggtgctggcctggggggcaccctgtcttcacacccacaccacgggctcccactatcctgccttcctggaaggctcgtccccaaccttctctgcagccacaaagtccctattcatgtctcagtgcagacaccactgctccagccttccgtggtcacctggtctaacacagcccccggtccctgcctgtcacactctgactctcaggagctcctgaccccacccggcagggtgctggaaggtgatggcctctcctcctccctcgaggctatgtgaggtccaggctgccctccctgtacctacagcaggtccccagaaaagagcagcagacactcggcccggcctcagcctctgtcctccgctgcagaagcagagtccagtgtggcgcctggcctcctgccgcctggtcagggccccgtccaccccccgggcgcatggtggcact

SEQ ID NO: 55568 - DNA, 361 bp, Homo sapiens
cagcagtgcaactgtctgacaagagcyttggcttctaccccacctctatagtgaggaagtagctttgtctcctgtctggtaggcatttgcagaggctgtgcgtatgagcagagcctggctaccatcccaaggtgacagtagggagacagttcccctcctgacactggtaggcatctgcagagtttgtttgagtaaagccttactatcatctcacacaagcagttaaaagcccttcctggctcctagatatctgcagagattatgcgtgtgaacacacccctgactaccaccctagcttgactgtcatgacatttaaataggaaactgagtcatatcataatacctcaaatttctaaaatgc

SEQ ID NO: 55569 - DNA, 361 bp, Homo sapiens
cagcagtgcaactgtctgacaagagctttggcttctaccccacctctatagtgaggaagtagctttgtctcctgtctggtaggcatttgcagaggctgtgcgtatgagcagagcctggctaccatcccaaggtgacagtagggagacagttcccctcctgacrctggtaggcatctgcagagtttgtttgagtaaagccttactatcatctcacacaagcagttaaaagcccttcctggctcctagatatctgcagagattatgcgtgtgaacacacccctgactaccaccctagcttgactgtcatgacatttaaataggaaactgagtcatatcataatacctcaaatttctaaaatgc

SEQ ID NO: 55570 - DNA, 1114 bp, Homo sapiens
gcatggaaaaaatatatagcagtgcaatcaaaggacctcaattgaacctcctttctacctttcctcactagttctgcaaactttctgaaaaatttaacccattggctaatcaacaataaggacagtaagtcttcccacacaggttcattataagagttaaaaaatatattagcatatattaaagtgccaggaacctggtgggttctcaaaaattattacctggattttgaaaccgactatgctagagcagtgttctatcatttcaaatttttgcccactatgattgtaatcacctgatgagttcttcctacctcctgcacagaaaaaaaaatcagtccactgagatctcagcattgcagtagagaaagagtttaactgacacaaggctggcctacactggagaacttacacttacttatcacttacatcagtctccctgaaggctccagggctctgagttgaggagattttatgggcaagttggtgggcaggggttagggaatgggagctgctgattggttagggatgagatcataagggtgtggaaaatggccctcatgcactgagtctgcccctgggtgtggtcacaggrtcagttgagtcaggagtcacaagtccaggtggagtcagtctgcaaaacatctcaaaaaaaaaaaaaaatcagtcttgggttctacaaccctctggccatataactcctgagcaagaaaggattataaaaactgtgcttacattttagcagagttcaggctcctcccataatcctgttcttgtggcctttcgtcagtcttacaaaggcagtttttggtccctgagcaaggaagggattagttttagggagggactattcttatcctccctttcaagttaaactataaactaaattccttctgaagttagcttagcctacacccaagaataaccaagggcagcttggagatcagaagcaagagggaatcaactatgtcagatttctcttactgtcataattttgcaaaggcagtttcacaatcacatatatttttctctcttgttatatttatttagtatccttttacctttgtgtcttacaaaagtttggaatctttctttacctagtgagtcataagagatg

SEQ ID NO: 55571 - DNA, 1114 bp, Homo sapiens
gcatggaaaaaatatatagcagtgcaatcaaaggacctcaattgaacctcctttctacctttcctcactagttctgcaaactttctgaaaaatttaacccattggctaatcaacaataaggacagtaagtcttcccacacaggttcattataagagttaaaaaatatattagcatatattaaagtgccaggaacctggtgggttctcaaaaattattacctggattttgaaaccgactatgctagagcagtgttctatcatttcaaatttttgcccactatgattgtaatcacctgatgagttcttcctacctcctgcacagaaaaaaaaatcagtccactgagatctcagcattgcagtagagaaagagtttaactgacacaaggctggcctacactggagaacttacacttacttatcacttacatcagtctccctgaaggctccagggctctgagttgaggagattttatgggcaagttggtgggcaggggttagggaatgggagctgctgattggttagggatgagatcataagggtgtggaaaatggccctcatgcactgagtctgcccctgggtgtggtcacagggtcagttgagtcaggagtcacaagtccaggtggagtcagtctgmaaaacatctcaaaaaaaaaaaaaaatcagtcttgggttctacaaccctctggccatataactcctgagcaagaaaggattataaaaactgtgcttacattttagcagagttcaggctcctcccataatcctgttcttgtggcctttcgtcagtcttacaaaggcagtttttggtccctgagcaaggaagggattagttttagggagggactattcttatcctccctttcaagttaaactataaactaaattccttctgaagttagcttagcctacacccaagaataaccaagggcagcttggagatcagaagcaagagggaatcaactatgtcagatttctcttactgtcataattttgcaaaggcagtttcacaatcacatatatttttctctcttgttatatttatttagtatccttttacctttgtgtcttacaaaagtttggaatctttctttacctagtgagtcataagagatg

SEQ ID NO: 55572 - DNA, 1114 bp, Homo sapiens
gcatggaaaaaatatatagcagtgcaatcaaaggacctcaattgaacctcctttctacctttcctcactagttctgcaaactttctgaaaaatttaacccattggctaatcaacaataaggacagtaagtcttcccacacaggttcattataagagttaaaaaatatattagcatatattaaagtgccaggaacctggtgggttctcaaaaattattacctggattttgaaaccgactatgctagagcagtgttctatcatttcaaatttttgcccactatgattgtaatcacctgatgagttcttcctacctcctgcacagaaaaaaaaatcagtccactgagatctcagcattgcagtagagaaagagtttaactgacacaaggctggcctacactggagaacttacacttacttatcacttacatcagtctccctgaaggctccagggctctgagttgaggagattttatgggcaagttggtgggcaggggttagggaatgggagctgctgattggttagggatgagatcataagggtgtggaaaatggccctcatgcactgagtctgcccctgggtgtggtcacagggtcagttgagtcaggagtcacaagtccaggtggagtcagtctgcaaaacatctcaaaaaaaaaaaaaaatcagtcttgggttctacaaccctctggccatataactcctgagcargaaaggattataaaaactgtgcttacattttagcagagttcaggctcctcccataatcctgttcttgtggcctttcgtcagtcttacaaaggcagtttttggtccctgagcaaggaagggattagttttagggagggactattcttatcctccctttcaagttaaactataaactaaattccttctgaagttagcttagcctacacccaagaataaccaagggcagcttggagatcagaagcaagagggaatcaactatgtcagatttctcttactgtcataattttgcaaaggcagtttcacaatcacatatatttttctctcttgttatatttatttagtatccttttacctttgtgtcttacaaaagtttggaatctttctttacctagtgagtcataagagatg

SEQ ID NO: 55573 - DNA, 1114 bp, Homo sapiens
gcatggaaaaaatatatagcagtgcaatcaaaggacctcaattgaacctcctttctacctttcctcactagttctgcaaactttctgaaaaatttaacccattggctaatcaacaataaggacagtaagtcttcccacacaggttcattataagagttaaaaaatatattagcatatattaaagtgccaggaacctggtgggttctcaaaaattattacctggattttgaaaccgactatgctagagcagtgttctatcatttcaaatttttgcccactatgattgtaatcacctgatgagttcttcctacctcctgcacagaaaaaaaaatcagtccactgagatctcagcattgcagtagagaaagagtttaactgacacaaggctggcctacactggagaacttacacttacttatcacttacatcagtctccctgaaggctccagggctctgagttgaggagattttatgggcaagttggtgggcaggggttagggaatgggagctgctgattggttagggatgagatcataagggtgtggaaaatggccctcatgcactgagtctgcccctgggtgtggtcacagggtcagttgagtcaggagtcacaagtccaggtggagtcagtctgcaaaacatctcaaaaaaaaaaaaaaatcagtcttgggttctacaaccctctggccatataactcctgagcaagaaaggattataaaaactrtgcttacattttagcagagttcaggctcctcccataatcctgttcttgtggcctttcgtcagtcttacaaaggcagtttttggtccctgagcaaggaagggattagttttagggagggactattcttatcctccctttcaagttaaactataaactaaattccttctgaagttagcttagcctacacccaagaataaccaagggcagcttggagatcagaagcaagagggaatcaactatgtcagatttctcttactgtcataattttgcaaaggcagtttcacaatcacatatatttttctctcttgttatatttatttagtatccttttacctttgtgtcttacaaaagtttggaatctttctttacctagtgagtcataagagatg

SEQ ID NO: 55574 - DNA, 1114 bp, Homo sapiens
gcatggaaaaaatatatagcagtgcaatcaaaggacctcaattgaacctcctttctacctttcctcactagttctgcaaactttctgaaaaatttaacccattggctaatcaacaataaggacagtaagtcttcccacacaggttcattataagagttaaaaaatatattagcatatattaaagtgccaggaacctggtgggttctcaaaaattattacctggattttgaaaccgactatgctagagcagtgttctatcatttcaaatttttgcccactatgattgtaatcacctgatgagttcttcctacctcctgcacagaaaaaaaaatcagtccactgagatctcagcattgcagtagagaaagagtttaactgacacaaggctggcctacactggagaacttacacttacttatcacttacatcagtctccctgaaggctccagggctctgagttgaggagattttatgggcaagttggtgggcaggggttagggaatgggagctgctgattggttagggatgagatcataagggtgtggaaaatggccctcatgcactgagtctgcccctgggtgtggtcacagggtcagttgagtcaggagtcacaagtccaggtggagtcagtctgcaaaacatctcaaaaaaaaaaaaaaatcagtcttgggttctacaaccctctggccatataactcctgagcaagaaaggattataaaaactgtgcttayattttagcagagttcaggctcctcccataatcctgttcttgtggcctttcgtcagtcttacaaaggcagtttttggtccctgagcaaggaagggattagttttagggagggactattcttatcctccctttcaagttaaactataaactaaattccttctgaagttagcttagcctacacccaagaataaccaagggcagcttggagatcagaagcaagagggaatcaactatgtcagatttctcttactgtcataattttgcaaaggcagtttcacaatcacatatatttttctctcttgttatatttatttagtatccttttacctttgtgtcttacaaaagtttggaatctttctttacctagtgagtcataagagatg

SEQ ID NO: 55575 - DNA, 1114 bp, Homo sapiens
gcatggaaaaaatatatagcagtgcaatcaaaggacctcaattgaacctcctttctacctttcctcactagttctgcaaactttctgaaaaatttaacccattggctaatcaacaataaggacagtaagtcttcccacacaggttcattataagagttaaaaaatatattagcatatattaaagtgccaggaacctggtgggttctcaaaaattattacctggattttgaaaccgactatgctagagcagtgttctatcatttcaaatttttgcccactatgattgtaatcacctgatgagttcttcctacctcctgcacagaaaaaaaaatcagtccactgagatctcagcattgcagtagagaaagagtttaactgacacaaggctggcctacactggagaacttacacttacttatcacttacatcagtctccctgaaggctccagggctctgagttgaggagattttatgggcaagttggtgggcaggggttagggaatgggagctgctgattggttagggatgagatcataagggtgtggaaaatggccctcatgcactgagtctgcccctgggtgtggtcacagggtcagttgagtcaggagtcacaagtccaggtggagtcagtctgcaaaacatctcaaaaaaaaaaaaaaatcagtcttgggttctacaaccctctggccatataactcctgagcaagaaaggattataaaaactgtgcttacattttagcagagttcaggctcctcccataatcctgttcttgtggcctttcgtcagtcttacaaaggcagtttttggtccctgagcaaggaagggattagttttagggagggactattcttatcctccctttcaasttaaactataaactaaattccttctgaagttagcttagcctacacccaagaataaccaagggcagcttggagatcagaagcaagagggaatcaactatgtcagatttctcttactgtcataattttgcaaaggcagtttcacaatcacatatatttttctctcttgttatatttatttagtatccttttacctttgtgtcttacaaaagtttggaatctttctttacctagtgagtcataagagatg

SEQ ID NO: 55576 - DNA, 856 bp, Homo sapiens
cagaacttcagtaaatttttttttagatgcagatgtttatgcactgacttaaatatttaataaggcatgctttaatttgtttgtttttacttattgttttaaaagctagagtcctgaccaatttgcttctgcctccacacattttgtttttagagatataaactacaagtatatctcagcaatatgaggccaggaaagagatgctccgagcatgctctgtagccgtggcccctgggccagcagcatcagtgctacctgtaggcttcagacctgcagaatcctagggcccagcccagatgcactgaatcagacctgtattttaacaggtcccctgggtgacctgtaaccacattccactttgtgaagttctgtttaaagaagcaggcctgggatttgcttactattcagtgaaactttcaataaagcttcttttctcttcctccgtgaacggcagttattttctcgtagcaagagtctggactacagttgttctgaatcttttgagtagatattgaaggggagatacatgagcatgcaagcagacgtgcccagtatagcgagaaccagaataatgaacccctgcaaagtgggagggcatttggaaagagtgcacgctgagttcatccccarcataaaggaaccagcccgttattctaatctgatgagggaattcttcctgacaattgagtgatggaaggaggcattttaaatctttccatgtgtgtctcttctggcaagtggacagggcttgtgatgaatcctaggtctgataccagggtctttaatgtaaaagacaaaaacatactagacatctagcctattaaacttgaactccagccaaataagagctgatttc

SEQ ID NO: 55577 - DNA, 545 bp, Homo sapiens
caaaagccaaaattgacaattgggatctaattaaactaaagagcttctgctgttgctttttaccatcactgcccctgaatcttttctcccttacttaccccagtacctccttttccttaaacacattggcagtcagcttcagcttcagccctgattccaccctgtctcttccattcctagctaaggaaacttgaacagggtgtctacaaaggctgggctcatttcctcttctcccatgccctgtgtttatttttattttatgttattttatcattattattttgagacggagtctcactctgtccccctggctggagtgcagtggcacgatctcagttcgccacaacctctgcctccygagttcaagtgattctcctgcctcagcctcccaaatagctgggactacaggcacccgccactatgcccagctaatttttgtatttttagtagagttgggggtttcaccatgttggccaggctggtctcgagctcctgaactcaggtgatctgcccgcctcggcctcccaaagtgctgggattacagg

SEQ ID NO: 55578 - DNA, 545 bp, Homo sapiens
caaaatgtctttgcaaagtgcaaagactcttcactcctctccactcttgctcttcctttttgctcctgccctggcctgscctgggttggtttccagggatctctgcttaccagcaagccagtcacctacctgttatccacatctactgaaggcctggtaacagcagcccgggcccagagaagtgttaaaaaaaaaagaaagaaagaaagaaagaaaaacttggatcaaagctagcaatgccaccatcatttcttcctcttggattgggttacgtaagctgagtgctatggtgggaaagctccagccaggactcaggaagctgggggtcaggtcttaaattttattttatccaacttataagacagtattagcctgtttcacagatgctggcagaagacatgagacttctggatctgaaatacaggactggtaacgtagcaagcaagatgaacacaagcatatttcatcagttacccttgcccttgagttccacagaagtgacccaacaggctcagattaactaatacacacatgaaggcggtttg

SEQ ID NO: 55579 - DNA, 1384 bp, Homo sapiens
tctctccagagattctaattatgattggtcttgagcgtggattctctctccagaaattctaatataattggtcttgagtatggcctgggcagtttttcaaacaattttttaaatctttccagggggttttaatataaactccaggctgagaatcactgctataaaaagatgttttttcttcttttactttaatagtctttggtataaagtgaccatatctgctaaatcattaagttccctgggagagaaccctctattctaattttctgcattggttatcaaaatttgcaaaccaacaacggagtgccttcccttcagagagttttctttggtaagtttggaatggggcccagaatctgcatttttttaagtcccatttggaattccaacatgcatgattcttgtaccacattttaaaaagcactgccttagcatgacaaaagaataggagagtagactttaatgggcacagggagaaaaaggagagtgggtaaggtctcagagtaagggttagggagcagaaagaagtgatgcaggtggcacacaacatggagctccaaaggttgatgaaagagagaaaggagaaactgcatggcacaattcttaggaatgagcagtaaagctcaagctctgtacaaaccaggctacttcttgtttgatcaactccaagttgcccagggaacagcaatgtgcctcagtgagcactgtcttggaagccccaagagaaagaacttttgggtttttaattgcttcttctcaaggctcctgaagttttttttttttttctttccttccttcttcttaagccagtcaaatttagcagtgggggattgtcttccaactttagtgacactaatgttaataagttctgataacccatcggaccagcctcctttcccttcttcacccatcagattaaagaattagaagaacttgacttgaaagaacactgtccaaaacctaaaatctttaactgcaccttgccttatagaaaagatgtatgcagaaaaattgtctataaaattttggtaaatcaaatgatatttttaatgactacagaataggaaaggagcttgcaatttaaaataatcctctgacaaccctctgaaaaaatctttctttattttttgaggttttattttttatttctctctatatctgatttttcttaacaaagaatacacatttaatattgaccattcatggagtcattattggattaaacaagaaaatgaatttaaagcattaagatagtccctggcatgcagtaaatattcaaaaaagttagattttttaaaagacattttttaaagagtagctttaggttcacagcaaaattgagaggcaggtacagagattgccyatatactccctgccccctaca

SEQ ID NO: 55580 - DNA, 1269 bp, Homo sapiens
tggttacattaaggagtgggaaccaagtgtctgccccatcacccacctaccaccaaccccttcagacaagcctcctctgggtgacctaagtaggtatttggttcttctcccatcactggaaatttctgtcctgtccaatttcctttatacatagtgctcactcttcagcattatttctcccctcaaccatcctcacccagtagaatgggatcatgatgatactctaatgaccattcctttctcacatccttatatagctaaaacatcatccaacatttttttttttttttgagacgaggtctcactctgttgcccaggctggagtgcagtggtgtgatcttggctgactgcaacctctgcctcccaggttcaagcaaatctcctgcctcagcctccccagtagctagggttacaggcacatgccaccacccccagctaatttttgtatttttgttagagatggtttcaccatgttggccaggctggtcttgaattccagacctcaagtgatccacctgcctsagcctcccaaagtgctgggattataggcgtgagccaccgtgcctggccatcattcaactttttatcccggaaatgatggaagacatatatttctctaatacagactggaaaactacaggctgccacttgtttttgtaaacaaaattttattggaacacagccacacacattaggttacatattttctatgactgcttgtgactacaatggtagagttgtgaagttgtgacagagaccttatgacctgcaaagactaaaatgtttactatctgaccctttacaaaaaaaatttgccaacccctcgtctaaaatatagatgagtttcacatcagtcctttaagttctgaaagagcttcattagtatgtatatgtagcctttatcatttactcactctaaataaaaactacatttgaaacaaagaaaatcgcatggctgtactataaggataatttttacatcttgtaaaattgtttccagccttaaaaacttcctgaaaaatatgaagggaactgtgtatttgctttgaaggagcagaaggaagaataaagtcttgcatcagtcagaagtatttgatgtcaccattgaaaagggaagaaaacagataatctatggggcctatagaagcaaaaaggagtaatgaaaactgtctgcaggaccagaaggcacaagatcctgccttcagagctccctatcagagcccttggctcctctcttcacaccctgttccctaactcagagtctagttt

SEQ ID NO: 55581 - DNA, 1269 bp, Homo sapiens
tggttacattaaggagtgggaaccaagtgtctgccccatcacccacctaccaccaaccccttcagacaagcctcctctgggtgacctaagtaggtatttggttcttctcccatcactggaaatttctgtcctgtccaatttcctttatacatagtgctcactcttcagcattatttctcccctcaaccatcctcacccagtagaatgggatcatgatgatactctaatgaccattcctttctcacatccttatatagctaaaacatcatccaacatttttttttttttttgagacgaggtctcactctgttgcccaggctggagtgcagtggtgtgatcttggctgactgcaacctctgcctcccaggttcaagcaaatctcctgcctcagcctccccagtagctagggttacaggcacatgccaccacccccagctaatttttgtatttttgttagagatggtttcaccatgttggccaggctggtcttgaattccagacctcaagtgatccacctgcctgagcctcccaaagtgctgggattataggcgtgagccaccgtgcctggccatcattcaactttttatcccggaaatgatggaagacatatatttctctaatacagactggaaaactacaggctgccacttgtttttgtaaacaaaattttattggaacacagccacacacattaggttacatattttctatgactgcttgtgactacaatggtagagttgtgaagttgtgacagagaccttatgacctgcaaagactaaaatgtttactatctgaccctttacaaaaaaaatttgccaacccctcgtctaaaatatagatgagtttcacatcagtcctttaagttctgaaagagcttcattagtatgtatatgtagcctttatcatttactcactctaaataaaaactacatttgaaacaaagaaaatcgcatggctgtactataaggataatttttacatcttgtaaaattgtttccagccttaaaaacttcctgaaaaatatgaagggaactgtgtatttgctttgaaggagcagaaggaagaataaagkcttgcatcagtcagaagtatttgatgtcaccattgaaaagggaagaaaacagataatctatggggcctatagaagcaaaaaggagtaatgaaaactgtctgcaggaccagaaggcacaagatcctgccttcagagctccctatcagagcccttggctcctctcttcacaccctgttccctaactcagagtctagttt

SEQ ID NO: 55582 - DNA, 962 bp, Homo sapiens
acaccacctttgtgctctaaattcaaagttcatgaaaatataatttttcaacataaamatttttcagcgatagaaggaagccaggaatccagcaaattcaatagtttttcctaaaatggctctgacagatgaacacccagcctctgcttttacaaatttttatcacactgctaatacggacagtttcctgaatacctctctaggcaccttgtcttattattcaacaaatcttaatttagtcatttgacaaatgtgacgaaagaaaaaaaatgtgtgtattctgttcgcttgcttgcttatttgtttctcttatcaaatagaaacaaaactgctaaatcaaggcagttccatttgttcaccctttttttttttttcatctcctcctcagctgcatcacatataagcacaacgggttcttgttctcatcttagggatctgcgtacgcaaccctaatttacccagacagaaagcaattcctcagaggcagatccagttaaacaggttgcctgtagtcgacaaatttcaggcagaaattgtgggagtacagcgtttctaggcacaggcgggcttatcaataccaaagcctagcttgactgcaagaagttttatttctcttctctgctacctgtctatatgaaaaggcattttcctgcttggaaaatagttgctaagagaaaaagtccaggcttccttatcagagaggtggaagctcaaatctgctgctcatatttattgatttttggccatgcacaagttatgttcaacctcagttttcttgtggggaagaacaacaatgctctaagggacaattgttcaatctgtggtggatatcattatctacacttgtataagagaatgcactgctctacctcactcacaatctaaatattctgacttgggatgtaaagagcttccttctcatcaagaaaagactatgaactaggctatgaatttggagtccc

SEQ ID NO: 55583 - DNA, 741 bp, Homo sapiens
cagttaatccctcccagcttaccagtaaaacctcaggattcatgctttcctgggagccacctkcggccactaagataggagcggggttcagacatggccaggcgctcctaatctcagacccaaagtgcaatttttggcagcctgcatgagaaggagggtgggaggaaaggtggctagaaccaagggtagcagcctgggggcttgagaggaaaccaggcacagcccatcctaccctgtctcacgagcagcccgtcctcctcctgactccccttaccccacacaccgagcgccattctcttgctgcctcatctattctggttaggtacttactgagcatcaggtgctaggcaagtggctggggagagacaacgtttaatgactcagtctccgcctgcacagagcctttgagtctagagggagacacagacttactgacaggctgggttgtgtaataagtgctacgggaggaaaagctgagagtgtctgagaatttatgagatgtgtgtctcatcagacttgggcatcaaaaaaaaaaaaaaaaaaaaaccatcctggaggaaaggacctctacgtcaagtgaagggtggggtccatttggtttttataggagcaagttctttgttggctggactctagatctcccgtcctttgactttggttacaaataatatccaaaccaccgctagtctcattctcttttctctttcctgctctagccctttgctcctctcccaggctgtt

SEQ ID NO: 55584 - DNA, 741 bp, Homo sapiens
cagttaatccctcccagcttaccagtaaaacctcaggattcatgctttcctgggagccacctgcggccactaagataggagcggggttcagacatggccaggcgctcctaatctcagacccaaagtgcaatttttggcagcctgcrtgagaaggagggtgggaggaaaggtggctagaaccaagggtagcagcctgggggcttgagaggaaaccaggcacagcccatcctaccctgtctcacgagcagcccgtcctcctcctgactccccttaccccacacaccgagcgccattctcttgctgcctcatctattctggttaggtacttactgagcatcaggtgctaggcaagtggctggggagagacaacgtttaatgactcagtctccgcctgcacagagcctttgagtctagagggagacacagacttactgacaggctgggttgtgtaataagtgctacgggaggaaaagctgagagtgtctgagaatttatgagatgtgtgtctcatcagacttgggcatcaaaaaaaaaaaaaaaaaaaaaccatcctggaggaaaggacctctacgtcaagtgaagggtggggtccatttggtttttataggagcaagttctttgttggctggactctagatctcccgtcctttgactttggttacaaataatatccaaaccaccgctagtctcattctcttttctctttcctgctctagccctttgctcctctcccaggctgtt

SEQ ID NO: 55585 - DNA, 174 bp, Homo sapiens
attttcacatgatgaaagggctttgtaaactgtacaacccaccacttacaaagtgttatcttaagtagagcaaaggcctcagtactggagaagccttctaataccacgcccctcccagtttaaatcttatttaacacakagctgatgaagcccatcgttaacgttccctgggag

SEQ ID NO: 55586 - DNA, 1201 bp, Homo sapiens
agtgatgggttttgagttagacagtcctgggcttgagacaggctttgtcactactgtgtgagtgtagccacctaatctctctgagactgtgtaaaacaaagatgataaaatctcaccctgttgtgagatattaaatgagccaaagtgcctagcatgatggtgctggctcatatagtgtagtccctggaatggcaaattaacatcacccaggaacttgttagaaaggcaaattcttggacacaaccctcctgatttatggaatcagaaactctggctgtggggcccagcaacctgagtttaaacaatttctctgggtggttctgcggcacactaaggtttgaaaatcactgcaacaaatgctaacttctaatccccttgatgagctttcacgaagtctcacggcttctctagggactccatggtcttcagagtcgttcacagatgaccaaggacagactgtgtcccagaagccaaaatgagagagagagagagagagcacgcgtacgtgcaccctggggcagtgtctcaccgtatgaayaagggatgtaacactaaaagcccattagggggcagtgtttcccgcctgttgtagaaactggtacagaaaggaatatgaagttcctgaaactgacctttgtctattattaccttctctgaaaagtgccagtccatgtattttttatttattttaagtttgtaatttaatttttaattattgtttagtgtttgcatttaattttatttaatcaccacatttagaaaataataagagcaagtttctaaatgggagactgctgaggctctttgcaagagatgagattaagtttgagtttctaaggcagggcatgagctggaaatagcattgctttccttgattgtctctctccttcagggagattctttttctctagtgttttaagtgatcctttgaagtaagtgtggagagtcttgaatggcaagaccaggagctgagtttaagcttgtaatggaagcttgcattgtgggatatataactgaggaagcatatttatcctgaaggtattttgccagaaggtatcacttgacctggaaaaggaatctatttagttcaggaaagataaaaagtttagaggtatgtgaaggaagcacttagaacttgcaagcctgatgtcctatcaagttatgtcttctgggtgacagacaaaatcgcttgtcttatggt

SEQ ID NO: 55587 - DNA, 1153 bp, Homo sapiens
agggcttaacacctagatgacaggttgacaggtgcagcaaaccaccatggcacatgtttatctgtgtaacaaacttgcacactctctctgaacacgtatcccagaacttaaagtaaaattaaaaaaaaaaaaaaaaaaaaaacagacaaggtacaaggaatgagaaggccctgaagccatagctaggtgtcaaacttgctgttcagaaaaggagacaaaaattaccttgtaaaattttccttagatttttcactttaagattacagcatgtccatctgtctcagagatcaagcatgctggtctatgcgcaatctgggatttttcccaagaaacagtcaatacttgtgaattcagatgaagagagcttctgcaaaaattaaaacttagaggtgatacctttaattcagaactcttacttctcatggtacagagataatattctttctctactcaggaacagttaatatgataccactctatagagtggtacatttttattttgcccaataacaaacgctcacccgtttctgtctctctggtgtgcagtacggcctaattttcttccacttttctctctattcaactcaggcgggcagtggggtagccttgtcaaattgcctgggttccaacctggatcaagtcagagtggcagcgggattttgggcaagttacttcatcctcctaatcttcactttccttggaggctttctaagaggagtctgtgaaaaatgcttagaaagcaccaacattatccacarcactcagcaaatgctctgaaaattcaactgttaatgttatgaatagtgttgttattacgtcggcacaaaagtaactgaggtttttgccgttactaccaacaccaccgccactattttttactcggtgttctcccacaaaataatgcaaaggtccccacacctcacctgtttcttttaccctgaagtctcttcctctcccctgcaatgaattccagaacaaagcactttggggcccacaccctcggtggaagctgttttctcccatgacacattcatggtaattttctgaattagggattcaccagcaaaacgtggtattacaaggcgtgggctccggagttggtgtggaaaatcctggctgtcccctacttctatgcagagtaacacttcccggt

SEQ ID NO: 55588 - DNA, 1079 bp, Homo sapiens
tttattaaaaataatagctaccatggtcaggttcaaccttttcagctcctaccccctctttcctgtcacttcctccatctccgaacatatccttacattctaagatccagctaaatcaaatacttaagacacagtgcactagtattcctttagcccttcgattacaaccttctctcatcctaaactgcccttcacctggccccatttgaactcatggaaggtctggagtcttgagacttgaacatctacccaagcgtgctctctgtaactttcattgacccttccagtgggcctgaattttaggggaggtccctatggccattggcatattcttctatcagaagcagaatatacatcctttctaactttttgtggacttggcctacccaggctgtgaatttctggaaggcaagggcaatgtttaattcaacactgtaactatgtagtctgggaaacggycccttatgtactgctcactacattgggtagcctaacaagtgattcttccttgccccagagggttacagcaccaagaaaggacattgaccttcattccagaaagaggtttctctgagcaactgggccttctttggtgctaccgtacttggtacccaggtaataacattgaatttcatgtccatctgagtccaaacccacacctttacatctggtcttaatccaacctacagttgaaatgaattttatagcccctcctttccactaataagaacctgtaaagtcatttagggggattattttataaaaacagaggctgagaaccattgttataaagcgagaacagaaatgatcattaacaatggtaccagacagcaagaaaaccctaatatgctctctagagttccagaagagtgatttagtgttattttttttttaactaaaatgttctgagtttgcaattactcttgcaaactacgtgaagagcaatttgtgaccagggagaatctcaggtcccagtggaattgggcacaattttcattgtaccaagattacacagaagctaaagagctgcaagtgaaggaaactcggaggacattggaacaaagtcaggcagaatgaag

SEQ ID NO: 55589 - DNA, 1079 bp, Homo sapiens
tttattaaaaataatagctaccatggtcaggttcaaccttttcagctcctaccccctctttcctgtcacttcctccatctccgaacatatccttacattctaagatccagctaaatcaaatacttaagacacagtgcactagtattcctttagcccttcgattacaaccttctctcatcctaaactgcccttcacctggccccatttgaactcatggaaggtctggagtcttgagacttgaacatctacccaagcgtgctctctgtaactttcattgacccttccagtgggcctgaattttaggggaggtccctatggccattggcatattcttctatcagaagcagaatatacatcctttctaactttttgtggacttggcctacccaggctgtgaatttctggaaggcaagggcaatgtttaattcaacactgtaactatgtagtctgggaaacggccccttatgtactgctcactacattgggtagcctaacaagtgattcttccttgccccagagggttacagcaccaagaaaggacattgaccttcattccagaaagaggtttctctgagcaactgggccttctttggtgctaccgtacttggtacccaggtaataacattgaatttcatgtccatctgagtccaaacccacacctttacatctggtcttaatccaacctacagttgaaatgaattttatagcccctcctttccactaataagaacctgtaaagtcatttagggggattattttataaaaacagaggctgagaaccattgttataaagcgagaacagaaatgatcattaacaatggtaccagacagcaagaaaaccctaatatgctctctagagttccagaagagtgatttagtgttattttttttttaactaaaatgttctgagtttgcaattactcttgcaaactacgtgaagagcaatttgtgaccagggagaatctcaggtcccagtggaattgggcacaattttcattgtaccaagattacayagaagctaaagagctgcaagtgaaggaaactcggaggacattggaacaaagtcaggcagaatgaag

SEQ ID NO: 55590 - DNA, 656 bp, Homo sapiens
cctcagggtcccctgcaacttgcccggctccagcagcagggcttgaagggaaaggagatcccctgtgtggtttccatccatgattcaactctcagctcaaatactgcctccctagcaaagcctcctttgattggtttctgcagcaaatctaggacaggttcccttgtcattgcatttatctcagctataactatmcaggaaaacataagcatttgattagtacctgtctctcccaccaggctgaatgctgcctgaggactcagacatggagggttttgcaccccaccaaatactctgcactcaacagagtgcctagagcaaaaccaacgcgctttaaatatgggctcagtgaaggagtgaataattctagaaagaaaccacatgtttctctgccatctgagacccaggggctttcatggaccaccctgcactgacagctccttcttgaagctcaacttcctacctacctcatgtccagctcctaaggggtcagttagaggacagaccatgatattcagaggcaagtgcatacgtgaagaaagagctttgaacttggaagtcatacccacttggtgcaactggcagctccagcatttgctagttgcttgaccttgggtgagttactgtccatctctggccacaattatccaatgcac

SEQ ID NO: 55591 - DNA, 2132 bp, Homo sapiens
catgcaaaatgaataacttagcaagatgcctggctaagtattcaatattagctattcttcttattataatgacagagtttggcattgcagacataagacaacacaatactataaatctctctgtgaccttcagggatggctttctgggctggacagaccatctttgcagacatctatacagccaaatgatgaccaagctgatgagccatttacttgaaatacaatttatcatcatctagtttcagtggaaactagtttatagtataatggaaactgatccagagtattagtattggaaaggcactaagcttatacaataagaaaggagattgggtgaggaagaacaggtgtttctaacaacttgtttttaaaaaatctataattgggttcatctaggctctgaaagctaagagaaaagaaaataacatttattgagcacctgccagatggtctcgagtgcattattgtctttaatgtgaatagtttacagggaagaaattatcctctttatttcgcaagtgaagaggatgagctcaaaggtaggtgacacactcagggtcacccaggtctaatccacagctcttgctgactttgataactgggagactcctaggaatctactataatgggactgtaatatttgtattgaaaggaatctagcttatgaaagaggaaaatgagaatgaatgaataggaataagagctaaaaaaccttgatgtggaaactttgacatttgtctcaactcagacggatgataggttttcaagaaaacaaactttaaaggagacaacgcgagatatatccacttctgaagcccctagtggaagcacatacctttcatttttaaagagtgaacattcatcattttcctgggagcctctatattgatttttttcttccaaattttttgaattgaccactgaaaattgaaatgccagagggtgtctttctttctttctctaatcttgtattagaatgtttttactctagcttgttccaaacaggacttgaagcagttatcaaagatatatgcaatagttcagaaattataactaattaattaagaagatgcaaataaaaaatccaaactacaaacaatagagtgagggaagcaagatttgttatacaaaatctatgccacggggtcctggacacttggtcttggtcagctgcagattttcctctgtacttcctgatgtccaacaggaaaagacaaagacagtaaattgcagggaaagaaatatatttttttcaatctttataaattcctaggtggaatgcatttctataacaaaagacaaattaacaagagaaaaacagaagtgtattaacatgtgtatttcacatagacaggggagatacccaaggaaggaggattctttagagagatgtctttgaattctagcttaaatagcatcttcaacaaagaacagtaagttttttttccacctgaaaaaaaaaactcatgtattaaaatattaaacttgctcagaatattggaaaaagttgcctatttcataagttctcgtttgtttgtgtcccaagtgtcttgtcattccaggccactctaattcttgggtattaataaacagtttgaggtatagtaagtcctctagatcagataaataaaactgaagatagtcagagttcccaaaaggcaggcacagcgtagttaggcaggaccacaggggaagcagcagggttggtcaggatgcagagggaggggtactccgagcaagcacctttcctgtgctgcctgacacgtttgtgccctccattatctactcgttcagcgcacattcactgcccactgggcctgttccagcraccaaagcacgccaaggggagaagcaggcagagatctccatttcagtgggctgacagcccaccaagatgcccgtggtcccacccttcagagaaccgtaagtttttagagaagcagcaagacaaagaaaaagaacattgagtctctacaggaaggtaagtagatgaaacacagaggctagttcgcaaagcttgttaatgttgtttcctctggtaccatctccaggccaatgagggtcataggtatcttcagtgatttacctttgttctccctgattgagagggggagtgggacaatttgtcttcg

SEQ ID NO: 55592 - DNA, 2132 bp, Homo sapiens
catgcaaaatgaataacttagcaagatgcctggctaagtattcaatattagctattcttcttattataatgacagagtttggcattgcagacataagacaacacaatactataaatctctctgtgaccttcagggatggctttctgggctggacagaccatctttgcagacatctatacagccaaatgatgaccaagctgatgagccatttacttgaaatacaatttatcatcatctagtttcagtggaaactagtttatagtataatggaaactgatccagagtattagtattggaaaggcactaagcttatacaataagaaaggagattgggtgaggaagaacaggtgtttctaacaacttgtttttaaaaaatctataattgggttcatctaggctctgaaagctaagagaaaagaaaataacatttattgagcacctgccagatggtctcgagtgcattattgtctttaatgtgaatagtttacagggaagaaattatcctctttatttcgcaagtgaagaggatgagctcaaaggtaggtgacacactcagggtcacccaggtctaatccacagctcttgctgactttgataactgggagactcctaggaatctactataatgggactgtaatatttgtattgaaaggaatctagcttatgaaagaggaaaatgagaatgaatgaataggaataagagctaaaaaaccttgatgtggaaactttgacatttgtctcaactcagacggatgataggttttcaagaaaacaaactttaaaggagacaacgcgagatatatccacttctgaagcccctagtggaagcacatacctttcatttttaaagagtgaacattcatcattttcctgggagcctctatattgatttttttcttccaaattttttgaattgaccactgaaaattgaaatgccagagggtgtctttctttctttctctaatcttgtattagaatgtttttactctagcttgttccaaacaggacttgaagcagttatcaaagatatatgcaatagttcagaaattataactaattaattaagaagatgcaaataaaaaatccaaactacaaacaatagagtgagggaagcaagatttgttatacaaaatctatgccacggggtcctggacacttggtcttggtcagctgcagattttcctctgtacttcctgatgtccaacaggaaaagacaaagacagtaaattgcagggaaagaaatatatttttttcaatctttataaattcctaggtggaatgcatttctataacaaaagacaaattaacaagagaaaaacagaagtgtattaacatgtgtatttcacatagacaggggagatacccaaggaaggaggattctttagagagatgtctttgaattctagcttaaatagcatcttcaacaaagaacagtaagttttttttccacctgaaaaaaaaaactcatgtattaaaatattaaacttgctcagaatattggaaaaagttgcctatttcataagttctcgtttgtttgtgtcccaagtgtcttgtcattccaggccactctaattcttgggtattaataaacagtttgaggtatagtaagtcctctagatcagataaataaaactgaagatagtcagagttcccaaaaggcaggcacagcgtagttaggcaggaccacaggggaagcagcagggttggtcaggatgcagagggaggggtactccgagcaagcacctttcctgtgctgcctgacacgtttgtgccctccattatctactcgttcagcgcacattcactgcccactgggcctgttccagcgaccaaagcacgccaaggggagaagcaggcagagatctccatttcagtgggctgacagcccaccaagatgcccgtggtcccacccttcagagaaccgtaagtttttagagaagcrgcaagacaaagaaaaagaacattgagtctctacaggaaggtaagtagatgaaacacagaggctagttcgcaaagcttgttaatgttgtttcctctggtaccatctccaggccaatgagggtcataggtatcttcagtgatttacctttgttctccctgattgagagggggagtgggacaatttgtcttcg

SEQ ID NO: 55593 - DNA, 2132 bp, Homo sapiens
catgcaaaatgaataacttagcaagatgcctggctaagtattcaatattagctattcttcttattataatgacagagtttggcattgcagacataagacaacacaatactataaatctctctgtgaccttcagggatggctttctgggctggacagaccatctttgcagacatctatacagccaaatgatgaccaagctgatgagccatttacttgaaatacaatttatcatcatctagtttcagtggaaactagtttatagtataatggaaactgatccagagtattagtattggaaaggcactaagcttatacaataagaaaggagattgggtgaggaagaacaggtgtttctaacaacttgtttttaaaaaatctataattgggttcatctaggctctgaaagctaagagaaaagaaaataacatttattgagcacctgccagatggtctcgagtgcattattgtctttaatgtgaatagtttacagggaagaaattatcctctttatttcgcaagtgaagaggatgagctcaaaggtaggtgacacactcagggtcacccaggtctaatccacagctcttgctgactttgataactgggagactcctaggaatctactataatgggactgtaatatttgtattgaaaggaatctagcttatgaaagaggaaaatgagaatgaatgaataggaataagagctaaaaaaccttgatgtggaaactttgacatttgtctcaactcagacggatgataggttttcaagaaaacaaactttaaaggagacaacgcgagatatatccacttctgaagcccctagtggaagcacatacctttcatttttaaagagtgaacattcatcattttcctgggagcctctatattgatttttttcttccaaattttttgaattgaccactgaaaattgaaatgccagagggtgtctttctttctttctctaatcttgtattagaatgtttttactctagcttgttccaaacaggacttgaagcagttatcaaagatatatgcaatagttcagaaattataactaattaattaagaagatgcaaataaaaaatccaaactacaaacaatagagtgagggaagcaagatttgttatacaaaatctatgccacggggtcctggacacttggtcttggtcagctgcagattttcctctgtacttcctgatgtccaacaggaaaagacaaagacagtaaattgcagggaaagaaatatatttttttcaatctttataaattcctaggtggaatgcatttctataacaaaagacaaattaacaagagaaaaacagaagtgtattaacatgtgtatttcacatagacaggggagatacccaaggaaggaggattctttagagagatgtctttgaattctagcttaaatagcatcttcaacaaagaacagtaagttttttttccacctgaaaaaaaaaactcatgtattaaaatattaaacttgctcagaatattggaaaaagttgcctatttcataagttctcgtttgtttgtgtcccaagtgtcttgtcattccaggccactctaattcttgggtattaataaacagtttgaggtatagtaagtcctctagatcagataaataaaactgaagatagtcagagttcccaaaaggcaggcacagcgtagttaggcaggaccacaggggaagcagcagggttggtcaggatgcagagggaggggtactccgagcaagcacctttcctgtgctgcctgacacgtttgtgccctccattatctactcgttcagcgcacattcactgcccactgggcctgttccagcgaccaaagcacgccaaggggagaagcaggcagagatctccatttcagtgggctgacagcccaccaagatgcccgtggtcccacccttcagagaaccgtaagtttttagagaagcagcaagacaaagaaaaagaacattgagtctctacaggaaggtaagtagatgaaacacagaggctagttcgcaaagcttgttaatgttgtttcctctggtaccatctccaggccaatragggtcataggtatcttcagtgatttacctttgttctccctgattgagagggggagtgggacaatttgtcttcg

SEQ ID NO: 55594 - DNA, 590 bp, Homo sapiens
caacctcaagaactcacaatccagtgactggaataataattcagtgtaatatggtacattttaagcacttttgtggatatatggtatgtaggtaattgcacttgtggttgtgtatgtgtgtctgtgtgcccatgtgcgtgtgtacttgttaatgtggtagtgcatatctgcttgtttgtgtatgaatgtgtgcccacttggtgtgcagatgtatgtgtgtttggttttgtccacacaagtgtgtctatatctatgtacaatttkcatgtgcattttcaaggttgaatgttttatttatctttaagaaaggttttgcagtctgcccaaaagtgattgcatttcttttttttttttcctttagccaaatttggtcctaaccaggtcttaccacggtaactgctaaccagtccatcttcagttaatatttcatgcgtaagatgtttcatgaagtaactgaatgggctaatgggttgttcactggataagactcccagatactccctttcatgccattccccagaattccttcacctcccagtgctgtctgtaagggtgaagatactccattttgccccatgctctttgctgtg

SEQ ID NO: 55595 - DNA, 590 bp, Homo sapiens
caacctcaagaactcacaatccagtgactggaataataattcagtgtaatatggtacattttaagcacttttgtggatatatggtatgtaggtaattgcacttgtggttgtgtatgtgtgtctgtgtgcccatgtgcgtgtgtacttgttaatgtggtagtgcatatctgcttgtttgtgtatgaatgtgtgcccacttggtgtgcagatgtatgtgtgtttggttttgtccacacaagtgtgtctatatctatgtacaatttgcatgtgcattttcaaggwtgaatgttttatttatctttaagaaaggttttgcagtctgcccaaaagtgattgcatttcttttttttttttcctttagccaaatttggtcctaaccaggtcttaccacggtaactgctaaccagtccatcttcagttaatatttcatgcgtaagatgtttcatgaagtaactgaatgggctaatgggttgttcactggataagactcccagatactccctttcatgccattccccagaattccttcacctcccagtgctgtctgtaagggtgaagatactccattttgccccatgctctttgctgtg

SEQ ID NO: 55596 - DNA, 590 bp, Homo sapiens
caacctcaagaactcacaatccagtgactggaataataattcagtgtaatatggtacattttaagcacttttgtggatatatggtatgtaggtaattgcacttgtggttgtgtatgtgtgtctgtgtgcccatgtgcgtgtgtacttgttaatgtggtagtgcatatctgcttgtttgtgtatgaatgtgtgcccacttggtgtgcagatgtatgtgtgtttggttttgtccacacaagtgtgtctatatctatgtacaatttgcatgtgcattttcaaggttgaatgttttatttatctttaagaaaggttttgcagtctgcmcaaaagtgattgcatttcttttttttttttcctttagccaaatttggtcctaaccaggtcttaccacggtaactgctaaccagtccatcttcagttaatatttcatgcgtaagatgtttcatgaagtaactgaatgggctaatgggttgttcactggataagactcccagatactccctttcatgccattccccagaattccttcacctcccagtgctgtctgtaagggtgaagatactccattttgccccatgctctttgctgtg

SEQ ID NO: 55597 - DNA, 590 bp, Homo sapiens
caacctcaagaactcacaatccagtgactggaataataattcagtgtaatatggtacattttaagcacttttgtggatatatggtatgtaggtaattgcacttgtggttgtgtatgtgtgtctgtgtgcccatgtgcgtgtgtacttgttaatgtggtagtgcatatctgcttgtttgtgtatgaatgtgtgcccacttggtgtgcagatgtatgtgtgtttggttttgtccacacaagtgtgtctatatctatgtacaatttgcatgtgcattttcaaggttgaatgttttatttatctttaagaaaggttttgcagtctgcccaaaagtgattgcatttcttttttttttttcctttagccaaatttgrtcctaaccaggtcttaccacggtaactgctaaccagtccatcttcagttaatatttcatgcgtaagatgtttcatgaagtaactgaatgggctaatgggttgttcactggataagactcccagatactccctttcatgccattccccagaattccttcacctcccagtgctgtctgtaagggtgaagatactccattttgccccatgctctttgctgtg

SEQ ID NO: 55598 - DNA, 590 bp, Homo sapiens
caacctcaagaactcacaatccagtgactggaataataattcagtgtaatatggtacattttaagcacttttgtggatatatggtatgtaggtaattgcacttgtggttgtgtatgtgtgtctgtgtgcccatgtgcgtgtgtacttgttaatgtggtagtgcatatctgcttgtttgtgtatgaatgtgtgcccacttggtgtgcagatgtatgtgtgtttggttttgtccacacaagtgtgtctatatctatgtacaatttgcatgtgcattttcaaggttgaatgttttatttatctttaagaaaggttttgcagtctgcccaaaagtgattgcatttcttttttttttttcctttagccaaatttggtcctaaccaggtcttaccacggtaactgctaaccagtccatcttcagttaatatttcatgcgtaagatgtttcatgaagtaactgawtgggctaatgggttgttcactggataagactcccagatactccctttcatgccattccccagaattccttcacctcccagtgctgtctgtaagggtgaagatactccattttgccccatgctctttgctgtg

SEQ ID NO: 55599 - DNA, 965 bp, Homo sapiens
agaggaaagacacacaaatatgtatatgtttttgtaaatgaagaggaaaatgatgtagaaggatgtactccaaactgacagtacatgtgcaatgatttggttaactgcttcccaagtattgagctacccgccttaccaactatgttattcagtccttagaacaacccaggaagtaagcactgctactgtaaaattccattttccaatatggcatcataagttgggaagtagcttctgtaaaattccattttccaatatggcgtcataagctgggaagtagcttgcccaaggccacaggtctgagctgggagtttactccatctgtctgatttccaagccagtgcaaagatctctccatgctgaccttggattcttccattgaatccaccaggaatgatcagtccaggcatctgagagaaaatgactcattgctggagactgtggctaacagtaaagcagagctgaaagaatggccccagtggaggagctaagtgggagtcaggcctgcgagcctccaaggccttcctttcactgtgaacttagctcaaggctattatacatcaggcractgtctgctcagtgaaagcaaatgacagcacagagctatcactgtctagcttccctgctgtggctgtgacattgatgataatcccttagcggggagacggaaccccattcatctcctctctgaagcatggctctcccgatggaagggaagtgtctggtgatgggaagaagacagtttggagggaggcaaaaaaggagaggtctctgctgaatgctgcagtggaagtggcacccactcctaacctgggaattaggtgggaacatgtgtgtgggagaggaaaggaaactaacactggctgggtgcccctcccacattgtgagcacaaactcagccattatttttctctacggttgaggagccagaacatcaaagagcttaggtgattttgatttttaaa

SEQ ID NO: 55600 - DNA, 965 bp, Homo sapiens
agaggaaagacacacaaatatgtatatgtttttgtaaatgaagaggaaaatgatgtagaaggatgtactccaaactgacagtacatgtgcaatgatttggttaactgcttcccaagtattgagctacccgccttaccaactatgttattcagtccttagaacaacccaggaagtaagcactgctactgtaaaattccattttccaatatggcatcataagttgggaagtagcttctgtaaaattccattttccaatatggcgtcataagctgggaagtagcttgcccaaggccacaggtctgagctgggagtttactccatctgtctgatttccaagccagtgcaaagatctctccatgctgaccttggattcttccattgaatccaccaggaatgatcagtccaggcatctgagagaaaatgactcattgctggagactgtggctaacagtaaagcagagctgaaagaatggccccagtggaggagctaagtgggagtcaggcctgcgagcctccaaggccttcctttcactgtgaacttagctcaaggctattatacatcaggcgactgtctgctcagtgaaagcaaatgacagcacagagctatcactgtctagcttccctgctgtggctgtgacattgatgataatcccttagcggggagacggaaccccattcatctcctctctgaagcatggctctcccgatggaagggaagtgtctggtgatgggaagaagacagtttggagggaggcaaaaaaggagaggtctctgctgaatgctgcagtggaagtggcacccactcctaacctgggaattaggtgggaacatgtgtgtgggagaggaaaggaaactaacactggctgggtgcccctcccacattgtgagcacaaactcagccattatttttctctacrgttgaggagccagaacatcaaagagcttaggtgattttgatttttaaa

SEQ ID NO: 55601 - DNA, 1291 bp, Homo sapiens
taatcaacctacgaaacatcatagtttagcctagcttactttaaatgtgctcagaatacttgacattggtctaaaattgggcaaaattacctaacacaaaccctattgtagagtaaagttttgaatacctcatgtaatttattgaatacagtagtgaaagtaaaaaacagaatggttgtatttactgaatygtattccattctatgggtatatcacatttagtttatcaattcatccatcaatgtatgttcggcttacttccactcttgtctattatgaacaatgctactgtgaacattcatgtataagcttttttttgtgtggatatatatcttcattgttctttggtaaatgcttagcagtagaattgctgggtcatgtggcatctctgtgtttcacattttgaggaatcaccaaactgttttccaaagcagttgtaccattttatagtactatcagtgacgtctgaggatcttatcatgtttttaacatctccaaaattgagatgtctctttgatgtactttgcaattacaaatggctatgtttcttttacttttttatgacatataaaaatggtggattttacagtccatagcatcttgaatttaattatatgtggttgttgtttaccactatatgaatactctcagtcttgacagtaacataaaagcacagatgacagaaattaagaagtggaagaggaagggatagggtcaaaggatggagttcagatcttatgtctaattgaaagacaggaaaggaagatatttaagaaacatttacagcagaggaatttacaaatatgatgtatctgagaggaggaaagaggctaggtagtttaagtgaagtaatgactcatctaccatagaaagaaatcaatagataatatataaaactcatctgctcttacaaacagcagaataactacattatttagaaatatggaattaaagattagaagaaacaatgaaagaagataaggtcatttttgaagttgtgtgttctaggaaatgaaaaagatgtcgagttggtgacgtgcaggaccctagccatttatgagcccttttgttctgtctgatgtttaaccacgtataaggctttgataaaaatttgtaaaagacacacaaaagtaaaatttaaagcacattctttatgaaactaaactcttgtggtgaatgctttgagagagataagaatataggatacagattctaaataagatgaaaaagacaggagataatgccggacaatgagttgataaaaattttctgcttctcagatgctatttat

SEQ ID NO: 55602 - DNA, 1291 bp, Homo sapiens
taatcaacctacgaaacatcatagtttagcctagcttactttaaatgtgctcagaatacttgacattggtctaaaattgggcaaaattacctaacacaaaccctattgtagagtaaagttttgaatacctcatgtaatttattgaatacagtagtgaaagtaaaaaacagaatggttgtatttactgaatcrtattccattctatgggtatatcacatttagtttatcaattcatccatcaatgtatgttcggcttacttccactcttgtctattatgaacaatgctactgtgaacattcatgtataagcttttttttgtgtggatatatatcttcattgttctttggtaaatgcttagcagtagaattgctgggtcatgtggcatctctgtgtttcacattttgaggaatcaccaaactgttttccaaagcagttgtaccattttatagtactatcagtgacgtctgaggatcttatcatgtttttaacatctccaaaattgagatgtctctttgatgtactttgcaattacaaatggctatgtttcttttacttttttatgacatataaaaatggtggattttacagtccatagcatcttgaatttaattatatgtggttgttgtttaccactatatgaatactctcagtcttgacagtaacataaaagcacagatgacagaaattaagaagtggaagaggaagggatagggtcaaaggatggagttcagatcttatgtctaattgaaagacaggaaaggaagatatttaagaaacatttacagcagaggaatttacaaatatgatgtatctgagaggaggaaagaggctaggtagtttaagtgaagtaatgactcatctaccatagaaagaaatcaatagataatatataaaactcatctgctcttacaaacagcagaataactacattatttagaaatatggaattaaagattagaagaaacaatgaaagaagataaggtcatttttgaagttgtgtgttctaggaaatgaaaaagatgtcgagttggtgacgtgcaggaccctagccatttatgagcccttttgttctgtctgatgtttaaccacgtataaggctttgataaaaatttgtaaaagacacacaaaagtaaaatttaaagcacattctttatgaaactaaactcttgtggtgaatgctttgagagagataagaatataggatacagattctaaataagatgaaaaagacaggagataatgccggacaatgagttgataaaaattttctgcttctcagatgctatttat

SEQ ID NO: 55603 - DNA, 1291 bp, Homo sapiens
taatcaacctacgaaacatcatagtttagcctagcttactttaaatgtgctcagaatacttgacattggtctaaaattgggcaaaattacctaacacaaaccctattgtagagtaaagttttgaatacctcatgtaatttattgaatacagtagtgaaagtaaaaaacagaatggttgtatttactgaatcgtattccattctatgggtatatcacatttagtttatcaattcatccatcaatgtatgttcggcttacttccactcttgtctattatgaacaatgctactgtgaacattcatgtataagcttttttttgtgtggatatatatcttcattgttctttggtaaatrcttagcagtagaattgctgggtcatgtggcatctctgtgtttcacattttgaggaatcaccaaactgttttccaaagcagttgtaccattttatagtactatcagtgacgtctgaggatcttatcatgtttttaacatctccaaaattgagatgtctctttgatgtactttgcaattacaaatggctatgtttcttttacttttttatgacatataaaaatggtggattttacagtccatagcatcttgaatttaattatatgtggttgttgtttaccactatatgaatactctcagtcttgacagtaacataaaagcacagatgacagaaattaagaagtggaagaggaagggatagggtcaaaggatggagttcagatcttatgtctaattgaaagacaggaaaggaagatatttaagaaacatttacagcagaggaatttacaaatatgatgtatctgagaggaggaaagaggctaggtagtttaagtgaagtaatgactcatctaccatagaaagaaatcaatagataatatataaaactcatctgctcttacaaacagcagaataactacattatttagaaatatggaattaaagattagaagaaacaatgaaagaagataaggtcatttttgaagttgtgtgttctaggaaatgaaaaagatgtcgagttggtgacgtgcaggaccctagccatttatgagcccttttgttctgtctgatgtttaaccacgtataaggctttgataaaaatttgtaaaagacacacaaaagtaaaatttaaagcacattctttatgaaactaaactcttgtggtgaatgctttgagagagataagaatataggatacagattctaaataagatgaaaaagacaggagataatgccggacaatgagttgataaaaattttctgcttctcagatgctatttat

SEQ ID NO: 55604 - DNA, 1291 bp, Homo sapiens
taatcaacctacgaaacatcatagtttagcctagcttactttaaatgtgctcagaatacttgacattggtctaaaattgggcaaaattacctaacacaaaccctattgtagagtaaagttttgaatacctcatgtaatttattgaatacagtagtgaaagtaaaaaacagaatggttgtatttactgaatcgtattccattctatgggtatatcacatttagtttatcaattcatccatcaatgtatgttcggcttacttccactcttgtctattatgaacaatgctactgtgaacattcatgtataagcttttttttgtgtggatatatatcttcattgttctttggtaaatgcttagcagtagaattgctgggtcatgtggcatctctgtgtttcacattttgaggaatcaccaaactgttttccaaagcagttgtaccattttatagtactatcagtgacgtctgaggatcttatcatktttttaacatctccaaaattgagatgtctctttgatgtactttgcaattacaaatggctatgtttcttttacttttttatgacatataaaaatggtggattttacagtccatagcatcttgaatttaattatatgtggttgttgtttaccactatatgaatactctcagtcttgacagtaacataaaagcacagatgacagaaattaagaagtggaagaggaagggatagggtcaaaggatggagttcagatcttatgtctaattgaaagacaggaaaggaagatatttaagaaacatttacagcagaggaatttacaaatatgatgtatctgagaggaggaaagaggctaggtagtttaagtgaagtaatgactcatctaccatagaaagaaatcaatagataatatataaaactcatctgctcttacaaacagcagaataactacattatttagaaatatggaattaaagattagaagaaacaatgaaagaagataaggtcatttttgaagttgtgtgttctaggaaatgaaaaagatgtcgagttggtgacgtgcaggaccctagccatttatgagcccttttgttctgtctgatgtttaaccacgtataaggctttgataaaaatttgtaaaagacacacaaaagtaaaatttaaagcacattctttatgaaactaaactcttgtggtgaatgctttgagagagataagaatataggatacagattctaaataagatgaaaaagacaggagataatgccggacaatgagttgataaaaattttctgcttctcagatgctatttat

SEQ ID NO: 55605 - DNA, 907 bp, Homo sapiens
ttgtcaaaacccagtgtattagtttgctatggctgccataacaaaatgctacagactgggtggcttaaacaagatggatttattttcataaaattctgggggctaaaagtcaacaatcaatcaagatatggacagggttggttccttcttagggctgtgagggcaggwtctgttccagtcctctctccttggcttataggggaggtcttttccctgtgtttcctcgctttgtgtgtgtctgtcctaaccacctcttcttttaagggcaccaatcatactggattaacgtcctccctaataaactcatttaaccttaatgacctttttaattttttaaagaccctatatccaaatatagtcacattctgcagtactggggttaagacttcaacatagaaattttagcggggatgcaactcaattcataatgtccagtaaatttgctcttaagatttatatattaagctgtaagtaaatttgcatcaaaagaaaaaactgcaaaacaatattgaacagaagttaatgttatgcgtgctgaaatacctagggggaagtgtattgatgttggcagtttactttaaaatgctttggaaaatgaagtggattaatagatgggtatatatatatataattttattatatatattatatatattacatagcaaatatcataacatttaaatggtagaatgtaggtggtgagtgtatgagctttccctgaaaaattctttcaactttgctatgtttcaaatcttttataataaaatgttggaaaaaatattagtagagcatctatggtccgccaggcatggagccaggtgatagggcttgaatggtgaagaagacagacaaggcccccaccttcatgaagcttgcattttgtgatactttattagcatctgtggtt

SEQ ID NO: 55606 - DNA, 1649 bp, Homo sapiens
ccgcaaagttcatatgttgaagccctaacccacagcactacagaatgtaactttttggagatagggtctttaaagagacgattaagttaatatcatggctgttggggtgggttctaatccaatgtgactagcatccttatgagaagaggaaatctggacatagagatacaccaggggtgtgtgtgcacggaggaaagatcatgtgaggatacagcaagaagatggccatccagaagccaaggagagagacctcctaatgaaaccaatgctgcggacaccttcatcttggacttccagcctccaaaactgttggaaaataattttcagttgtttaagccacccactctgaggtattttgttatggcggccctagcaaactaatatggtcctctttactccttatagtaatgatactagtagctaatatttatcttcaaatgcatttatcacttaatctccataaattgtgtgacgtcaatgaaagaattagcttcattttacacatgaaaaaactgagactaatagaagttaggatagagctgggcctgttgatgttccaaagccatgctcttactatgggggttgttagagtaataatggggtcacagtagtcaggaattctcagacagggggatgatgccactgtgtcacttcctgtttcacaggaagtaggacagagcaatggagggaagccagatttaatgtcagaagtctggaccatcaattttatcccttcccattgcctccttttaaattttagtcaattcaataaatattttcaactcctcgtctgtaccaggcaccaagccacagaatggagttctggcaatgaacactgcagacatggccgcctttagcctcatggagcttagrgtctgggagcattgtcagtttctgaatcctccaagtgctaaactatcttctctcttcaaattagagaaaagaaatgagacagcaggcctgcttctttgagtgtttttttcttttttgtttccgttttctgacaaccatacttcacgtctgacagaggaaatgattctttttgtcagtgataaatttatgagttttgactgtttgtgaagttccctaattaattctttatagacttctattggcaactgaatttgtgttttgagttaaaaatgggagttcagatgaattacagttgaacattctgctccctttgaagagctcatactccacattctacgctgttaatctctctgcttactgagaggcaccgtttgtcttgcagtgacgcacggtgggtggttaccatggcataggaaaacattgccagcgctggccctgtcgtcatggaacccctgggccatctcctgagaaacttggtaagggctcccaagccgcccatacctccttggcaccacaagtgtagctttttattttgtgtgtgggcagcttgacatctgcacctgaccaagagattgatgtggctaaacaaatttaggaaatgagcagcagtggatctctgttcagagagggaggaggagagagaaggagggagggaagaaaggagagagggagagagccagaaaacagagcaagataaaggaagagaatgcacctgaaatagacacaaggataaatggatcaaggagagaggagaaacagataatcacaacagcgaa

SEQ ID NO: 55607 - DNA, 1649 bp, Homo sapiens
ccgcaaagttcatatgttgaagccctaacccacagcactacagaatgtaactttttggagatagggtctttaaagagacgattaagttaatatcatggctgttggggtgggttctaatccaatgtgactagcatccttatgagaagaggaaatctggacatagagatacaccaggggtgtgtgtgcacggaggaaagatcatgtgaggatacagcaagaagatggccatccagaagccaaggagagagacctcctaatgaaaccaatgctgcggacaccttcatcttggacttccagcctccaaaactgttggaaaataattttcagttgtttaagccacccactctgaggtattttgttatggcggccctagcaaactaatatggtcctctttactccttatagtaatgatactagtagctaatatttatcttcaaatgcatttatcacttaatctccataaattgtgtgacgtcaatgaaagaattagcttcattttacacatgaaaaaactgagactaatagaagttaggatagagctgggcctgttgatgttccaaagccatgctcttactatgggggttgttagagtaataatggggtcacagtagtcaggaattctcagacagggggatgatgccactgtgtcacttcctgtttcacaggaagtaggacagagcaatggagggaagccagatttaatgtcagaagtctggaccatcaattttatcccttcccattgcctccttttaaattttagtcaattcaataaatattttcaactcctcgtctgtaccaggcaccaagccacagaatggagttctggcaatgaacactgcagacatggccgcctttagcctcatggagcttagggtctgggagcattgtcagtttctgaatcctccaagtgctaaactatcttctctcttcaaattagagaaaagaaatgagacagcaggcctgcttctttgagtgtttttttcttttttgtttccgttttctgacaaccatacttcacgtctgacagaggaaatgattctttttgtcagtgataaatttatgagttttgactgtttgtgaagttccctaattaattctttatagacttctattggcaactgaatttgtgttttgagttaaaaatgggagttcagatgaattacagttgaacattctgctccctttgaagagctcatactccacattctacgctgttaatctctctgcttactgagaggcaccgtttgtcttgcagtgacgcacggygggtggttaccatggcataggaaaacattgccagcgctggccctgtcgtcatggaacccctgggccatctcctgagaaacttggtaagggctcccaagccgcccatacctccttggcaccacaagtgtagctttttattttgtgtgtgggcagcttgacatctgcacctgaccaagagattgatgtggctaaacaaatttaggaaatgagcagcagtggatctctgttcagagagggaggaggagagagaaggagggagggaagaaaggagagagggagagagccagaaaacagagcaagataaaggaagagaatgcacctgaaatagacacaaggataaatggatcaaggagagaggagaaacagataatcacaacagcgaa

SEQ ID NO: 55608 - DNA, 1115 bp, Homo sapiens
gcatgagtattgtagaagtatcatgtagtagagatcatacgcaattatttctgtattaattaaagtgtgtccagatacctttaaacaacagttttaaacgttcaaaacagtggaatacatgttgcccaataagtgaaataatatatactgcaatgtatagaacaggtactagctgtatttaatagtgaagttatgcttaatttgaaatgcttcacatttgtttataaatccatcatcagaagcaatgtttgttatgatcaattcagacgtttggaatcaggaggtccagaaggcagccgtaggcagttgtttgtgcattcagactacagagtatcaagaaaatcccaatttgctcagataggtaggtgtgaaaaccaacaatttctttgaaccactcgtcttacaacctcagtgtattctatattgtgcatagatgacagaagaaacattcattcctaagatacctacaaaatgagcaaaaccagcagcataaatggacccagtagtaatctatctccagtgcgtcttaattttgtgcatcatccatttgtgactttcttttgttctttctgttaatcagagatcttttcagtggcaggtgacatatgcccaacttgaatggccttaaggaaaaaaacagtattgtctcatgtgattgaaacatctatgtatatatagctggtttggggcaaagctgaatcaagatgatcagatgatgttgccaggaatamttcttcccacattacacactcttctgtatgccatgtattttcaggctgttcccttaaagtggcaagatggcttccagcagggatacgcttacatcatcccagctcaggagcctgacggcaaagagaaccttctcttcagtggttcaggataagtcccggccagatctcagttgcttacccatcctaagaagcagggttttgttttaactgcactatcaccacgtaattataggagaaagggaaaaggtttcttcaatgagtctttaaaatatttaacattaaaaaattgacactaaaaattgtatattatgtaaaacaggatgttttgaaatatatatatattgtggaatgcttaaattgggtttaaatgagttaaattaatac

SEQ ID NO: 55609 - DNA, 1115 bp, Homo sapiens
gcatgagtattgtagaagtatcatgtagtagagatcatacgcaattatttctgtattaattaaagtgtgtccagatacctttaaacaacagttttaaacgttcaaaacagtggaatacatgttgcccaataagtgaaataatatatactgcaatgtatagaacaggtactagctgtatttaatagtgaagttatgcttaatttgaaatgcttcacatttgtttataaatccatcatcagaagcaatgtttgttatgatcaattcagacgtttggaatcaggaggtccagaaggcagccgtaggcagttgtttgtgcattcagactacagagtatcaagaaaatcccaatttgctcagataggtaggtgtgaaaaccaacaatttctttgaaccactcgtcttacaacctcagtgtattctatattgtgcatagatgacagaagaaacattcattcctaagatacctacaaaatgagcaaaaccagcagcataaatggacccagtagtaatctatctccagtgcgtcttaattttgtgcatcatccatttgtgactttcttttgttctttctgttaatcagagatcttttcagtggcaggtgacatatgcccaacttgaatggccttaaggaaaaaaacagtattgtctcatgtgattgaaacatctatgtatatatagctggtttggggcaaagctgaatcaagatgatcagatgatgttgccaggaatacttcttcccacattacacactcttctgtatgccatgtattttcaggctgttcccttaaagtggcaagatggcttccagcagggatacgcttacatcatcccagctcaggagcctgacggcaaagagaaccttctcttcagtggttcaggataagtcccggccagatctcagttgcttacccatcctaagaagcagggttttgtwttaactgcactatcaccacgtaattataggagaaagggaaaaggtttcttcaatgagtctttaaaatatttaacattaaaaaattgacactaaaaattgtatattatgtaaaacaggatgttttgaaatatatatatattgtggaatgcttaaattgggtttaaatgagttaaattaatac

SEQ ID NO: 55610 - DNA, 1115 bp, Homo sapiens
gcatgagtattgtagaagtatcatgtagtagagatcatacgcaattatttctgtattaattaaagtgtgtccagatacctttaaacaacagttttaaacgttcaaaacagtggaatacatgttgcccaataagtgaaataatatatactgcaatgtatagaacaggtactagctgtatttaatagtgaagttatgcttaatttgaaatgcttcacatttgtttataaatccatcatcagaagcaatgtttgttatgatcaattcagacgtttggaatcaggaggtccagaaggcagccgtaggcagttgtttgtgcattcagactacagagtatcaagaaaatcccaatttgctcagataggtaggtgtgaaaaccaacaatttctttgaaccactcgtcttacaacctcagtgtattctatattgtgcatagatgacagaagaaacattcattcctaagatacctacaaaatgagcaaaaccagcagcataaatggacccagtagtaatctatctccagtgcgtcttaattttgtgcatcatccatttgtgactttcttttgttctttctgttaatcagagatcttttcagtggcaggtgacatatgcccaacttgaatggccttaaggaaaaaaacagtattgtctcatgtgattgaaacatctatgtatatatagctggtttggggcaaagctgaatcaagatgatcagatgatgttgccaggaatacttcttcccacattacacactcttctgtatgccatgtattttcaggctgttcccttaaagtggcaagatggcttccagcagggatacgcttacatcatcccagctcaggagcctgacggcaaagagaaccttctcttcagtggttcaggataagtcccggccagatctcagttgcttacccatcctaagaagcagggttttgttttaactgcrctatcaccacgtaattataggagaaagggaaaaggtttcttcaatgagtctttaaaatatttaacattaaaaaattgacactaaaaattgtatattatgtaaaacaggatgttttgaaatatatatatattgtggaatgcttaaattgggtttaaatgagttaaattaatac

SEQ ID NO: 55611 - DNA, 570 bp, Homo sapiens
ttgcacatttaggttagtatagtgggtaagatgagagactttggagtcacactgcgagagtcccagtgctggactacactttgggaaggtacataacctctctgaacttggttttggcacttgcaagatgtggacaagtataattgtgtgctgggcaggatagcttatgtgtattaagtgctgtgattattcttagatttctttgtctaagagttsgcacactgtgtattatacaataaatacattcataattgaaaaacctggccaggcgtggctgctcatgcctgtaatcccagtgctttgggaggccaaggagggtggatcacttgaggccaggagttcaagaccagcctggccaacatgatgaaacaccacctctactaaaaatatatattttttaagtattagccggtgcagtggtgcatgcctgtagtcccagctacttgggaggctgaggcatgagaatcacttgaacttgggaggcggagattgcagtgagctgagattgtactactgcactccagtctgggtgtcgtagtgagactctgtctcacaaaaaaaggaaaatga

SEQ ID NO: 55612 - DNA, 781 bp, Homo sapiens
aggcatgaactgtgttgctctgtaagtccgtagccattggtcgtcaagaatgagcttccctgtcattaggtgaacccagaagtaatcagccctaggtgtcacgttccatccagtgctctttctgcttttgagccacttactgaaaggcttatctcccatcctttggggatgctctctgcttaaaaggatgtttagaatgccatttgtagcacacacacgtacacgggcaatcctttccacttcatcttaccatattcatctgaatctggcttcccgagagtctctgtagtatggcgtggaggcttaagagcttctgtgtctttcagagggtagaaggagattcagtcgactttcttttgcccacatgaattgatgctatgctcctttaagtgccaggtttagtcccctgctgagatcacacttacctcaactaaattatttttcatttaaaagcagccatccattcacagtcttttatttgtgtttcaatgatgtttgtaaatgtgctctagcagttgaaagtgtaggcacgtatgtgggggagcattcctgatgttcccctcaccacgcatttgtgtacccctcacatgccctttgtctgtgtctcatccatctctaacatgaccacaaaaatggtgtctcctgaagtgttcaaggatctaccctcctccatagtcatgaagtttctagtaataatgrtaattattcttattgtaataaggaggaaggggtggaggagaaaaaagtgatggagaaaaatggtgtctcctgaagtgttcat

SEQ ID NO: 55613 - DNA, 630 bp, Homo sapiens
atcccagaggttcccagggagactgagttgcagctccccaaagtggtgacctgctcaatagcacatcttatattgatttccttttcttctccctcctgcatctcaattccccactcctgtaccagggcatcctaggataaccctccaaataaaattacttgccctcggccaggcatggtagctcatgcctgtaattccaccactttgggaggccraggcaggtggatcacttgaggccaggagttcgagaatggcctagccaacatgacaaaaccccatctctacaaaaaattagctggatgtggtggcacatgcctgtagtctcagctactccggagggaggctaaggcagaagaatcgcttgaatctgggaggtggagattgcagtgagccaagaccaagccactgcaccatagcctgggtgacacagcgagactccatctcaaaaaaaaaaaaaaaaaaaaattacttgcccttaaatccttatctcagggtctacttccaaaaaacccaacctaagacctgttatctagcactcttacaccttcaaagagaccttcctaatagtaattaaggaatacttaacaatgaagttatttgctagctacgtgtctgctcctttggactata

SEQ ID NO: 55614 - DNA, 630 bp, Homo sapiens
atcccagaggttcccagggagactgagttgcagctccccaaagtggtgacctgctcaatagcacatcttatattgatttccttttcttctccctcctgcatctcaattccccactcctgtaccagggcatcctaggataaccctccaaataaaattacttgccctcggccaggcatggtagctcatgcctgtaattccaccactttgggaggccgaggcaggtggatcacttgaggccaggagttcgagaatggcctagccaacatgacaaaaccccatctctacaaaaaattagctggrtgtggtggcacatgcctgtagtctcagctactccggagggaggctaaggcagaagaatcgcttgaatctgggaggtggagattgcagtgagccaagaccaagccactgcaccatagcctgggtgacacagcgagactccatctcaaaaaaaaaaaaaaaaaaaaattacttgcccttaaatccttatctcagggtctacttccaaaaaacccaacctaagacctgttatctagcactcttacaccttcaaagagaccttcctaatagtaattaaggaatacttaacaatgaagttatttgctagctacgtgtctgctcctttggactata

SEQ ID NO: 55615 - DNA, 1189 bp, Homo sapiens
aaaaaatagaaatggctaaatcacagagtttcttacctttacctcttctgcattttcttggctggagctgaatcttttttggcacatttatgatttagaaaaccatatggtgagattttgtcttctcttttgacttattgatttgggatatctagtaagccagaatatggttttttaagaatactaaaacacagtgttggcaaagatacaggaatacgtgtactctcgtacactgctattaggcaagtagcaaccaggggaaggattaaaaaatgataggaattacagcttacttttaacccatttagccctcacctccactccttaaggtaaaggaaacttcaagtcagggaaattaagttgccagagccacagagctgatgagcggctgagccaggcttttgagctaagcccagttggctccaggacccgagccactgtattgrttatctgccgccacgtaacacatacctccagatttagcagattgggatcctatgtttattatctcacagtttctgcgggttgggactccaggggtgacttagccagatcctctggctcaaggtctgtcatgagggtgtaatggagctgtcagctggggctgtggtctcatatgatggctcaacttggcggttggacgatctactggcagtcccacttacggggttgtggctggattcagttccttggatgctgtcagccagaagccactctcagttccttgatacgtggacctcttcacagagccgcttacaatgtggcaactgctccctcaaagcaagagagggtgccaaaaatggaagcctcagcctgcagccatacccacagcattttcctgcttctccatggtgtctccaccaggtccctgtgaggccattaaagtgacgatagttaacgatctgacatggtgttcccaatggcatcattttatgcctccccaaaattaataatcttatgttggtaaatagaatacagagagtgggagaccacatcaaaattgttattgctgggtagaaaattaaatgtgttttcttttttccatgttgcttattggtatcttcctcaataaacattttatcacaaaataagtggggtggacagttgcaggagcagataaaaaaaattttttaacagaaaagcagagcaaacaactccagttggacttgaccttcgttctggccaggct

SEQ ID NO: 55616 - DNA, 453 bp, Homo sapiens
caagagattaaagcctgggtctgagctctctttctttggggaaacttcttcccaaattggaataaaaatcctcaaccagagagaagcttctttcaggtatcacacagccgaagggaaagaatttagaccaggaaccaggacagctgggttccagcaccagctctgccactagcctgctgaaaggtcctgatctggttacttctcctttctgggcctcagtttcctcatctgtaagaggggctagtaaaagcccttctctaggaatctattccagtgatagctgatatgtgctggattgtgacaatggggcaggcacatcaggcacattcctgtttgaagcttcacatcaattttgggagaaaagtatgcctaatgcaaccatgttacagatagaaacaccaaggctcagagaggttgagtaagtgaatcaatatcacacagctrttaagtaca

SEQ ID NO: 55617 - DNA, 684 bp, Homo sapiens
tttcaattaaggttctctatgccccatacctttttagtatctttgaagccatgttcactgcttctatacagctaaactgtacagctaggtctcttattccaatatttgaattcaggcccagtaaacactcaaaagatttaagacagctctgatatgtctccttgttcaaaccagaaagtttaattaaataagcctgtgaaaggaaaaacacatacacaaatcataaaaaccttaagttctatatattagtacccttaaacacttgtttaataagcagtataacttttcaaaattaattttgtggcaagtcactctacctaaaggtttagcttcatttagtcaaaaaactggtaatcatgtcaggctgaggaagtactgctttcaaagagttcaaactatgcaaaggcaggcagtcatgcatatgcacagatgatttaaaattataacacaatattaatatagtcaaaataggcagtaaaaaaccacaggaaacacacagatggttacttgtgtttatacaaaggtgctaacgtgtaatttattgggaaaaggaaggagagaagtagcgggagtggagtagggggcggggtggtgagagagagagagagagagagagwgtgtgtgtgtgtgtgtgtgtgtgtgcaggagagaaagaggaaaaggaaactaggaaaagaaacagga

SEQ ID NO: 55618 - DNA, 684 bp, Homo sapiens
tttcaattaaggttctctatgccccatacctttttagtatctttgaagccatgttcactgcttctatacagctaaactgtacagctaggtctcttattccaatatttgaattcaggcccagtaaacactcaaaagatttaagacagctctgatatgtctccttgttcaaaccagaaagtttaattaaataagcctgtgaaaggaaaaacacatacacaaatcataaaaaccttaagttctatatattagtacccttaaacacttgtttaataagcagtataacttttcaaaattaattttgtggcaagtcactctacctaaaggtttagcttcatttagtcaaaaaactggtaatcatgtcaggctgaggaagtactgctttcaaagagttcaaactatgcaaaggcaggcagtcatgcatatgcacagatgatttaaaattataacacaatattaatatagtcaaaataggcagtaaaaaaccacaggaaacacacagatggttacttgtgtttatacaaaggtgctaacgtgtaatttattgggaaaaggaaggagagaagtagcgggagtggagtagggggcggggtggtgagagagagagagagagagagagtgwgtgtgtgtgtgtgtgtgtgtgtgcaggagagaaagaggaaaaggaaactaggaaaagaaacagga

SEQ ID NO: 55619 - DNA, 1357 bp, Homo sapiens
tgtctcttggcatgagtgtagggctgtgtctttccaggggccastcctgtctggatctttcctatctctgtgtgtccacctgtgtctagagtatttcttgatgtttgcgtgtgactctgcaggggtgggtgcgtctgggtgtgcctcttccaaagactatatgcctggacaagggagcctagcagagccactaccttctcaccctacgcttctcctagtctgcctgcccacagttccctggctttttcctgcccatagaaggctctggaggcgtaggggcctgggagtgacaggggccgggtggaggaggggaaaaggaaggctgtttcttctgcctcccacaggatcttcttaaagtgggatcagactcccaaagggtctctgtgccctactctgttctgaccaaggagaggttgatttgttcagggaatgtgtatgcagccagtgctggccatttatagatgtcccagtaactctgaggtagagaccatcatcatccttatcttacagatggggaaactgagtctcagactaagtgactcacccaaggctacctcaggcatccaggttccagagcccccacaattaaccaccagacaaatgggagatcccttttttccctttccgctcagctgacacaaggttgcaggattttccccgagggaatccccgcttggaaacaatggaaatggaagaaaggaaggaaatgccaaaaagctcagaggaagaagaatccagatctaaggccaaactgggttcaacagccactggccatactcttgggcaagtcacttccagggccgctgcatgatttttaagggtactttgccttcatgggccccttgctccattgtttttttaaagcactaaaaattacattttgttatttcattaataggaagacaaatgtaatctaggctggattagatattttcttatgattttaaaagaaattaagaccttcctatgggcccctaaaggtttcatgggccccatgctctgtgcctactgggtaagtgggctctggtcactgctgtgatctggcaaaatgggccagtgttcttgacctcacaggacaggggtgaaagagaccactatctgcaaggaatttttttttatattaaattgtgtttcaaaaatgttgatggtaatatgaagtttctacacccagggaaacaattcaaaggaagagaaagaaaaaataattaataacttctacccccttctcattcccactccatgccctccagacaccaacccagcctcattccacagccttccccaggctggaagatgctgtacagatgtgtccacatccacatgttttggtttgttttttcacaaaggggctaaaggt

SEQ ID NO: 55620 - DNA, 1357 bp, Homo sapiens
tgtctcttggcatgagtgtagggctgtgtctttccaggggccagtcctgtctggatctttcctatctctgtgtgtccacctgtgtctagagtatttcttgatgtttgcgtgtgactctgcaggggtgggtgcgtctgggtgtgcctcttccaaagactatatgcctggacaagggagcctagcagagccactaccttctcaccctacgcttctcctagtctgcctgcccacagttccctggctttttcctgcccatagaaggctctggaggcgtaggggcctgggagtgacaggggccgggtggaggaggggaaaaggaaggctgtttcttctgcctcccacaggatcttcttaaagtgggatcagactcccaaagggtctctgtgccctactctgttctgaccaaggagaggttgatttgttcagggaatgtgtatgcagccagtgctggccatttatagatgtcccagtaactctgaggtagagaccatcatcatccttatcttacagatggggaaactgagtctcagactaagtgactcacccaaggctacctcaggcatccaggttccagagcccccacaattaaccaccagacaaatgggagatcccttttttccctttccgctcagctgacacaaggttgcaggattttccccragggaatccccgcttggaaacaatggaaatggaagaaaggaaggaaatgccaaaaagctcagaggaagaagaatccagatctaaggccaaactgggttcaacagccactggccatactcttgggcaagtcacttccagggccgctgcatgatttttaagggtactttgccttcatgggccccttgctccattgtttttttaaagcactaaaaattacattttgttatttcattaataggaagacaaatgtaatctaggctggattagatattttcttatgattttaaaagaaattaagaccttcctatgggcccctaaaggtttcatgggccccatgctctgtgcctactgggtaagtgggctctggtcactgctgtgatctggcaaaatgggccagtgttcttgacctcacaggacaggggtgaaagagaccactatctgcaaggaatttttttttatattaaattgtgtttcaaaaatgttgatggtaatatgaagtttctacacccagggaaacaattcaaaggaagagaaagaaaaaataattaataacttctacccccttctcattcccactccatgccctccagacaccaacccagcctcattccacagccttccccaggctggaagatgctgtacagatgtgtccacatccacatgttttggtttgttttttcacaaaggggctaaaggt

SEQ ID NO: 55621 - DNA, 1649 bp, Homo sapiens
caatcctcccacctcagcctcccaaagcattggggtaacaggtgttagccaccacacccagccaataatacttttattatcagctcctaaggttgatgtaaggtttaaatatgaccaagctccatgtctattatcagaacaagttttcctgatgcttatttgtctaccaagaccaggaagaaatattaggaattatatccatccatctactccctcctccccagcaccaccccatgaggctcagtagattttccatttccttcgtgatacgtactcatttgcccaataaatctttttcaaagcatgaaaattcatagggggatctttttggcccaaatttcttgtaagagatgcctacagggaggtaaatgttcatttatagcttatcacctgttttacagagaggttgagaggtggaaagaaatggagggaaggaagaggtaggagtgaagttggcatttttcattgttgatccaatgtagcacacagacgttggtgtgagcagatgcatgtggaaaggaggaggagaaatttgggtcaggaaggaacctgagctatttttttctctcagtggtgggtgagtagctgttttaaggaaaaagaaagtggaaaaaaggaaataagagagtgaatgcctaatatataaatactcagaacttctgcaccctctgataagtaggaaccccaagaaacaagaagctttgggggtgaacggggtgtcgttcattcaataaacatctgagcacctattctgtgccaggcactgttgcagggtctgggaaccgagcaatgaacaaaccaaagtcttttaccatatggaaccaccactcctaatttctgggcatgatcagagaatgggatgaaatggagagtgaaggggaggccgcctcaacttcagtggtcagagagggccactctaagaaggtaacatttgagcagagacccacttggcaaagagaagacagttacataggtatctaaggaaggcattctcctttcatcaaagtgttcactgatgctttgcttagaagaattgacaacacccaagagtccatccttagaagactggctgaatgtatcaggattcaactgggtgagaaatgagttgaatatttgaatatggtaggagttctgaattacagaattaaatgaaaacaaacagaacaatcgatgacagcatatatgtgtactctcatttgtgttttctttaagtgagggggcttcaggggctttcactcagcagctatttacctactttcacagaaacatttcaataagttagcaacctatatagaagtagtagtgctctgctaattatcagttgtgtatataaagygtatcagtcagttttgctgtgtaacaaaccactccaaaacttagtgacttaaaataacaagcattattagctcatgaatgtggccacaggggctaagttaaactggatagttctggcctcagctgacttcatgtgttcaactgtggtcagctgtgggctgcctggtccagaataaccttgtccgagatgactcgcctctcctccttgggcatctcatcctccagcaagccagctcaagccagtgcacatgactgagcagggatttgagaggaaaagagagcatagaattcttttgaggtgtgtgtgtgtatgc

SEQ ID NO: 55622 - DNA, 1192 bp, Homo sapiens
atcatatctgactccaattaaaagatcagagtcctcagagcgacgtattgcaaacaaaaagtccttagtaggtggtggaaagtcaggccaggagtcaaacagaaccarcagagatgacagagatgtgatattcagcacagtctcctcagagagaaaaagcaaaaccacatggccctgctgaaatgccgagttaattctctctcttatctgagcattaaacattacatcgttaaaattgtttcagctagattattgcctcttcaggtgagactctcatttaagaaacacaaacattctcaaagcacattgctgaaacaccataaaaacttaataacctaccattttctttgcactcttctggaggtttagcctttttcgcaagtcgtggatccagccatgatgttgtctttgtgttatggctgaaaagaaaagagatcactctgaacagacacatactaaaaggaatcaagtttattccttaagaaaaaaaaagcagggttagtccaacaaaattgcaatcgatacacttaatttgcttactggttctaagtagccctgaaggaggtgtaagagtaattgtgcaaggcagctgtaaatttggcaacctcagctccctgtcctcaaagcagctatttttattaaaatcaactagaatgttgccaagttaacctcattgaaaatgcagaactcatccagagcaaaaggaatttattacaaatacaggattctccagttggaagagcacagtccacaggctctgataatgtttcctgagttttgcaaaagaattattttcatcttaaacctacccttttcataaacagttgttttgttactctttagctacagagctggcagaggcagtacaaaagtgatgcagattatagcatgttcttgggattcctgcattttctcaataagtgattaatagcaattttattaactcacattaaactatctttcatccaaatactttcaacccagctcagaaggtaggggataagactgcctgcattctaatgtttctgaaatggcatttccagaaagtaatgataaaataatatttttgaaaaaaatgttttcttgtaagagttttgccagaaatttaaaaagtaaaggagagatattcttaaagtagtgttttttaaagtggttgtgaaataacctgcattagaattacctggtggacaac

SEQ ID NO: 55623 - DNA, 1192 bp, Homo sapiens
atcatatctgactccaattaaaagatcagagtcctcagagcgacgtattgcaaacaaaaagtccttagtaggtggtggaaagtcaggccaggagtcaaacagaaccaacagagatgacagagatgtgatattcagcacagtctcctcagagagaaaaagcaaaaccacatggccctgctgaaatgccgagttaattctctctcttatctgagcattaaacattacatcgttaaaattgtttcarctagattattgcctcttcaggtgagactctcatttaagaaacacaaacattctcaaagcacattgctgaaacaccataaaaacttaataacctaccattttctttgcactcttctggaggtttagcctttttcgcaagtcgtggatccagccatgatgttgtctttgtgttatggctgaaaagaaaagagatcactctgaacagacacatactaaaaggaatcaagtttattccttaagaaaaaaaaagcagggttagtccaacaaaattgcaatcgatacacttaatttgcttactggttctaagtagccctgaaggaggtgtaagagtaattgtgcaaggcagctgtaaatttggcaacctcagctccctgtcctcaaagcagctatttttattaaaatcaactagaatgttgccaagttaacctcattgaaaatgcagaactcatccagagcaaaaggaatttattacaaatacaggattctccagttggaagagcacagtccacaggctctgataatgtttcctgagttttgcaaaagaattattttcatcttaaacctacccttttcataaacagttgttttgttactctttagctacagagctggcagaggcagtacaaaagtgatgcagattatagcatgttcttgggattcctgcattttctcaataagtgattaatagcaattttattaactcacattaaactatctttcatccaaatactttcaacccagctcagaaggtaggggataagactgcctgcattctaatgtttctgaaatggcatttccagaaagtaatgataaaataatatttttgaaaaaaatgttttcttgtaagagttttgccagaaatttaaaaagtaaaggagagatattcttaaagtagtgttttttaaagtggttgtgaaataacctgcattagaattacctggtggacaac

SEQ ID NO: 55624 - DNA, 1013 bp, Homo sapiens
tttgtaggtagtagttctgtcatccagaatgtgtaaagtaactctctaggtagctgttatggatggcctgcaggaaggatcataccagtgacttcttttgagccccctgccgagtggctagcgtcaggtgggggattagactctggttctttgcttcctggccctgtgagccccaggcaagtcagttaacttcttggagcctcagtttcctgacatgcaaatcatactgacctggtaaggctattgtcaggattatatgagctattatatcctaaagtatattatatcatactttatagagcgtagtatatattcaactaactgcatttgtgttagttcctttattttgttaacatggggatcaatggctttttttttctgatttggtatttattttaagactaggttgggaaccaattttccatagtcatctgtgggtataagtactcttaccttcagccaggacttaattttggccaagagccttggcttattccagcagagagtggagttatttagagccaaactgtaggggactgaattctctgtgtagcactttctgcagacagtggtaacattaatgacttactgcatatacattcataagtgggtgatttatggttagccccggatccataactttcatttcctgactgatatatcagaagcttcatgtataaaggcgcattagatttagtaagtgtaaaagacttaagttgaggtcatttctgtccacaagctgttcatggtgtagctgttcatgtagctcagctgtgggaatggcctggccctatgtgatgcggaaagacagccaagggggacagtggcacatgcctgtggcacttggttctgtgtgtggtctcctttgtatccccaggaactctctgcaataggaaggtgatggccaggatctcattttacagaggaggacaytgaggcccagagaggttaagtgacttgtctgagggttaacagctcctgggtggcaggatttacattggcgctcagatgca

SEQ ID NO: 55625 - DNA, 836 bp, Homo sapiens
ggatcctttcccataacaccagagagattgccaggctggggaggaaagactgttttgcaggcagccctcggagtgaaacatggagttcttctgactgaaggtaatgaaaagaatggcgtaacaaatacgaactgcaatgctaacaaatgcctgagtgtggaaggtcaggtatgggagtcattggatactaggggttctttttctttttctttcttttttttttaaattttattattattatgctttaagttttagggtacatgtgcacaacgtgtaggtttgttacttatgtatacatgtgccatgttggtatgctgcacccattaactcatcatttarcattaggtatatctcctaatgctatccctccccgctccctccaccccacaacaggccccagtgtgtgatgttccccttactgtgtccatgtgttctcgtttttcaattcccacctatgagtgagaacatgcggtgtttgtttttttctccttgcgatagtttgctgagaacgatggtttccagtttcatccatgtccctacaaaggacatgaactcatcattttttatggctgcatagtattccatggtgtatatgtgccacattttcttaatccagtctatccttgttggacatgtaggttggttccaagtctttgcttttttttattttattttttttgaaactgagttttgctcttgtcgcccaggctggaatgcaatggtgcaatctcagctcaccacaacctctgcctcccaggttcaagcaattttcctgcctcagcctcccgagtagctgggattacaggtgctcaccaccatgcccagctaattttttt

SEQ ID NO: 55626 - DNA, 1428 bp, Homo sapiens
ttccactctgcaaatatgtcagactcagtctccatttggaaccagggaacatcaatctctcaccagccaggcaaggttctgcccagcgggctgctcaccactctagcatctctcagctcccacagtcccagcccatgcatctgaattccacctcctgggaaaatgctggaacaaatcccaactttcagagttgtctttagcttcgagaaaatattttcagggatctagttgtatttactgaacattcatggaccaattcctaatgtgtctaattttttagaccaactataattcacctgttacatttgggcttttggctgtgctataattttcctaaattgaaatatttcttatgctcaaagatctccctggtgttcaaaagcaaaattggtttcctataaaaacttgtcgtcactgtcattaattaacagaaagcagaatgcctctgtgtgtttaccttcacaaagtgtatccatgcaatgcatttctttcccagaggcatagtttattcctatataccagaaattaagagtgcattaaaaaaatgcatgtctttcaccagcagggaagttttgagaaggagactactgtatttcatgaaaggacaccagacacaggggtgtgaaaattaaatagagcctctctctatgagaaagtaaattatgttatattgttcactttatctgagactacttttctgtggtttgatccaatttgccaaagaatatatgggctgatcattcaaccagttattagctattcattggccagctttgtggttgtttgacttggtagtaattcaaggtagaacatgtgtatgtttgtgtgtgtgtgtgtgtgtgtgtgtgtgtgagattttatcactagttgtaaattcaaggattcatagaaagagtttaaagttagaattcttttaaaatgtgatataaatatatatatgtgtgtgtgygtatatatatatatattccattgtgtgtgtatacatacataaaggaatattattcaaccataaaaagaagtaaatttgcaacaacatgaatggacctgggaaacattatgctaagtgaaataagccagatgcagaaagacaaatactgcaagcgcccacctgcatgtggaatctaaaataaaactcacagaaccagagagtaaaatggtgattgccaagggcacagggtgagggaaggaggaggaaatagggagatgtttgtcaaagggtataaagtttcagttaggtaagatgaatgggtcctggggatctaatgtacatcatgatgtctgtgtttaatactgtagtgtacactttaaatttgctaaaatggtagatcttaagtgttcttaccacaaataaaaagaaaaagagaatggcaactatgtgaggtgatagacatgctagcagtttcattgtggtaatcgtttcacaacgta

SEQ ID NO: 55627 - DNA, 1428 bp, Homo sapiens
ttccactctgcaaatatgtcagactcagtctccatttggaaccagggaacatcaatctctcaccagccaggcaaggttctgcccagcgggctgctcaccactctagcatctctcagctcccacagtcccagcccatgcatctgaattccacctcctgggaaaatgctggaacaaatcccaactttcagagttgtctttagcttcgagaaaatattttcagggatctagttgtatttactgaacattcatggaccaattcctaatgtgtctaattttttagaccaactataattcacctgttacatttgggcttttggctgtgctataattttcctaaattgaaatatttcttatgctcaaagatctccctggtgttcaaaagcaaaattggtttcctataaaaacttgtcgtcactgtcattaattaacagaaagcagaatgcctctgtgtgtttaccttcacaaagtgtatccatgcaatgcatttctttcccagaggcatagtttattcctatataccagaaattaagagtgcattaaaaaaatgcatgtctttcaccagcagggaagttttgagaaggagactactgtatttcatgaaaggacaccagacacaggggtgtgaaaattaaatagagcctctctctatgagaaagtaaattatgttatattgttcactttatctgagactacttttctgtggtttgatccaatttgccaaagaatatatgggctgatcattcaaccagttattagctattcattggccagctttgtggttgtttgacttggtagtaattcaaggtagaacatgtgtatgtttgtgtgtgtgtgtgtgtgtgtgtgtgtgtgagattttatcactagttgtaaattcaaggattcatagaaagagtttaaagttagaattcttttaaaatgtgatataaatatatatatgtgtgtgtgcgtatatatatatatattccattgtgtgtgtatacatacataaaggaatattattcaaccataaaaagaagtaaatttgcaacaacatgaatggacctgggaaacattatgctaagtgaaataagccagatgcagaaagacaaatactgcawgcgcccacctgcatgtggaatctaaaataaaactcacagaaccagagagtaaaatggtgattgccaagggcacagggtgagggaaggaggaggaaatagggagatgtttgtcaaagggtataaagtttcagttaggtaagatgaatgggtcctggggatctaatgtacatcatgatgtctgtgtttaatactgtagtgtacactttaaatttgctaaaatggtagatcttaagtgttcttaccacaaataaaaagaaaaagagaatggcaactatgtgaggtgatagacatgctagcagtttcattgtggtaatcgtttcacaacgta

SEQ ID NO: 55628 - DNA, 3158 bp, Homo sapiens
acatggtatgagaaagtgaattacaaacacaaataaagagaaaccaggtagggagacagcaagatagcttctcttcccatcatgtgaactaagaaatagaatggatgctcattaaagtagtttaccgggactccaatttgttctgtgattaagaggtatcggttagaggagattggtgagggagatcaatattcttgtcttcattcttaattcttctttaatgtctgtctccacagggcagctgaatcagagatgtagagtaaatctttatccaccagggggctgcacttcagggggaaaaaaaaaaaaggtctggtctacctcagctagataaatcaagttgatacctagctttctttgtccttaaactcccaacttctgttcaagtgttgccatgtttctgactagtagatgtgataaggatgaggcatggagaatagtattggctggagtcacgaagaaagtcattcctggatcttaaagtaatatgatggtgtgctgtacctaactgcgtctttcacaccaaagtacctcagcaatggtattctttcacatcctcatctttctctacaactcaagctgaggggaattcttacctttaaaactcagtggtgccatcatctgaggcccacagtgacagaatctgtcttcttctctctgagtctcccaggttcaacctctctggcagtggttcctaactaggggttattttactttccaggatacatatgcaatgtcagggaatgctcaattgtcacaagtaaggggaggggtactactactactactacctagtgggtagagccaaggaatgctgctaaacatcttacaatatataggacagcccctatcaacaaagaattacccattccaaaatgtgagtagtgctgagactgagaaaccctgccctaaagtgatggggacaccttgatgcttcaacccaaatggctggtgggtgacacacctcactgaactctggatctttgacctggaattactctaataatctgaaatgtaatgctttctcctgcttcacaacatgtatgttacattgagctaaacatagaggcaatcttgctgtcacatgctctaaaaaaggaatcagaggtacattactcagggcactgccaatgggctaggaggtagaaaagagtttatttttcaattttttgttgtaagcctctgtgcctataaatttttaagctatttgtacgttgcaggctgctatgtgttcatcaaaacctgttccctttacttcctggacacacagactacatttcccagcctcctttgaaggtggatggccatgtgactgagtattagccaatggaatgtgagagaaagtgataacagcgtctctgtgcatagcccataaaaatgtatcacatgatcttttaccctctctctttccctgatccctgatcaaataccaagtctccagcaaaaagaatcaaaggccagaagggatgatggatccatcagatgcaaagaacctgggtccttgaagaactattttgaagaccacttgttgttaactaacaacatctacactggactttatgtgaataagaaaataagccaatgagagtttggggttgttacagcatctagcattaattaccccaaattattataatatgcatgaattactttaattttacaagttataattcaaatataaatcatttagttggtttaaaatttcttgtggaaagcatgttgctgtctggtttctgttccagacttactgtaatgccactgaaatttcttttgcaaatgtaaactgacccatattactttcaaccttgaagcacttcactggccacgcattactcttagtataagatttttaaatttatcatgattcacatggcccttcacaattgcaagagatcccaaggattgaggaataaactcagaggtgtgtgctgttgaagagaaaaccttcacctcccactacagaaaggaaaggacccagttatcccttttaatactgcatgtagctagagtgtagactcaaacaatctaacatccttacttgagattttaaaccttaaggaaataaagcaaaacaaagagaaaattgagaaactattcagggtgacagccatgagaatgaagctgcaagggcaccaaatttccaggacagcagtggcagtgacaggtacaacctagactgttctgcagcgctaccttggctatgtggccctgctaccaagcttcctttagagcttgcctatttatgaatttgaatttggttattaagattcccattggtgctgtgagaatttataaattccatttctgctctagttaaccaattttagagtctattgcttgcaagcaaaacctttgagtaatagaatatcttcccctcaccctcaggattgcaagctccaagggggcagaaagtctactttgttcaacattgtatctccatcttcttcctgctacacagtgcctggtacacagtagaaggtgattagatatttttaaataaatgcatgaatgaaaatacaggcaggcaatcaggtaaatgcacacatcagcatcagcccccaaagggtgtactattccaccattctaaaatcaagagttaataaggtaggaggtcagaaaattagggaaggtagggctgaagtggaagggaaatggcacctaggtgatgagagtaagggactgtggggatgctttgctggttaagggttgtatgcaaggaaagccaactccaactctcttgcctcttgctggatactggaaacagtgcaataactacagttttcatgtaactcctagcaagtatatctctttcccaagttctccagcaagtgactgcttcccaaacatgtggagcttggtactgaggagtcagaaaacatgggttccctcttgaaaggtgatctcccttttccaacccttagtatcctggctccacctgcttcagctacttggcagtttggcttttagaattgtattagtccatttttacactgctgataaagtcatacctgagactgggaaggaaaacaggtttaatggactcacagttccatgtggctagggargccccacgatcatggcggaaggcaaaaggtacttctcacatagcagtggcaagagagaatgagagagaagcgaaagcggaaccccctttacaa

SEQ ID NO: 55629 - DNA, 3158 bp, Homo sapiens
acatggtatgagaaagtgaattacaaacacaaataaagagaaaccaggtagggagacagcaagatagcttctcttcccatcatgtgaactaagaaatagaatggatgctcattaaagtagtttaccgggactccaatttgttctgtgattaagaggtatcggttagaggagattggtgagggagatcaatattcttgtcttcattcttaattcttctttaatgtctgtctccacagggcagctgaatcagagatgtagagtaaatctttatccaccagggggctgcacttcagggggaaaaaaaaaaaaggtctggtctacctcagctagataaatcaagttgatacctagctttctttgtccttaaactcccaacttctgttcaagtgttgccatgtttctgactagtagatgtgataaggatgaggcatggagaatagtattggctggagtcacgaagaaagtcattcctggatcttaaagtaatatgatggtgtgctgtacctaactgcgtctttcacaccaaagtacctcagcaatggtattctttcacatcctcatctttctctacaactcaagctgaggggaattcttacctttaaaactcagtggtgccatcatctgaggcccacagtgacagaatctgtcttcttctctctgagtctcccaggttcaacctctctggcagtggttcctaactaggggttattttactttccaggatacatatgcaatgtcagggaatgctcaattgtcacaagtaaggggaggggtactactactactactacctagtgggtagagccaaggaatgctgctaaacatcttacaatatataggacagcccctatcaacaaagaattacccattccaaaatgtgagtagtgctgagactgagaaaccctgccctaaagtgatggggacaccttgatgcttcaacccaaatggctggtgggtgacacacctcactgaactctggatctttgacctggaattactctaataatctgaaatgtaatgctttctcctgcttcacaacatgtatgttacattgagctaaacatagaggcaatcttgctgtcacatgctctaaaaaaggaatcagaggtacattactcagggcactgccaatgggctaggaggtagaaaagagtttatttttcaattttttgttgtaagcctctgtgcctataaatttttaagctatttgtacgttgcaggctgctatgtgttcatcaaaacctgttccctttacttcctggacacacagactacatttcccagcctcctttgaaggtggatggccatgtgactgagtattagccaatggaatgtgagagaaagtgataacagcgtctctgtgcatagcccataaaaatgtatcacatgatcttttaccctctctctttccctgatccctgatcaaataccaagtctccagcaaaaagaatcaaaggccagaagggatgatggatccatcagatgcaaagaacctgggtccttgaagaactattttgaagaccacttgttgttaactaacaacatctacactggactttatgtgaataagaaaataagccaatgagagtttggggttgttacagcatctagcattaattaccccaaattattataatatgcatgaattactttaattttacaagttataattcaaatataaatcatttagttggtttaaaatttcttgtggaaagcatgttgctgtctggtttctgttccagacttactgtaatgccactgaaatttcttttgcaaatgtaaactgacccatattactttcaaccttgaagcacttcactggccacgcattactcttagtataagatttttaaatttatcatgattcacatggcccttcacaattgcaagagatcccaaggattgaggaataaactcagaggtgtgtgctgttgaagagaaaaccttcacctcccactacagaaaggaaaggacccagttatcccttttaatactgcatgtagctagagtgtagactcaaacaatctaacatccttacttgagattttaaaccttaaggaaataaagcaaaacaaagagaaaattgagaaactattcagggtgacagccatgagaatgaagctgcaagggcaccaaatttccaggacagcagtggcagtgacaggtacaacctagactgttctgcagcgctaccttggctatgtggccctgctaccaagcttcctttagagcttgcctatttatgaatttgaatttggttattaagattcccattggtgctgtgagaatttataaattccatttctgctctagttaaccaattttagagtctattgcttgcaagcaaaacctttgagtaatagaatatcttcccctcaccctcaggattgcaagctccaagggggcagaaagtctactttgttcaacattgtatctccatcttcttcctgctacacagtgcctggtacacagtagaaggtgattagatatttttaaataaatgcatgaatgaaaatacaggcaggcaatcaggtaaatgcacacatcagcatcagcccccaaagggtgtactattccaccattctaaaatcaagagttaataaggtaggaggtcagaaaattagggaaggtagggctgaagtggaagggaaatggcacctaggtgatgagagtaagggactgtggggatgctttgctggttaagggttgtatgcaaggaaagccaactccaactctcttgcctcttgctggatactggaaacagtgcaataactacagttttcatgtaactcctagcaagtatatctctttcccaagttctccagcaagtgactgcttcccaaacatgtggagcttggtactgaggagtcagaaaacatgggttccctcttgaaaggtgatctcccttttccaacccttagtatcctggctccacctgcttcagctacttggcagtttggcttttagaattgtattagtccatttttacactgctgataaagtcatacctgagactgggaaggaaaacaggtttaatggactcacagttccatgtggctagggaggccycacgatcatggcggaaggcaaaaggtacttctcacatagcagtggcaagagagaatgagagagaagcgaaagcggaaccccctttacaa

SEQ ID NO: 55630 - DNA, 3158 bp, Homo sapiens
acatggtatgagaaagtgaattacaaacacaaataaagagaaaccaggtagggagacagcaagatagcttctcttcccatcatgtgaactaagaaatagaatggatgctcattaaagtagtttaccgggactccaatttgttctgtgattaagaggtatcggttagaggagattggtgagggagatcaatattcttgtcttcattcttaattcttctttaatgtctgtctccacagggcagctgaatcagagatgtagagtaaatctttatccaccagggggctgcacttcagggggaaaaaaaaaaaaggtctggtctacctcagctagataaatcaagttgatacctagctttctttgtccttaaactcccaacttctgttcaagtgttgccatgtttctgactagtagatgtgataaggatgaggcatggagaatagtattggctggagtcacgaagaaagtcattcctggatcttaaagtaatatgatggtgtgctgtacctaactgcgtctttcacaccaaagtacctcagcaatggtattctttcacatcctcatctttctctacaactcaagctgaggggaattcttacctttaaaactcagtggtgccatcatctgaggcccacagtgacagaatctgtcttcttctctctgagtctcccaggttcaacctctctggcagtggttcctaactaggggttattttactttccaggatacatatgcaatgtcagggaatgctcaattgtcacaagtaaggggaggggtactactactactactacctagtgggtagagccaaggaatgctgctaaacatcttacaatatataggacagcccctatcaacaaagaattacccattccaaaatgtgagtagtgctgagactgagaaaccctgccctaaagtgatggggacaccttgatgcttcaacccaaatggctggtgggtgacacacctcactgaactctggatctttgacctggaattactctaataatctgaaatgtaatgctttctcctgcttcacaacatgtatgttacattgagctaaacatagaggcaatcttgctgtcacatgctctaaaaaaggaatcagaggtacattactcagggcactgccaatgggctaggaggtagaaaagagtttatttttcaattttttgttgtaagcctctgtgcctataaatttttaagctatttgtacgttgcaggctgctatgtgttcatcaaaacctgttccctttacttcctggacacacagactacatttcccagcctcctttgaaggtggatggccatgtgactgagtattagccaatggaatgtgagagaaagtgataacagcgtctctgtgcatagcccataaaaatgtatcacatgatcttttaccctctctctttccctgatccctgatcaaataccaagtctccagcaaaaagaatcaaaggccagaagggatgatggatccatcagatgcaaagaacctgggtccttgaagaactattttgaagaccacttgttgttaactaacaacatctacactggactttatgtgaataagaaaataagccaatgagagtttggggttgttacagcatctagcattaattaccccaaattattataatatgcatgaattactttaattttacaagttataattcaaatataaatcatttagttggtttaaaatttcttgtggaaagcatgttgctgtctggtttctgttccagacttactgtaatgccactgaaatttcttttgcaaatgtaaactgacccatattactttcaaccttgaagcacttcactggccacgcattactcttagtataagatttttaaatttatcatgattcacatggcccttcacaattgcaagagatcccaaggattgaggaataaactcagaggtgtgtgctgttgaagagaaaaccttcacctcccactacagaaaggaaaggacccagttatcccttttaatactgcatgtagctagagtgtagactcaaacaatctaacatccttacttgagattttaaaccttaaggaaataaagcaaaacaaagagaaaattgagaaactattcagggtgacagccatgagaatgaagctgcaagggcaccaaatttccaggacagcagtggcagtgacaggtacaacctagactgttctgcagcgctaccttggctatgtggccctgctaccaagcttcctttagagcttgcctatttatgaatttgaatttggttattaagattcccattggtgctgtgagaatttataaattccatttctgctctagttaaccaattttagagtctattgcttgcaagcaaaacctttgagtaatagaatatcttcccctcaccctcaggattgcaagctccaagggggcagaaagtctactttgttcaacattgtatctccatcttcttcctgctacacagtgcctggtacacagtagaaggtgattagatatttttaaataaatgcatgaatgaaaatacaggcaggcaatcaggtaaatgcacacatcagcatcagcccccaaagggtgtactattccaccattctaaaatcaagagttaataaggtaggaggtcagaaaattagggaaggtagggctgaagtggaagggaaatggcacctaggtgatgagagtaagggactgtggggatgctttgctggttaagggttgtatgcaaggaaagccaactccaactctcttgcctcttgctggatactggaaacagtgcaataactacagttttcatgtaactcctagcaagtatatctctttcccaagttctccagcaagtgactgcttcccaaacatgtggagcttggtactgaggagtcagaaaacatgggttccctcttgaaaggtgatctcccttttccaacccttagtatcctggctccacctgcttcagctacttggcagtttggcttttagaattgtattagtccatttttacactgctgataaagtcatacctgagactgggaaggaaaacaggtttaatggactcacagttccatgtggctagggaggccccacratcatggcggaaggcaaaaggtacttctcacatagcagtggcaagagagaatgagagagaagcgaaagcggaaccccctttacaa

SEQ ID NO: 55631 - DNA, 1009 bp, Homo sapiens
gcatgtgatccatgttcttagcacagcacctagtacrtaaatggactaacgtacttaatggtagacatttttatttaatgataccctctttgctaggaattttctcattgctctgaagtagaagatatttggggccactgagtcctacttgccagcactctaacccaaatcagctttccagcagttattttactcagagaaagggtgatggtggttatactgagtacagagccatttgggtcaactccaggaaaaaaaaaagatcctattttatttcattaggagaagtgtcttcccattgtagaagtcagcacttttcctacctggcacccctgttcagttatgaatggaaatggttgctaatcttccttccaggccagcctttctctgagtcttcaggcaactgccatgtgccagctggcaatgagctctggagttaagaggctcttctcaggtttttcacatttgctatattaacaagttcatccatttaattttttccaaggccttctttctaaatgaacagtaaacatgccattgtcgttggataagagcctctttgaccttctctctgagccgcttatgagaagcagatgctatgttattgtttagggaaacccaggagtgctctgattacatatgtgtaaaccagatgctgaccagggtaccgtggcccctagaaatgtagataaaatcagctgcaatccctgttccatgcccagggcaggtctaaaacatctgcacatactcccatcctctcccccaaaatttcctgcaattcttgagcaaactcgtccttgtggtcacctctgtttctaggctcctggttgtcatgtgcttgctttctcaactcagcactgaatttcctcaaatgtcaaacttagctttatcagaaatttctaattgatcattcgatcaatcaaccaattaaacatatccccaaaggatatatgattataattcaatgaatttgagttttgtgtggagacaggacaatgttaacatgaca

SEQ ID NO: 55632 - DNA, 1009 bp, Homo sapiens
gcatgtgatccatgttcttagcacagcacctagtacgtaaatggactaacgtacttaatggtagacatttttatttaatgataccctctttgctagraattttctcattgctctgaagtagaagatatttggggccactgagtcctacttgccagcactctaacccaaatcagctttccagcagttattttactcagagaaagggtgatggtggttatactgagtacagagccatttgggtcaactccaggaaaaaaaaaagatcctattttatttcattaggagaagtgtcttcccattgtagaagtcagcacttttcctacctggcacccctgttcagttatgaatggaaatggttgctaatcttccttccaggccagcctttctctgagtcttcaggcaactgccatgtgccagctggcaatgagctctggagttaagaggctcttctcaggtttttcacatttgctatattaacaagttcatccatttaattttttccaaggccttctttctaaatgaacagtaaacatgccattgtcgttggataagagcctctttgaccttctctctgagccgcttatgagaagcagatgctatgttattgtttagggaaacccaggagtgctctgattacatatgtgtaaaccagatgctgaccagggtaccgtggcccctagaaatgtagataaaatcagctgcaatccctgttccatgcccagggcaggtctaaaacatctgcacatactcccatcctctcccccaaaatttcctgcaattcttgagcaaactcgtccttgtggtcacctctgtttctaggctcctggttgtcatgtgcttgctttctcaactcagcactgaatttcctcaaatgtcaaacttagctttatcagaaatttctaattgatcattcgatcaatcaaccaattaaacatatccccaaaggatatatgattataattcaatgaatttgagttttgtgtggagacaggacaatgttaacatgaca

SEQ ID NO: 55633 - DNA, 593 bp, Homo sapiens
acgactcctgctgttgaaattattgctgttgaaatacactaagtgaaaaaagcaaggtgcagtatagtgtggaaagcaaaccatttgagtaaaaaatggaataagtaacatttacatatgattgtaggtgcctaaaatatttcttaaagaatacccacatatacacacacatatctgttgtctgaggtggtgggaacagggtggttagagatgaggatggaaggtaaacttcattctatagcgtttgtgtcttataaattttaaacaatgtaaatatatatatatatatatatatatatatatatatatatatatacacacacacacatttttttttttttgagttgragtctcgttcttgtcacccaggctgaagggcaatgacgtgatctcggctcactgcaacctctccctcccgagttcaagcaattctcctgcctcagcctccagagtagctgggattacaggcacccaccaccaggcccagctaattttggtaattttagtagagatggagtttcaccatgttggccaggctggtctcgaactcctgacctcaggtgatctgtccaccttggcctcccaaagtgctg

SEQ ID NO: 55634 - DNA, 1017 bp, Homo sapiens
ctattcattatctagtttctgcagccaagtatctcatcatttctaccttagtaacctacttctccctctagcatcacattctacactcagtcctttatgcctcttctggagtaattttttctgccagctaattcagtgctgtcacagttttcatcaaaagtctataatggttgaccattaccattcgtggtactcaaaatttcatgaccatttgtcaagctggcctaaactactttatccatccacctgacactatcaatcagcataataaagcaaatgttgcttacagtttacttcagccaggttttcacccccacttccgcatctgccccttgttcttttgttagaatccttcttctcaaatcttacaggattctttcccaagactctttgtaatgtcggctttcatagtcattgctacttagtgtacttacagcttgtcagtgcattataatgttaaaactttttagttttcttctggatttaattcaagttrttgtcttataaatcttatgttttaatgtgtatgtcagtgtgtgtctgttattattcaggatatatgttttatgcttcctggtagcctacaggtaggtcttcaataaatatccatcttgggctagacacctaatttgtccaatacattatacctttcttttgtctacttttggtggtgatcgaatctaccttagagggtggttataaggataaggaggaaaatacttattcagtgttcctagtacagagcctgacaaatagtagatacttcagaaatggttatttttatttttaatttagatgctatatcttgagggaaaaaatatggttttttcactgacactggactacattaaaagctgtttttctatttctaggttgaatatatttcaggaaaggtttttttcaccacctgttctgatttgaatatgttgaagaaattaaaatctgcagaaagattatttttgctgattaaaaagcagtttccacttattatttcttctgtaagtaaaggtatggcat

SEQ ID NO: 55635 - DNA, 1017 bp, Homo sapiens
ctattcattatctagtttctgcagccaagtatctcatcatttctaccttagtaacctacttctccctctagcatcacattctacactcagtcctttatgcctcttctggagtaattttttctgccagctaattcagtgctgtcacagttttcatcaaaagtctataatggttgaccattaccattcgtggtactcaaaatttcatgaccatttgtcaagctggcctaaactactttatccatccacctgacactatcaatcagcataataaagcaaatgttgcttacagtttacttcagccaggttttcacccccacttccgcatctgccccttgttcttttgttagaatccttcttctcaaatcttacaggattctttcccaagactctttgtaatgtcggctttcatagtcattgctacttagtgtacttacagcttgtcagtgcattataatgttaaaactttttagttttcttctggatttaattcaagttattgtcttataaatcttatgttttaatgtgtatgtcagtgtgtgtctgttattattcaggatatatgttttatgcttcctggtagcctacaggtaggtcttcaataaatatccatcttgggctagacacctaatttgtccaatacattatacctttcttttgtctacttttggtggtgatcgaatctaccttagagggtggttataaggataaggaggaaaatacttattcagtgttcctagtacagrgcctgacaaatagtagatacttcagaaatggttatttttatttttaatttagatgctatatcttgagggaaaaaatatggttttttcactgacactggactacattaaaagctgtttttctatttctaggttgaatatatttcaggaaaggtttttttcaccacctgttctgatttgaatatgttgaagaaattaaaatctgcagaaagattatttttgctgattaaaaagcagtttccacttattatttcttctgtaagtaaaggtatggcat

SEQ ID NO: 55636 - DNA, 1900 bp, Homo sapiens
aaaagaagtatactgcttttgaaggcaataatacaagggctcactgttggaattttcaacaaaagactcaaagggcaaaataacacaaaatttggagtaggacagctctgggtgcactttctgaccacgttacactacatgatcttaaacaagtcccttatcctctagtatctcaattgttctagggtggaggaggataaaatggctcaacccatagcaagtactcaatagatgtcagtaataacccaacagtagraacagtgctagtaggagagacagtggtagtagtggtagttgaaagagacggtggtagtgtgttctgtgcaagacacaattacgaatgccaaactcaccctctggaccgaaattttaaatgggactcacaaagactgatagtaatcactaatggaaatgttattaaccagcagggatgttttataataatttcatgtattttaataattttcaaaaatatttcaaagtattctaaagcgtaagacttactacatccctcaaaaggtgtaaaagttttaaaattactatatatactattgctgttggattttttcccttcagtgagcatttctatcaagaagttgtaccataaatataagtgtatagttgtaatttaaccacgacaattacacacaaggaaaaatcccttaaactctgacaaataacttgtaacttattttcaaaataaagttttttaaaattcttctttaaaaacttctgggttttctagttttttttttaattcttccgtatattcatgaaaaaaatctcagtaattgttttctttataaaatgctaataagttagaaaatctttctctgaatgctggccaacttaagacccatagcttatcctgcagcatctttcaagttgtttatcaatgaggacatgtaagatgtgtatacctgtaagatacggtttcatttttaaagtaaaagtgagatacccaaaaaaatacatttctccaggaaattgaagtcaaaggcaggatttgactggcaggaggtgctgataaaatcagcgcagctcatctaaactgttgtggtctccaagtaacaagaggagaaacaataatcctattactagaaggattgggggtattagtacatgcatcctacttcagtcgtaggctgggaactgctttgcccatttactcacagacctgttgaagtgtctcaggaggatgctcatgctccaagtgacattcctcaatggaatccttaaaaattctcatcccttttttctcaaaagtactcacagaatctcatacactttgtgctcctagtgtttgtttatttcagtgcaaacatctaagaaatcaatcaccttacagactccaaaccattatactgcattagagaatcttgttcacaaaataaaacatggaaagggtattcatgtacccgaagtttaacaacagacataccatcttacctgatgccacgtcagatgagctctgccccacctttctgcgaaccctcgttcggcaaattttgctttatgaacgcctgacaaggtcccagtgatggagcagagggagcaagaacggacggtgcagagaaaagcaacctttagcttcactattccctctcgtcctccagctgaaagttgttccacgtcccgggcaaagagagagccccaccaggcagcaccaccagctccacagagttggagtgattcccccaagaagctcccctgcgccccccgtcacccccagagaccagcagaggaaacggcatctatcccttggaagacactaggcaggcgagaacaaatgcaagtcctgctgctcacaccgaggaggaaaggatggaggaggcggtgaatgggatgtagcagaaacccgacggccgcagcggaagggacacctcccctctccagccta

SEQ ID NO: 55637 - DNA, 1900 bp, Homo sapiens
aaaagaagtatactgcttttgaaggcaataatacaagggctcactgttggaattttcaacaaaagactcaaagggcaaaataacacaaaatttggagtaggacagctctgggtgcactttctgaccacgttacactacatgatcttaaacaagtcccttatcctctagtatctcaattgttctagggtggaggaggataaaatggctcaacccatagcaagtactcaatagatgtcagtaataacccaacagtagaaacagtgctagtaggagagacagtggtagtagtggtagttgaaagagacggtggtagtgtgttctgtgcaagacacaattacgaatgccaaactcaccctctggaccgaaattttaaatgggactcacaaagactgatagtaatcactaatggaaatgttattaaccagcagggatgttttataataayttcatgtattttaataattttcaaaaatatttcaaagtattctaaagcgtaagacttactacatccctcaaaaggtgtaaaagttttaaaattactatatatactattgctgttggattttttcccttcagtgagcatttctatcaagaagttgtaccataaatataagtgtatagttgtaatttaaccacgacaattacacacaaggaaaaatcccttaaactctgacaaataacttgtaacttattttcaaaataaagttttttaaaattcttctttaaaaacttctgggttttctagttttttttttaattcttccgtatattcatgaaaaaaatctcagtaattgttttctttataaaatgctaataagttagaaaatctttctctgaatgctggccaacttaagacccatagcttatcctgcagcatctttcaagttgtttatcaatgaggacatgtaagatgtgtatacctgtaagatacggtttcatttttaaagtaaaagtgagatacccaaaaaaatacatttctccaggaaattgaagtcaaaggcaggatttgactggcaggaggtgctgataaaatcagcgcagctcatctaaactgttgtggtctccaagtaacaagaggagaaacaataatcctattactagaaggattgggggtattagtacatgcatcctacttcagtcgtaggctgggaactgctttgcccatttactcacagacctgttgaagtgtctcaggaggatgctcatgctccaagtgacattcctcaatggaatccttaaaaattctcatcccttttttctcaaaagtactcacagaatctcatacactttgtgctcctagtgtttgtttatttcagtgcaaacatctaagaaatcaatcaccttacagactccaaaccattatactgcattagagaatcttgttcacaaaataaaacatggaaagggtattcatgtacccgaagtttaacaacagacataccatcttacctgatgccacgtcagatgagctctgccccacctttctgcgaaccctcgttcggcaaattttgctttatgaacgcctgacaaggtcccagtgatggagcagagggagcaagaacggacggtgcagagaaaagcaacctttagcttcactattccctctcgtcctccagctgaaagttgttccacgtcccgggcaaagagagagccccaccaggcagcaccaccagctccacagagttggagtgattcccccaagaagctcccctgcgccccccgtcacccccagagaccagcagaggaaacggcatctatcccttggaagacactaggcaggcgagaacaaatgcaagtcctgctgctcacaccgaggaggaaaggatggaggaggcggtgaatgggatgtagcagaaacccgacggccgcagcggaagggacacctcccctctccagccta

SEQ ID NO: 55638 - DNA, 587 bp, Homo sapiens
gctgctctatattgccttatttttctggtgtgctttcttttccacatcaaaaaataactgtggtgtgtaagctcagatcctataacgcttgtatttttttggcatctgttgtaatattggggtagtgtaatcagggccactgctaacctatttgctattcttgtgcaaatttgaaaaacagctttcctttctscaggtggatcacaggcccatgccagggcaaagagtttggtaaacagaatacgggctggatttcagtcccactctcaccctcagctggatgtgcagtcccaggtgcaatattatctccatcactagatggtgggacctgctgagttccattttacatcagcgagggtagcagatgctgttggtgcctggccatatcccttcagccgttccagaggttacctgaatctgcaatattcagctttctgtgtatatcaagatttcttaactcaagctcctgtttctctctgcctgggcttttcctggcttcaggagcatgctggacaaggcaggggtattaatgcccataagcagtcctcaaccagagtggtggagtggagttggtggataaatcctcc

SEQ ID NO: 55639 - DNA, 615 bp, Homo sapiens
ttcctgtctgtcacttggctatatctgaagtttttgaaatgtaatgacctgaattagttctaaatgaactattttaatgtcctctttgtcttgagttacaaaccttttaaatttctagctttatgcaatgttattattattcctagttgtattacattcaagygagtggaagttacttatgcaatagtatatagtaatatagtttatattagtatatatatttatattaacatatgttagcaagatatagtaatataacagtatacagcaatggtctgacaaaattgtatgtgtatttgaaaagaacgtgcactctggtttgggttaaacatctccatacataactaatggatcaaagaccattaaattttgtacttaaatcttcaatattctgacctttttgtttcagaggaacaagtaaatctcctattaacacggtttacttatcattttctgtttgtaatatcactttttgctttctatattttggagttattttgtttgctataactcctgtcgttttgcccagagatgatcccactgtggcatttcccatgggctctctcctcctcccagccccacccttacaggcatgtagcctcgtttccatctttt

SEQ ID NO: 55640 - DNA, 1387 bp, Homo sapiens
acatttgtctattgtcattttcagtgctatttagaaaatataaatttaagctgacatttgcctagttataaattatgtttcacccataaaccaaagcagttttgttgaatcacactcagtaagttatcactgaagaagtgactgtacactaccctctaggccaatgttcaggggtccctggaaaggtgagcagtcaggggctgcaggtcttctgctctcaaatcaaagcatctgttttgtcacatatcaaggttcctcataagatgctatttacaaataagtatttcacaagctttaaaaaattctgaaaaaccactgatcaaggaaacagaaatctaccagaaaaaaaaaaaaagcctcacaaacttattaatgattcttctcccttgagaaactggctaggaggagcacattcaggtaatacatcttttcattttcgtttttccatattattctacagagataattttgggcacattccatctaatttcaaatcatactacctcatacaagattttaaaaatagtaattaaaacacaacctctaagctgacaaaaattgtttgaaaaaagttgatgaaaacaaaagtttaaaacaagtttaaaacaaaaaaacttggctcaaactttgtgactgggcaactcctttaaaagtaaacattcagaaaaaacattcagaaaaagttcaccaagtgtttgagtaagtttagagggaaagtagagaggggttggacacgaagtgggcattgaaaaagatagaattgggggataaaaaacatgggcaaataatttttctaagaaaaaaggaacagaatgagcgaagggataaaggaatgaactgttcccaatgagaaagaaytcgatttggtcaggacattgttgaagggcaataagaaatgattgtgaactgagattgtagccagctaatgaaaggttctcaacaccagagtaagaacttgggctttttcagtaaaaaagaaggaagtgcagatatacttccttttattgtgcatcaccttattgcgttttgcagatattgtggttttgatgaattggtttctttcaatcctgtgtccaacaagtctatgagtgccatttttttcaacagcatgttctcatttcatgtctctgtcgcattttggtaatttttgcaatatttcaaatgtttccattattattaaacctattttaatgatctgtaatcagtgatctttgatgtttttgtaagtatttggaggcagcatgaaccatacccatgtaaggcagtgaaagtaataaaaaaaagtgtgtgttcggactgctctcctaaccagctgttcccacatccctctctccttgagacaaaataacattgaaattaggccaattaataatcctacaatagcctc

SEQ ID NO: 55641 - DNA, 1387 bp, Homo sapiens
acatttgtctattgtcattttcagtgctatttagaaaatataaatttaagctgacatttgcctagttataaattatgtttcacccataaaccaaagcagttttgttgaatcacactcagtaagttatcactgaagaagtgactgtacactaccctctaggccaatgttcaggggtccctggaaaggtgagcagtcaggggctgcaggtcttctgctctcaaatcaaagcatctgttttgtcacatatcaaggttcctcataagatgctatttacaaataagtatttcacaagctttaaaaaattctgaaaaaccactgatcaaggaaacagaaatctaccagaaaaaaaaaaaaagcctcacaaacttattaatgattcttctcccttgagaaactggctaggaggagcacattcaggtaatacatcttttcattttcgtttttccatattattctacagagataattttgggcacattccatctaatttcaaatcatactacctcatacaagattttaaaaatagtaattaaaacacaacctctaagctgacaaaaattgtttgaaaaaagttgatgaaaacaaaagtttaaaacaagtttaaaacaaaaaaacttggctcaaactttgtgactgggcaactcctttaaaagtaaacattcagaaaaaacattcagaaaaagttcaccaagtgtttgagtaagtttagagggaaagtagagaggggttggacacgaagtgggcattgaaaaagatagaattgggggataaaaaacatgggcaaataatttttctaagaaaaaaggaacagaatgagcgaagggataaaggaatgaactgttcccaatgagaaagaactcgatttggtcaggacattgttgaagggcaakaagaaatgattgtgaactgagattgtagccagctaatgaaaggttctcaacaccagagtaagaacttgggctttttcagtaaaaaagaaggaagtgcagatatacttccttttattgtgcatcaccttattgcgttttgcagatattgtggttttgatgaattggtttctttcaatcctgtgtccaacaagtctatgagtgccatttttttcaacagcatgttctcatttcatgtctctgtcgcattttggtaatttttgcaatatttcaaatgtttccattattattaaacctattttaatgatctgtaatcagtgatctttgatgtttttgtaagtatttggaggcagcatgaaccatacccatgtaaggcagtgaaagtaataaaaaaaagtgtgtgttcggactgctctcctaaccagctgttcccacatccctctctccttgagacaaaataacattgaaattaggccaattaataatcctacaatagcctc

SEQ ID NO: 55642 - DNA, 1387 bp, Homo sapiens
acatttgtctattgtcattttcagtgctatttagaaaatataaatttaagctgacatttgcctagttataaattatgtttcacccataaaccaaagcagttttgttgaatcacactcagtaagttatcactgaagaagtgactgtacactaccctctaggccaatgttcaggggtccctggaaaggtgagcagtcaggggctgcaggtcttctgctctcaaatcaaagcatctgttttgtcacatatcaaggttcctcataagatgctatttacaaataagtatttcacaagctttaaaaaattctgaaaaaccactgatcaaggaaacagaaatctaccagaaaaaaaaaaaaagcctcacaaacttattaatgattcttctcccttgagaaactggctaggaggagcacattcaggtaatacatcttttcattttcgtttttccatattattctacagagataattttgggcacattccatctaatttcaaatcatactacctcatacaagattttaaaaatagtaattaaaacacaacctctaagctgacaaaaattgtttgaaaaaagttgatgaaaacaaaagtttaaaacaagtttaaaacaaaaaaacttggctcaaactttgtgactgggcaactcctttaaaagtaaacattcagaaaaaacattcagaaaaagttcaccaagtgtttgagtaagtttagagggaaagtagagaggggttggacacgaagtgggcattgaaaaagatagaattgggggataaaaaacatgggcaaataatttttctaagaaaaaaggaacagaatgagcgaagggataaaggaatgaactgttcccaatgagaaagaactcgatttggtcaggacattgttgaagggcaataagaaatgattgtgaactgagattgtagccagctaatgaaaggttctcaacaccagagtaagaacttgggctttttcagtaaaaaagaaggaagtgcagatatacttccttttattgtgcatcaccttattgcgttttgcagatattgtggttttgatgaattggtttctttcaatcctgtgtccaacaagtctatgagtgscatttttttcaacagcatgttctcatttcatgtctctgtcgcattttggtaatttttgcaatatttcaaatgtttccattattattaaacctattttaatgatctgtaatcagtgatctttgatgtttttgtaagtatttggaggcagcatgaaccatacccatgtaaggcagtgaaagtaataaaaaaaagtgtgtgttcggactgctctcctaaccagctgttcccacatccctctctccttgagacaaaataacattgaaattaggccaattaataatcctacaatagcctc

SEQ ID NO: 55643 - DNA, 1217 bp, Homo sapiens
gtgtaattacacatttttcaaaggagggcaaaacgccttaggcatttgtacttcatcttcagagttgacctgatcctccttctgctgactctgactctctctacccttcaggactcttgtttgcctctgctgctggtctctcggctgccagctgaactgctttgattgacaacttaggtgttcaagacttttggaatgcacactttagccttcctggggctgctccatcctttttactccctcaggctggggaacccactgtttggggctgccctttccacagcactttcttcagggagggacttgccgtttggtaactgacacccctcacccccaccacttctcttctgaggagatggaagagctgcagcatagaagaagctggggaacaggcccaaaaccaagggccccagagtctaggtgggattcctttggctctggccctaggcctggcatctgagtattatagagaaactcattttatgtttatccaggggttcttgcattgcctgtgatttctgaggatgcttttaaatcactagtattcactgcctctactagaacttctgtacactggattttattccccccagctataagggcttgtgaaaatatcttaaagagtagagtaagtagctcgggcaggcttgcatttgcaaaagcccaccctcackgatggaagactggtgggaggcccttgtgataggttgagggaaagaagctgaggttttagttggggcccaggattggggtggaggggaggagatgggtgtgagttttccccttcccttctctgtgggcgatgctccacatacggtggcaaggaaagttttctgcattcttcaaagcatgagcagagatcttttgcatgctgtttccacgggtgtttcagggagctctctgtaataagggttccctttgtggcagttggcagtcggttccaagctcatcattttgttgcagcaggacttggcaggggcatgggagaacaagacttctgctgttcctttgccactctgagctctgcacccgtacctatgagggctacctctttcctccatcctgttccacctgtcctcttcctgccattcttttgtccaaacctgtgggaggctgcattcaagttcacagaaaaggggtacctgtagtcaaaaagggtaggaggatgggaggagaggattaaggaaaagccaacttttgcctcagatgcccggctg

SEQ ID NO: 55644 - DNA, 1010 bp, Homo sapiens
caaagacgttctaaagaagaatgaaggaggagctgccatcactgtggggaaaattaggagagagaatcttaaggagtcacatttgagcttggtcttgcaggagagaaagttcgcctgattgagacagggatgtctgcttgactccctcgtctatcgagtgggaaagatagagcacccatctctcagagaagggagaattaagagagtacgtatttaaatcctggcgcatggtatgtatgtgcaggaacccaccttataaaacctgaaacaggctgcaaaaatctctggaccaagagtcagaagcctgaatcccagcctgagctctgtccccagctacctgcaggactctacgttcgtctcttcccctccctgtgccatcactcccacgtgtctaaaacgatgtcaacaaaactgtcctgccacctctcatgacaggcaaatgaaatcaaagattgggaagcacattgaagagttaagtccttggcaatgcaaggcgttatttttgtcacaaatacagtacactttcctgagtccaaatatgataggaaattcaggaaggtagggcaggaagaaaaggaatcaaaaatctgttctactgcagagagtaaagaaggcttccaaggatgtctgagccaagcctccaccttcaagtcctctcctccctgcctccatatgggatggtgctttaggctctttcaactggaccatgaacatgtcccttcgaatctaatgctgaatggaaggtttctctctgctaaagttctggcattagggtcactcatctccctttcccagataaaaggaaaaaaaaaaaaatagttctgggactggagtggcttccccattcttctcacagagtcaagggtcctgatgagggctctccagggtacagaggcaaaggtggtgytccatgcctaacttagtcccttaatcctcactttaagccaaatttaaaagtcttcaaagtggatctctgatcagaaggaaaatgtttaattgaaaaagctgct

SEQ ID NO: 55645 - DNA, 1884 bp, Homo sapiens
atgcctcctgaggtgaccaggttctcaagactaactcmaaagaatctgatggagcaggctggggccaatgtgtggctttcaatgagccctatcccttccaggaggaacagatactgcttcaggggttcctgctgctgggtgggcctagcattagaagagaaggcatgaggcatcccagtggacagtgccatggagctgtgcaaacgtgatgtccctgtccctgccacaggggttaccagctgaacagaaccaatattcccatggctggtcaaggaacccctctaaaagccagtgctggggttaccagcagattcctgttctttggttccttcttgtctccattacttcaaacggtcacaatctttttgaaataaatcacattttctttcactttggaaagtctaattacatattacaccatcatagcaactcttaaacaaactcacaaccttgcaaatggcttgttccatccatgttgtgttgtttctttgctactttcaccctctgttcctatgtcccattctcatgtcttttgcacagatcctggggtcagcctcttataggtccccagctgccaactaacaacactgcagaccaaccacaaaggtggagaagccacacggaacgtgcctcctctgaggccgggccaggagaacagctttggcccaggaggagcctgtgccatgcgtggctgatgtcaacccggcaagcaagtcgccccgtgggtaggggatctgcagacaggaagggagcggttgcccacacccagttcatgatggtgggggtgtgtgtgtttgtgtgtgtgtgtgtgtgtgttgaactgtgcagtgttaggggcccaatgtgtagagtgcagagccaccatttgctgccttttacctcctgtttgttgaaaactgaccttagagaggagggcacagcaggaatgaagggtgaaggcacctatttctggactatcaacagcgctgcctgagatcccagtggtgtctgccagactccttcaccgccacatagaatgggatggaagctgctggaggtgcctccctagaggcccatcagacacccagggctggtggctgaaaagaaagggcttgtcttggtttctgtttccccatacacaggaagggcccaggctggacctactcaggacctatttcctcctgaggcctgagagctgagggaacctcgaaggcagaactctacggatcccttgcccaactggaaggtcagagtctgggccaggagaggggcatagttcttccctggcctccccacccaccctccgggccctagctcttctatttcccacaggaacaccatctaccagcagggcagaaaaaccagggggttgctatgtcttcactgagaggctttctgttctctggccagacaaaaacaaatgggcattaatacaagaactggccaggcacggtggctcatgcctgcaataccagcactttgtgaggccgaggcaggtggatcacttgaggccaagagttcaagaccagtctggccaacatgatgaaacccttgtctctattaaaaatacaaaaactaactgggcatggtggcaggtgactgtaatcccagctactcgggaggctgagacaggagaatcatttgaacctgggaggcggaggtggcagtgagccgagattgtgccactgcactccagcctgggtgacagagcaagactccaaaaaaaaaaaaagaaagaaagaaagaaagaaagagtctacttggtgggactaaagccaaaccagagggagccagagccaggagagggagagaggcggattcttctttatgttttttaatccaggacattttatttaatagtagggacagcttcttgacatgatgtgagcacttgtattcagcagt

SEQ ID NO: 55646 - DNA, 1884 bp, Homo sapiens
atgcctcctgaggtgaccaggttctcaagactaactccaaagaatctgatggagcaggctggggccaatgtgtggctttcaatgagccctatcccttccaggaggaacagatactgcttcaggggttcctgctgctgggtgggcctagcattagaagagaaggcatgaggcatcccagtggacagtgccatggagctgtgcaaacgtkatgtccctgtccctgccacaggggttaccagctgaacagaaccaatattcccatggctggtcaaggaacccctctaaaagccagtgctggggttaccagcagattcctgttctttggttccttcttgtctccattacttcaaacggtcacaatctttttgaaataaatcacattttctttcactttggaaagtctaattacatattacaccatcatagcaactcttaaacaaactcacaaccttgcaaatggcttgttccatccatgttgtgttgtttctttgctactttcaccctctgttcctatgtcccattctcatgtcttttgcacagatcctggggtcagcctcttataggtccccagctgccaactaacaacactgcagaccaaccacaaaggtggagaagccacacggaacgtgcctcctctgaggccgggccaggagaacagctttggcccaggaggagcctgtgccatgcgtggctgatgtcaacccggcaagcaagtcgccccgtgggtaggggatctgcagacaggaagggagcggttgcccacacccagttcatgatggtgggggtgtgtgtgtttgtgtgtgtgtgtgtgtgtgttgaactgtgcagtgttaggggcccaatgtgtagagtgcagagccaccatttgctgccttttacctcctgtttgttgaaaactgaccttagagaggagggcacagcaggaatgaagggtgaaggcacctatttctggactatcaacagcgctgcctgagatcccagtggtgtctgccagactccttcaccgccacatagaatgggatggaagctgctggaggtgcctccctagaggcccatcagacacccagggctggtggctgaaaagaaagggcttgtcttggtttctgtttccccatacacaggaagggcccaggctggacctactcaggacctatttcctcctgaggcctgagagctgagggaacctcgaaggcagaactctacggatcccttgcccaactggaaggtcagagtctgggccaggagaggggcatagttcttccctggcctccccacccaccctccgggccctagctcttctatttcccacaggaacaccatctaccagcagggcagaaaaaccagggggttgctatgtcttcactgagaggctttctgttctctggccagacaaaaacaaatgggcattaatacaagaactggccaggcacggtggctcatgcctgcaataccagcactttgtgaggccgaggcaggtggatcacttgaggccaagagttcaagaccagtctggccaacatgatgaaacccttgtctctattaaaaatacaaaaactaactgggcatggtggcaggtgactgtaatcccagctactcgggaggctgagacaggagaatcatttgaacctgggaggcggaggtggcagtgagccgagattgtgccactgcactccagcctgggtgacagagcaagactccaaaaaaaaaaaaagaaagaaagaaagaaagaaagagtctacttggtgggactaaagccaaaccagagggagccagagccaggagagggagagaggcggattcttctttatgttttttaatccaggacattttatttaatagtagggacagcttcttgacatgatgtgagcacttgtattcagcagt

SEQ ID NO: 55647 - DNA, 1884 bp, Homo sapiens
atgcctcctgaggtgaccaggttctcaagactaactccaaagaatctgatggagcaggctggggccaatgtgtggctttcaatgagccctatcccttccaggaggaacagatactgcttcaggggttcctgctgctgggtgggcctagcattagaagagaaggcatgaggcatcccagtggacagtgccatggagctgtgcaaacgtgatgtccctgtycctgccacaggggttaccagctgaacagaaccaatattcccatggctggtcaaggaacccctctaaaagccagtgctggggttaccagcagattcctgttctttggttccttcttgtctccattacttcaaacggtcacaatctttttgaaataaatcacattttctttcactttggaaagtctaattacatattacaccatcatagcaactcttaaacaaactcacaaccttgcaaatggcttgttccatccatgttgtgttgtttctttgctactttcaccctctgttcctatgtcccattctcatgtcttttgcacagatcctggggtcagcctcttataggtccccagctgccaactaacaacactgcagaccaaccacaaaggtggagaagccacacggaacgtgcctcctctgaggccgggccaggagaacagctttggcccaggaggagcctgtgccatgcgtggctgatgtcaacccggcaagcaagtcgccccgtgggtaggggatctgcagacaggaagggagcggttgcccacacccagttcatgatggtgggggtgtgtgtgtttgtgtgtgtgtgtgtgtgtgttgaactgtgcagtgttaggggcccaatgtgtagagtgcagagccaccatttgctgccttttacctcctgtttgttgaaaactgaccttagagaggagggcacagcaggaatgaagggtgaaggcacctatttctggactatcaacagcgctgcctgagatcccagtggtgtctgccagactccttcaccgccacatagaatgggatggaagctgctggaggtgcctccctagaggcccatcagacacccagggctggtggctgaaaagaaagggcttgtcttggtttctgtttccccatacacaggaagggcccaggctggacctactcaggacctatttcctcctgaggcctgagagctgagggaacctcgaaggcagaactctacggatcccttgcccaactggaaggtcagagtctgggccaggagaggggcatagttcttccctggcctccccacccaccctccgggccctagctcttctatttcccacaggaacaccatctaccagcagggcagaaaaaccagggggttgctatgtcttcactgagaggctttctgttctctggccagacaaaaacaaatgggcattaatacaagaactggccaggcacggtggctcatgcctgcaataccagcactttgtgaggccgaggcaggtggatcacttgaggccaagagttcaagaccagtctggccaacatgatgaaacccttgtctctattaaaaatacaaaaactaactgggcatggtggcaggtgactgtaatcccagctactcgggaggctgagacaggagaatcatttgaacctgggaggcggaggtggcagtgagccgagattgtgccactgcactccagcctgggtgacagagcaagactccaaaaaaaaaaaaagaaagaaagaaagaaagaaagagtctacttggtgggactaaagccaaaccagagggagccagagccaggagagggagagaggcggattcttctttatgttttttaatccaggacattttatttaatagtagggacagcttcttgacatgatgtgagcacttgtattcagcagt

SEQ ID NO: 55648 - DNA, 1884 bp, Homo sapiens
atgcctcctgaggtgaccaggttctcaagactaactccaaagaatctgatggagcaggctggggccaatgtgtggctttcaatgagccctatcccttccaggaggaacagatactgcttcaggggttcctgctgctgggtgggcctagcattagaagagaaggcatgaggcatcccagtggacagtgccatggagctgtgcaaacgtgatgtccctgtccctgccacaggggttaccagctgaacagaaccaatattcccatggctggtcaaggaacccctctaaaagccagtgcyggggttaccagcagattcctgttctttggttccttcttgtctccattacttcaaacggtcacaatctttttgaaataaatcacattttctttcactttggaaagtctaattacatattacaccatcatagcaactcttaaacaaactcacaaccttgcaaatggcttgttccatccatgttgtgttgtttctttgctactttcaccctctgttcctatgtcccattctcatgtcttttgcacagatcctggggtcagcctcttataggtccccagctgccaactaacaacactgcagaccaaccacaaaggtggagaagccacacggaacgtgcctcctctgaggccgggccaggagaacagctttggcccaggaggagcctgtgccatgcgtggctgatgtcaacccggcaagcaagtcgccccgtgggtaggggatctgcagacaggaagggagcggttgcccacacccagttcatgatggtgggggtgtgtgtgtttgtgtgtgtgtgtgtgtgtgttgaactgtgcagtgttaggggcccaatgtgtagagtgcagagccaccatttgctgccttttacctcctgtttgttgaaaactgaccttagagaggagggcacagcaggaatgaagggtgaaggcacctatttctggactatcaacagcgctgcctgagatcccagtggtgtctgccagactccttcaccgccacatagaatgggatggaagctgctggaggtgcctccctagaggcccatcagacacccagggctggtggctgaaaagaaagggcttgtcttggtttctgtttccccatacacaggaagggcccaggctggacctactcaggacctatttcctcctgaggcctgagagctgagggaacctcgaaggcagaactctacggatcccttgcccaactggaaggtcagagtctgggccaggagaggggcatagttcttccctggcctccccacccaccctccgggccctagctcttctatttcccacaggaacaccatctaccagcagggcagaaaaaccagggggttgctatgtcttcactgagaggctttctgttctctggccagacaaaaacaaatgggcattaatacaagaactggccaggcacggtggctcatgcctgcaataccagcactttgtgaggccgaggcaggtggatcacttgaggccaagagttcaagaccagtctggccaacatgatgaaacccttgtctctattaaaaatacaaaaactaactgggcatggtggcaggtgactgtaatcccagctactcgggaggctgagacaggagaatcatttgaacctgggaggcggaggtggcagtgagccgagattgtgccactgcactccagcctgggtgacagagcaagactccaaaaaaaaaaaaagaaagaaagaaagaaagaaagagtctacttggtgggactaaagccaaaccagagggagccagagccaggagagggagagaggcggattcttctttatgttttttaatccaggacattttatttaatagtagggacagcttcttgacatgatgtgagcacttgtattcagcagt

SEQ ID NO: 55649 - DNA, 792 bp, Homo sapiens
gatcccctgcyctaaataggacaagatggccaaaacaagacatttgacactgtgcaggtgagactggcagcagtttactagtcacaaatacagtctactggggaaagatatcataagccacacagggccacatggggtcaccctcaggagcagagtgaaccagccagggctgtgggaggcaggccttgtagtaataaaaggatgagatgccccggattcctgtaggaggatgtgattggcttgtttgaatagtttctcaggctggcagagaagtgaaacccattaagtagaaaactgggtggcatgcagctggtccagatgataggaaattagccaggtggggaccgagggcaaggatatatctggtgagaggcagggaactcagggttaggtctttggggccctgtgaggcataaaatgtcacagcagcacgtggtatttcaggtcttacaatacaagcctgtgccctcagctgtgacccatttgcacccagaacaacacactgctggttacagttatttaaggaagcatcttttcctgaggaccttaatgaagacctgtgctcactccaccctcctctcctctctgtggtggctgctgcctggattccagcttcagccactggacttgggatttggaactgatgcctgtggaactgggtctctgtgaagagtggggaacctgctgagacttgttcttgggaattgagctatagactagaagattgtgcagtaaacaagaagaaagatcaccaagatcgtgacattggagaccttgctctactttaataaa

SEQ ID NO: 55650 - DNA, 792 bp, Homo sapiens
gatcccctgctctaaataggacaagatggccaaaacaagacatttgacactgtgcaggtgagactggcagcagtttactagtcacaaatacagtctactggggaaagatatcataagccacacagggccacatggggtcaccctcaggagcagagtgaaccagccagggctgtgggaggcaggccttgtagtaataaaaggatgagatgccccggattcctgtaggaggatgtgattggcttgtttgaatagtttctcaggctggcagagaagtgaaacccattaagtagaaaactgggtggcatgcagctggtccagatgataggaaattagccaggtggggaccgagggcaaggatatatctggtgagasgcagggaactcagggttaggtctttggggccctgtgaggcataaaatgtcacagcagcacgtggtatttcaggtcttacaatacaagcctgtgccctcagctgtgacccatttgcacccagaacaacacactgctggttacagttatttaaggaagcatcttttcctgaggaccttaatgaagacctgtgctcactccaccctcctctcctctctgtggtggctgctgcctggattccagcttcagccactggacttgggatttggaactgatgcctgtggaactgggtctctgtgaagagtggggaacctgctgagacttgttcttgggaattgagctatagactagaagattgtgcagtaaacaagaagaaagatcaccaagatcgtgacattggagaccttgctctactttaataaa

SEQ ID NO: 55651 - DNA, 792 bp, Homo sapiens
gatcccctgctctaaataggacaagatggccaaaacaagacatttgacactgtgcaggtgagactggcagcagtttactagtcacaaatacagtctactggggaaagatatcataagccacacagggccacatggggtcaccctcaggagcagagtgaaccagccagggctgtgggaggcaggccttgtagtaataaaaggatgagatgccccggattcctgtaggaggatgtgattggcttgtttgaatagtttctcaggctggcagagaagtgaaacccattaagtagaaaactgggtggcatgcagctggtccagatgataggaaattagccaggtggggaccgagggcaaggatatatctggtgagaggcagggaactcagggttaggtctttggggccctgtgaggcataaaatgtcacagcagcacgtggtatttcaggtcttacaatacaagcctgtgccctcagctgtgacccatttgcacccagaacaacacactgctggttacagttatttaaggaagcatcttttcctgaggaccttaatgaagacctgtgctcactccaccctcctctcctstctgtggtggctgctgcctggattccagcttcagccactggacttgggatttggaactgatgcctgtggaactgggtctctgtgaagagtggggaacctgctgagacttgttcttgggaattgagctatagactagaagattgtgcagtaaacaagaagaaagatcaccaagatcgtgacattggagaccttgctctactttaataaa

SEQ ID NO: 55652 - DNA, 992 bp, Homo sapiens
atataatgctcaagtgctatgaagctctctttaaaagttcttctatattctctttctaattttgaatcaagggctgaaaattaattcaataggctagcttttcttaatatatcaagtgagcaagcatgtttacacatgttcattttcttatggycttcaggagttggtaggaaataaaaggtccaaaataaatagattttcgcggacaaattagtagaagtaggttatgtgagatataacaaagtgaaagaacctcttcttaattggaagcttttgggtattgatggactgatcaaaacaggtgaggctggcaagaagcctgtggtttttctagatttgtggcagtgtaggaagctagaatttggctgatgggtatgagagttgctgggaaatgagctaagcttgctgtcaggaattattaagagaaggggtttacaaaacagtaacttggagccggattctcttaaagaagtctgggcccagtaccaaaggaactaaaggaaaaggcggggataagggaatggggccacgacctgagtggaacatggtctctcctcctgtaggatgatctggaaggctgtggagcaacctgaagtccccagataaacatgggaaggagagatgtgtggtaggcactgcagagaaacattgctactttataattttatctggttacaaacatttaaacggtttaaatttacaagtatttaaacagttttctgctgttacgtgtttatgtttacagttaactatttaaaatctaccaaagcaccaattaacaatttattccactctacagtttctttctaatctaattgctctgtccctatgaagtggcaaaactatagagaaatatagtgttttctcacagacatatctatttggagcattcttatggatagcgttgagtgccaaggttaccatgagtgtgcaaacataagttgaccaagaaaagtgattttcatcttgttttcccaaagggatattcaaaa

SEQ ID NO: 55653 - DNA, 992 bp, Homo sapiens
atataatgctcaagtgctatgaagctctctttaaaagttcttctatattctctttctaattttgaatcaagggctgaaaattaattcaataggctagcttttcttaatatatcaagtgagcaagcatgtttacacatgttcattttcttatggccttcaggagttggtaggaaataaaaggtccaaaataaatagattttcgcggacaaattagtagaagtaggttatgtgagatataacaaagtgaaagaacctcttcttaattggaagcttttgggtattgatggactgatcaaaacaggtgaggctggcaagaagcctrtggtttttctagatttgtggcagtgtaggaagctagaatttggctgatgggtatgagagttgctgggaaatgagctaagcttgctgtcaggaattattaagagaaggggtttacaaaacagtaacttggagccggattctcttaaagaagtctgggcccagtaccaaaggaactaaaggaaaaggcggggataagggaatggggccacgacctgagtggaacatggtctctcctcctgtaggatgatctggaaggctgtggagcaacctgaagtccccagataaacatgggaaggagagatgtgtggtaggcactgcagagaaacattgctactttataattttatctggttacaaacatttaaacggtttaaatttacaagtatttaaacagttttctgctgttacgtgtttatgtttacagttaactatttaaaatctaccaaagcaccaattaacaatttattccactctacagtttctttctaatctaattgctctgtccctatgaagtggcaaaactatagagaaatatagtgttttctcacagacatatctatttggagcattcttatggatagcgttgagtgccaaggttaccatgagtgtgcaaacataagttgaccaagaaaagtgattttcatcttgttttcccaaagggatattcaaaa

SEQ ID NO: 55654 - DNA, 607 bp, Homo sapiens
tgttttagaaatatggcttagtcaaaaagcaaacacatataaagaagattctttatatttctttgcccaggattttacacgtacacacatgcacacacatacacattttaaatcaagtttattcaccacctatctctagcttccttgaataattcaaccgttacagaaaaaaattctaaaaatattctttccttttggatctgaaatatattgatataattcaattgcatctacccaggcgttcttcagttcaatagcctcctgaatttgttgttattgttgctctgaaagttaayggggtgtggagtgaacaaaatgtttgtgtagcagtgagggtttctagaaagagggattctacttttccaaatatgtatgtaggaggttttagtatttgtgttatttctgagttcttatagtggtttagtggagtgatttaaaataaggtcagcccagagtagtttccgcaacataaaggatagttttgttgaagatcaagtttatcccctgcttcttttactgctacccaatacagcagtcctatttcttaagagttcacatttccttcttttacaatgttagaggaaacatatttttggggtgttctgtc

SEQ ID NO: 55655 - DNA, 607 bp, Homo sapiens
tgttttagaaatatggcttagtcaaaaagcaaacacatataaagaagattctttatatttctttgcccaggattttacacgtacacacatgcacacacatacacattttaaatcaagtttattcaccacctatctctagcttccttgaataattcaaccgttacagaaaaaaattctaaaaatattctttccttttggatctgaaatatattgatataattcaattgcatctacccaggcgttcttcagttcaatagcctcctgaatttgttgttattgttgctctgaaagttaatggggtgtggagtgaacaaaatgtttgtgtagcagtgagggtttctagaaagagggattctacttttccaaatatgtatgtaggaggttttagtatttgtgttatttctgagttcttatagtggtttagtggagtgatttaaaataaggtcagcccagagtagtttccrcaacataaaggatagttttgttgaagatcaagtttatcccctgcttcttttactgctacccaatacagcagtcctatttcttaagagttcacatttccttcttttacaatgttagaggaaacatatttttggggtgttctgtc

SEQ ID NO: 55656 - DNA, 1264 bp, Homo sapiens
tgcagtaaacacttttagaatgtttagtggatatttcttacttgcagctgcacaatctctgaacrccttctatttgggaaaatttcaaggaagacagacagggttttaccttccacagtgaaaactgaggagagggacatatttgttgttgtctaggtaggtgtttggtagctctgtgtgggcttctgacctaacctcaccttgggctactctttgctggggctttgaatctggagtggtttatgtaaataagcaggggccagtctggaaaccattctaggagcagtagcagatgcagtgaaaggaaagactgtaacttctctggaagcaggagtgtcaccagtgaccctgtggccatggttgtttccataactctgatgtggtcttgaatggcgacaggactttggcagttattctgggtgtcaactttccaccaatttttgcattttgactcttcaactttccaccatttttttttcaatttggcatccctttcaaatagttttcatcctctttgaataatccaatgttggtttattttgtttgtaaccaaaatcatagctaatagagatgaccgaagtattaaataccataatggctatgggagatgtagtggacctgtcactagacttgggattggaaagccttatttgtaattcttgctttgcagttctcagttgtatgtgacatggatcattagctgagcttcgctatctttttgactttcagtggctactccaaaaataatcacacaaggcaggatttcatctatccctaatattctcagaaggttcatcagtggcatgatgacagaaaaagtgctacaaaaggtaggaattggggaaaattattgtgaattgaaatatctgagaaaggatttgcaatcccagcttttctagcatatacttagttttctttttttttttattagatgcacattcaaggatctttctggctacatacagaaaatttgaaaaataaaagagaaatattattaatagaggctttaaaatatattaggggggtaaaaggagaaactacaatttagagcagttgccctggcaatggcagtgcaagctgcatccattgtttcaagtattaatcagtcaacttgttattgaaagcttgccactagaaagacattatgtaatgggtgagacagaagatatgcaatactctcccttcccttaaaacataaatacatgatgacaaaagctatgagtcaaatttctccctatttatcaatatatagctctaccatgca

SEQ ID NO: 55657 - DNA, 520 bp, Homo sapiens
ttctataaagatccaatagtatcttaaataatacttaactaagcacaggagagcagtacttacaaaaggaaatactaaatgttatgctaaactggcttcacaccatgtttttaatcttcttgatctttgttaactgcacaattctaatttagaataaatgagcagatagttcattttggcaagaagacaatagcaggagctataaaaggtttctgaaattcccaggcaataattattttactatacttgtatctgcagaagggatttgcactaagttctaattggaacttgaacctccaactaccttaagctttgaggtacatgatgaaatttttttgagaaatcgcataaaccaataattttrtattaatgcacatttgtaaatagtgtaaaagtgttttataagaataacagaagtggctggaaaataggagtttgccagtaattaataaaaaatagttgggccgggcgtggtggctcacgcctgtaatcccagcactttgggaggctgaggcgggca

SEQ ID NO: 55658 - DNA, 1151 bp, Homo sapiens
gcattttattaagtacttaaaaaaaacttgaaccatgtgaaagtattacctatttaaagttaaactaaagaatacttaagcaaccaagtcagaaagaattcgtaatgtagagattggtgtagactttctcagaggaagacattcaatgaagccattgtttctgaggcttcttgttaaaacaagctacagacttccacgtgtatgaaaattgttatggaagacaaaagtgccccaacaccttgtcttctttgaccttgaaaagcaaaatcattggtttttcagggagtgctgctgggctagcctcatcattcaggtggtcttgccttcctcagactctgcctctggctctacctccagtgccaagaacaatgcttgacaccaactcagtgctagttagtatttattgaacaattaaatttagggagcrcctatcactgtgtaagtagttttagtcatagatattgaatcagtggtcaaaggggaatgagaattttttttaatgaaacatccattttaacttgacaatgttttggaacctaaaatcagaaagaacctttttttttttttttttaatccacctggaaatcaggtgtagctccctgggtcagttttatttttattttttattttttagagatgcggtctccctgtgttgcccaggctggtcttgaactcctgggctcaagtgatccttctgttttggctgcctaaagtgctgggattacaggtgtggggcactgtgcccagccttgggtcaattttagaaaatactccctgtccatcacagactcaccataaaacaaaaatcatgtttcttcccagaagaatgggaggaactacttgcatgttttttctatattcttttcagtgtgccacatctcaggggcagggaaatattccttggagaagacattgacagtctcttggtggaggagcaaatgaagggttgcttctactgggtgacttttatccctgaatagagatatgttactttaaaaaatttttaacatttgaacaattttcatatgtttttcaagccttgggaatgctgagtatatcagaatatgaaactagaatgagagcagaaaaaacagccttcagatttccaaaatgaaaatagaaaatagaagaaaaagaagtgtgtccttata

SEQ ID NO: 55659 - DNA, 799 bp, Homo sapiens
aggattgccagttgtggccttggggcttcccctgtggtggcaactaagctagggactgtcaattattctagatctgtctgcctgagagctcaggaaagccagactgtagtgtggagagagttatagggagaagaaaccactgtgtcactcctgggcttagtccacagtctgagctgtttctaagcatctcagacagaggccccaaagtccttgaactggaggcaattggaaagcaactgctttgatgaggattgctgattagagagagctcctggaacaagaaaaggaggcaagaggacatcctcaaggactcccactggaaatagaatttggtgactcagagtgtcctaagttccagaagttgcagtagaatgagaaggcatgtgtgtatgtgtgtgtgtgtgtgtgtgtgtgtgtgtgtgygcgcgcgcgcgcatgtgtgcctgtgtctttttggcctgtgtgtgcatgtgtctttttggcctagctggtaaaaggtgtcatgggttgaattgtgttcctcaaaaagatatgttcaagtcctaatccctggttcctgtgaatgtgaccttatttggaaatcgggtctttgcggatgtaatcatgttaagatgaggtcatgctggattggggtgggccttaatccaacgactggcattcttataaggagagagaaatttggacacacacacaggatgaaggccatgtgaagtgaaggcagaggttggagcgatgcatctacaagccaacaaatgccaaggaatatccacaacacctggaagctggtaaagacaagggt

SEQ ID NO: 55660 - DNA, 665 bp, Homo sapiens
tcttccttcccggttctttcgccgcctgcggctcctcgtccctgctcgtcccctttcccttccctcctcgccttcaaggatgcgccaggcaaaccctcgtgcctccctcaggcaggccatggagggctccaggcaatccttttctttagcctccgaagccccaaagaaagaaacttgaatccgttatgacatctcagggcaaaacccctcaaggtggagagaccactttcaatgcgacccgactgcgcgggtggaggtgcgagtgaggggtaggcgatgatgtaggggatgggggagacgtgtcagctacagctttaggcagatacaccgcctttggtctgctctccagcaagccagatcagttcaccttttctacgcgacctttgggacgcgcaggcagagtgcacggcaccgggtgggagctgcttgcgcgcagggctaggaaggcggggttgccgcgcgggggcgctttcctcccgcttctgcgcccaggcagggcacccggcgttcgctccactgggtgttggggaytggggactccagaggaaaagacccctggggaccaggtctggggcgggcagaggagggtcagggcctgtaggggagcgtggtcgctggctgtcctggctgtaattacattagaaaatcagacccatgagcccgga

SEQ ID NO: 55661 - DNA, 1010 bp, Homo sapiens
gtttgactgctgtgtcacctgacacttctttgaaactaaaggtataaagttactaacccatcatcatgagggtaaaatttttgacttattttccagtgatggtaattagccgatgctagtttacattaatttattccactaaaatgtactctagagatctaaattagtacttataccaatcaacctaatttattatcaaggaatcactgagacactatcagggaattcactagacctatgataatcaagccattttatatattacggaattcatttttgaaaacaaagagaagattagaaaatatgaaagtattttgtacttactcatctgacataatttttttgccagctggtactctcgggccatttctgctctcagaaactggaaaacattaaattcttcagataagtgaatttaaatgttgtcaactctaaactccctagaaaatcttccattaatcattagttattttgcttttaacacttccacatgtttttccaggagtcagtctataatgaatagtgaatcaattaatcaaggaaattgaagtacctctgatggcaaagccacatggggtaaggatgatacctctgctttcctgcagccatactgtgtatgtactactgaacaatttgagaatatgtaggttgattcaactggcacagatagtgaagacattaatcactttattttaatattcctttggttcagatacaggtttcatttgtaacttagtccataattatacgacagttgaaaaaaatgcagayttacaaaatgtacatttgatattttccagcattgctcttatatcatccagttttgtttttattatttttattatacttttcttgttacaaaataatacatctttttttatgtaggaaatttaaaagctaaatacacacattctgtccccaattaagaagcacttaatttctaccatctatgaaaaataaacacatttatttttaacatcttcatgtatattctttcaagtattattttc

SEQ ID NO: 55662 - DNA, 718 bp, Homo sapiens
tcctgcctcccacccctgtctccaacacaagtgctcctataaatccatcaagaataggtattcctttggtcaggtgctgtgtagmttaatttaaaaatacatttatcttaccgtttcgcagcttgcaatgtggaatggacgatgatttagaacaaagatacatagatacagaactctgagatgtcagaaaaacttcccaaacatacacagacatttatacacatatagaaaaagtctgaaaaaatcttcgctaaatgattaatagtagttacatttgtagagtggaactgagatcaggagatggcagtaagggagattttttccccactttttcaatattgtttagattttttaatatgctagaattttaaaatattttttaaatcaatagagaaaaggaagtgccaacgtttaaaataaagcaaagccctaaagctgttataagggaaggagcaggcggtgagcgcgaggccgaggtcatccagggagcttcgtttctctgcaggaacagcccacagaggcggctgtgagagtagttcattcagcctggagtctaggacagggcagagtcccacctcagccatgtgctgaagcacagtacatgtagtggaaacctgctcagactttgacaccagagagtgtggggtctgagtcctacgtatgccactgtctagcttgagatttcaggagatgatgactaactgtaaatggcagctgt

SEQ ID NO: 55663 - DNA, 1359 bp, Homo sapiens
tgttatccccaatttctttttcctctataaagtgggaatggctatggtaggttttttgtcctgcttaggttgacaaaagttaaagaaaaaaaaaaaaagcttgagaaccactggtagataaatgttggcgacagtccctcacaacttcccgtctggggttccacacaaaacaggcatgactagccttgcatctacctcacgttgccatcatcctttggtctgctgggtgcaaagtcaagaaacctgaaaacaggtaacaacagaatccgtattcaacagttcttactcaagaggctgcataagttttaagactcactagagattgtcagtgaggataattgaaggctgtgcttccaacaacaggattgtataaaacaaagtgaaccacgcaaaaagcaggcctaggagtcctggtttgtaccaagttgatcccaggtatgtttaaatgacagtacgccatgatacrctctcccaaaaattgtttgactctactaggagtggaataagaacaaataaaatttttttctagtttgacatttcacagaaacaaattttaaaagcagcacgatttgtttcaagaaagaacatttctgagcaacatcaaggtggcaaaggaagtggtgggttctcctctggagacctttaaattaagagatatagttctgtttaaccacaggagtcagaaacctgttgactttttggatcccttttcaaacatcacactgaaagaaaagaaaagagcaagtagaacagactaaacaacaaattatggcttttgctataactgaaataatttgaacaacaaaatgaataatgatagtattggattgtagcccaaagaacaaagttcactaataagttcatgctgatacaaataaccaacaagttaataagtgggataaaaggactagtcttccttacagttgaattccaattaatacatatagaaggatgccgagcatggtggcatgcacctgtaatctcagttactcagggaggctgaggtgggaggattacttaagctcaggagtttgaggcaacacagcaagaccccatctcaaagaaaaagaagtcttaataaatgtagaaggaaagagaaaaacagaaaatcaccattagacaaacaccactataataattgttgcagacaagatctaccaatgaatgctaaaactagtgggtgaaagttccaggaggaacagaatttttacaattccaaagtgtctcccccaagatatttattaactacaaagggaaaaatagtgattttgaagtagagaagccaggcagaaaccaccttaaccaaatgaccaaggtcaacatcaccagtaataagatagtaataagacatcaatatct

SEQ ID NO: 55664 - DNA, 1359 bp, Homo sapiens
tgttatccccaatttctttttcctctataaagtgggaatggctatggtaggttttttgtcctgcttaggttgacaaaagttaaagaaaaaaaaaaaaagcttgagaaccactggtagataaatgttggcgacagtccctcacaacttcccgtctggggttccacacaaaacaggcatgactagccttgcatctacctcacgttgccatcatcctttggtctgctgggtgcaaagtcaagaaacctgaaaacaggtaacaacagaatccgtattcaacagttcttactcaagaggctgcataagttttaagactcactagagattgtcagtgaggataattgaaggctgtgcttccaacaacaggattgtataaaacaaagtgaaccacgcaaaaagcaggcctaggagtcctggtttgtaccaagttgatcccaggtatgtttaaatgacagtacgccatgatacgctctcccaaaaattgtttgactctactaggagtggaataagaacaaataaaatttttttctagtttgacatttcacagaaacaaattttaaaagcagcaygatttgtttcaagaaagaacatttctgagcaacatcaaggtggcaaaggaagtggtgggttctcctctggagacctttaaattaagagatatagttctgtttaaccacaggagtcagaaacctgttgactttttggatcccttttcaaacatcacactgaaagaaaagaaaagagcaagtagaacagactaaacaacaaattatggcttttgctataactgaaataatttgaacaacaaaatgaataatgatagtattggattgtagcccaaagaacaaagttcactaataagttcatgctgatacaaataaccaacaagttaataagtgggataaaaggactagtcttccttacagttgaattccaattaatacatatagaaggatgccgagcatggtggcatgcacctgtaatctcagttactcagggaggctgaggtgggaggattacttaagctcaggagtttgaggcaacacagcaagaccccatctcaaagaaaaagaagtcttaataaatgtagaaggaaagagaaaaacagaaaatcaccattagacaaacaccactataataattgttgcagacaagatctaccaatgaatgctaaaactagtgggtgaaagttccaggaggaacagaatttttacaattccaaagtgtctcccccaagatatttattaactacaaagggaaaaatagtgattttgaagtagagaagccaggcagaaaccaccttaaccaaatgaccaaggtcaacatcaccagtaataagatagtaataagacatcaatatct

SEQ ID NO: 55665 - DNA, 1146 bp, Homo sapiens
aaaagatattacttatatacaatgaaacctatatttctttgcctaatagcatattaactcaataaatttttaagttttaatgacaaataactaaaatgttaggaatatcttcttatataataattacaacatgaaagctaggatgctcactattaaatagtaatgttttgtatttctgctagaatatctaacattattcatttttcaataactcacattttcctctaaattcatcattttatatatatatatatatatatmtatatatatatatatatccacctttttttaaagtaacctttttaaaattgtagaattgtatgtcaggttttcattaagtacagcccaattatattggaaataaacagaaagtgacttctggtttcattgaagaggactggcaacatagaatggtgctggagatagcaccaggaaatgctattaaacccactcagattgacaaaatagtttcacttgggtcaggaaagataaaagtctttcaagtataacttaagcaaataagatgagggcaaaatgtacagtagctgcaagtacatcaatgagatgagtgtgagccaggtggaagaaacaggtctgcaccagagaatgctaggaagtcgataaaagtatgaagaagcagataatctagccttttggaactcaaaatgcaatcaatagaccaccagcagccatgtcacctgaattcgtaggcaccactccagagctactgattcagaatccacatgtaaacaaaacaaaatccccaagtgacacgtatgtaaagttttagtttgttgtttggttcctgctcagtgttacctgacaggctgcctccgttctctgctattacagtattcatgaccttggatactcatgtcttttgtctactctatattttttgtccaaacgacttctttttgttcaccctaattatacctatttcttcttttatcaataggtatattaaaatctcattgaaaacttaagattgacactctgaataaaggtgaattaataaaatgataaaataatccaaagctacagtgaccaaaatatgaagccaacatattaaaagattaaaaataattttgtatatatacacatacatagggaatatatatatattcccaatgtgacccagtgagc

SEQ ID NO: 55666 - DNA, 1146 bp, Homo sapiens
aaaagatattacttatatacaatgaaacctatatttctttgcctaatagcatattaactcaataaatttttaagttttaatgacaaataactaaaatgttaggaatatcttcttatataataattacaacatgaaagctaggatgctcactattaaatagtaatgttttgtatttctgctagaatatctaacattattcatttttcaataactcacattttcctctaaattcatcattttatatatatatatatatatatatatatatatatatatmtccacctttttttaaagtaacctttttaaaattgtagaattgtatgtcaggttttcattaagtacagcccaattatattggaaataaacagaaagtgacttctggtttcattgaagaggactggcaacatagaatggtgctggagatagcaccaggaaatgctattaaacccactcagattgacaaaatagtttcacttgggtcaggaaagataaaagtctttcaagtataacttaagcaaataagatgagggcaaaatgtacagtagctgcaagtacatcaatgagatgagtgtgagccaggtggaagaaacaggtctgcaccagagaatgctaggaagtcgataaaagtatgaagaagcagataatctagccttttggaactcaaaatgcaatcaatagaccaccagcagccatgtcacctgaattcgtaggcaccactccagagctactgattcagaatccacatgtaaacaaaacaaaatccccaagtgacacgtatgtaaagttttagtttgttgtttggttcctgctcagtgttacctgacaggctgcctccgttctctgctattacagtattcatgaccttggatactcatgtcttttgtctactctatattttttgtccaaacgacttctttttgttcaccctaattatacctatttcttcttttatcaataggtatattaaaatctcattgaaaacttaagattgacactctgaataaaggtgaattaataaaatgataaaataatccaaagctacagtgaccaaaatatgaagccaacatattaaaagattaaaaataattttgtatatatacacatacatagggaatatatatatattcccaatgtgacccagtgagc

SEQ ID NO: 55667 - DNA, 734 bp, Homo sapiens
ttctaataaataataagtttccttaccctcattactcgacgccaaaaatgaatcaaaacctttaccaatgtattttgttggatttttgttgttgttgttgttgttgttgttgttgtttgttttttgagacacagtttcactctgtcacccaggctggagtgcagtggcatgatctcggctcactataacctccacctcctgggttcaagtgattctcctgcctcagcctcctgagtagctgggattacaggcacacgccactacacctggctgattcttgtatttttagtagagacagagttttaccatgttgrccaggctggtctcgaactcctgaccttaagtgatccgtccgccttagcctcccaaagtactgggattacaggcataagccaccacactcagcctgtattttgtttcaatattcttctaacatgcatagcaaactccagaatttagagaagcttaatggtaagacttttttaaaaaaggatgatttacatattcaaaaaaaagcaagaaaaccaattttgattatgaaggaatcaagtcattgtcagtcatgtaaaatcagaggaatcaaacaattagagggtcacaggtaagtgaaaaaaggaggcagaaagtataggctaaagtgagagaagtggactggctcaactccaaaggaagtgggtgtttgggctgtcaaaaaataaatgcaaaataaatttgtggagacaaaagggataggg

SEQ ID NO: 55668 - DNA, 830 bp, Homo sapiens
cccagtcaggctcttgtccccttttcaggaggctggagctcctggatcagctgcattaaaggcccgaggaagctgctcctggactcccttgccagccatgctacgatgcacacagatgtgggattatgccaggatgacccagccctgcccaacctccctccaggctccatttccaagactgccttaaagagagcaggctccctgcatgtaacatctggggtctgacagtgaggagacaactgtctttatctctcctcacttgccatcctgcaggcttttaagcacaaatgaggagctaatcccaggatggaaggtgccttgcccttgcccaggctcctaaagacaccagaatggtgtcacgctggcttggcagcagatgtagcgagctaaggggacaagtggggtgggcaggggttgccaccgcacagagtggggctcaccaggatggcaatggcttcaggcaggggcccgctggtcttgaggctttccttggcatcctccaccgcatcctcccactccaggcccatggcggtgaaggtccggcttgtggcttccttgcccttggggttgaggatgaagctgccggtgacctggttcttcaccactgaccggtggggggagagggtcacacagatttctgctcctctccacagggggcgggccatgaatatgaaattcaaggccttcccagtgagccttctgggctcctgtccaccggcctttccttcccacccaagccctcccgagtcagacaggtcaacacgctccctgtcaaacccacgtgcgcgcrcacacacacacacacacacacacacactcttgctgcctct

SEQ ID NO: 55669 - DNA, 660 bp, Homo sapiens
agaagtcgtgagcatcctaagctggtggtcccactgcccagcgtcccccactccctcactgggcacccaggaacatctcatttgatcacagaacctctctgaatctctgtatcctcatttgtaaactgaggatgagaccttctccatgagggtgctgggaggatcgaatgagacatgtcctgtaaactctaagggcctcygtgtgtgtgagagctgctattacttccctctttcctgaccctcttcctctccgtctcacttctgcccttccccccgtccctttttgctcctctgactctctctccctgcttcttctcacaccttaagctacttgctactgatgggatttaaatgataaaggccatgaagactccacatgactgtcctgagccgccctggccctcccgacccaaggcctggactttctcagagccaccaaccttgtccccaacaatcaaaggtgagacaaagtgtaacatctcccaagggaaaataggccccatttatactaaagtgtgaaggactgatatctggttcttttccacagcaagtctggtcagattggaggtagagaggaaagtcaaggaactcaaagataccaggaattcaaagcagaaagtgccacaggtttaaaaaaaaataaggaaggagagaggaaaa

SEQ ID NO: 55670 - DNA, 647 bp, Homo sapiens
tttttttctgctctcataatagctgccactagtcctagatacatcttctacttctagcaatatacgcttgcagaaacaggaagactcaatgaggttgggtgtgatggtgcatacctgtaatcccagtattttgggaggctgaggcagggggatcacttgagcccaggagtttgagacaaggaacatagtggcacacagtgggacctatctctacaaaaaaaaaaaaaaaagaaataggcagatgggatggtgcatcctatatcccccagctactggggaggttgaggcaggaggattgctggagcccaggagctctagaagattgaggctgcaatgagctgtgatcataccactgccctccagcctggataacatagtgatgccctgtctcaaaaagtaaataaatactctaccctttactgtgaaaacagcagcttaataartgaagatatttttggtgtccacatagcattttttaatttagaagaatatttataattcacttctaaactcaagtaatgttttacttcttatgatgaaggaacctgacataacttcttactctccttgctgcttatgatacaagaaaactctgtgaatttcatgattattactctcagtaaggatcttaaaataatcagtaatca

SEQ ID NO: 55671 - DNA, 868 bp, Homo sapiens
aataagaaaaaatctggccaggtaacccatatgaggtctttaataaaaagagaatatattgacttcttgttaaattgacagcataagcacaggcctttaactaccttccttcaggcctcatggaaatgataactagaatacaaaatagggcaaaaatcttcaaaagcactagctgttacaggtgaatcctaaaatctttttaatataggagagataggaccacatggatggaaagcaggaagggccaacctgttactcccactgctaaacaacagtaacgattgtgggaataactgactggcaggaaccctggcaggaggacaytcttaatatgttctgatttgaaggagtaatgaataaagtcaaagacaggctgggggtagggggcagacgatctcttttcactcttttttatcttagtgagtcagtggcatttgttgaaatcctcaggttcacacagattatttgtcaagcagaaggacaactggggcttgatcctttagaaagtggagacacactttagatctgacagacactggggcatacaggaagctttaaatgtaagaggagttggcacgacagcttcagcaccaaaagccacatcactctgcgcagccacctcttgttctaagtcacttttcaccccactcagactgctgagtcatccttaaactcacaatgcaaaggtacatttcacccagaggtttgagagggtaattccaacaacaatttggtcaaattttagggcaatcaaagggtctacacattctttaaaaggtcaaaaaccagttctgagtagagagctctctaaattcaagcttttatgaataaaaatgtataacatatataatgtgtatatatacacaca

SEQ ID NO: 55672 - DNA, 692 bp, Homo sapiens
tgcatcccaaggacaaatcccatcaccactgcaatatgggactgaagcaaaagcaaacagcactcctcacaactacatatatatagtgctcccactaagagtgacccttccctccccagtgatactcacacagttggtaccattctgagagcccagcttccaaagatccacatcctgccatagggctgagactaacacggctgctgctaccaacaaacaaaggagaaagaggagaggctgagcactttcgtgcaccttgaggacaaatcccactggcactgctgtgtgctgccatgagaccaaggtgcaagaaaaccatacttgccacaactacctgcctaccctgcacacacagagagtggccctgccctcccaaatggcaagctcacactacacccactactacatatacctgagcatcccatcaacaaccyagaaaccaccctgccactgcctatcacagccagtgcctgaatgtactaccaaggggcctgaggacagatctgccatcccagtcccctttccccactacttgggcacactgtccaggggcctggggattccccagcccagtccaccacagttggcaactgaacattcttgccaaggtctgagtttgggttgagacaacatgctggtaccaccacagttggaatccacccaaacctaccaccagcacacaggggtactag

SEQ ID NO: 55673 - DNA, 2715 bp, Homo sapiens
gcatggaagggagctcagatcaatagtgcttagagctgccaaggttctaaaaaggccctgggtaccaacctgaagccaaccattctgtggtaagtctggtcttcacaggtgtcacaaatttctttacgcagctctactccattctattgaactgtctacatagttggacatgggagcagaactgtccacatagttgcatgtaaaccataaatgacttattaaaaagttatgtttggatcctcatctacatatgaatttaagacaagaagtacaagaatcagcacacaagcaagttttgagggtcccacataatgattttaattattttttgttaatttattccaacatttaaaattcatgataattcacataaaaacccagattatcatcctcttgaaaaaagaattgtaaagtatagagatattggacccaaatgttggcatggcaacactctactaatgctgacgaaggctatccctttaaatggggtatgttctctacttggccgcaaaccctgtctccatgtaggctaacttgctgtcccaagagacaattgagtttatgccccctagtttaaggctcttaggaaaaccttatttctttttcacaatgtggcttcaatatcttacgtgaagacctgtcrtgataggatacaggaatctctcaatctaagaagagtttcaatcaaattccccccaatatgttctcaatttgaaccatgatccccaagaagattgacaaatgacaaattaccctgcagtttcttttgcccttcaagctagccaaggcagaagcccaatcaggtggagtcaaagcactaatataagaatgtcttaattaatcaaagtgatcaataaataatacacataataattagaaagcaaagtctgggactgatagaataaaaacaacatagcactaatctaagtaagggtgagaggtcaatagccataattcaaaaggaaaagccctaaaaatatgcagaaatagctagtaactggagtttagtccaagtttgttaacaacccactgtatgatttcacctcacacccacattaaacacagtatcttattttgggatggcagaattctgacaactacaggttgagtatcccttatctgaaatgcttagatctagaagtttcagatttaggggttctttggattttggaatatttgcattatacttaccagttcagcatccctaatccaaaaatctgaaatccgaaatgttccaatgagcatttcctttgactgtcacatcagtgctctaaaaagttttggattttggagtatgttggatttcagattagtgctaaattatatttgctaattgatattctgtgtattgttttcttactggtgaaaagacaaattgaactcaggaaagaaaaattacaaatatatagtcaaagagtcaccagatcatttgagcaacataatgagtttttatttcttaatatacagggtttaatttgttaaccacaccagaaaaagaaatgttcaaacagtcgactttctacttgaaattaaaatggaaattagcccttaggaaacagtgatgactttaagtttatacatcagtggctggttcatgaattattaactgattttaatgatcctggctatattttatttgaagttattctcctacttgcaacgacttttgaacccacaaaactctttcatccattctccacagacacagtacactttcatgagcactgacatttgaaaaggatccatatactcacagaatgtaaagataatacacatgcatataattgatacaaaggactctggtcatttgttaaagagagtaatgaatgaaaccctattattcacggtttgtaaataaatttaaagataagcgctaactttcacttgttaagcctagagccaagagttcggtgtttcttctaaagtttcccagatggtcattaaaacaagagagggaagaaacatactttctttgaaatccatcatttcccatccagaaagataatacatgtcatcaaaagttaagtctttagagattaattaataatgtgagtattttcaaataaaataaatgcatgtctttatatgctagtttttacattttcagtataaacctatattgaacagcaccacttcagacacacaaattagctgtgaaacaaaatgctataaacctttaattagcacttgctgctttatacccataaagttaatacttcctcttctactatattctctgtaaaggaaaattatgggaaataaaattgtgtttttcacttccgaaaataaaagtagcaaaatatagtattgtggctcagtttaaagatagttatatttttacttgcaaggaagtcaatacaaagatcccttacaataagtataatttgattcctaccaatattaagcgctatgtctaactttcataacttgggtacacagagcactgatgacgatcagattgctaaataagtaagaaagcaagttatttcaggcaaatagctgcattaagaaaatacgacagtaagccaacttgtatccacactcctgaagctgaacaagcatctcaataaataatgtctgttttcaagctttatataccctccctgaaataaatgttctgagcttaaatagactcaaaatagcctttctcagaaaataaaaaagagacacacacaaaacacccccaatttcctctggtcccttgaagtacccttg

SEQ ID NO: 55674 - DNA, 616 bp, Homo sapiens
caaaaacaacaaaaacaaaaataggttttctcctgtcttcccaaaggtccaccaagatattaaagatgggacttgggtgtccatctctaaaacactaaaaccagaccaatctgcattgtagagactccaaccagtgtcttcaattccaagcactttgcctgagggagaggttgggcagtgggcagggatggagatggatgagtgggaacagccgtgggcttggaggattgtccatggggttggaggtggggtctgtccttgctccactacytctgccaggcctctgcagaccctattgggttggcgagatggtgagacttggggcctggggtagggaggggattattccaagtggtggagaaattccaaaaggcagagctggagataggagggtgattcccagggccactattctggggggaccttacacatataaaatcaaaggaatgagtctctgggtcaccaatgtctactatccctgttctagggattcaaacagctgcttttagacacccagtttttactctacagccgtatacattaaccaggaggagatttgtgacatcaacaagcaatgctaagataacacacacatgggcacgcacacacacatgct

SEQ ID NO: 55675 - DNA, 2147 bp, Homo sapiens
acatatcaggtacacaagagatctcccttagcccactgaagtgttgaccaaattcatttctcttggacaatggagttagtgccttaccccttcatcagctgctctcacatgaagaacttctctgagtaaggaaggtgtccttgctcttattgaaagattgactgaaaagcagctaagttgttttctatcctcagtagtccttgttgaaattgagttgtaaataaccaaaagcttggagagggaaaggcgatgaagtcaaagaagggaaaagagaggagagaaaggcaggaagctacccttttttgagaacctgctacgcaccagacactaaaaaaactaattcttaaaattgatagaagcccctagaaaatggttggtggtctttttccacttgagttttaattaagtgatttttcagttccatactttggtttgctataaaagggcctttgcaacattttgtaatcatcctcttctttcttaagctttcctttcaaaaccaattttgtatattctaattgcaaactctagttcaagttcctgaaacactttcttataattatcaccaaacaaatgcagtgatttcacaaagcccaaacatgtgtcacattaattctcacaacgaaaayactttcatttttcttggactccaagcaaaatggaccataagcaaagtgtttgataaaatgacaggtggaattccatccaattaagacataaatatttttccagaggctaaactcactgcaaaataataatcttcactcaacacatctttacatgtctttggcaaaacacctgtctaaaactgttaacactaaatattttgggagctctgtacttcaaagacatccctgaaaacgtcaagcattgttaaaatgttgaagtaattttggttaaatgcttctgtgacaactgtcggacttgatttgttttagctgaatacattctgaatattgcttggaatctgtgagttggtcatttgccaaaagatgagaaatgggctgaagtcaaaagaattatatgcatcaaagaaatgaaaaaaatgatgggagtctttgtttttttaaaaaatgcagtttatcctctaagttggaagcttcaaaagaacattcttaccagttgatagcctttgtggtaaaatgataaagcatacactagaagttattctgattcttggccaaattcatacatatagaatcacacctatagttccttatgcagaaaaaagaacattttaaagtagcttgatgaaaatagggattaagtaatataaaactgagtgttttcctaggaacgtctagttagttggttaccaagtacttatggttcatggaatcacagaagaaatcatagaagtaaaaacattagagagcatctagtccaacaatatcctttctccctgcactgcctccattttcagatgggtaaattgaggcccagagacccaaaaccagcaatagttggttaacagatgtgcctactgcaaaaagcttaagtttgggctgaaaaagagggtgagagggagacacttacggaacacatcaacagatggtaaaaatgcagcataaatgtgaaagaggtacagtgagatcaaaaataagaggaactaatgttaattgggtaatcatgatggcccaggcattatgctggattatatgcgttatctcacttaattcctgcagttacttatgcacaaggttgccattattattcccatattataaacaaaatctctaagcaacttgtccaggttaggtagctagcaattgataaagtcaagacttggaattggttctgtctgacttcaaaatcattgttcttaatcattaactccccttccaacacttacgactccaacttgtttcttttccttaaatccaggtaggcaccacaatagctggagaaacgtagggtgattataatgatttggagtgtcccgatcagctgcgggtcacacctaagttattaagtctggggaaaatgtgttatccaagctaagggtataatgaccatgatctgaaattttccatgaaattctaaatcaaatattctgtcacattatccctataagaaccttcatgcttgatagagcacgtgctcagaactattttacagaatgtttcagtccttgactcaatctaaga

SEQ ID NO: 55676 - DNA, 748 bp, Homo sapiens
tatctcaaaaaggaaaaaaaaaaaaaagacaacattttccggtctccctatcagctaaggtgactgtgtgattaggttctggttagtaaaacataagcagaagttatgtatgcctttcagaaaaatgttttgaaaggaaaaggacatcctttgtcctccatccagctscatggaactgagagaagagtcgccagtccctcagaatcatacatactctagcccttctttctcccaagaagagatcacatcaactactattcctaaaactccctggacatccagaacacagctcacagaggcatctctaaggtctccctccctacataacactagcaaaaagaatctctccctgcttccctggtctagcctggaaaaaaagaatgacccaaacagtccctacagaaccagtgacaccccagaggatctgaagtctctagccctgaatgtgaaatagaaaccatccccctacctgtcctattctgagaggtgtgtccagaagagactgtggatatgaacccattttaggttgcaatgacatcaaaatacaatgggactaatgatctttagagccacagtcaagaaaggatagagtggctggaacacaggggggagaacacttctaagaacccatcctgaagatattcttacacaagtgtacaaagatgtgtgtacaatgaggctcactgcagtattacatgtaagatttaaaagtaataatcataagtatggtatatccatataactaaat

SEQ ID NO: 55677 - DNA, 1910 bp, Homo sapiens
agatattaccattaaaaataaccagaaaatgggaataatgatcacagggctgttgagaagactacacgtataatgtgaccatcacaatgcccaaaatgtctttgttgttgattttacaacaggctagattgaaaaccacatcagaatccaatgaggatcttttaagtcagttctagagacccatacaatgaaatgtgaaagagccattaaaaagttgttgtaggaggatatttaatgaaaggtgaacttggttattctatgacatgaagagaaaaaaatcagctaaaaatgtatgtgtagggccaagcgttgtgactcatgcctgtaatctcagcacttggggaagctgaggtgggaggatcacttgaggccaggagtttaagaccagcctaggcagcatagcaagaccctgcctttacaaattaaaaaaaataaattagccaggtgtggtggtgcatacctgtaatgcccccttcccaggaggctgaggcaggaggattgcttgagcacaggaatttgaggctgtaatgagctgtgattgcagcactgcactccagcctgggtgacagagagagagtctctaaaaaataaaacaataaaacagaaaacatggcctcaaatcctttgaccttcttcccatgatctcaacccttgaatctggacaggcatgtgactgctttgaccaacagctgcggcagaaatgacacaatgtagcttccaaaactaggtcataaaaggccatggaatttcccttcacttgctcaacctccattcttggagcctgagccttaaggtaagaagtgcaactaccctgaggctgccatactgtgaggaaccctaagccacatggagaagccatgcataggcacttggggcaacagcctcagcagagtcagcccagttcatgagccagacatatgaatgaagaagcttctagaagattctagtctccagctgtttgagtctttctagctgaggcttcagacatcacaggagcacagataagccatcccttacgtgccctattcaagtttctgaagcacagaatctgtgagcatgattaaatggttattctctcccagcaaatttggggtggtttgtgatatagtgctagataacgggaatgggagattttaggattttttattcttttaactctacatttctgaaactttacttttttatggtgagtgtatgtttttatgactaagaaaatatttataaggaaatatttattgagtgaataaagaaagaaaaaaatgaatgaatgaaaatgggagagaggaagagtgggagaaagaaaagagggaggaagctgttttgtgggaaggccccgactccaaccctctcaggaattactgacttcagataagtctcccttgaacctttctttcctccatgtcccattccttgagccactttgtcctcaggccatgaccaaaaggcagagcattcaatgactctgagtgagatagagctgggtttcagtctgatggctccacctcttmctgcctgtatgtctttgtacaactcactcaccctctctgagtgcatgtcagaaagtggggtgcacacaaacacttggacatgtgggagaagcctgattcaaacctagagctggctgacttttgacagagcagcccctctttatccattaagggggtccaggacactgcctcgagggacattgggagagggggctaccctcagccagccacgtcctgggagccctctgtgtgggctgccactgggccaaggtgccaggcacagagggggaaggctggggcccaggcagaggccggggctgctccagcccctccaggaagccgagcgatccctcctgtaaacctttcacccctgcacgctctgaatgaagccattcagaggaagaaacctgaccggcgcatgtt

SEQ ID NO: 55678 - DNA, 767 bp, Homo sapiens
tttattcttgccctttctagacatgtaaaccaataaatccctttttatttacttgaaataattcaaattggtttctattagttgccaacaatagggtcctaaaatataagcctataatttcaccactgaagttcaaggtaaagctacaaatcttcctgggagaggtgattcatgggtctaaattgttactaaagtataaatgactgataacagatcctttcttaagaggagactataattacgagcttatctgaaaacagacaaagcaccatacagctagamgtaaagacagtcaaaacgtctggtaaccttcacctatcagcacataagttttttttaagattagaatcttcagtcaccaatgtgctgagtttgctgggtctggcacccagtatggggttcagtcaatatcgtaaaagggaagaaacagaagcaagggaaagtggaaagaaaggaagagtgggggaaggaggaaggggaaaaaaagaaaagaaaaaaagagggaaggagacgggaagaggagaaggaagggtgatgagggaggaagaaaagagagaaggaaggcttgaagggaggcagtaaggagggaagaaagaaaggaaggaaggaggaaggaaaggaagaacggaaagagaaggaagagagggagggagtaaaaagaacggagggaagtggaaactgagggagagacacacagagactgagacaagacagacaaattgaggggaaagggaggaaggaagaaagactagagtctgagcggtgga

SEQ ID NO: 55679 - DNA, 703 bp, Homo sapiens
agtagtatattattatatttccaaacatatggagttttaaagtaatctttggttgctgatttctggtttaattgcatttctgtcacatgatgctctgcatatatgttcagacttcctttgttagctgagcacgtgtatctgttttgatgaatgttttatgaatgctagtagagaatgcctattttctggatgttgggagcaagatactgtgtccattaagcacatactgtgtaatttaaatcttttgagccatattaactttttgtatgcttgaactgttaattactaagaagtaaaaaaaaattaccaactatgttatggatctgtcaattttccttgacaatcaacaacctgttttgtgcattttaaggctatattaatacctgagatttatctagtgagatagakacattcttgatttgttttaatagttacatcagctcttttttgacatttgtctgttatttctttcctagttttgtattttcaaattttcctgtaattatcccataaacaagatatatttggattttaactgtagcatttaattcatttattactttgcagagaaacatcttaattttgtcctcattcttttattttttacttttatgggtatataatagctatatgtatttatagggtacatgagctatcatgatataggtatacagtgcataataattacattaggataaatggg

SEQ ID NO: 55680 - DNA, 1623 bp, Homo sapiens
cagaatgaaatgcctagtgatggatcaataaccccacagggaagccaccagccagcaagccctacacttagatacagaactcccaaacaccttgttgtactttttccacatgtaaacagtctgagatcaacaggaataaatcacaccccagacttgatgccctaagcgagatgagaggatagaacagctatggaataagactgggatgttatcaaagggaatgcagcagcaataaaatagtcatggatggggtcagaagatcaaactgaggaaattatgcagaaagtagaacaaaagcacaaaaatacagaatatgatttcacaatgagaggattaaaccaggargtctagcacctgacattgaactgaagcaaggattcaaagtatttttttatgctgtggacccacaatcagatgaggcatatggatctcttctcaaaataatgctgttttaacaagtgaaaaaattattttattaatagactttatttttagagcagtttaaggtttatagaaaattggggggaaggaggaagagaggaatgaagacagaataatattttaaagcacataaaatgcatagaagtacaaaggaaactgatcatattgaaatatagttgtcaaaatatcaaaaaacaaaatagggatatagcaatgtatgtgctttttaatgagcacattaaataacaagaagggcagaatgactgtaattttgaagtagtgatgagcatgagtgctattttaagatatttgcatcaatgtgatgtgagatgagcatatctgttttttggttttctgtttttgtgacaggatcttgtctgttgcccaggctggtgtgcagtgacactatcatagatacctcactgcagcctccaatgtccaggctcaagtgatcctcccgcctcagcctcccagagtagctgggactatgggtgtgcaacaccacacctggctaaatatctgggatttctatagatgaccagaagactactgttttaatcatgtatttgtcgaactaagtgcctttgaaaactatgtgtgtgtatcacttttacaaaggaccataattaattaaaaaataattagaaagtataattttatttttattcaggtagaagaagtgaatgaaagaaagtttaatgagagtgatatagagcctcaagtgtgagatgaggtgaacgactttgaaatagcaagttcttaagtttgtatggtactttacagtttgcagtgtgcgcttttcacacattccattatgtgattttcacaagaacttctaagagaaggcagtacagatattatccacacattcagtttataaatgagaaagtgagtcaaggctcaaaatcaggtgcttgagtcctaatccagtgcagctttataggtgagaaaggttggaggttctcatgtgtcccagcaaggctcagagacccattgacacaaggctgatagtcacaagaagcagagttattggctgggcgtgatggctcacatctgtaatcccagcattttgggaggtcaaggtgggaggatttcttgagcccaggagtttgagaccagcctgggcaacaaagtgagactccatctctacaaaacatttttaagaaattaaccaggcgtggt

SEQ ID NO: 55681 - DNA, 1623 bp, Homo sapiens
cagaatgaaatgcctagtgatggatcaataaccccacagggaagccaccagccagcaagccctacacttagatacagaactcccaaacaccttgttgtactttttccacatgtaaacagtctgagatcaacaggaataaatcacaccccagacttgatgccctaagcgagatgagaggatagaacagctatggaataagactgggatgttatcaaagggaatgcagcagcaataaaatagtcatggatggggtcagaagatcaaactgaggaaattatgcagaaagtagaacaaaagcacaaaaatacagaatatgatttcacaatgagaggattaaaccaggaggtctagcacctgacattgaactgaagcaaggattcaaagtatttttttatgctgtggacccacaatcagatgaggcatatggatctcttctcaaaataatgctgttttaacaagtgaaaaaattattttattaatagactttatttttagagcagtttaaggtttatagaaaattggggggaaggaggaagagaggaatgaagacagaataatattttaaagcacataaaatgcatagaagtacaaaggaaactgatcatattgaaatatagttgtcaaaatatcaaaaaacaaaatagggatatagcaatgtatgtgctttttaatgagcacattaaataacaagaagggcagaatgactgtaattttgaagtagtgatgagcatgagtgctattttaagatatttgcatcaatgtgatgtgagatgagcatatctgttttttggttttctgtttttgtgacaggatcttgtctgttgcccaggctggtgtgcagtgacactatcatagatacctcactgcmgcctccaatgtccaggctcaagtgatcctcccgcctcagcctcccagagtagctgggactatgggtgtgcaacaccacacctggctaaatatctgggatttctatagatgaccagaagactactgttttaatcatgtatttgtcgaactaagtgcctttgaaaactatgtgtgtgtatcacttttacaaaggaccataattaattaaaaaataattagaaagtataattttatttttattcaggtagaagaagtgaatgaaagaaagtttaatgagagtgatatagagcctcaagtgtgagatgaggtgaacgactttgaaatagcaagttcttaagtttgtatggtactttacagtttgcagtgtgcgcttttcacacattccattatgtgattttcacaagaacttctaagagaaggcagtacagatattatccacacattcagtttataaatgagaaagtgagtcaaggctcaaaatcaggtgcttgagtcctaatccagtgcagctttataggtgagaaaggttggaggttctcatgtgtcccagcaaggctcagagacccattgacacaaggctgatagtcacaagaagcagagttattggctgggcgtgatggctcacatctgtaatcccagcattttgggaggtcaaggtgggaggatttcttgagcccaggagtttgagaccagcctgggcaacaaagtgagactccatctctacaaaacatttttaagaaattaaccaggcgtggt

SEQ ID NO: 55682 - DNA, 1623 bp, Homo sapiens
cagaatgaaatgcctagtgatggatcaataaccccacagggaagccaccagccagcaagccctacacttagatacagaactcccaaacaccttgttgtactttttccacatgtaaacagtctgagatcaacaggaataaatcacaccccagacttgatgccctaagcgagatgagaggatagaacagctatggaataagactgggatgttatcaaagggaatgcagcagcaataaaatagtcatggatggggtcagaagatcaaactgaggaaattatgcagaaagtagaacaaaagcacaaaaatacagaatatgatttcacaatgagaggattaaaccaggaggtctagcacctgacattgaactgaagcaaggattcaaagtatttttttatgctgtggacccacaatcagatgaggcatatggatctcttctcaaaataatgctgttttaacaagtgaaaaaattattttattaatagactttatttttagagcagtttaaggtttatagaaaattggggggaaggaggaagagaggaatgaagacagaataatattttaaagcacataaaatgcatagaagtacaaaggaaactgatcatattgaaatatagttgtcaaaatatcaaaaaacaaaatagggatatagcaatgtatgtgctttttaatgagcacattaaataacaagaagggcagaatgactgtaattttgaagtagtgatgagcatgagtgctattttaagatatttgcatcaatgtgatgtgagatgagcatatctgttttttggttttctgtttttgtgacaggatcttgtctgttgcccaggctggtgtgcagtgacactatcatagatacctcactgcagcctccaatgtccaggctcaagtgatcctcccgcctcagcctcccagagtagctgggactatgggtgtgcaacaccacacctggctaaatatctgggatttctataratgaccagaagactactgttttaatcatgtatttgtcgaactaagtgcctttgaaaactatgtgtgtgtatcacttttacaaaggaccataattaattaaaaaataattagaaagtataattttatttttattcaggtagaagaagtgaatgaaagaaagtttaatgagagtgatatagagcctcaagtgtgagatgaggtgaacgactttgaaatagcaagttcttaagtttgtatggtactttacagtttgcagtgtgcgcttttcacacattccattatgtgattttcacaagaacttctaagagaaggcagtacagatattatccacacattcagtttataaatgagaaagtgagtcaaggctcaaaatcaggtgcttgagtcctaatccagtgcagctttataggtgagaaaggttggaggttctcatgtgtcccagcaaggctcagagacccattgacacaaggctgatagtcacaagaagcagagttattggctgggcgtgatggctcacatctgtaatcccagcattttgggaggtcaaggtgggaggatttcttgagcccaggagtttgagaccagcctgggcaacaaagtgagactccatctctacaaaacatttttaagaaattaaccaggcgtggt

SEQ ID NO: 55683 - DNA, 520 bp, Homo sapiens
gctgggctaaggaagggcagacatgcagggctgatgctttagttgggaggccatttggatgcatcaattcctcctggattccaacccttgctattctcatgagcatttcatggagatttggaggcatatgcacagtctttgtgctctggatgcatttctttgcagtcatttattactagtctattttatagtagatcttgtctcaaccatttcattcacgcaaaagccttyggatgcttaatattattttgtgaaggtttccaactcctttgggctttgcttaggaacctagcaaacaaacttctcagcatctcaaagggaagcttaagctgataaaaatgtgaattgtagacagctggagctttgctgaacatttcacttctggatatgccgagcaatggtctaacatgaatgctctcatggggaggtcacctctacccttgacggccagtggcctagctgtattgtgctaggggacatgcggatctgtgcaagagggtttgtggatggtctatgtcat

SEQ ID NO: 55684 - DNA, 520 bp, Homo sapiens
gctgggctaaggaagggcagacatgcagggctgatgctttagttgggaggccatttggatgcatcaattcctcctggattccaacccttgctattctcatgagcatttcatggagatttggaggcatatgcacagtctttgtgctctggatgcatttctttgcagtcatttattactagtctattttatagtagatcttgtctcaaccatttcattcacgcaaaagccttcggatgcttaatattattttgtgaaggtttccaactcctttgggctttgcttaggaacctagcaaacaaacttctcagcatctcaaagggaagcttaagctgataaaaatgtgaattgtagacagctggagctttgctgaacatttcacttctggatatgccgagcaatggtctaacatgaatgytctcatggggaggtcacctctacccttgacggccagtggcctagctgtattgtgctaggggacatgcggatctgtgcaagagggtttgtggatggtctatgtcat

SEQ ID NO: 55685 - DNA, 542 bp, Homo sapiens
gatcaagcctgtcttctccactttgccaccaaactgttctttctagatctcaagttcaatcagaccacatcttgcttagggctccycagtccctaaaagcaaagcctaagctttcttttatggtaacagggctttccgtcacctgccacagcctcctccttcttaagggcagtgatttctcatcactttctgctgcatgccctataatcccatgacattcaaccctctgattcttctggacagaacccttttctttcattagggcacggcacatgcattttccaccaactcaaatacctggtggatgtctacccatgctttaaagcccagcctatttgctaccttctgtgtgaaagcttacctgatctccactccctttctcacgtcttctgctgtttctgtggtatgccacttattactttattataattatttgggtatgactttggggttctatcttgactgaatcttagctcttctgctttttatctgtgtggcttttgtcaagttattttaacttctttgggcctcaatcttacaat

SEQ ID NO: 55686 - DNA, 542 bp, Homo sapiens
gatcaagcctgtcttctccactttgccaccaaactgttctttctagatctcaagttcaatcagaccacatcttgcttagggctccccagtccctaaaagcaaagcctaagctttcttttatggtaacagggctttccgtcacctgccacagcctcctccttcttaagggcagtgatttctcatcactttctgctgcatgccctataatcccatgacattcaaccctctgattcttctggacagaaccctttyctttcattagggcacggcacatgcattttccaccaactcaaatacctggtggatgtctacccatgctttaaagcccagcctatttgctaccttctgtgtgaaagcttacctgatctccactccctttctcacgtcttctgctgtttctgtggtatgccacttattactttattataattatttgggtatgactttggggttctatcttgactgaatcttagctcttctgctttttatctgtgtggcttttgtcaagttattttaacttctttgggcctcaatcttacaat

SEQ ID NO: 55687 - DNA, 542 bp, Homo sapiens
gatcaagcctgtcttctccactttgccaccaaactgttctttctagatctcaagttcaatcagaccacatcttgcttagggctccccagtccctaaaagcaaagcctaagctttcttttatggtaacagggctttccgtcacctgccacagcctcctccttcttaagggcagtgatttctcatcactttctgctgcatgccctataatcccatgacattcaaccctctgattcttctggacagaacccttttctttcattagggcacggcacatscattttccaccaactcaaatacctggtggatgtctacccatgctttaaagcccagcctatttgctaccttctgtgtgaaagcttacctgatctccactccctttctcacgtcttctgctgtttctgtggtatgccacttattactttattataattatttgggtatgactttggggttctatcttgactgaatcttagctcttctgctttttatctgtgtggcttttgtcaagttattttaacttctttgggcctcaatcttacaat

SEQ ID NO: 55688 - DNA, 542 bp, Homo sapiens
gatcaagcctgtcttctccactttgccaccaaactgttctttctagatctcaagttcaatcagaccacatcttgcttagggctccccagtccctaaaagcaaagcctaagctttcttttatggtaacagggctttccgtcacctgccacagcctcctccttcttaagggcagtgatttctcatcactttctgctgcatgccctataatcccatgacattcaaccctctgattcttctggacagaacccttttctttcattagggcacggcacatgcattttccaccaactcaaatacctggtggatgtctacccatgctttaaagcccagcctatttgctaccttctgtgtgaaagcttacctgatctccactccctttctcacgtmttctgctgtttctgtggtatgccacttattactttattataattatttgggtatgactttggggttctatcttgactgaatcttagctcttctgctttttatctgtgtggcttttgtcaagttattttaacttctttgggcctcaatcttacaat

SEQ ID NO: 55689 - DNA, 581 bp, Homo sapiens
tatatctgtagagctctttaggatctgtgaaatatttttacagctgtgtcccatgtaacctcacagcattcttgggaggtaagtaggactggtttcttggcccctttaagataggtgagtaaatcgaagaacagggtagcaaagtgacttggccatcaccagattgagaactccaagccaggtctcttcacttgtagtctagtgcaccttcctaccccacagtgcaccaggctgggcccatccagggactccagcctcagtccctggagaaaggaaaatggacctgcctctctttacaatgggcttgtgcaacagagaaagtcctggtcctgatggtttgcaagaagtgggtatggctyatttggtttcttgcctgtctctaccactagaaagtgaggaagtgagtggaagaagggacattggtctgttttgtttactgtgtttccccagtgactgaaagagtgcctggcacatagtatgtgctcaataaatatttgataaatgaattagtggatgaacaaatgaatgaagcaacctatctcaggactgaggctcctccatatccagacaacatctaatag

SEQ ID NO: 55690 - DNA, 755 bp, Homo sapiens
agggggatcccttattccctgggggttccaggttgcagtgagccgtgatcgtgccattgcactccagcctgggtgacagagtgagaccctatctctaaaaaacatattttaaaaataaaaaaaaaagaaaccctgaaggagcagtgggcctgaaaagtagctttcaatccagggatgatgaaggcactggtaatgttgaaatactatttctagccyaacagactacactcaatataaaaagtagatatcgttctaatttctgaacataactaagttaatatattagacattgtaagcagacatgagaacatttattccttgcatccaagagttaaaggactgatgtgggcaaggacttggggaatgtaaagagctaatagatgtctggctcttactccctctgtcttgtccagaaaggcagacctaccctgaggggacaggacaggagggctgagcacagcacacacttctgttctcttttcatgcttgcacactttttctgcatctgttcagtgtgtgtgtgtgtgtgtgtgtgtggtgttctcactgtttcttctctctggcattgtcccaccccctcctctgtttccctctgtccccatgactccccaccccacacagacacaattcttgataattatagtttattgattctcctggtgttagctgcccccggcatcgtcttcctcatgttagctggggcaccttcccagctccatcacagcctgcgtttctcaggaggcaaagcactccca

SEQ ID NO: 55691 - DNA, 755 bp, Homo sapiens
agggggatcccttattccctgggggttccaggttgcagtgagccgtgatcgtgccattgcactccagcctgggtgacagagtgagaccctatctctaaaaaacatattttaaaaataaaaaaaaaagaaaccctgaaggagcagtgggcctgaaaagtagctttcaatccagggatgatgaaggcactggtaatgttgaaatactatttctagcctaacagactacactcaatataaaaagtagatatcgttctaatttctgaacataactaagttaatatattagacattgtaagcagacatgagaacatttattccttgcatccaagagttaaaggactgatgtgggcaaggacttggggaatgtaaagagctaatagakgtctggctcttactccctctgtcttgtccagaaaggcagacctaccctgaggggacaggacaggagggctgagcacagcacacacttctgttctcttttcatgcttgcacactttttctgcatctgttcagtgtgtgtgtgtgtgtgtgtgtgtggtgttctcactgtttcttctctctggcattgtcccaccccctcctctgtttccctctgtccccatgactccccaccccacacagacacaattcttgataattatagtttattgattctcctggtgttagctgcccccggcatcgtcttcctcatgttagctggggcaccttcccagctccatcacagcctgcgtttctcaggaggcaaagcactccca

SEQ ID NO: 55692 - DNA, 786 bp, Homo sapiens
tgccttaaagaacctcctttgagctggaaattccaactgttgaagtcactactgagttgaagaaaaggtagatgcttgtgcccagcctagagagctcaaggacttgtggggtacagtgccaggcatgcaataacctctctgatctccactggccactttgaaaactaatgaataaatagaaatggctccttttctgaaaagagaaaactgcaattctaaaagaaacctggagaggaagtgaccaagatattcagaggtgagaacccccaaaggaaagtagacagcacgtctcaaataatgttctctatcacattctttcccaaaagcttctacaaaaaaaaacaaaaggtagagagagggattccacaacaaagcagggttgccctcttagagacacatgcagcgcgtgtggctttttaaaggttctgagaagttctgcagcaaaggaccttgtttcattgcataatgtgttttccaaatgtttttgcccacaagattcyatttccacaaatggttcatttattcttatgacatttcaagtcccctttgatggctttgagaacctctgggttaatgcatgaggtcaggtgtgctgaacgttcactggtctcatctcaccttgactttccttttcagtcttcatgttagggactcttagacgtaacctttactgtttactgtctccactccccaagaatgagctgagccccacaagacagctgaagagatgaggcagatggaaatacctgggcctcttcagggagttatcagggaattgctttcttt

SEQ ID NO: 55693 - DNA, 596 bp, Homo sapiens
ttgactgtgaccttgaggaagtcctgttccttttctgggcttcagtctccacttctgtccgtgggggttagtggggagtggtcccagatgacttgtgctgctccatgacactgagtgaggggccccttaagggctatgggtacaggtaggratgctagttgtggcgaagaaagctagagctgattaattatgcaggcagccccacctctgcaaaccacccatctgggaggtcagcctgcaaacactgtttctcttgatattacaggcctgcgtgtcttcgcccttagttgtccatataaagcatcccagcagcccacttccggtggcctcataagaccctgcccccacacattgtcactggctcacagctgtaggtcctttttctaacagcttttctgctcagacacaagagatgaaagaaaggacctctgatgaagcagttgaacttgctgcttgatgtgttcttccctgaatttttttttttcatcctcctttgcaagctcccaattgcagtctctccaaatgccttttcctatttgaatgcaaaagacagtaaaggaaacacgcccccaccccatcctaactcacacacaaaa

SEQ ID NO: 55694 - DNA, 1384 bp, Homo sapiens
tagcttatgtggggttccaatgctaattttttcatggtcaactttttttttttttttgacactggatatagtaggctgaaaaacagccaaccaaaagtatcagaatycaatccctgggacctgtgcatgttaccttaaaaggaaaagagtctttgaaaatgtggttaagggtcttcacatgcggatatactggtggaccctaaacccaattacaagttttcttatgtgacacacacagaagagaagacgatgcaactttggaggcagagattggaacaatgtggccacaactcaaggaatgccagcagctgccagaagctggaagaggtgagaaataaattcttccccagagagtctgggggagatgtgggctggccaacaccttgattttggctcaggaaaaccgattttggacttctggtctccagagttgtgacagaatgagctttggctggactcaggccaccatgtttgtgataatttttcccagcagcctccggagacaaatacactgggttttacctgtgctttccactctgagggggtctctatgctcctgaccaatattgaggacaaggagagcaacgtaatgtatgtaaatatcctatataggagaaagaacccctccatttcctggtccaaggtccttccaggaaactatgctaaagggaagaagatattgatgtgcatcttcttgatttattggtgcatgttgcgactcaattcatggggaaaacaacagatctggaggctctgcaggatgcaagctcatttaaactcttttatgcataacctaaaggtttctccttatgaccaaaatttgacttcaccaagacaaagtgaactagactgtggggtttcttcatttatatgtagtttgtctcattgttctatcattatcataaactggggaacttgtttgaaggaaactgtgagtaatgtaagaatggcttagatttatataatatgaactttcttggtcaaatccaactgtgatcttgggatcttgagttcccttattgtgggtgtcagaatataaacattagacatttcccactttcttatgtctagttttaaccccaagattttggtggtctgtactgttttccctccatttactaactcaactgattttatttctattagtcttcatactgttctttactctgatacaatagattctccatggatcaatactgtcaacccaacacttttcatcaaagacagtaaaagttttcttaacaaatccacagatgatacagagctgtaaggcagagctttccaattcaagtatggggtgacagagtcaagatttataaagatttatcaaggtttggaaatatatatccaaaccagcatattgaaacaaacagaaatatagaat

SEQ ID NO: 55695 - DNA, 1307 bp, Homo sapiens
gcttattgtgcttttagaaaatcaaggcttggcttacttcagcccacacccttagtagcaaaagcatggccagctgaaccccacacaccccagayagagcaagctcccaggttgttttctggggatcaggctctctccagacagccatgaagtccttcttagggtgctgcaggcttgttcctgctgctcgccaatcccaggctgctggagagcatggccatcaacttctttccaggacattttgttcaaaagaaaaaaatgctctgagcctctcacaacacgagcctctgacctgtgacagaagatcctctggggctggaaggagggtggcttccatgacacagaaaggcagaggaaaccaatttctcactcctcagcaggagggctccaaggtcatcctcctacctccaaggttaaagggacacagggaacctgggagacttgcctaggcttgcagtcattaccattcagaaatgtccattagcgtgcagatcaataaagaagacaggaggccaccttttgcaaggacaattctgtggcccgttcaagtggaccagaacaggttcagccttcccaagccaaacccaggggtgctgacactggagcgatttctcttaccagcccttacctgagatgaatttctcaacggagggtgcttgtgtggggtgaggaatgctcactgatgtggggaattcagggaggctcctagagtaacttgctcagaattgactctttttacaggaagaaaacacgccccatgccaaactgttacccacatcagatttctacatcttgattatagtcccaagacatacactgatgttacgccatctgacagaggaggaaacactaagctcatgaacgctggtttattgccccagggattgatctgagactttgaggcggtgattcccgacttatagagatcgaggctgagcacaatgcctgctaccctcactctttgctctggacgggaatgtacaactcaattttctaccccctacctattccctggcccgggttgccaaaatccctttctctgtggctcttctcttctttctcccctcctggctgtacccctagcagtcctcactgtttcctgtcacctgcctctcacctctctgcacacttcctgtgttacggagtgccctgccgagagaccgggatatgatagctcagaccctccactctatttcatcacatccaccctctcctatctgaatcgttgaccttatttctccctcctctacttctccctccccatctatttgtaacctctgaatagagttctggattttttactcatc

SEQ ID NO: 55696 - DNA, 886 bp, Homo sapiens
gcatttgtcagaaataattcagagtgattacttatacacttcgcccagtttctcccaatgaaaacattttgcaaaattataacaatatcacaaggaggatattggcatttacacaaaaataaaatgaaagttccagaagtttgcctgccttgaggaaagggtccaagccctggtgttgactttcacttgcaaatttcttaaccatggccttgagctctttaataagctgatccctacctacattctccacattggaatttggctcgtttttaactttgaattgagttttccggtaatgtttatgtcttggtcatcatggtgaaatcacttcgcctttaggttcttatttctcatatggaaaggaggttaaaaaagcacacttggaaaaagggcaaacagggccaagtcctcactggattaacccaccctgacatcccagttgtccttctacccataggtgacattcaaaatatgtaacatcctatatggcaaaaggcaccatggaattagaacaaatgccagttatataaaccaggccctgctctgccaggtgtgaacccttcaattttcaagctgtagggagatctgagactctcagaagatggcccagggcagtggaggttgcagaggagttttggggggagctcaaggtagtagctattttaaaaagagcctggacttattttagtatcttaacaaccaatacagctccactagtgartgccaactaaatgcctctgcttcttcccttaccccagcacccttgattgctgaattatcacatcgttcatgtcaggggccgtatatctgtcttggttactactgtacctagtgtctagcaccatgagtaggtgctcagtaaatatttattgaattggtatatgca

SEQ ID NO: 55697 - DNA, 2125 bp, Homo sapiens
gatggaacagtagactagacaaagaggataacagctcatgtggagcttccactctggaaacrtagagcaaacgagaatgagcaggagctaccaggaaggctgcatggatgaagtaggcttacaaaatgagtgagatttgggtatcaagaacaaagtctaagggggcaagcaagtagaggcaataattggaggagtaggatggggttagcggcaaacgtgtgggaggaagaccatgtcagctgaactggctgggagcagttttgccttgggaagcagtgagccattgaagagagagagagatacacgcatgaaaccatggtcctggattgtcaagagtcacagtgcccggaggagatagcatgtgagcaattgtcaggtggttcgatctgtactctagcaggactgagcacaggggaatgctgatgcgggtgtggggcaaaggaggagcagagccacagagctggaaggggagggtgctctctgatggccatggaccttcgatgccctgaggaggaagcaaataatccctcaaaggtttgtgagtaggggagtggcaagaccagggtgatacctcacaaagagaatttggggggttgtgtgaggaatgactgggaaggacagagtagttggacaaggcgatcacacccaagatggtaggtcattcaggagagagatggcgacagccaatgactgatgggtgaggaggtggggcaggttacagaggcagtcagaagccacaacaggttgttcattgtatgcaggagatgagcaaggggagaagtttgaaatgagtgcagtttccagcttgagggatgaagcgaatcaggatgccataaaccaggattgaggacactgcatgcgctgcccatgttgcacagtgcaggcatggcaaggggtggcgtggagaggaggaagaggagagctgcgtttcagacacatggatttagaagtgccctgcagacctgctggtggaaggttccaggatatcttctaagtggacgaaacagacagacaggacagggcattcagagccacagaatgaatgcaggaaagataaccacagcttcttcccttcaggacaccaagaggtgaagtggggaagatgccatccaagcagttttagaatgtggttatgggcttcgccaatattctgctttgcgatgctatgacctctacctggggtcctggagtgaagtcttcctcctagagactgtctccagaaaaacatgcattttatatctgcctcttcctgacatccccaacctcctggcaccaattaatgtatcagtgggcctcagaaattttcacccaagatgttgcttctgctgggaacatctggcaacatctttaattttatttggtttcttccttttttttcttgaggaacatcctgaagggagcagatggcaatgtgaaagggcagatcaatgctgaggaaagtggccctctttgcccttggattctcagaggcgcattctctgttcctgagagtggctattagaagcaagctctttttttttttgacaaagtttcattcttgttgcccaggctggaatgcagtggcgtgatctcggcccactgcaacctccgcctcctgggttcaagagattctcctgcctcagcctcccaagtagctgagattacaagcgtctgtcaccacaccaggctaattttttgtatttttagtagatacagggtttcagcatgttggccaggctggtctcaaacttctgacctcaggattacaagtgtgagccaccatgcctggccaagatggagtcttataatgtaacataatcatgggaataatgtctaccacctttcccatattctactgattagaagcaagtcacaggtcccacatgcacttcaaggggagggaattacacaaaggcatgggcaccaggaggcagaggtaattaggagccaccttaacgtctctccaccatagccatggaatagttgtactctgacatctttttttttccacttcttaagctcttaaggctaattatttgtgtgtcccaaatatctctggggagtcagtgcttgtttgacttgtttacagctatatttccagactttagtgcagagccaggcccactgcagacgctccagaaatgca

SEQ ID NO: 55698 - DNA, 2125 bp, Homo sapiens
gatggaacagtagactagacaaagaggataacagctcatgtggagcttccactctggaaacatagagcaaacgagaatgagcaggagctaccaggaaggctgcatggatgaagtaggcttacaaaatgagtgagatttgggtatcaagaacaaagtctaagggggcaagcaagtagaggcaataattggaggagtaggatggggttagcggcaaacgtgtgggaggaagaccatgtcagctgaactggctgggagcagttttgccttgggaagcagtgagccattgaagagagagagagatacacgcatgaaaccatggtcctggattgtcaagagtcacagtgcccggaggagatagcatgtgagcaattgtcaggtggttcgatctgtactctagcaggactgagcacaggggaatgctgatgcgggtgtggggcaaaggaggagcagagccacagagctggaaggggagggtgctctctgatggccatggaccttcgatgccctgaggaggaagcaaataatccctcaaaggtttgtgagtaggggagtggcaagaccagggtgatacctcacaaagagaatttggggggttgtgtgaggaatgactgggaaggacagagtagttggacaaggcgatcacacccaagatggtaggtcattcaggagagagatggcgacagccaatgactgatgggtgaggaggtggggcaggttacagaggcagtcagaagccacaacaggttgttcattgtatgcaggagatgagcaaggggagaagtttgaaatgagtgcagtttccagcttgagggatgaagcgaatcaggatgccataaaccaggattgaggacactgcatgcgctgcccatgttgcacagtgcaggcatggcaaggggtggcgtggagaggaggaagaggagagctgcgtttcagacacatggatttagaagtgccctgcagacctgctggtggaaggttccaggatatcttctaagtggacgaaacagacagacaggacagggcattcagagccacagaatgaatgcaggaaagataaccacagcttcttcccttcaggacaccaagaggtgaagtggggaagatgccatccaagcagttttagaatgtggttatgggcttcgccaatattctgctttgcgatgctatgacctctacctggggtcctggagtgaagtcttcctcctagagactgtctccagaaaaacatgcattttatatctgcctcttcctgacatccccaacctcctggcaccaattaatgtatcagtgggcctcagaaattttcacccaagatgttgcttctgctgggaacatctggcaacatctttaattttatttggtttcttccttttttttcttgaggaacatcctgaagggagcagatggcaatgtgaaagggcagatcaatgctgaggaaagtggccctctttgcccttggattctcagaggcgcattctctgttcctgagagtggctattagaagcaagctctttttttttttgacaaagtttcattcttgttgcccaggctggaatgcagtggcgtgatctcggcccactgcaacctccgcctcctgggttcaagagattctcctgcctcagcctcccaagtagctgagattacaagcgtctgtcaccacaccaggctaattttttgtatttttagtagatacagggtttcagcatgttggccaggctggtctcaaacttctgacctcaggattacaagtgtgagccaccatgcctggccaagatggagtcttataatgtaacataatcatgggaataatgtctaccacctttcccatattctactgattagaagcaagtcacaggtcccacatgcacttcaaggggagggaattacacaaaggcatgggcaccaggaggcagaggtaattaggagccaccttaacgtctctccaccrtagccatggaatagttgtactctgacatctttttttttccacttcttaagctcttaaggctaattatttgtgtgtcccaaatatctctggggagtcagtgcttgtttgacttgtttacagctatatttccagactttagtgcagagccaggcccactgcagacgctccagaaatgca

SEQ ID NO: 55699 - DNA, 983 bp, Homo sapiens
ccaaaccacttgctcaagtaatggcatcagcctatggtgaatgtccaggatctgggtcctgcatccaactttgatgcacttgtcaagaaggcctggacttggcccttaagtttgctatctttctctgccaccccactgtctgacttctaaggcctgataaaaagcctgtccaaaacggagctctgatggtgtcactttcaatggctctccactgcccctgtgcacctggccctggtccttctctccggtcacatttctctatgcttcctttgtatagaacatgctgcagccacactgaacttgcccattccttccctccacgatgcctctacttggtctgtttcctcttgctgtgacttccctctctacctctttaagtccagcttctatcaatgtgttaaggcattgattagtttctatctcctccatgaggtcttccttcatctctttatagaaagcctctggattccatgacactttgggaggtattaagagtgtggttaagggtgaagccctaggaaggacatgacttaggatcagacaccagtttcattactgactggctatatsgccctggacaatatacttaactcctctgtgccttcgctggctgtcaaatggattataataatataattactttgtaggctgtggcaaaggttgaatatttagttacacattaatatccaagaaggcctggtacatgctaagtgtcaacttttattattgttattttaaagtatccaaaaaatggttattgagcatctatatgctacatgtgcccagtctatatgtgtccagtgctatacaaggcattggagatatagcagtgaataatggaagccactctgctttgtagagcttatagtttaacaggtaacaaatgcaaattgaaccctgtattgtgatcttggcctatggatttctccttcttttctagactctaagggtgtggctactgtcttttatttttctgcaatttt

SEQ ID NO: 55700 - DNA, 983 bp, Homo sapiens
ccaaaccacttgctcaagtaatggcatcagcctatggtgaatgtccaggatctgggtcctgcatccaactttgatgcacttgtcaagaaggcctggacttggcccttaagtttgctatctttctctgccaccccactgtctgacttctaaggcctgataaaaagcctgtccaaaacggagctctgatggtgtcactttcaatggctctccactgcccctgtgcacctggccctggtccttctctccggtcacatttctctatgcttcctttgtatagaacatgctgcagccacactgaacttgcccattccttccctccacgatgcctctacttggtctgtttcctcttgctgtgacttccctctctacctctttaagtccagcttctatcaatgtgttaaggcattgattagtttctatctcctccatgaggtcttccttcatctctttatagaaagcctctggattccatgacactttgggaggtattaagagtgtggttaagggtgaagccctaggaaggacatgacttaggatcagacaccagtttcattactgactggctatatggccctggacaatatacttaactcctctgtgccttcgctggctgtcaaatggattataataatataattactttgtaggctgtggcraaggttgaatatttagttacacattaatatccaagaaggcctggtacatgctaagtgtcaacttttattattgttattttaaagtatccaaaaaatggttattgagcatctatatgctacatgtgcccagtctatatgtgtccagtgctatacaaggcattggagatatagcagtgaataatggaagccactctgctttgtagagcttatagtttaacaggtaacaaatgcaaattgaaccctgtattgtgatcttggcctatggatttctccttcttttctagactctaagggtgtggctactgtcttttatttttctgcaatttt

SEQ ID NO: 55701 - DNA, 606 bp, Homo sapiens
taagcccctccttgtctaccctatttaaacttgtagctcatcccctatccacctcataccctccttctcccccttccatgcttatttttattcatggcatttattgggttcccaaatacttactgaataaaactgcattcccccatcagaatataactccatgagagaaggctccatgtaaatatttgctaaatgaatgcgtaagtgaatgactcaattggataatattatgctggcatgtaagccaatgagatgatgggataaagggtaaaaagtcaaataaatagatactctattttataaagcttagagaaaaacaacaacgtttgtaaacatgacaaggtgagaataattaataggtaatgcattcacagcaagctattaatggaagctagaatgtttgaaataaaatcctaagcactgaggttgacatcagaaagcacaacggttcgcttttattaacagtcccttgggctacttgcaccataraattaagccaggttggtaaaaagtggtactatacaatcataaagaaacagctgtaatgtgtaggtcaaacttagcagtacataaatatgtatgcttgtgttccacctgcaaaaaaaa

SEQ ID NO: 55702 - DNA, 1021 bp, Homo sapiens
cttattacaatagttattagaaatgatgattgtatatggactatctgaacatgatattaaaaataattccaggcttcrcatccagcatctatattttcaataagcaaattaatattttagaagaatatttctaattaccttctttgtgtaatagtaattatattgcttaaacaaataacagattgttcatcctgaagtggcgaagcaacaaaataatcccaaactggtgagaaaactttcttagccaattcatagttaccaacttgataggcaacctataacaaaaagcacatatttatgtaatagttttattcgtgaatgaatgttttaaacaataattcttaaaatatacaatctatgacagcattttataaggtgctatcacacgctcatttcagatacaatcattcacatttgctgttctgttctatagtgccatggtcaggtaacggccaatggcaagggagacagatacatttttgaaatctcttttatttctaaattgcatggaaatttgaaactctgtaaggatgtttcaaatccttataagcaaaacaaagatcacatctgagccaaattaatttcatttccatctatctcagcagtgcactccatttattatagatactgttataatgaacaatctgttccaagagaaacaatcagatttcccaaacccaatatgtgaaaaatacttcattcttttctggttctgactgatactttcagagcttctgtgcaacaaaaagttcacgagctgaaaagagtatagaataaaacagagaagctttccaagaagacattatatgttttaagtttaacaaatttaacattaggcaaaataaataatttcactggtgaagcctagaagttcaaaagaaaaaaactgacttacctattttttatggtagaatatatttctttaaagacgttcctaaaaagcactccattaaatatgtaaataacaatataaaatctcaccaaatgagttctacactgcttcaaatcctttatggaaaca

SEQ ID NO: 55703 - DNA, 1021 bp, Homo sapiens
cttattacaatagttattagaaatgatgattgtatatggactatctgaacatgatattaaaaataattccaggcttcgcatccagcatctatattttcaataagcaaattaatattttagaagaatatttctaattaccttctttgtgtaatagtaattatattgcttaaacaaataacagattgttcatcctgaagtggcgaagcaacaaaataatcccaaactggtgagaaaactttcttagccaattcatagttaccaacttgataggcaacctataacaaaaagcacatatttatgtaatagttttattcgtgaatgaatgttttaaacaataattcttaaaatatacaatctatgacagcattttataaggtgctatcacacgctcatttcagatacaatcattcacatttgctgttctgttctatagtgccatrgtcaggtaacggccaatggcaagggagacagatacatttttgaaatctcttttatttctaaattgcatggaaatttgaaactctgtaaggatgtttcaaatccttataagcaaaacaaagatcacatctgagccaaattaatttcatttccatctatctcagcagtgcactccatttattatagatactgttataatgaacaatctgttccaagagaaacaatcagatttcccaaacccaatatgtgaaaaatacttcattcttttctggttctgactgatactttcagagcttctgtgcaacaaaaagttcacgagctgaaaagagtatagaataaaacagagaagctttccaagaagacattatatgttttaagtttaacaaatttaacattaggcaaaataaataatttcactggtgaagcctagaagttcaaaagaaaaaaactgacttacctattttttatggtagaatatatttctttaaagacgttcctaaaaagcactccattaaatatgtaaataacaatataaaatctcaccaaatgagttctacactgcttcaaatcctttatggaaaca

SEQ ID NO: 55704 - DNA, 1900 bp, Homo sapiens
ttaccgccgtgttcttcttaaagtcacagtggacatgcctaggcatattgttgtagatcccaagaacagatacctcttctgggctgactatgggcagagaccaaagattgagcgttctttccttgactgtaccaatcgaacagtgcttgtgtcagagggcattgtcacaccacggggcttggcagtggaccgaagtgatggctacgtttattgggttgatgattctttagatataattgcaaggattcgtatcaatggagagaactctgaagtgattcgttatggcagtcgttacccaactccttatggcatcactgtttttgaaaattctatcatatgggtagataggaatttgaaaaagatcttccaagccagcaaggaaccagagaacacagagccacccacagtgataagagacaatatcaactggctaagagatgtgaccatctttgacaagcaagtccagccccggtcaccagcagaggtcaacaacaacccttgcttggaaaacaatggtgggtgctctcatctctgctttgctctgcctggattgcacaccccaaaatgtgactgtgcctttgggaccctgcaaagtgatggcaagaattgtgccatttcaacagaaaatttcctcatctttgccttgtctaattccttgagaagcttacacttggaccctgaaaaccatagcccacctttccaaacaataaatgtggaaagaactgtcatgtctctagactatgacagtgtaagtgatagaatctacttcacacaaaatttagcctctggagttggacagatttcctatgccaccctgtcttcagggatccatactccaactgtcattgcttcaggtaagtgcactccaggtgctgcttgtcctgcaagtagacacaatggggtcaacacacatggatgactgagtgtttctaatgcatatgagactctaatgtctttgtgtgtgcttgtgtgtgtktctgcctgtatgtgtccaggtatagggactgctgatggcattgcctttgactggattactagaagaatttattacagtgactacctcaaccagatgattaattccatggctgaagatgggtctaaccgcactgtgatagcccgcgttccaaaaccaagagcaattgtgttagatccctgccaagggtatgccatcatcttccttgttatatttctgtctgcttatttctggaaaaaatggggcctgaaattatgttcatagatagccaatgtgttatgggcttataaaactatggctacagattcaaaaatgaaagcatattgagtgattttacgtgggaaggagggtgcagcgcatagctccctttgatggcagaaaggttggcaacatactaggaagtcaacaccctgacttactagatctcctttggacaagttgtgtaagtagaaatgaagtttcttttgccatgttactggcaatttgcaattaaagaatattgtccttttttttttttttaaaggactatgaggttccctgtgaattaattattgactccttttgtatgactaggtacctgtactgggctgactgggatacacatgccaaaatcgagagagccacattgggaggaaacttccgcgtacccattgtgaacagcagtctggtcatgcccagtgggctgactctggactatgaagaggaccttctctactgggtggatgctagtctgtaggtgtctctggttactcatgtgggtgttaagaagaggtttttcttccatttccaaagaagagggatttgcatcatgtgatgaaaatatagcatgccagatagacattgccagaatatagaatcacagttttaggaactatgtttatattggaacttggtgaacatactgtgaaaatttatctatatcatgca

SEQ ID NO: 55705 - DNA, 1900 bp, Homo sapiens
ttaccgccgtgttcttcttaaagtcacagtggacatgcctaggcatattgttgtagatcccaagaacagatacctcttctgggctgactatgggcagagaccaaagattgagcgttctttccttgactgtaccaatcgaacagtgcttgtgtcagagggcattgtcacaccacggggcttggcagtggaccgaagtgatggctacgtttattgggttgatgattctttagatataattgcaaggattcgtatcaatggagagaactctgaagtgattcgttatggcagtcgttacccaactccttatggcatcactgtttttgaaaattctatcatatgggtagataggaatttgaaaaagatcttccaagccagcaaggaaccagagaacacagagccacccacagtgataagagacaatatcaactggctaagagatgtgaccatctttgacaagcaagtccagccccggtcaccagcagaggtcaacaacaacccttgcttggaaaacaatggtgggtgctctcatctctgctttgctctgcctggattgcacaccccaaaatgtgactgtgcctttgggaccctgcaaagtgatggcaagaattgtgccatttcaacagaaaatttcctcatctttgccttgtctaattccttgagaagcttacacttggaccctgaaaaccatagcccacctttccaaacaataaatgtggaaagaactgtcatgtctctagactatgacagtgtaagtgatagaatctacttcacacaaaatttagcctctggagttggacagatttcctatgccaccctgtcttcagggatccatactccaactgtcattgcttcaggtaagtgcactccaggtgctgcttgtcctgcaagtagacacaatggggtcaacacacatggatgactgagtgtttctaatgcatatgagactctaatgtctttgtgtgtgcttgtgtgtgtgtytgcctgtatgtgtccaggtatagggactgctgatggcattgcctttgactggattactagaagaatttattacagtgactacctcaaccagatgattaattccatggctgaagatgggtctaaccgcactgtgatagcccgcgttccaaaaccaagagcaattgtgttagatccctgccaagggtatgccatcatcttccttgttatatttctgtctgcttatttctggaaaaaatggggcctgaaattatgttcatagatagccaatgtgttatgggcttataaaactatggctacagattcaaaaatgaaagcatattgagtgattttacgtgggaaggagggtgcagcgcatagctccctttgatggcagaaaggttggcaacatactaggaagtcaacaccctgacttactagatctcctttggacaagttgtgtaagtagaaatgaagtttcttttgccatgttactggcaatttgcaattaaagaatattgtccttttttttttttttaaaggactatgaggttccctgtgaattaattattgactccttttgtatgactaggtacctgtactgggctgactgggatacacatgccaaaatcgagagagccacattgggaggaaacttccgcgtacccattgtgaacagcagtctggtcatgcccagtgggctgactctggactatgaagaggaccttctctactgggtggatgctagtctgtaggtgtctctggttactcatgtgggtgttaagaagaggtttttcttccatttccaaagaagagggatttgcatcatgtgatgaaaatatagcatgccagatagacattgccagaatatagaatcacagttttaggaactatgtttatattggaacttggtgaacatactgtgaaaatttatctatatcatgca

SEQ ID NO: 55706 - DNA, 522 bp, Homo sapiens
tgcctctattattaagcattaggttgcttttattttattcctctatagtatatatcattgcagtaaatattaacatcgtatttaaaacattttattttcaggatattttcttaggatcattagtatagttttatagctgaagtcaaactattttcaattccagttttctctcaggtttaaattctgtgttgaagagtggtatttggagtgcttcactaagttctttttccccaacactgaaagttttatagaaagcaaagggcacatagagttttgaggacctgtaaaggaaataactaataactgctggatgagtagaatagtcttagagattgtttcaaatgtatgaattattggttcaaatatatgaataattaatatgagtttttaaacttctctatggtaacaaaagccatagtaatagcagtgagtaccaatgacctgatatatttaaataaaaataagcacataatmtatatatgaatatatcctcattgtagtaaagtaataatattcagaaat

SEQ ID NO: 55707 - DNA, 563 bp, Homo sapiens
ttcaaacagtttatatacattcttaacatcccaacttctcatcatcccacttaacaaatacttggattatggaaggaaatggagaagaacaatttgtaagtttcaatcctgattgactaggaaaatagtacgagcattagcaaaagtaggggagtccagaaaggcgcttgctcaaggtggaaggtgagtttgacatagtaggacttcctgaggtgaaagtatgtcttaggtatttgggcacaactggagccrtgaagagatattgcttgtgccaaggactgttaagggacacacacaggcacattgagagcatcaggaatggccaccttacagcatgcgaaggaagacagtgggaaagatatactaagtaggcacaagatcagagaagcagagtcacaggggccattgactggaggggcaggcagctcatcaacaggcgctaatgtaccgttggagtccagtgtggtgtacgattgtgtgtttattgtggtggtcctgaggaagaaggaggaggtgaaggagcagggactcagcagtaatttaaaaagtagataaatgctatc

SEQ ID NO: 55708 - DNA, 563 bp, Homo sapiens
ttcaaacagtttatatacattcttaacatcccaacttctcatcatcccacttaacaaatacttggattatggaaggaaatggagaagaacaatttgtaagtttcaatcctgattgactaggaaaatagtacgagcattagcaaaagtaggggagtccagaaaggcgcttgctcaaggtggaaggtgagtttgacatagtaggacttcctgaggtgaaagtatgtcttaggtatttgggcacaactggagccgtgaagagatattgcttgtgccaaggactgttaagggacacacacaggcacattgagagcatcaggaatggccaccttacagcatgcgaaggaagacagtgggaaagatatactaagtaggcacaagatcagagaagcagagtcacaggggccattgactggaggggcaggcagctcatcaacaggcgctaatgtaccrttggagtccagtgtggtgtacgattgtgtgtttattgtggtggtcctgaggaagaaggaggaggtgaaggagcagggactcagcagtaatttaaaaagtagataaatgctatc

SEQ ID NO: 55709 - DNA, 636 bp, Homo sapiens
catggaaaaaaatgaagaataatgacattctataattaagaaaataatttcatcaatgctttaataagcagttgcttgattaacaatcagccaccttacacactgcttactatatgctctacaacattgactcatatgatcttcatgacaactctatggggaaaatactatttaacagatgaggwgattgaggcataaagagatcttgcccaaagcgtcatggctggtaagtgccagaaccaggattcaagcctaggcagtctggctctggagtccacattcttaaataccatgctttgctgcctctaattgcctcatgtttaagattctacgtcttccaattcgttatacattgtttgatcatgttagctttccatttcttcgcatttcttaatgaaaatcttatttgggttatgtcatagacctagataatccaaaaaaaatgttgattctttaaaaaaaaaaaagttcttgttttcaaggagagaagccctacactaggattctgaaaaggaagggtaatgtgaaacttacaagattcagattatttagtccaaatgaaaaaacaataagatccagaaaggtcatgtgacttggccaaggtcccacagtcccttaatggtagtgctgggacca

SEQ ID NO: 55710 - DNA, 636 bp, Homo sapiens
catggaaaaaaatgaagaataatgacattctataattaagaaaataatttcatcaatgctttaataagcagttgcttgattaacaatcagccaccttacacactgcttactatatgctctacaacattgactcatatgatcttcatgacaactctatggggaaaatactatttaacagatgaggagattgaggcataaagagatcttgcccaaagcgtcatggctggtaagtgccagaaccaggattcaagcctaggcagtctggctctggagtccacattcttaaataccatgctttgctgcctctaattgcctcatgtttaagattctacrtcttccaattcgttatacattgtttgatcatgttagctttccatttcttcgcatttcttaatgaaaatcttatttgggttatgtcatagacctagataatccaaaaaaaatgttgattctttaaaaaaaaaaaagttcttgttttcaaggagagaagccctacactaggattctgaaaaggaagggtaatgtgaaacttacaagattcagattatttagtccaaatgaaaaaacaataagatccagaaaggtcatgtgacttggccaaggtcccacagtcccttaatggtagtgctgggacca

SEQ ID NO: 55711 - DNA, 636 bp, Homo sapiens
catggaaaaaaatgaagaataatgacattctataattaagaaaataatttcatcaatgctttaataagcagttgcttgattaacaatcagccaccttacacactgcttactatatgctctacaacattgactcatatgatcttcatgacaactctatggggaaaatactatttaacagatgaggagattgaggcataaagagatcttgcccaaagcgtcatggctggtaagtgccagaaccaggattcaagcctaggcagtctggctctggagtccacattcttaaataccatgctttgctgcctctaattgcctcatgtttaagattctacgtcttccaattcgttatacattgtttgatcatgttagctttccatttcttcgcatttcttaatgaaaatcttatttggrttatgtcatagacctagataatccaaaaaaaatgttgattctttaaaaaaaaaaaagttcttgttttcaaggagagaagccctacactaggattctgaaaaggaagggtaatgtgaaacttacaagattcagattatttagtccaaatgaaaaaacaataagatccagaaaggtcatgtgacttggccaaggtcccacagtcccttaatggtagtgctgggacca

SEQ ID NO: 55712 - DNA, 636 bp, Homo sapiens
catggaaaaaaatgaagaataatgacattctataattaagaaaataatttcatcaatgctttaataagcagttgcttgattaacaatcagccaccttacacactgcttactatatgctctacaacattgactcatatgatcttcatgacaactctatggggaaaatactatttaacagatgaggagattgaggcataaagagatcttgcccaaagcgtcatggctggtaagtgccagaaccaggattcaagcctaggcagtctggctctggagtccacattcttaaataccatgctttgctgcctctaattgcctcatgtttaagattctacgtcttccaattcgttatacattgtttgatcatgttagctttccatttcttcgcatttcttaatgaaaatcttatttgggttatgtcatagacctagataatccaaaaaaaatgttgattctttaaaaaaaaaaaagttcttgttttcaaggagagaagccctacactaggattctgaaaaggaagggtaatgtgaaacttacaagattcagattatttagtccaaatgaaaaaacaataagatccagaaaggtcatgtgacttggccaaggtcccacagtcccttaayggtagtgctgggacca

SEQ ID NO: 55713 - DNA, 695 bp, Homo sapiens
tattatatagaaatatggaagttaatgccagaaggaacagctcaaagagttgaatggtgctactaacatccaaggaatgggagaacaatgaaacacgatwccaaaaagtactaatttttttaacttttattttaggttaaggggtacatgtgcaggtttgttattatagacaaacttgtttcacaggggtttggtgtacagaccatttcatcatccaggtactaagcatagtatccaatagttatttttcctgatactctccttcctcccacccttctccctcaagtaggccccagtgtctgctgttcccctctttgtgcccatttgttctcattatttagcttccacttacaggtaagaacatgtggtgtttggttttctgttcctgcattagtttgctaagtataatggcctccagctccctcttcatccatgttcctgcaaacatgttcctgatctcattctttttatggctgcatagtattccatggtgtatatgtaaaacattttctttagtctaccactgatggatgtttaggttgattccatgtctttgctattgggaatagtgctgcaatgaacatacacatgtgtgtgtctttatggtagaacaatttacattcctttgggtatataccctgtaattggattgctgggttgaatggtagttctgtttttagctctttgaagaattg

SEQ ID NO: 55714 - DNA, 864 bp, Homo sapiens
aaacactaactttaaaaacttccagtggtggacacatgactgaggcctgaccaatcagcagaatctaacccctcagccacaatgactggttcagagatgcacacgtgacccaagtcagtccaaccagaactaatctcaggactttcctgatcaactgaaaataggtgctctctgtttccctagggttgctggcaatatgaatagtgtgaacctggagctgtcagaagtcactattcagaatctgagaatgaagcctataaaacggaaagtggacccaagaaatgaagagactcatggcccaggtgatataagttgagctcccagacactgctgtgcctacacttttcagccacatgaacctacagactgcctttgatgcttaagttatttgaattgagtcttctgttgcttgcaacccagagggtcctgactaatacatacaatgtagaagaaccctgatctgacctggtcttcaaacctctctggcttccatttttttcaactctaagatgacaaaattagatatcacttgattgctaaagttcttgcaggagtgcttagtgcwtgcatatttaagatactgtatatctacttaataaaaacccaaacacatcattgcatttctggtttattcatactcactcaaacacagatattacactcatcttaaaatcagtacttctattggctttcagctatggttaaccaaatgactgaatcttatatcacaagtgattatgcaagttgattaccattttcagaaactcattttatctttagagattttctgtaagttaaactataaaactgtacttttaatgagcagttacttctgaatatattgggcaaaagcattaagccatg

SEQ ID NO: 55715 - DNA, 1054 bp, Homo sapiens
tgcattaagaagccatttctgaagccatctggccaggcttcaaggtccccatactacccaccaagtcctatcaccaacacagtcttccagattctagtgcagtccagccctcaacccaagactgggctkctagagaactttctcaaaacccagatttggggagtatttctgcacccccatcccataatttcagcatgcaacagctttctctttgggttcagagaggggaagcaacttaacaaaaaccacacagttgtgatgagaccccaggcttggtcccagtgtcttggagttcccccagtcagctgagaggtatcagttcacagttccagagaacagcttgagaaaagccaacttctctaggtcaggaaggaagggggagtcatacatggagtggaaataagcaccaggcaaatatctgagagaacaaacgtaaggaatgatgatatatgttagggaagggagtggatggatctaaagaagaaaatgcaaaaacagcaagcaggacatgacctccatgctcagcattatccaaggagggttccttttgtgccgagtaaataagactggtctgcttctgcccctataggactattaagcaccatccctgattcaggcagttatttaatagctcagtaattcattcattcattcagttaaaacttttgtgctcattgtgtgtctgacatcatggtggcaactgaaagaataaagatgtggcctctgtaaggtggtgctttcctatgctcgagtgtccagcgagcccctttcctccctgccatattcagatgacagctttccaggtggcaaggatgtgtccccctgagttatccgtgctcccttgccactttcacccctacccaatagcataggggtaaaagtgaactctggagccacactgcttgttttcaaaagtaggctctgttccttcccagcttggggatcttgggcaagctccttagctctgtgcctcagctgcttcatctgcgaagtggagttaataacagaactcccctcatagagttgaggactgaatgagttaacacaagcacca

SEQ ID NO: 55716 - DNA, 1054 bp, Homo sapiens
tgcattaagaagccatttctgaagccatctggccaggcttcaaggtccccatactacccaccaagtcctatcaccaacacagtcttccagattctagtgcagtccagccctcaacccaagactgggctgctagagaactttctcaaaacccaratttggggagtatttctgcacccccatcccataatttcagcatgcaacagctttctctttgggttcagagaggggaagcaacttaacaaaaaccacacagttgtgatgagaccccaggcttggtcccagtgtcttggagttcccccagtcagctgagaggtatcagttcacagttccagagaacagcttgagaaaagccaacttctctaggtcaggaaggaagggggagtcatacatggagtggaaataagcaccaggcaaatatctgagagaacaaacgtaaggaatgatgatatatgttagggaagggagtggatggatctaaagaagaaaatgcaaaaacagcaagcaggacatgacctccatgctcagcattatccaaggagggttccttttgtgccgagtaaataagactggtctgcttctgcccctataggactattaagcaccatccctgattcaggcagttatttaatagctcagtaattcattcattcattcagttaaaacttttgtgctcattgtgtgtctgacatcatggtggcaactgaaagaataaagatgtggcctctgtaaggtggtgctttcctatgctcgagtgtccagcgagcccctttcctccctgccatattcagatgacagctttccaggtggcaaggatgtgtccccctgagttatccgtgctcccttgccactttcacccctacccaatagcataggggtaaaagtgaactctggagccacactgcttgttttcaaaagtaggctctgttccttcccagcttggggatcttgggcaagctccttagctctgtgcctcagctgcttcatctgcgaagtggagttaataacagaactcccctcatagagttgaggactgaatgagttaacacaagcacca

SEQ ID NO: 55717 - DNA, 1054 bp, Homo sapiens
tgcattaagaagccatttctgaagccatctggccaggcttcaaggtccccatactacccaccaagtcctatcaccaacacagtcttccagattctagtgcagtccagccctcaacccaagactgggctgctagagaactttctcaaaacccagatttggggagtatttctgcacccccatcccataatttcagcatgcaacagctttctctttgggttcagagaggggaagcaacttaacaaaaaccacacagttgtgatgagaccccaggcttggtcccagtgtcttggasttcccccagtcagctgagaggtatcagttcacagttccagagaacagcttgagaaaagccaacttctctaggtcaggaaggaagggggagtcatacatggagtggaaataagcaccaggcaaatatctgagagaacaaacgtaaggaatgatgatatatgttagggaagggagtggatggatctaaagaagaaaatgcaaaaacagcaagcaggacatgacctccatgctcagcattatccaaggagggttccttttgtgccgagtaaataagactggtctgcttctgcccctataggactattaagcaccatccctgattcaggcagttatttaatagctcagtaattcattcattcattcagttaaaacttttgtgctcattgtgtgtctgacatcatggtggcaactgaaagaataaagatgtggcctctgtaaggtggtgctttcctatgctcgagtgtccagcgagcccctttcctccctgccatattcagatgacagctttccaggtggcaaggatgtgtccccctgagttatccgtgctcccttgccactttcacccctacccaatagcataggggtaaaagtgaactctggagccacactgcttgttttcaaaagtaggctctgttccttcccagcttggggatcttgggcaagctccttagctctgtgcctcagctgcttcatctgcgaagtggagttaataacagaactcccctcatagagttgaggactgaatgagttaacacaagcacca

SEQ ID NO: 55718 - DNA, 3069 bp, Homo sapiens
tgggctccttgaagtggtggggataagatacctgtcctttatgccaaggtagacaggatcaaaaacaagaggactccactgcagctgaagaaatttgagttaggtatcaggaagaatttcttcatggtactgggctctgataaactttcaaaaaggatcatggtgttttcttttctggatatttttagaaaaggcagagactgctttatttctagcatgattcgcatgaggtcctcccacagcgacacatagacatctagtgttcttttgtgcgcctgggatgaaggcagaataaagacaccagagccctggtccccaagtcctgaaagcctaacatcccagcagatcccctggaacatccatcctggacacagaagctggggtgtctctgggttgggatgggagagaatggtttggggacaaggaaagctgggatgaggttgagaggaatgaatgacatcatctccctacggtattctgagctccttgggagaaaggtgtggtgtaaataccaggtattattattatgaatcagaatttcttctttttaaatcccttgtgtaccttaattctcttaacaatggaccatttctaggaaagagaacaaaagacttgcaaggtggttttccaaagagtggagcgtttggggtcccttccaccaggcttcccaggcttttttttctctcagggatcaaatgttgccaagtgaccagacaccattctgtctaaacaggaaattctctgttcctgaccccaaccttcccttcccaacccccattttatttaccctttgacctgaacataacataaatatttaatgtcatttgttacctgaaaattatctgtatttatcctgtttatttactggcagttccttaaaaacaaaacaaaaactacaggattgggtcagacaacaccagtttgtctgatttttccactgaagtcgtcatttctgtatttgatttaagtcagtgactagttgctccccaaacacaccatagattttcccagccttcttgctctgggccttcctccccgccatatcttttctctgcctggcaaaatccttctcacttttcaaaacctatttcaagtgccccctcctctgcagggccttccctgagagacccctccaccctctgcaggttggagccactgctatcccctctgtgttcctgcagtgctttgtgtgtccygtatcataggtgtgggaggcaagaaggtggaggtgtccaagcaggactctggaatcacactgcgtggcttcaaacacaggctctacaggtccctggttttgaggcccaatgcaggtgtcttagctttgggccagggatcccatcttgttagtttcttttttttttttttttttccgagatggagtcttgctctgttgcctgtgctggagtgcagtggcacaatctcggctcactgcaacctctgcctacccggttcaagcgattctcctgcctcaacttactgagtagttcagactacaggcgcccaccaccacgcccagctaatttttgtatttggacttgagacggggtttcactgtgttgccaggctggtctcgaactcctgacctcaagtgatccatctgcctcggcctcccaaagtgctgggattacaggcgcgaggcacagcacccaatccaatcttgttcgtttctgcttgacaaacttctgacttttaggagatactatgcaatccttggaggatggatcataagggaaaaaaaggaaattaagcagaagaataaataaagatggggctgggagaattagaaggaaaggggaagaaaagaggaacaagtttttaaagagggaagaatctatcatttgggagtggttgagatatccaacatctaactcctaagttagtatcccacaccctaacctgacagctactctgggcttctggtttgggggccgcagccaatttgtcagctagctctgcattcctgcaccccagtgaggtcttgagctgaggcttgcctgcagcgacaggatgagacgtgagcaggcaggttacaacagtccatcctggcaccgtgtgcaaagtctgcctgtagggaaggacctggctttgggactatcctgccgcctcccatactaagccagatctgcttagccttgagctggaagaaggctatagctgtagaacttgggaatcaactcatccttttaacacacaatccagaccatgccactcccttgttctcatggctctcatggcatcctcagtcccttaggaaacaatccaaggtccttaccatggccccagctcctggctacttctctgcaccctgtccccacctggcctccttgctgtttctcaaatacaccaaacaggttcccttctaatggccttgcatttgcagttcctttgatgaggatccactcctccagatatacgtgtggcctgctccctcctttccttcagtctctatccaaatgtcacctcttgggagacatcttctctaaggtgggcccaccccactcacctgccgagtttaccttcgtgacactcatctcatctgatattacatccattacctattgctcactgctttatttggttttcgcctgcctctgctctaaatgtgccccgtgactgtagaagctaaatcattgaagtgcctggcacatagtaggtactcagggaacaactgttgaggacagaatgaaggaatccatctgcctcactcttggtgagaatcttgggacccagagtgggaagaacttgttcaatgtcacctttgctagcttatgtgtagcagacctaagttcacccacatcccctggctcccagatggaggttttggtgcccgttcacacagactgtgacctaggaagggccgcctaccctcaccagtcacctacacagaccccaaggtggactcaagcacagacagcccagtgcatgagggcaccttgcacccaggtctccttctgtgctgtgcctgagtctcttctcatcgcttactcattctgaatctgcatgaaaaggtgcttttagacaccagatcaagatgatcatgggctggggatcaccagtcctagactaggt

SEQ ID NO: 55719 - DNA, 1777 bp, Homo sapiens
ggcttgtggaattgtatctgtagctctcacttgagaattatagatcaatttcagatcagaacaatgggctagattgctgctattcaatagctgtgtgatcttgggagtctcttcgcctctctgttagtctgttaccttccaataacatgcaaggatctctaaatcaaattcatccacatgtgcagatcaatccgcacatatgaatgacacacagcctttgttatttttaagatgggaaaagacaggggtgactaggagaacagggggctttcagaaactgagaatgtggaagatgaccacccctgaatggaaagatcagaaagaagaggaggcaaggaacaaaagaagaacttcaaaagactgagctatgggatctagagtaggctctgtgcacttccaacaaggccaggccaaaccaggcaaaattctgtggttttagctatgcagctaccaaggtcctccgctttctatcatttaagaagtaggtttgtgtaggtttggagtgtagcgtgtatgtgtgttttaacttggctaacttgaaacttccttcccccagattaatcaaagaatcagcatatgacttactcagaatataggtcacagaattatagaatgttattgcaggaagaagcctttgaggatacacacttgtacacacccaaagagtggcttaataaatgcatgttgaatgaggacacttcattacagggttaaagaattatccatctattcaacaattattacatacctattatgtgttggatcctgtattaaaattaggccagttgcacaaattcatctgctagagcagcaaaaaaaatattttattcaaggctgtttagcagtttaatcaaaaagctaaactattttttaaagccctgaatgatatttttttcccctatacttggacaatcaggcatatgggccttggcataaaaatgttccagatcccagttggggtaaggcatgtggctaaaaagaccttcgagcacttccagtcctttccacactcctggaaggtttttaagaaaaaargaagaaaaagaaacaccctttggtttcagtatgcactctctgtacttgcatctgtctctttggacgtggttggccaaagagtctgctaaaaatataacgaaagaaggtgggtgggaagtgaggaatatagggagaaaattgaaaaaactaaccctgttccttgctggctgcctccccccacaaattcaccacaatgtttaagcatgtcactatttatccctctttttagccatatttttgacacttgacatgggtatatactgtcttttaaataaaaggtaaaagtgctctcatttttattcttcctgttgggctcaagagtctctgagactgagaaaaactctctagcttcaagcaggtctttgttctgattttgctgcctcccaatggctggaaggcaggctggggagtggtgggaagggtgtttgagccaatacccattgtatgggtagcagaatccgccaagatcctgaaggtatacgggaaccagtttaatagacttccaaggaccagccagctgggagtacccaagtctctggtttctcagtttccaggatctgttcatccatgtcatggttggagtttgcccaaagggaacagaggaagggagctcagcaggagctagtccgggagctgggtggttggatcattgggcttcttggagtttgcttcaactcttccctttcagcaaaggttactggagcaggctgggcctacttgggctaggagagctgagtcatgc

SEQ ID NO: 55720 - DNA, 1777 bp, Homo sapiens
ggcttgtggaattgtatctgtagctctcacttgagaattatagatcaatttcagatcagaacaatgggctagattgctgctattcaatagctgtgtgatcttgggagtctcttcgcctctctgttagtctgttaccttccaataacatgcaaggatctctaaatcaaattcatccacatgtgcagatcaatccgcacatatgaatgacacacagcctttgttatttttaagatgggaaaagacaggggtgactaggagaacagggggctttcagaaactgagaatgtggaagatgaccacccctgaatggaaagatcagaaagaagaggaggcaaggaacaaaagaagaacttcaaaagactgagctatgggatctagagtaggctctgtgcacttccaacaaggccaggccaaaccaggcaaaattctgtggttttagctatgcagctaccaaggtcctccgctttctatcatttaagaagtaggtttgtgtaggtttggagtgtagcgtgtatgtgtgttttaacttggctaacttgaaacttccttcccccagattaatcaaagaatcagcatatgacttactcagaatataggtcacagaattatagaatgttattgcaggaagaagcctttgaggatacacacttgtacacacccaaagagtggcttaataaatgcatgttgaatgaggacacttcattacagggttaaagaattatccatctattcaacaattattacatacctattatgtgttggatcctgtattaaaattaggccagttgcacaaattcatctgctagagcagcaaaaaaaatattttattcaaggctgtttagcagtttaatcaaaaagctaaactattttttaaagccctgaatgatatttttttcccctatacttggacaatcaggcatatgggccttggcataaaaatgttccagatcccagttggggtaaggcatgtggctaaaaagaccttcgagcacttccagtcctttccacactcctggaaggtttttaagaaaaaaagaagaaaaagaaacaccctttggtttcagtatgcactctctgtacttgcatctgtctctttggacgtggttggccaaagagtctgctaaaaatataacgaaagaaggtgggtgggaagtgaggaatatagggagaaaattgaaaaaactaaccctgttccttgctggctgcctccccccacaaattcaccacaatgtttaagcatgtcactatttatccctctttttagccatatttttgacacttgacatgggtatatactgtcttttaaataaaaggtaaaagtgctctcatttttattcttcctgttgggctcaagagtctctgagactgagaaaaactctctagcttcaagcaggtctttgttctgattttgctgcctcccaatggctggaaggcaggctggggagtggtgggaarggtgtttgagccaatacccattgtatgggtagcagaatccgccaagatcctgaaggtatacgggaaccagtttaatagacttccaaggaccagccagctgggagtacccaagtctctggtttctcagtttccaggatctgttcatccatgtcatggttggagtttgcccaaagggaacagaggaagggagctcagcaggagctagtccgggagctgggtggttggatcattgggcttcttggagtttgcttcaactcttccctttcagcaaaggttactggagcaggctgggcctacttgggctaggagagctgagtcatgc

SEQ ID NO: 55721 - DNA, 752 bp, Homo sapiens
tggctctgacactaactagctgagagactttgggcaactcttcaggcctcagtttctcacatgtaaaaaaaggatgataatagtatctatcttaactagaaaaaggaatttgaagccacaggcttaacttcagaatgtacttatgtattcatttcttactgctgctgtaacaaatttaccacaaatttagtggcttacaacatgaatttatkctcttatagccctgtaggttggaaatctgaaatcatttccctgggctaaagtcaaggtgtcagccgggctggttccttctggaggctctaaggggagaatctatttatttgcctttttcagcttctagaggctgcctgtatttcttgacttgcacccctttcttcaccttcatggctcatcactcctgtctctgcttccgtcatcacatggccgtctcctcttctggtgtcaaatctccctctagctccctctcataaggatacttgtgatgacatttagagatcacctggatcatctgcccctctccccatccttaacttaatcacatctgcaaagtcccttttggcatataaggtaacagattctgggggttaggatgtggaccactgtggagcgccattgttcaacctaccacaacatgtctgaaatgcaatggtttagtcaataaaaatataatatttgtatcacatttgctccaaagagctttggtagttgaagttattgaattatttctatttaaaaattcatggcatgcctgc

SEQ ID NO: 55722 - DNA, 645 bp, Homo sapiens
gtaagagggaaaattaagctctaaacataatgaaaatctaaaaatagagaacagcaacttcatatacttgtcgctctctttaaaatattttccctattacacatctggaaagtccttcaaaaatgtagtcacttcaccatgagtttgattaacagagtaccaaagtaatttgttttactgcaaaatcaaggaatgataaggaggtaaatttaattcagtaagaaaatttgtccttcttgttatatacatgcaagaatagtaagtcatataaaacttttaatatttttgttcctgaaccagtcacattttaaagctttgatttttttatcagaaagtagaatactttggtgttgataaaaatcagataaatgttaaatcttaatttgttaagaaatagcgtatgagtttcacaaaagaaaatttctaacataccaattacataaaacattttcacataaaaggtgataggagcactgtggtcacagcagtggttctctactgggagtgattcaggcaattctggaaacgttttgggttgycacaactagaggctattggtacctaacgggtgaagaccaataaacctccacgtggtacaacatacaggaaaggtccacaacaaattttctgccccaaaaagtcaat

SEQ ID NO: 55723 - DNA, 767 bp, Homo sapiens
aggaggctgagggatgagaatcacttgaacccgggaggtggagtttgcagtgagcagagatcgcgccattgcactgcaacctgggtgacaagtgagactccatctcaagaaagaaataaattaaataaataaatagcattaaaattgtataactattaggattttgtaataaaatacaggttcacttttacaaatcaacttaattataagataaaagtctttttactcttaccagttttactattatctattcaggatgtaactacccttctcctaagatgtacatataactttaacaactcggtattgtaaagtccaagggaaagaacaaatttcaagtcatccacaaaaacagtcagtaaatgactccagcaccttgtcaggttattcttcatacacagcttgctgccaaatgggaacatgctttaaggtgcagcctgggcattcttcttcctcagactccttatggttactactaggaccaaacttacacgaatgtggccagcagaaaactcattttacgaagtgatttcagaggtatcctctctcctcactctggttgattatcaaaatgccaccactagcagccttgcattttagctcaaggttttcaatgcaggtagaagwcagatttcccagggagagaatgtacacattagggttaatggcaaacgtgagcagtttttatgtgtgacactggataagggcagacagagggcacttcccaaacagaaggatgtgggatgggcctgagagtttgcaaacca

SEQ ID NO: 55724 - DNA, 767 bp, Homo sapiens
aggaggctgagggatgagaatcacttgaacccgggaggtggagtttgcagtgagcagagatcgcgccattgcactgcaacctgggtgacaagtgagactccatctcaagaaagaaataaattaaataaataaatagcattaaaattgtataactattaggattttgtaataaaatacaggttcacttttacaaatcaacttaattataagataaaagtctttttactcttaccagttttactattatctattcaggatgtaactacccttctcctaagatgtacatataactttaacaactcggtattgtaaagtccaagggaaagaacaaatttcaagtcatccacaaaaacagtcagtaaatgactccagcaccttgtcaggttattcttcatacacagcttgctgccaaatgggaacatgctttaaggtgcagcctgggcattcttcttcctcagactccttatggttactactaggaccaaacttacacgaatgtggccagcagaaaactcattttacgaagtgatttcagaggtatcctctctcctcactctggttgattatcaaaatgccaccactagcagccttgcattttagctcaaggttttcaatgcaggtagaagayagatttcccagggagagaatgtacacattagggttaatggcaaacgtgagcagtttttatgtgtgacactggataagggcagacagagggcacttcccaaacagaaggatgtgggatgggcctgagagtttgcaaacca

SEQ ID NO: 55725 - DNA, 760 bp, Homo sapiens
atcacccgaactagaagttatttcaccaccacccctgaattcctgaaattccttgttgtaaacatcacatacataggtagatatatattaataaatagactgtgtgtatacacatattgcatacatgctctctactcctccaggaaaggactgtctctctcatctttgtagccctctcccaacacctaatacagcctgccttgcatattggaagtgtccattgcaaaatggagagcatgagcacaaacatattaatagaagattgatatccatcccacagtaaactcctacctgaaatgataggtttaatcatgtcctctcattcatgaagagaagtggggcaaccaatgactctctcaagaaggtgggagggatgttattattataaactgctgtacctcccacaagttgaagtactgaattatttatgtaatttttatttgtatgattgtatattttacgatgtccatcttttccaataaactgcaagtctcctcagggcagggatggcatctgtcctatcccccactgcatcctcatagcccatcacagtgcctgrcacatggtaggtagtaaataaatatttggaggaaaaaaaaaggaaaggagaaaaggggaaagaaaagactttacaatctttgaagctgaggttgcatttggatagtttgactatgatctacccaaggctgtatttatatttatactgcttggtttaaaaaccaacctcttgttaatatgatcaaattagttgtacgatcat

SEQ ID NO: 55726 - DNA, 1127 bp, Homo sapiens
tcacagaaaggaagactagagcttaccccacacccagagcccagacaagctttgtcccaggctgttgtctgttgttcaggtccatttatcttccgtaaacatcatttactcctccttgagaattgcctacatcccccacttttctctcctttatgaagaggtcatttaagcttcaaccatctggcccttctttgagcctcatattttgtaggacacccttgtgcttgcacctaataaatgtgtattccttttctctgttaatccgcctattgtcaggttgttttataggctggaattattgaaacttcagggggtgaaagttcattttcttctacagtcacatgtttctgttgttaattccctagtaggacacttgagtttttttcctaattgcatttttccataaggtattgtggtacaggtggcatttggttacataagtaagttctttagtggagatttgtgagaacctggcacacccatcactcgagcagcatacactgcaccatattttttgtcttcttttttttttgagacggagtcttgctgtgtcacccaggctggagtgcaatggcaccatcgcggctcactgcaagctctgcctcccasgttcaagtgattgtcctgcctcagtttcccaagtagctgggattacaggcacgcaccaccacgcccagctaatttttttatttttagtagaatcggggtttcaccatgttggtcaggctggtcttgaactcctgacctcgtgatctgcccgccttggcctcccaaagtgctgggattacaggtgtgagcaacagcacctggcatttgttgtcttttatcctttgcccccctcccacttttaccccccaagtccccaaagtccacggcaaaactgttttcagtatcttcttttcaggatcttctacaaaagacagtctcatttaggtaaaagttgatattttacaaaagataaactctttttattgaactatttagtggctgtgtttcaaaggacctcacagagtttagtaataattactttttaaaactgtcatatgaattatggctttacaataatgagactgagcccttctaccaaacacaactgtaactttctggtcacgtcttacacatattga

SEQ ID NO: 55727 - DNA, 541 bp, Homo sapiens
caagggtttctagaaatacgtaattctaacaattaaaatgtgcttttcggtctacagttttctatcaagcttataaattagaatgcagttgcccattttgattccatggtgaaaactcatagattaaataagaataggacatgaagacaagatgctataatatgwatgcagtgcactcacaacacagaatatgacaaatctcccactaataactaattttaaaaaatattttgatatatttaatgttggaataatataatgtatttttaaaattattaccagagagaaatagaaagttacttttctatataaatatatcctacccccagtggatgagttttcccagatggaggaatagaaaatatagtagatccaattatctaaccaggaactttcggtgacttggaaatttcaagatccaacaacaggctccccactattaggatgctgggcagcgctgactcccacaaatgtatgcaggggccaggtagccaacatcagtgtgtatatttggcatgctattaatcagtgtgaaatggca

SEQ ID NO: 55728 - DNA, 541 bp, Homo sapiens
caagggtttctagaaatacgtaattctaacaattaaaatgtgcttttcggtctacagttttctatcaagcttataaattagaatgcagttgcccattttgattccatggtgaaaactcatagattaaataagaataggacatgaagacaagatgctataatatgaatgcastgcactcacaacacagaatatgacaaatctcccactaataactaattttaaaaaatattttgatatatttaatgttggaataatataatgtatttttaaaattattaccagagagaaatagaaagttacttttctatataaatatatcctacccccagtggatgagttttcccagatggaggaatagaaaatatagtagatccaattatctaaccaggaactttcggtgacttggaaatttcaagatccaacaacaggctccccactattaggatgctgggcagcgctgactcccacaaatgtatgcaggggccaggtagccaacatcagtgtgtatatttggcatgctattaatcagtgtgaaatggca

SEQ ID NO: 55729 - DNA, 541 bp, Homo sapiens
caagggtttctagaaatacgtaattctaacaattaaaatgtgcttttcggtctacagttttctatcaagcttataaattagaatgcagttgcccattttgattccatggtgaaaactcatagattaaataagaataggacatgaagacaagatgctataatatgaatgcagtgcactcacaacacagaatatgacaaatcwcccactaataactaattttaaaaaatattttgatatatttaatgttggaataatataatgtatttttaaaattattaccagagagaaatagaaagttacttttctatataaatatatcctacccccagtggatgagttttcccagatggaggaatagaaaatatagtagatccaattatctaaccaggaactttcggtgacttggaaatttcaagatccaacaacaggctccccactattaggatgctgggcagcgctgactcccacaaatgtatgcaggggccaggtagccaacatcagtgtgtatatttggcatgctattaatcagtgtgaaatggca

SEQ ID NO: 55730 - DNA, 813 bp, Homo sapiens
tgacatattccgaaagcagctgggctaccacttgagagaaacggctgcgagcaggacctgctcaacatttatctcctggagtagtggttcccaaccagggtgaatttgcaccccactggcatttgccaatrtctggagacatttttggttgttgaaatggctgggggtggagaatgctactaacatctagtgggtagagaccagggatgctgtgctaaacagcccccaatgcacaggacagcccccacagctgagatatatctgggctcaaatgtcaagagtgccaagggttgagagtcccagctctggggcgttcatgctctgaatccctgaccgggtccctccggagcgctcctctcctctttctctctctccttgctcctgaatttggctgaacttgaaaatcttccaccatttgaccagaaaaggatttcaagctgccttcctctttcctgagctggggatctgcactgagccaagcatctccttggaaactccttggcttcatgcaatttggaaaacaataaatttgcaaggttgcacaaaacatccagaagcctaaagctggctggaactactaaatccatttttttccttccacatcaaaaataatttcttggccttagaggctttctccactgtcacaagacacaggcagatagttttacatggtgaacaaccctgccaaacatatctctgctttcagagctgttgggtggatttctagtccagccaggaatatcagcacacttttccactgagccgaggttggttttatctgaggcagacctgataattgcctttcacacccca

SEQ ID NO: 55731 - DNA, 813 bp, Homo sapiens
tgacatattccgaaagcagctgggctaccacttgagagaaacggctgcgagcaggacctgctcaacatttatctcctggagtagtggttcccaaccagggtgaatttgcaccccactggcatttgccaatatctggagacatttttggttgttgaaatggctgggggtggagaatgctactaacatctagtgggtagagaccagggatgctgtgctaaacagcccccaatgcacaggacagcccccacagctgagatatatctgggctcaaatgtcaagagtgccaagggttgagagtcccagctctggggcgttcatgctctgaatccctgaccgggtccctccggagcgctcctctcctctttctctctctccttgctcctgaatttggctgaacttgaaaatcttccaccatttgaccagaaaaggatttcaagctgccttcctctttcctgagctggggatctgcactgagccaagcatctccttggaawctccttggcttcatgcaatttggaaaacaataaatttgcaaggttgcacaaaacatccagaagcctaaagctggctggaactactaaatccatttttttccttccacatcaaaaataatttcttggccttagaggctttctccactgtcacaagacacaggcagatagttttacatggtgaacaaccctgccaaacatatctctgctttcagagctgttgggtggatttctagtccagccaggaatatcagcacacttttccactgagccgaggttggttttatctgaggcagacctgataattgcctttcacacccca

SEQ ID NO: 55732 - DNA, 813 bp, Homo sapiens
tgacatattccgaaagcagctgggctaccacttgagagaaacggctgcgagcaggacctgctcaacatttatctcctggagtagtggttcccaaccagggtgaatttgcaccccactggcatttgccaatatctggagacatttttggttgttgaaatggctgggggtggagaatgctactaacatctagtgggtagagaccagggatgctgtgctaaacagcccccaatgcacaggacagcccccacagctgagatatatctgggctcaaatgtcaagagtgccaagggttgagagtcccagctctggggcgttcatgctctgaatccctgaccgggtccctccggagcgctcctctcctctttctctctctccttgctcctgaatttggctgaacttgaaaatcttccaccatttgaccagaaaaggatttcaagctgccttcctctttcctgagctggggatctgcactgagccaagcatctccttggaaactccttggcttcatgcaatttggaaaacaataaatttgcaaggttgcacaaaacatccagaagcctaaagctggctggaactactaaatccatttttttccytccacatcaaaaataatttcttggccttagaggctttctccactgtcacaagacacaggcagatagttttacatggtgaacaaccctgccaaacatatctctgctttcagagctgttgggtggatttctagtccagccaggaatatcagcacacttttccactgagccgaggttggttttatctgaggcagacctgataattgcctttcacacccca

SEQ ID NO: 55733 - DNA, 813 bp, Homo sapiens
tgacatattccgaaagcagctgggctaccacttgagagaaacggctgcgagcaggacctgctcaacatttatctcctggagtagtggttcccaaccagggtgaatttgcaccccactggcatttgccaatatctggagacatttttggttgttgaaatggctgggggtggagaatgctactaacatctagtgggtagagaccagggatgctgtgctaaacagcccccaatgcacaggacagcccccacagctgagatatatctgggctcaaatgtcaagagtgccaagggttgagagtcccagctctggggcgttcatgctctgaatccctgaccgggtccctccggagcgctcctctcctctttctctctctccttgctcctgaatttggctgaacttgaaaatcttccaccatttgaccagaaaaggatttcaagctgccttcctctttcctgagctggggatctgcactgagccaagcatctccttggaaactccttggcttcatgcaatttggaaaacaataaatttgcaaggttgcacaaaacatccagaagcctaaagctggctggaactactaaatccatttttttccttccacatcaaamataatttcttggccttagaggctttctccactgtcacaagacacaggcagatagttttacatggtgaacaaccctgccaaacatatctctgctttcagagctgttgggtggatttctagtccagccaggaatatcagcacacttttccactgagccgaggttggttttatctgaggcagacctgataattgcctttcacacccca

SEQ ID NO: 55734 - DNA, 703 bp, Homo sapiens
ccgccatcatccaaatacctcccatcaggcctcacttccagcattggggattaaaattcaacatgagatttgggcggcgacaaatatctaaattatatcactgtgaatgtgtccttatttggaaatagggtctttgcagatgtattcaaattaagacgaggtcattacggtgaacactaattcaattaattcaacatgactggtatccttattagagggcaacatttggacatagagacagactctcacagagggaaagcagtgcagacaygggataatacagccctgcgaggggccacgtggtgacgggatggaggcagagagattggagttgggttgtcagaagccagggaacatctgaggctgccagaagctggaagaggaaaggaaagatcttcctctgaggcttccaagggagcatggtcctgccaacaccttgatcttggacttctagcctccagaactgtgagacaatgaatttctcacagttgtttgaagccactccatttgtgacattttgttgtgagagccctaggaaactgatacagggggtgatgtggggtttagggaaccaatacaaaaaaaaaaaaagaaaaacattaaaagacttcattgggaaacccagtatgtataatgtgatagcatttattcatctatgtaaaattacaacataacatatgcatatgtataaagaaattcaaat

SEQ ID NO: 55735 - DNA, 698 bp, Homo sapiens
cactttgggaggccgaggcaggcggatcacgaggtcaggagattgagaccatcctggctaacacggtgaaaccttgtctctactaaaaatacaaataattagccaggcgtggtggcaggcgcctgtagtcccagctactcgggaggctgaggcagtaggcgtgaactggggaagaggagcttgcagtgagctgacatagcaccactgcactccagtctgggcgacagagcaagactgtcaaaaaaaaagaaagaaaagaaaagaaaagaaaaagaaagaaggcagggcacggtggctcatgcctgtaatcccagcactttgggaggccgaggtgggcagatcatgaggccaggagttcgtgaccagcctagccagcatggtgaaacccatctctactattaaaaaaataataataaaaaaataaaaataaaaaaaggaagaaagaaagacattagccaggcatggtggcacgcgcttgtaatcccagctacttgggaggctgagwcataagaattgcttgaaccctggaggtggaggttggagtgagccgaggtcacaccactgcattccagcctggtgacagagagagactctgtctcaaaaaagaaaaaagaaaaatagaggcaagaaggccactcttcatgatatacaccacatttctggtagggagttatagcagcatcctctgtgctgttaga

SEQ ID NO: 55736 - DNA, 634 bp, Homo sapiens
tgtatcccagtggctcagcagaaaggagtgaagacccactttcttaaaaacctcagagccctccagagacatgacattatccaatgtactccctctggaagagccctgagtttcctgagctataaatattgagtcttgtgaggtttcctctcagagctaaggtacagctaatgaagtttcacatccgtgctgagtttgacctaaaaaaaaagttkaaactgtcaggcccatcaaaatgaggagctttttcttaccccaatctcagtgagctaacaaggcctttcaagaaagaaattcccacaaatggagactgttgaggcatcggtggttacttctgatcaccacagaaacccccaaactactacatccctggcttccacaggggcagggctgcctcaccctcctactccatcttctccaaagatgagatgctgctgagtccaccagcttttatcaaccattcagcactcaaagtctactcccctcacgtttaacccaacttggttccttcgtggtcttcactactgccaagacccagtttttggcagcctaggagatttcagtggcttaacatttttcctcttatcccaacttctcaatggcctacagccctctgttctctgccatgatccca

SEQ ID NO: 55737 - DNA, 634 bp, Homo sapiens
tgtatcccagtggctcagcagaaaggagtgaagacccactttcttaaaaacctcagagccctccagagacatgacattatccaatgtactccctctggaagagccctgagtttcctgagctataaatattgagtcttgtgaggtttcctctcagagctaaggtacagctaatgaagtttcacatccgtgctgagtttgacctaaaaaaaaagtttaaactktcaggcccatcaaaatgaggagctttttcttaccccaatctcagtgagctaacaaggcctttcaagaaagaaattcccacaaatggagactgttgaggcatcggtggttacttctgatcaccacagaaacccccaaactactacatccctggcttccacaggggcagggctgcctcaccctcctactccatcttctccaaagatgagatgctgctgagtccaccagcttttatcaaccattcagcactcaaagtctactcccctcacgtttaacccaacttggttccttcgtggtcttcactactgccaagacccagtttttggcagcctaggagatttcagtggcttaacatttttcctcttatcccaacttctcaatggcctacagccctctgttctctgccatgatccca

SEQ ID NO: 55738 - DNA, 597 bp, Homo sapiens
atgkatttatttattttgagacagggtctcactttgttacccagactgaagtgcagtggcacaatcatagctcactgcagcctcaaccacctgggcttgagcaatccttcaatgtcagcctccccgagtagctggtcctataggtgcatgcctccatgcctggctaatatatttttttaagtttttgtacagatggggttctcgctatggtatccaggctggcctcggacacctggcctcatgtgattctcctgccttggcctcccaaagtgctagagttacaggtgtgagccattgcacctagcttatgctcatttatatgagaattttttgcattcatgataattcaaaacgtgtctgctaaacactgttctagaaaagtttcttagtcaatgggttttgctggttctgaaagtgacatggggcttctagtgatgattcttgtcaccaagcacaagctcctttgcaaagtcctggggggggtcttataggatacacagctgttctgctgatgtttcatttacttcatgaaaatgccatgattttcaaagtcaaagtaaaatcagattgcctttctactttgaaacaattacggaa

SEQ ID NO: 55739 - DNA, 654 bp, Homo sapiens
cctcccgagtagctgggactacaggcacacaccaccacgcctggctaattttttgtgtttttagtagagacggggtttcactgtgttagccagaatggtcttgatctcctgacctcgtgatctgcccacctcggcctcccaaagtgctgggattacaggcgtgagccactgcgcctggccaactctcatttttaaaacctttggatctcgtgagacttattcgctatcatgagaacagcatgggaaagatctgcccccatgattcaattatctcccactgggcccctcccataacatgtgggaattatgggaactacaagatgagatttgggtggagacacagagccaaaccatatcagaggcgcaaaggcacatcttacatggcaacaagtgagagagcgtgtgcagaagaactgccctttataaaaccatcagatcttgtgacacttattaactatcatgagaacaggagtgcggaagcygcctccatgattcaattatctccacctggttcctcccatgacacgtggggattatgggaactacaattcaagatgagatttgggtggagacatagacagaccataccgatgggcaaaccctgggcttgtggacagcagtgatgcataagctacacaatttacaatctagcag

SEQ ID NO: 55740 - DNA, 679 bp, Homo sapiens
tatgggttgctcaggtggctctgctgatcttggccggactcacatatctagagttcaggtgatttaagctgacctaggctggcctcttctttcattttccagcaggctagactgggcatgtttatggtaatgacagaagtgctacagaaaaggggcagaaacatgcaaagcctctttaggcccagcctcagaactaacactatcatttctgccacattctgttggccagtgcaagtcagagaccagcccagatgcaagaggtagggaaataggctctgcctggaagtgcaggtcccatggaataggacatgaatgggttaggaatgagcctttggccatcaggacgttagtgttaagcttttgcagaaaggacttgttggacaaataacagattcctgctgcgggaatggagaccagctaatatggcctgagtcccgaaagcccatatccttaggctgtatttgtgaggttttaatttaatctttgtatatatcgtgagcactcttcgttgaccttatagtgttgctatcatctcctaagttgattggctccctgaatgtaaaaggattttcagaggcaggcatggtttgtagcaaagtcagctgtaatccctgatgatggtatcatcatcragggatgccaagagggtaaaagcactatttcagattatggctacgtg

SEQ ID NO: 55741 - DNA, 1723 bp, Homo sapiens
ctggggcttagtggagtgagaaatactagcatcctgtcttttttagggtgaaaccatagcctcaaactaggatgtagagagagatggagccctgtcttggctgctcatatactgggtagagtttccataataaggaagaagattaatgggcaaatcgcagctcaaatgccacagactcttgctattatgattgaaattttaaagattttcttgaattaatgtttcttatttgctgtatggcccttacaacactttccagacactttaaatgatggatattttaaataattttctctaattcgattgttgttttgctggggaaagagtccaccaaacttgttattccattctcccagaagtcccacctcttaattcctctttatatattcaccataatatctctttgcacctaatatagaagtgaaaagcacaagctccagtgtaaccagcctgaattcaagtctctagtctgccacttgttagctgtgttacttagcacatgttattaaactaatagtagctacctcaggggattgtggtgagagtaaatgagctaatccattgaaaatgcctagcatggtatttgtctcagagttaggcatcccctaaaggatggctgtcatgttcatcttggtaaccctgcatgatgacagattgccacaagggggcaccaagaaccatgtataatgatgaaggactagagggattcagttaggtcgctctagcagttacatttgtaggctcacgtttacatttgtaagccagccagaggtaggtattttcccagaaaacaaaagaaagaggttgaaggcatgttataaacattgccataccatttcctacagaagatggaaattcaggatccttcctaaacatcaccaagccatttccccaacttggaagcttagctaagcaaaaggaactatgctgtgaaagggggagtgtctcttgatttgcaaggtactttcctgtgtacaaggcactgttccatgagttgaggggattcaaaggctcccttaaggagcaatcaactgtagtaagttggcatttacttattgagtgtctgccatgtgctaaggattctcaatagcttaaggcatcattatgccattccttttgtttttattgaagagttccccagaggcttggctgaggatttagcccatgtccagaggatgataaaaagtcaacagacaatctggagcagggagaggacaacttaatgaagaatgaatttagcatgattgattgattgatttttattttattttatttttttttgagacaaggtctcactctgtcacccaggctggagtgcagtcctgcgatctcagctcacagcaacctgtctcccaggttcgataaattcttctgcctcagccacctgaatagctggcattacaggaacacaccaccacacctggctaatttttacayttttagtagagacggggttttgccacgttgactaagctggtctcgaactcctgacctcaagtgatccacctgcctcggcctcccaaagtgctaggattacaggtatgagccactgcggccagccagaatgaatttagctcgatttatttagagtggagtgcaggaaagaagagcgtcaaaggccagggatgcccatggcaatgttgaaacagattgatgtgaagtcaaacactattaaagcagaaattcctaatataattaaattttaagagaaatcacaatagtt

SEQ ID NO: 55742 - DNA, 691 bp, Homo sapiens
ccgccaggccaatctcatctaggtggcctccttttcccgcgcgcgcagcctgtaccctcgacggccgcgggcctgaaaggaggagaactcgagagcsgtagttgtacagcagcagtcgctccgcaggagtctcttatcagagtgggatctggttccaacgcctatccagttaccatcgccttctggggcatttgcattctcttgtctgaaaagtagatctttgaaatcctcgagctgtgctctactaataataggttttcgttccagacagtttagctaattactgtcagataaagtaagtatggctgcatccatggaagcgtttgattttattttaatcgagtgtatctgccttcctaccctttcatcacctcatacatttatacaagctctctcccccaccctatgattaaagatcatcagtaaatggtggcaaagtccttgaaggggaagtgctgtatagatgcctaaacgtctgtacctttttttttttttaaggaaaaccacatgctagccattacaataaatgcattatcaaatgaaaaatgtgacaattttttgaaaactgttaagtgttctcatagctgttattgtctacacaaagattgcttaatgcacatataaatataggcagataatggataattttagttgtaaatgccactgcttatcccgttgtctctcaactttt

SEQ ID NO: 55743 - DNA, 691 bp, Homo sapiens
ccgccaggccaatctcatctaggtggcctccttttcccgcgcgcgcagcctgtaccctcgacggccgcgggcctgaaaggaggagaactcgagagccgtagttgtacagcagcagtcgctccgcaggastctcttatcagagtgggatctggttccaacgcctatccagttaccatcgccttctggggcatttgcattctcttgtctgaaaagtagatctttgaaatcctcgagctgtgctctactaataataggttttcgttccagacagtttagctaattactgtcagataaagtaagtatggctgcatccatggaagcgtttgattttattttaatcgagtgtatctgccttcctaccctttcatcacctcatacatttatacaagctctctcccccaccctatgattaaagatcatcagtaaatggtggcaaagtccttgaaggggaagtgctgtatagatgcctaaacgtctgtacctttttttttttttaaggaaaaccacatgctagccattacaataaatgcattatcaaatgaaaaatgtgacaattttttgaaaactgttaagtgttctcatagctgttattgtctacacaaagattgcttaatgcacatataaatataggcagataatggataattttagttgtaaatgccactgcttatcccgttgtctctcaactttt

SEQ ID NO: 55744 - DNA, 691 bp, Homo sapiens
ccgccaggccaatctcatctaggtggcctccttttcccgcgcgcgcagcctgtaccctcgacggccgcgggcctgaaaggaggagaactcgagagccgtagttgtacagcagcagtcgctccgcaggagtctcttatcagagtgggatctggttccaacgcctatccagttaccatcgscttctggggcatttgcattctcttgtctgaaaagtagatctttgaaatcctcgagctgtgctctactaataataggttttcgttccagacagtttagctaattactgtcagataaagtaagtatggctgcatccatggaagcgtttgattttattttaatcgagtgtatctgccttcctaccctttcatcacctcatacatttatacaagctctctcccccaccctatgattaaagatcatcagtaaatggtggcaaagtccttgaaggggaagtgctgtatagatgcctaaacgtctgtacctttttttttttttaaggaaaaccacatgctagccattacaataaatgcattatcaaatgaaaaatgtgacaattttttgaaaactgttaagtgttctcatagctgttattgtctacacaaagattgcttaatgcacatataaatataggcagataatggataattttagttgtaaatgccactgcttatcccgttgtctctcaactttt

SEQ ID NO: 55745 - DNA, 474 bp, Homo sapiens
  misc_feature (1)...(474): n = A,T,C or G
aggggccagttgtcctcacttgctacatcactaccaagcttccccacatggacaccatctctctacgttgaggagaaacaggcagaaatgcataggttttgttttgactctaacaacaatttcctttggctttaaaacttatgttggacagaaacacaaccactgtatgatctcacttgtatgtgaaatcttaaaaagttgaactcagaagctgagagtacaacagtggttaccgggaatggggatgggaggagaggtggcagacaaagttacaaaatttcagttaaacaagaggaataaattcaagagacctgttgtacaacatgatgatgacagttattaacaatgtattgtatacttaaaaattgnnnnnnnnnnnnnnnnnnnnnnnnnnnnnnnnnnnnnnnnnnnnnnnnnnnnnnnnnnnnnnnnnnnnnnnnnnnnnnnnnnnnnnnnnnnnnnnnnnnncmcatg

SEQ ID NO: 55746 - DNA, 709 bp, Homo sapiens
tgtgtcacatcatgtaccaggctgcaaggcaagtctctcaaggaatttacagtctagtagagagataagtgacccrtggtccacttgactttgtgatctgtttcctgatgaaatttcaggaacaagaaactaaaatcaatgaaattgattcactcactggtgtggtgtcctcgaatggcctccctggccaagcactggccagccctgcctccttttctgggccacctccagccagggctgggtagctatcccagggctgggttctgaacagaggctgcctctggggagggggggactccaaatgctgggcccacggaataaaatagcctgaaggaacaaaacagccactgacccgatgggaaagaataaaagcctcctctcctcgacttgggcagaaggacggtgaaagaacatgcaagcacagttgtggatattgtgattgctgatttaattttttttttctttttttaatggggcctgaattgtttcccttccctgacctgacctgtacaataagagtttgccgaccacaggtctaaagagaaaaagttctcaaacttttaaaatcactttcatgtggtgcttctagtaacgtcttgcaggtggaacacagaagggaggcatctgggctggggccttccccagctgcagagctgtttatttttcttcccccgatgaagttgaccttggcttcatcactttccattct

SEQ ID NO: 55747 - DNA, 1342 bp, Homo sapiens
ctgtgggcttcatcttccacatcttcttgtcccttcttaaaatgagttacccatttataaactgccgaatgctttggggcacattcccataaacttttcataaagcatcagtgattttgccactcttccactcaagcttcaccataaatttgcwgtttattcttatttcaattttagcaggattcatgttgctctgatagggactcttttcaaactgatattttatccttaatgcctcaaactagatcctgtttagacatgttataacaagttagtatgagtgcatttggtacaaaaaattttttgaaatccatgcatagctttctcataatacacattttcatgaagtttttgaagtcctcatataatccatatttatctccatgatgatgtaatcatacgcacacatatacatatatgtacataagtgcaaaattttaagaagtttcattattgttttataataatgtgttttttagaagcatttttttctatattgagattttcttatttgaaataccttgtggaaaacccttttatcccaactgacagagctctaattcattcttttttgatgactgtataatgttctttggtggatccagttgatgatcactcccattgtttccattcgttgttgtcattgttcttggtttttgcaggcagtaaatatcctgtaccatattcttatgtatttgagctttcatttattttgctagattcccagaaagggaatttgagtgaagacaagtgtattttcgtttttaatgaatgtggacacattgtttatcaacaaggcttttacaatacacatttcctcttaaacacatttctacgcttgtacacattttcatcctctttaagaaatgtgaaatggacatgttaacagcaagaacagtgattattactctttcatactttgccaatctaatgggcattttacatttacattttacttttacattttctgcaccaccagtgcagttgaacatctttgagtattttctggccatttatatccagtcttctgtgaatttttcctcctattcttttcctatggggaaaaactgtcttcttgttaatttgtagaaactttttgtgcatacatcatatattaaccgtttttccagttttgcaatttttttaaaaaaaatctattgtttatttattgggtttgtttagggtaacatttgccatcaaaagtatctagtttttacttagccaaatatgcctatcttacctttcatagtatgtgagttttcagtttgaatgatacacatagccttctataattttttgaaatatatttgtttaatatttttatgtttatatttttaatgca

SEQ ID NO: 55748 - DNA, 1342 bp, Homo sapiens
ctgtgggcttcatcttccacatcttcttgtcccttcttaaaatgagttacccatttataaactgccgaatgctttggggcacattcccataaacttttcataaagcatcagtgattttgccactcttccactcaagcttcaccataaatttgcagtttattcttatttcaattttagcaggattcatgttgctctgatagggactcttttcaaactgatattttatccttaatgcctcaaactagatcctgtttagacatgttataacaagttagtatgagtgcatttggtacaaaaawttttttgaaatccatgcatagctttctcataatacacattttcatgaagtttttgaagtcctcatataatccatatttatctccatgatgatgtaatcatacgcacacatatacatatatgtacataagtgcaaaattttaagaagtttcattattgttttataataatgtgttttttagaagcatttttttctatattgagattttcttatttgaaataccttgtggaaaacccttttatcccaactgacagagctctaattcattcttttttgatgactgtataatgttctttggtggatccagttgatgatcactcccattgtttccattcgttgttgtcattgttcttggtttttgcaggcagtaaatatcctgtaccatattcttatgtatttgagctttcatttattttgctagattcccagaaagggaatttgagtgaagacaagtgtattttcgtttttaatgaatgtggacacattgtttatcaacaaggcttttacaatacacatttcctcttaaacacatttctacgcttgtacacattttcatcctctttaagaaatgtgaaatggacatgttaacagcaagaacagtgattattactctttcatactttgccaatctaatgggcattttacatttacattttacttttacattttctgcaccaccagtgcagttgaacatctttgagtattttctggccatttatatccagtcttctgtgaatttttcctcctattcttttcctatggggaaaaactgtcttcttgttaatttgtagaaactttttgtgcatacatcatatattaaccgtttttccagttttgcaatttttttaaaaaaaatctattgtttatttattgggtttgtttagggtaacatttgccatcaaaagtatctagtttttacttagccaaatatgcctatcttacctttcatagtatgtgagttttcagtttgaatgatacacatagccttctataattttttgaaatatatttgtttaatatttttatgtttatatttttaatgca

SEQ ID NO: 55749 - DNA, 1342 bp, Homo sapiens
ctgtgggcttcatcttccacatcttcttgtcccttcttaaaatgagttacccatttataaactgccgaatgctttggggcacattcccataaacttttcataaagcatcagtgattttgccactcttccactcaagcttcaccataaatttgcagtttattcttatttcaattttagcaggattcatgttgctctgatagggactcttttcaaactgatattttatccttaatgcctcaaactagatcctgtttagacatgttataacaagttagtatgagtgcatttggtacaaaaaattttttgaaatccatgcatagctttctcataatacacattttcatgaagtttttgaagtcctcatataatccatatttatctccatgatgatgtaatcatacgcacacatatacatatatgtacataagtgcaaaattttaagaagtttcattattgttttataataatgtgttttttagaagcatttttttctatattgagattttcttatttgaaataccttgtggaaaacccttttatcccaactgacagagctctaattcattcttttttgatgactgtataatgttctktggtggatccagttgatgatcactcccattgtttccattcgttgttgtcattgttcttggtttttgcaggcagtaaatatcctgtaccatattcttatgtatttgagctttcatttattttgctagattcccagaaagggaatttgagtgaagacaagtgtattttcgtttttaatgaatgtggacacattgtttatcaacaaggcttttacaatacacatttcctcttaaacacatttctacgcttgtacacattttcatcctctttaagaaatgtgaaatggacatgttaacagcaagaacagtgattattactctttcatactttgccaatctaatgggcattttacatttacattttacttttacattttctgcaccaccagtgcagttgaacatctttgagtattttctggccatttatatccagtcttctgtgaatttttcctcctattcttttcctatggggaaaaactgtcttcttgttaatttgtagaaactttttgtgcatacatcatatattaaccgtttttccagttttgcaatttttttaaaaaaaatctattgtttatttattgggtttgtttagggtaacatttgccatcaaaagtatctagtttttacttagccaaatatgcctatcttacctttcatagtatgtgagttttcagtttgaatgatacacatagccttctataattttttgaaatatatttgtttaatatttttatgtttatatttttaatgca

SEQ ID NO: 55750 - DNA, 693 bp, Homo sapiens
tttgggtttaggagtttgagactagcctgggcaacatagcaaaatccagtctctacaaataatacaaaaaaatagccaggtataatggtgtgtgcctgtgatccgkctacttggttggctgaggtgggaggactgctcgagcctaggactggttgacagaaagagactctatctcaaaaaaaaaaaaaaaaaaaaagtgaaatcaaacagtaatttttagccagcagcctttggaaccaaagtgtttgagtttattcttttgtgggcctcttctctttcctttctggattaggagatcttgatcaatgcagtgggatgacattaggagaaggaaaaatgacttcaggagtcataagtataaaaaccggcttcagattgagaatcagctgaatattcaaatcgtaaaagagtagaagtgcttcggatagtgtctacaaaatacaaaaattagccaggcctggtggctcatgcctgtaatcccagctactttggaggctgaggcagagaatcacttgaatccaggaggtggaggttgcagtgagcagtgagcaggttggagtgccactgcactctagcctgggtgacagagtgagactgtctcaaaaaaaaaacaaaacaaaaaacaaaacaaaaaaaaacccaaaatattctgttcattgcatattaattttaaaggactatttttaaagcaaa

SEQ ID NO: 55751 - DNA, 693 bp, Homo sapiens
tttgggtttaggagtttgagactagcctgggcaacatagcaaaatccagtctctacaaataatacaaaaaaatagccaggtataatggtgtgtgcctgtgatccggctacttggttggctgaggtgggaggactgctcgagcctaggactggttgacagaaagagactctatctcaaaaaaaaaaaaaaaaaaaaagtgaaatcaaacagtaatttttagccagcagcctttggaaccaaagtgtttgagtttattcttttgtgggcctcttctctttcctttctggattaggagatcttgatcaatgcagtgggatgacattaggagaaggaaaaatgacttcaggagtcataagtataaaaaccggcttcagattgagaatcagctgaatattcaaatcgtaaaagagtagaagtgcttcggatagtgtctacaaaatacaaaaattagccaggcctggtggctcatgmctgtaatcccagctactttggaggctgaggcagagaatcacttgaatccaggaggtggaggttgcagtgagcagtgagcaggttggagtgccactgcactctagcctgggtgacagagtgagactgtctcaaaaaaaaaacaaaacaaaaaacaaaacaaaaaaaaacccaaaatattctgttcattgcatattaattttaaaggactatttttaaagcaaa

SEQ ID NO: 55752 - DNA, 614 bp, Homo sapiens
ccagctgccctccttactcattagcatgacactcctactggcaccatgatagtttacaaacaccgtgacaacaactcagaagttaccacccctttcctagaaagatccaaataacctgcccctcaatttgcattgacccacccaataatttacttgcaattgaaagtgggtttacctgagtataaatatagttgttaagagcctgtatgttaccaactctgcgtgcactgcctacgagttagccctgctccacaagragcagtactgtttaataacagattgctgtctaacaccactgccttgcccttgaattctttcctggacaaagccaagaactctcccaaagccccaacttcagggattacctgtctgcaacaaaaggataccacaacttttgaaaagggtttgagattttctaatcagttaaaccagtagttcttaactgtgggctaattttgcttcccaggagacatttgtcaatatctagagttattttcatttgtcacaactggtagcaggtgctactggcatccacttgggtaaaggaccaggttgctgctaaacatcagaactgcttcccacaacaaagaatcatctggcccaaaatggcaaag

SEQ ID NO: 55753 - DNA, 635 bp, Homo sapiens
agtttcagctttctacatatggcttgccagttttcccagcaccatttattaaatagggaatcctttccccattkcttgtttttctcaggtttgtcaaagatcagatggttgtagacatgcggcattatttctgagttattttaaaatgtacaattaagttgttgttgactatagtcaccctgttgtgctatcaaatagtagatcttattcatttttttctaaccattttttttatgcccattaaccatgccacccttcttcccagggattttcgttttgatgaagaccattttgtatttttgcataaagagagtgcctttggtgtcttctgcaaataaagacacatttctgtcttttcaatatacatgcatttagctttttattcttggtttaataaactaggtaaaactgcaaacacaatgttgaatacaaatcctgaaaatggacatatttgcctcactcctgatattaggtgaagtttcatctttcaagattaataggatactaactgaagttttttaaagagatgccctttatcagaatgaggaatttgatttctcttcctattttcttgagatttattattattaatgattctttactacttacaaatgtatttttgtatatctattgag

SEQ ID NO: 55754 - DNA, 617 bp, Homo sapiens
caccttttttatactgacagcaaagttgctaaagatctgaaataaaattttgatctagtttgaatttagacaaatgggaaattttaaacaactaaaacttatcacggacagaaattgaagcagtctgttaaaggtcatacaaatttctatgtcctaagattctgttaaaatagcctacaaaataattttttaacattgtgagtaaaagatgttaattgtatgacattgatctttgtcatttgttaagacttgctttgtgttggaacctagyacatttttgtaaatgtttatgcctaaaaagaatgtgtatgtatacttaaaaaagaataactttctttttttgttgttgttattttttgagatggaatttcactcttgttgcctctcgggttcaagcaattctcctgcctcagccttctgagtagctgggattacaggcatgcgccaccacacctggctaattttgtatttttagtagacatagggtttcttcacattggtcaggctggtctccaactcccaacctcaggtgatctgcccgcctcagcctcccaaagtgctgggattacaggcatgagccaccacacctggcagattgggtgaagatttcatatgca

SEQ ID NO: 55755 - DNA, 2489 bp, Homo sapiens
aagatgttctgtttgcattgcaatattttataaccagtagaatatttttgacttatttttcaggaatcatgttttctaaaagtgtgtagacattaaaatcggaggatttaaacataaaactgctttctaattggtgttttccacagtaaacatgcattgtgcatagtcacttgatccaaaagatgaaaataagaaatccaagaattaatgacatgcttcaaggagcaaaatttctgcctgttgtaggacattataaacattaggaaaaatgttaagttggttaaagctgatgatgttattacaacaaaagacctggtcaccatgttaaacctgacaataccaatttaatctctggtataatttttgtctatctgattttttgcttaaaacattcattaagtgcctactatctgtcaggtcatattaggtactttagttgtaattgtcagtaagatatagttcctactcttaaagaacttagaatctagtaaaatagagagttacatgagcagataattttaatgtaacttgataagttttcagttagtggtttgaaggcagtattatggtaataaagaggaagataaatttaaggaggttaaaactgtagagagatcagtgaggagtggcaaatacaaaaggtctgaaattgtaaagttggagaagataagttatattaatattaaaggaataattagcgagggtgggcattaaccagacattgggggaaaggagaaattattataaagtctaaatttctggctgtactaaggcaatagatggataaatagtggtcctcaaaattgaaaatcaggcatacaaaaggaaaggcaggttgggggaggaagaagaactgcatttgaggtacctgtggttattcaattgcatacgttcaagaaaatgactcttgaaatctagacctctcaggagaggtcaggctggtgataatgactgggaaatgcaggcacacgggtgatctccaaaatctatgagaccaaatgccatctgtcaaggaggtcctggaaagaaggaggtggagtaaccataagagaggaataattattttctttattttctgcaagcactactctgctttggctaataaagacatttaagttctggaaggacttggggaaaatttaaggttatatatctaattatatatatgtgtgtatatatatgtatttattattaaaatcattgttgttcaattgaaggacataataaatatgcctgtagcttctgtgggggcaatcactaagtaatgtttccttcatgcataattcttttcacctatgttctctcccaacccaccctgtgaaaaatgacaagtcgtgtctcaatcaggaatatgttctagtactagagattgggaacccaacagaaagtgattgaatcaagtgattctggctcattaatatcatgctctaataattgatgtacagccaatgttaatttaagtgcaaattaactcccmttctcttcattttaattagtagctttgttctagctctgctgtcactaaattgataacacttttatcctcaagatctacttaccaaagcataacaaaatgtatcttgatgttctaaaaaaattacagaataattgtctagtaatgagtatttgtgtagattccaataatatgcaaaatattgtcaagaaattgacttgaaaaacatgtcaaatgattgaccaaatttagggaaagttaccttgtctcttcttctgcctcttctcttccccttcttcatctccatgttaatattttttttctagtccactgtttgaaaaagtttggggaatattctattacatttataaaaattctttataccaccatctgggtgcttcacactctccatcacaagtatttctgactatttaataattagtacgagaacatattgtatgcctacttgttcgattgagatattctctgtgttctttctggatttcaggtgtataacactttctttgttatggatccatcatttgagacatctagttctgaacaaatatgtttttcataaaagctccctataatatggcaatatctgagttatttctgttgtggagatcatagatggagaacatttaaatgactcttacgagttagacacatacctacaaatattccaggcaagatttctgatacaatcttgtggtctttaattttttttcttaagcatttggctacttatattattcactaaactagtatccaactgctgatcttctatgttatctccatctgtaaattgatcaacctttcacattattttgggaaatatcaatgtgttttttcttgtgttttgttagtaagtaagctaacattatagggacaaatctcttgttttataaagagtatatggacttatatgagacagtaataataaatatggaaaaaggatacaaatattgctggaaaagaagtcctcctacaacttatgatgaacacttgtgaatcattttaaataatgactatt

SEQ ID NO: 55756 - DNA, 2489 bp, Homo sapiens
aagatgttctgtttgcattgcaatattttataaccagtagaatatttttgacttatttttcaggaatcatgttttctaaaagtgtgtagacattaaaatcggaggatttaaacataaaactgctttctaattggtgttttccacagtaaacatgcattgtgcatagtcacttgatccaaaagatgaaaataagaaatccaagaattaatgacatgcttcaaggagcaaaatttctgcctgttgtaggacattataaacattaggaaaaatgttaagttggttaaagctgatgatgttattacaacaaaagacctggtcaccatgttaaacctgacaataccaatttaatctctggtataatttttgtctatctgattttttgcttaaaacattcattaagtgcctactatctgtcaggtcatattaggtactttagttgtaattgtcagtaagatatagttcctactcttaaagaacttagaatctagtaaaatagagagttacatgagcagataattttaatgtaacttgataagttttcagttagtggtttgaaggcagtattatggtaataaagaggaagataaatttaaggaggttaaaactgtagagagatcagtgaggagtggcaaatacaaaaggtctgaaattgtaaagttggagaagataagttatattaatattaaaggaataattagcgagggtgggcattaaccagacattgggggaaaggagaaattattataaagtctaaatttctggctgtactaaggcaatagatggataaatagtggtcctcaaaattgaaaatcaggcatacaaaaggaaaggcaggttgggggaggaagaagaactgcatttgaggtacctgtggttattcaattgcatacgttcaagaaaatgactcttgaaatctagacctctcaggagaggtcaggctggtgataatgactgggaaatgcaggcacacgggtgatctccaaaatctatgagaccaaatgccatctgtcaaggaggtcctggaaagaaggaggtggagtaaccataagagaggaataattattttctttattttctgcaagcactactctgctttggctaataaagacatttaagttctggaaggacttggggaaaatttaaggttatatatctaattatatatatgtgtgtatatatatgtatttattattaaaatcattgttgttcaattgaaggacataataaatatgcctgtagcttctgtgggggcaatcactaagtaatgtttccttcatgcataattcttttcacctatgttctctcccaacccaccctgtgaaaaatgacaagtcgtgtctcaatcaggaatatgttctagtactagagattgggaacccaacagaaagtgattgaatcaagtgattctggctcattaatatcatgctctaataattgatgtacagccaatgttaatttaagtgcaaattaactcccattctcttcattttaattagtagctttgttctagctctgctgtcactaaattgataacacttttatcctcaagatctacttaccaaagcataacaaaatgtatcttgatgttctaaaaaaattacagaataattgtctagtaatgagtatttgtgtagattccaataatatgcaaaatattgtcaagaaattgacttgaaaaacatgtcaaatgattgaccaaatttagggaaagttaccttgtctcttcttctgcctcttctcttccccttcttcatctccatgttaatattttttttctagtccactgtttgaaaaagtttggggaatattctattacatttataaaaattctttataccaccatctgggtgcttcacactctccatcacaagtatttctgactatttaataattagtacgagaacatattgtatgcctacttgttcgattgagatattctctgtgttctttctggatttcaggtgtataacactttctttgttatggatccatcatttgagacatctagttctgaacaratatgtttttcataaaagctccctataatatggcaatatctgagttatttctgttgtggagatcatagatggagaacatttaaatgactcttacgagttagacacatacctacaaatattccaggcaagatttctgatacaatcttgtggtctttaattttttttcttaagcatttggctacttatattattcactaaactagtatccaactgctgatcttctatgttatctccatctgtaaattgatcaacctttcacattattttgggaaatatcaatgtgttttttcttgtgttttgttagtaagtaagctaacattatagggacaaatctcttgttttataaagagtatatggacttatatgagacagtaataataaatatggaaaaaggatacaaatattgctggaaaagaagtcctcctacaacttatgatgaacacttgtgaatcattttaaataatgactatt

SEQ ID NO: 55757 - DNA, 2489 bp, Homo sapiens
aagatgttctgtttgcattgcaatattttataaccagtagaatatttttgacttatttttcaggaatcatgttttctaaaagtgtgtagacattaaaatcggaggatttaaacataaaactgctttctaattggtgttttccacagtaaacatgcattgtgcatagtcacttgatccaaaagatgaaaataagaaatccaagaattaatgacatgcttcaaggagcaaaatttctgcctgttgtaggacattataaacattaggaaaaatgttaagttggttaaagctgatgatgttattacaacaaaagacctggtcaccatgttaaacctgacaataccaatttaatctctggtataatttttgtctatctgattttttgcttaaaacattcattaagtgcctactatctgtcaggtcatattaggtactttagttgtaattgtcagtaagatatagttcctactcttaaagaacttagaatctagtaaaatagagagttacatgagcagataattttaatgtaacttgataagttttcagttagtggtttgaaggcagtattatggtaataaagaggaagataaatttaaggaggttaaaactgtagagagatcagtgaggagtggcaaatacaaaaggtctgaaattgtaaagttggagaagataagttatattaatattaaaggaataattagcgagggtgggcattaaccagacattgggggaaaggagaaattattataaagtctaaatttctggctgtactaaggcaatagatggataaatagtggtcctcaaaattgaaaatcaggcatacaaaaggaaaggcaggttgggggaggaagaagaactgcatttgaggtacctgtggttattcaattgcatacgttcaagaaaatgactcttgaaatctagacctctcaggagaggtcaggctggtgataatgactgggaaatgcaggcacacgggtgatctccaaaatctatgagaccaaatgccatctgtcaaggaggtcctggaaagaaggaggtggagtaaccataagagaggaataattattttctttattttctgcaagcactactctgctttggctaataaagacatttaagttctggaaggacttggggaaaatttaaggttatatatctaattatatatatgtgtgtatatatatgtatttattattaaaatcattgttgttcaattgaaggacataataaatatgcctgtagcttctgtgggggcaatcactaagtaatgtttccttcatgcataattcttttcacctatgttctctcccaacccaccctgtgaaaaatgacaagtcgtgtctcaatcaggaatatgttctagtactagagattgggaacccaacagaaagtgattgaatcaagtgattctggctcattaatatcatgctctaataattgatgtacagccaatgttaatttaagtgcaaattaactcccattctcttcattttaattagtagctttgttctagctctgctgtcactaaattgataacacttttatcctcaagatctacttaccaaagcataacaaaatgtatcttgatgttctaaaaaaattacagaataattgtctagtaatgagtatttgtgtagattccaataatatgcaaaatattgtcaagaaattgacttgaaaaacatgtcaaatgattgaccaaatttagggaaagttaccttgtctcttcttctgcctcttctcttccccttcttcatctccatgttaatattttttttctagtccactgtttgaaaaagtttggggaatattctattacatttataaaaattctttataccaccatctgggtgcttcacactctccatcacaagtatttctgactatttaataattagtacgagaacatattgtatgcctacttgttcgattgagatattctctgtgttctttctggatttcaggtgtataacactttctttgttatggatccatcatttgagacatctagttctgaacaaatatgtttttcataraagctccctataatatggcaatatctgagttatttctgttgtggagatcatagatggagaacatttaaatgactcttacgagttagacacatacctacaaatattccaggcaagatttctgatacaatcttgtggtctttaattttttttcttaagcatttggctacttatattattcactaaactagtatccaactgctgatcttctatgttatctccatctgtaaattgatcaacctttcacattattttgggaaatatcaatgtgttttttcttgtgttttgttagtaagtaagctaacattatagggacaaatctcttgttttataaagagtatatggacttatatgagacagtaataataaatatggaaaaaggatacaaatattgctggaaaagaagtcctcctacaacttatgatgaacacttgtgaatcattttaaataatgactatt

SEQ ID NO: 55758 - DNA, 2489 bp, Homo sapiens
aagatgttctgtttgcattgcaatattttataaccagtagaatatttttgacttatttttcaggaatcatgttttctaaaagtgtgtagacattaaaatcggaggatttaaacataaaactgctttctaattggtgttttccacagtaaacatgcattgtgcatagtcacttgatccaaaagatgaaaataagaaatccaagaattaatgacatgcttcaaggagcaaaatttctgcctgttgtaggacattataaacattaggaaaaatgttaagttggttaaagctgatgatgttattacaacaaaagacctggtcaccatgttaaacctgacaataccaatttaatctctggtataatttttgtctatctgattttttgcttaaaacattcattaagtgcctactatctgtcaggtcatattaggtactttagttgtaattgtcagtaagatatagttcctactcttaaagaacttagaatctagtaaaatagagagttacatgagcagataattttaatgtaacttgataagttttcagttagtggtttgaaggcagtattatggtaataaagaggaagataaatttaaggaggttaaaactgtagagagatcagtgaggagtggcaaatacaaaaggtctgaaattgtaaagttggagaagataagttatattaatattaaaggaataattagcgagggtgggcattaaccagacattgggggaaaggagaaattattataaagtctaaatttctggctgtactaaggcaatagatggataaatagtggtcctcaaaattgaaaatcaggcatacaaaaggaaaggcaggttgggggaggaagaagaactgcatttgaggtacctgtggttattcaattgcatacgttcaagaaaatgactcttgaaatctagacctctcaggagaggtcaggctggtgataatgactgggaaatgcaggcacacgggtgatctccaaaatctatgagaccaaatgccatctgtcaaggaggtcctggaaagaaggaggtggagtaaccataagagaggaataattattttctttattttctgcaagcactactctgctttggctaataaagacatttaagttctggaaggacttggggaaaatttaaggttatatatctaattatatatatgtgtgtatatatatgtatttattattaaaatcattgttgttcaattgaaggacataataaatatgcctgtagcttctgtgggggcaatcactaagtaatgtttccttcatgcataattcttttcacctatgttctctcccaacccaccctgtgaaaaatgacaagtcgtgtctcaatcaggaatatgttctagtactagagattgggaacccaacagaaagtgattgaatcaagtgattctggctcattaatatcatgctctaataattgatgtacagccaatgttaatttaagtgcaaattaactcccattctcttcattttaattagtagctttgttctagctctgctgtcactaaattgataacacttttatcctcaagatctacttaccaaagcataacaaaatgtatcttgatgttctaaaaaaattacagaataattgtctagtaatgagtatttgtgtagattccaataatatgcaaaatattgtcaagaaattgacttgaaaaacatgtcaaatgattgaccaaatttagggaaagttaccttgtctcttcttctgcctcttctcttccccttcttcatctccatgttaatattttttttctagtccactgtttgaaaaagtttggggaatattctattacatttataaaaattctttataccaccatctgggtgcttcacactctccatcacaagtatttctgactatttaataattagtacgagaacatattgtatgcctacttgttcgattgagatattctctgtgttctttctggatttcaggtgtataacactttctttgttatggatccatcatttgagacatctagttctgaacaaatatgtttttcataaaagctccctataatatggcaatatctgagttatttctgttgtggagatcatagatggagaacatttaaatgactcttacgagttagacacatacctacaaatattccaggcaagatttctgatacaatcttgtggtctttaattttttttcttaagcatttggctacttatattattcactaaactagtatccarctgctgatcttctatgttatctccatctgtaaattgatcaacctttcacattattttgggaaatatcaatgtgttttttcttgtgttttgttagtaagtaagctaacattatagggacaaatctcttgttttataaagagtatatggacttatatgagacagtaataataaatatggaaaaaggatacaaatattgctggaaaagaagtcctcctacaacttatgatgaacacttgtgaatcattttaaataatgactatt

SEQ ID NO: 55759 - DNA, 1084 bp, Homo sapiens
cttcttatgaacagaatgtgagaccaatcatgctgttttccaagataagagagtttaagtgagaatcacaaccacttccttctcctatgctagacgctattgacaggaataaggatattgtgacatgtgagatgtgtagcataggcacagaagctaggccagatttactgccaccctgggtattcttgattgccaagatggctgtggcttccagttgatgtcacaaatctactcattccctgagaattgggaaagaaaacaaaagaaatggtaactggaagccattgcctgggaagttgaatcacggtttttttataatgtgctggacctgatctgaaagtcaatacatggttgtgtaggcttagcaaactccctgacaacccattcagggttttcctgccttctctcctttccagtatctgggtatatgtcctggcagaattttccctttaaaacgtattcactaaactatacttaaggaaactgagtaaatattacatcttttaggctttgcttaaacaataaaaaggccagaatttttttaaaaaaattaaacttacctaaaaagagcctttgactaaatgattagtgaagaaaggcttgaaatgtcctgtgtcaacttattgagaaagtctgtgcatatttcatggctaagtcattttgaaagtccatttcacagtaaaagatattcggatatttgtaaagcactttactgttttaaaaaaactgcttttaccatctgtgatttcactgaagtgtgcagtttgaagtaactctgtaaatcaggaaggggttatgggtctcaatttagagataagaaaataagactcaaagaggttaaatgaagagtttgtatttgaacctagaacttgggtcctaaatctgatgtttgctgccycatgaggaaatgacagaaggtgtctaatttaagtttgcaatatgcctaaactgtgttgaaaatcatacttgcacttgacatttaaaagtgagagtacatgtgataattctggaaaaaaataaagcaaatatttattctgcactatgaactttgattatagtaattgagaaaaaaacatgctgagtg

SEQ ID NO: 55760 - DNA, 729 bp, Homo sapiens
atatatatatatatatatagaaagagagagagagagttatagaggaaaaaacacagaatgtgggttgaaaagctccaggctgtggacccagcagggtcctcaatttccctctcagggccttgtgttctcattggtccggtgcaggggcttcctctgaacaatgggaggggaaccttcaaagcaccctgtgtggaatcctccctgtgaccatctgggccagcacagacaactgctgccagaggccatcagatggaccaggcctatgagttgctcactgcccctgctcctggctcagtgccgcttccgtgggtccccacctctcctggaggcaaaagctcgtctttggtaccttctgccttcagtcatgcccaagggactctgtgactctctcctgttcccaaaatctgcctcagccccatcctgccactgggcagccacatcccctgcagccccttccaggtcagagcctttgatgccaggatgtgccctcagacaagactcacttgcctctgacctatgccgctgggctagctgcgtggcaggggcctgaggtgctgtccatgggctggagctggaactccacctgcratcagcagacacccccagctggaggccccagagaggcggcggccaggccctctgtttattccatcgccaggagggacccccaaggtgcccagttaacatctgttgactgactcagctctggaggctgcttcaggctgggga

SEQ ID NO: 55761 - DNA, 582 bp, Homo sapiens
tattgtctgaatggctcattccctcactgatctcaggactctgcctaagttccacatggactgagttttcctcactcatgattcaatggaaatcagctcctactctctcggcccttgatcttcattaattattcacatctgacatattatagctgcatttccatatttgcattgtactgtctggagctccaagataacaggaactctattatcagcccctagaagaggatctgattcatagtaggaactcaatcaatatgggctgaatgaataatagaataccaccacaaaaagagcttctaattcagttatgttaatayagtgacataaaatgctgaaaattacagtgacacaaaatgttgaaaactacagtatgtaaaagctaaatagcacaatagctgaatgagatgctgcagagtagtgtggaattaaggaccagatacaaaatcattggcttaggcaataagagtgggtgtccaagaatgcttgagattatgttatacaggaccaggaagaaaagtgatcttctctgtttctatctaggcttgaaaatcttgttccaaattggaagacacacttctg

SEQ ID NO: 55762 - DNA, 1190 bp, Homo sapiens
gcatgaatattttttaaaagtttagtttcaatgattaatatagtaaatgcaaatacacatataatacacagaaacaaaagaccttcagggtcatcaataaattttaagattataaggtgactctgaaaccaagaagattaatacatgatatgctccaaaaatgataaactacattttatcaacagcttttgcagactatctagcatagagtagaatttttataactatttattgagtgaacgaaagaaatgtatatcttcaggcctatgtcacacaaactatgcaaacgtctgcagtgcagcattctctctctctcacttaaggtaatgctgactgctgtaacaaacaaatccaaagatacagaatagctcaaacttgatagaagtttatttcttttatgtgtatgacttctaataacaaagcaattgttcttgatcacatatggccctcctctaagtggtcatgagaaactgagccctttgtgttttgtgattccacaaccttctacacgtggcttccacagtgaccatgtttgtctgagtcaagcccggagaaagagaatgattaactagagaagataaagctgtatttgaagcattctgcttcaaggtgatacatgccatttctgcttatattattttgctaaagtggcctaggacaccacggctaagggacaacactagatgagggaatatgagaatccagctttagtgggcaggtaaatttagagagttgagagagacagtatataaatgaattgaaatatctagattttggtgtatgtttaaaatactctgtttcatgtgctgtgcagttgatggtgggaattgtgtgtggagtgttgagctaaaagtcttacttcttttttttgtaaagtttaaaaaaatgtaattagccartatgtctgtattttggtacaaaatttctcccctgccttttttatcttcactgacatcttttcaagtacatctatttcttcagtccgtgaacctatggagcactcaccaaaaatatgatcacaggatgttaattaactttgcgggggaataattgctgtacggattattggagaagaaaagttatcgagttttgaaagcatggattccacatacacttaagaggacccaggcaaattttagtactcgatagataaatgttttatttagtttttgattttgaaatttatgatg

SEQ ID NO: 55763 - DNA, 1543 bp, Homo sapiens
aggggaaacagcaatggactatgagaaacaccagctggttgggtgatacaagcccaagctctgcagccaagccccagctccagcatggagtagctctgggacctggggcaagtcaccaccttctctgtgcatcaatttccttacttgtaaaataggtatgttatcagtagtttacctctttgggttaaatgatgcaatttatgtaaagcggagtctagtacatatttagtgggggtcaatagaggttattatgttgagtcctacctggggattcaggcaggaaaaattgatcagtgactcttaagggcgtacagcaggtgatatactctggaggggtgtgtatttttattttggtaaagcatttcactactaaaaataattgaatactgggataagattagayagaccttatttttcatatgcaaactaaaaaatgcagactcaaacaaagggttagtaaacttttgctgtagagttgaatagcaaacagtttaagtttcttgggttttacagctgcttcttcttcttcttcttcctcttcttctccttcctcttcttctcctcctcctcatattcctcctctgcctccttcctccttctctttctccccttcttttgctcctcctcctctttcttttcatcctcttcatctcctcctccctttctttcctcttccttttcttctcctatacaacttttttaaaaatgtaaaaccaactcttagttcaaaggctgaacaaaaacaggctatcagctggaattgacccccaaactgaatttgtttgtgggcagactttgctgaccccttttcgacatagtattcaagtctagtggctatctgaaaatagagtaataattctcagtgaagagagcttggaaatagtggacatgcctaccctagtgtatctaggggaggcagagcagaatctcaaggtatgagaatggtcattttatttattcactaaagaatgaaagatactttttttgaaaataagaaattccatccttaaaaccattgggataaaggaagctcttagagataatacaaaggatgaagatttcagccattgttgctcaacaaaggacccaagtttgggaccacaggaatctatacatgaggatcaggttgacctacaagccagggctttcagtcctgaggggaaatggacagatggccacttcattctgtctcaaacaaagatattcaggtaatatgaggttaagctttgctaaatctccaggatgcatctttggtttcctgtgtggtgggacaaaggatctttagactgcacctgaagggagagaagctattggtaagttaggagggcacccctctcaccaccatgttgaattcaattaaatcactttcagtacttgtctttgttaaggtgtagcacttgagaaacaacagagctgaatcagaagaccatgtgtgcagtggtgtcctaggcaatgatggcatcacagaaaacatgacagaaaggaggagagactgggcatgcctgcatctggctgcctttggctttctttataactcttggag

SEQ ID NO: 55764 - DNA, 690 bp, Homo sapiens
tgtctctggacatattgagagatgggaggggaggaactgtccttggttcacaataaagagttaggggctagggaccaggtctccccagttatttagcagaaattggatattttctcctaacataattctaactcgccaatcctatatatatttttattttactgattttcatcttatcggataatattgattgcttgactttttaagatttaaatcaggtcaactgaaagagttcagaaaggaccccgaagagtcagggaggaaaagtcatccttactttcagagttaaaaactcataagtaattagattattttctggaaactcatggaaaattgcttgtgcaaaaccacttttattggattaatgtgtaagtatatactacaccttcaggctggtttttggtacattgaaccgagcacaaataaaattgtccatcataagataaaatctggtcagctacactggactgcctattttctctattggcaacattagtaagtaatgactatagaaatttttttcattaaccaaggcatctatttagacatggagtggtcaatgctttcaatggttatttacttcttagaattggtggtatgaaaatgtaataarcaattaatatgctagccacaaaatttcaaaatcagtaactaaactaaaacactgcttagtgattagaaatcaggctt

SEQ ID NO: 55765 - DNA, 2228 bp, Homo sapiens
aatcaagatggtttaggatatattctattattctaactcaggattggtaaattatggcccataggccaaagctggcctgctgcctatttttttatatggcttctgagtgaagaacaatttttacatttttaaatgattgaaaaaaataaaaagaagactatttcacaagtaaaaattctatgaaattcaaatttcagtgtccataagttaagatatcctggaacacagtcacactatttgtttacatattgtctatggctgcttttgtgctataacacagagttgaatagtgtgacaaatatcatattgtgcatacaaattattgtggtgggtcctcgatatgataacaagtattcttgtaagcgatagaagaggagaagagacatacagaggacaaggccatgtcacaacaagtggagactggaattatgcagccacaagccaaggaacctctggaaccaccagaagctggaaatggcaggtaagaatttacccaagaggccgggcgcggtggctcatgcctgtaatcccagcactttgggaggccagggcgggcggatcacaaggtcaggagaccgagaccatccttaccaaaaatacaaaaaaaaaaaaaaaaaaattagccgggcatggtggcaggcccctgtggtcccagctactcaggaggctgaggcaggagaatggtgtgaacctgggaggcagagcttgcagtgagtggagatcatgccactgccctccagcctgggtaacagagcgagactccgtctcaaaaaaaaaaaaaaaaaaagaaagaattctacccaagagtgtctggaggcagcacagcccttccaacacctcgattttggacttctggtctacataacagtgagaaaataattttcttttgtttcaagccacccagtttgtggtaatttgttatagcagccctaggaaatgaatatactggtctttcatacaaagtttaccaacccctgtttcaatctgtctttctacattggatttgggtatgctcattagtgtctagttttcttctaaatgaagtaaagagatagtgaaatgtagggatacactgcatttccattaaaatgactaagagaatgagaaagaatgctcagcactatgaagctgacagctcttctcctcccatgatggagatgggagtyggggctgggtgctccatccatttctccaaaggactcatgtctcccatgcattccagctgctgacctggatcaatggttttcagaaacagaggctagaagggattatctcatcagcttgtattcaggtctgtggtagtggcagggcaggggttgggggattgataaggaggaggatgaagaaggaaaggcaccaccgtggagcaaactggtaactgagacttggaggaaagctagacccttctcctccaagtctaaacaaattccctttcctttcattttccttactaccatctgcccactgtagtcctcctcacccacctatggaagcaaggcttacccagtgactttgggtaggtactcaagcttctctttcctactctcccaaaagagaggactcaggtcctgacaaacaagcatcataacgacctacgaagacaggatttgacataggaaaatcagagcttgcattgttaagagttaagaagggggattgtacccaccttgttcctccacctgttcacaaacaatgtgtcaaagaaggggcaggtaagtggccaggcagccctgaaatagcctggggccaggactgtgacaaatactcactgggaacatcccccacctaagggttgaagtcaggaagaggagtgccctgtccttacactagatggaactgttcctctataaaaaagaagaagaaataaaacctgatacatgtattaatcttattcagggagatgtgggttttaagcaattcaaatatttcattctgttctttcagttctgcctactggccattatcaggaagatgtgggaaatagactgaaagaaaatcttctgattattgaaagagaatttacagcagcaaaacaatttgcagtgtttctacctagagacagggaagtaagagaatctgagtccaagtccccaccaaaaagagctttagtttagagcctgtttctcaagaaacttgcatatgcacacatgagtttgggaaattctcattattacctcataggttaggtctaaaccttattttaagactgagaaatggaaacctagctg

SEQ ID NO: 55766 - DNA, 642 bp, Homo sapiens
ccttatgataggggttagtgcccttagaagacaccagagagcttcctcattctctctctctctctctctctctccctctctgtctctstctctctctctctctctctctccatatatatatatatcgtccttctcatgcaaagaagaggtcacgtgaacacaccaaaaagatggccattgtccatgagctggaaagagagccctcaccagaacccagccatcctgcaccctgatcatggacttctagcctcgagaattgtgagaaaataaatctctgttatttgactacctgtgctatggcattttgttattgcagccccagcagactaagacacctagtgtccatggaccacacacacacacacacacacacacagagggactcaaggatgggcctcaagttaagaaccttctcccttgtggtcagaaatatattatttgagttccggaaatccagacaagtctggacaacatagcaagacttcatctctactaaaaatcaaaaaaagctaggccgggcacggtggctcacgcctgtaatcccagcactttgggaggccgaggcaggcggatcatgaggtcaggagtgtgagaccagcctggccaacatggtgaacccccatctctactaaaaatacaaaa

SEQ ID NO: 55767 - DNA, 642 bp, Homo sapiens
ccttatgataggggttagtgcccttagaagacaccagagagcttcctcattctctctctctctctctctctctccctctctgtctctgtctctctctctctctctctctccatatatatatatatcgtccttctcatgcaaagaagaggtcacgtgaacacaccaaaaagatggccattgtccatgagctggaaagagagccctcaccagaacccagccatcctgcaccctgatcatggacttctagcctcgagaattgwgagaaaataaatctctgttatttgactacctgtgctatggcattttgttattgcagccccagcagactaagacacctagtgtccatggaccacacacacacacacacacacacacagagggactcaaggatgggcctcaagttaagaaccttctcccttgtggtcagaaatatattatttgagttccggaaatccagacaagtctggacaacatagcaagacttcatctctactaaaaatcaaaaaaagctaggccgggcacggtggctcacgcctgtaatcccagcactttgggaggccgaggcaggcggatcatgaggtcaggagtgtgagaccagcctggccaacatggtgaacccccatctctactaaaaatacaaaa

SEQ ID NO: 55768 - DNA, 656 bp, Homo sapiens
acatgagataaagcagccgggcacaaagacgtgcacatggcatgattccatttacatgagataaagcagccgggcacaaagacgtgcacatggcatgattccatttacatgaaactctattagcatcgtgcctgtccctggtgagaaaacagcccagggcccaggagaaggtgctgggctgctgcgatccgggtgatgtttacacaggtgcacacaattatcaaaatttaaccaactatgtgccttaaaatgtctgagttttattgcatgcaatttagaccttgataaaatcgatttttaaaaatcatgtcttaggagaggaattagtagcgtggaaaacactctgcagtatgttttctcagcttttctttcatgcatatttrcatatacacaaataccaaatattaatcacgtctaagtcgaagagtgactttttgtgtatgcttttctgtgttttctcgatattattaaatcaacatgacttacttttgtaagcaggaaaaacatttttttaaagtatctgtggcatgcctatgttttgccaggcactttgcagggtgtgctgaggacacgctttataaacacagtactgacctgcccaacgagttcaccaccagcctgggacatcccaagtggggttggtggaaggaagggga

SEQ ID NO: 55769 - DNA, 656 bp, Homo sapiens
acatgagataaagcagccgggcacaaagacgtgcacatggcatgattccatttacatgagataaagcagccgggcacaaagacgtgcacatggcatgattccatttacatgaaactctattagcatcgtgcctgtccctggtgagaaaacagcccagggcccaggagaaggtgctgggctgctgcgatccgggtgatgtttacacaggtgcacacaattatcaaaatttaaccaactatgtgccttaaaatgtctgagttttattgcatgcaatttagaccttgataaaatcgatttttaaaaatcatgtcttaggagaggaattagtagcgtggaaaacactctgcagtatgttttctcagcttttctttcatgcatatttacatatacacaaataccaaatattaatcacgtctaagtcgaagagtgactttttgtgtatgcttttctgtgttttctcgatattattaaatcaacatgacttacttttgtaagcaggaaaaacatttttttwaagtatctgtggcatgcctatgttttgccaggcactttgcagggtgtgctgaggacacgctttataaacacagtactgacctgcccaacgagttcaccaccagcctgggacatcccaagtggggttggtggaaggaagggga

SEQ ID NO: 55770 - DNA, 654 bp, Homo sapiens
agttacatactrtgtgattccatttatacaaagtttgaaaaggacaaaatttatttgtactgatagaggtcaaaatagtggttacctttgggtggagggtaactaataaggctttagggaggctggcaatgttcacacttctagtggctcatgagttttcaatttttaaaaaagttatcagaatttatttttaagatttatgatttataacttcacaaatcataaacgtatgtatctttaagacataagcaccttttgttataaatcataaactctatctttaagacttatgcagtcttgctctgttgcccaggctggagtgcagtggcacacaaacttcttatgaaaatagtcctattttcatggataaattcttcttcttatgaaaatatgtcctattttcataagaagtttgtgaaataagataaaattagttgctctttttgccataggggtttgccataggagaactgtggataccaagtagttgcctaatactaaccctttttaatttttaactcctacaaggtttcgaattaagtttgtatgtaaaactccaacatttatatctccagtactgacttcttatgtcagtagatgttgtacgatgaaaagaccatgagacattttatattttctaagacttaacttata

SEQ ID NO: 55771 - DNA, 654 bp, Homo sapiens
agttacatactgtgtgattccatttatacaaagtttgaaaaggacaaaatttatttgtactgatagaggtcaaaatagtggttacctttgggtggagggtaactaataaggctttagggaggctggcaatgttcacacttctagtggctcatgagttttcaatttttaaaaaagttatcagaatttatttttaagatttatgatttataacttcacaaatcataaacgtatgtatctttaagacataagcaccttttgttataaatcataaactctatctttaagacttatgcagtcttgctctgttgcccaggctggagtgcagtggcacacaaacttcttatgaaaatagtcctattttcatggataaattcttcttcttatgaaaatatgtcctattttcataagaagtttgtgaaataagataaaattagttgctctttttgccataggrgtttgccataggagaactgtggataccaagtagttgcctaatactaaccctttttaatttttaactcctacaaggtttcgaattaagtttgtatgtaaaactccaacatttatatctccagtactgacttcttatgtcagtagatgttgtacgatgaaaagaccatgagacattttatattttctaagacttaacttata

SEQ ID NO: 55772 - DNA, 654 bp, Homo sapiens
agttacatactgtgtgattccatttatacaaagtttgaaaaggacaaaatttatttgtactgatagaggtcaaaatagtggttacctttgggtggagggtaactaataaggctttagggaggctggcaatgttcacacttctagtggctcatgagttttcaatttttaaaaaagttatcagaatttatttttaagatttatgatttataacttcacaaatcataaacgtatgtatctttaagacataagcaccttttgttataaatcataaactctatctttaagacttatgcagtcttgctctgttgcccaggctggagtgcagtggcacacaaacttcttatgaaaatagtcctattttcatggataaattcttcttcttatgaaaatatgtcctattttcataagaagtttgtgaaataagataaaattagttgctctttttgccataggggtttgccataggagaactgtggataccaagtagttgcctaatactaaccctttttaatttttaactyctacaaggtttcgaattaagtttgtatgtaaaactccaacatttatatctccagtactgacttcttatgtcagtagatgttgtacgatgaaaagaccatgagacattttatattttctaagacttaacttata

SEQ ID NO: 55773 - DNA, 559 bp, Homo sapiens
ggaaagggcaatattcatttaagattacatctaaatcctcaaagatcaatcaaatacctggcacttagtaattgctcaattaacaataaacagttaaatgaatgacttaatgaaggaaggaaacatttttttcctagtaatttcaccctgacaaatacattacattacactgctcgttattcgagaaaaccttggaaatgagtatacctgtatcccaaataygcttctagagaaattattgataccagtacagagttgaataagacattactgtgaaaggctagatgttattaggctacatcttgtccatcaagagggaatctagtgaattaggcggcacgtacctgggtggaagtgatggactagagatcctaagacactgttgacatgccagagaccagggttcccataaagaccagggactgaaaaaagcaaaacgtctgggagccaaaagaccaaagtaaagggttcagtccgtgagtctattttcagaggcaggatagatgtgttgtatccagacatccaggctgacattaagcagctcatcagaggctcaaac

SEQ ID NO: 55774 - DNA, 521 bp, Homo sapiens
agtgattcccactttttcattttacagaggaagaaggtaatgcccagagaggttaagtgttcttccaaaggtcacacagtaaatgtctcattcattaaattggaaatgccactttgaagagaaatcaatgaacamacatttatcaaggagaaagaatgtgcaaagttaaaaaccatgataatgtctggattggaataaatatacaatgcaagaactcaaataatagaaaaagggaagagaagagaaaagagaacattctacaaatgtatttcaatgttagaaaagcttcccacattcagctaaatatcactcatgactcattttcctatgaatctggctataacgtttgacaagtaaaactggccattgctacccagattattcttatgtcatgattttgaactcttttgtacatatattaaaaaaacacagctttaaatacctaatataaaacatgcacaggcaatttattggcaaggtggataggcatcattttaaagagatatagaaagaaaatgcaa

SEQ ID NO: 55775 - DNA, 1088 bp, Homo sapiens
gcatatcagaatctaccagaatcaggaggtcacaggaatttgcctggaggctatggcacagctaaattatgaccattagaaaaggtattcacataagaaaactttccactattatctcacatctgcataagaagtccagccacatggatctcgatggagagaccctcagctagcagagacccctgacttaattctgtatactctttttctgcaggtttatttagcgttttgtttttgttttcttaatttccagaataaattattcacagaagcaatgactgagtgagaaataagagatgaggtgaggaacttttgtaaattcaacattgtctaactggacatgagtgagagattggtttctattggatattgctattgggcacgtacttttacaraggcatatggagtcaatcattcatggatgcaaggcttgcaaaagatttaaaatagctgggttaaaacctaaacatggagactgtttcttggaccaatggctggtctgaacttcatggaaacattcgatgaagagtcacccaaagtgagacaaagcccaggtgattagttgctgccgcctttgaatcctaaagtgagcaccttagagatacccaaataatttcttcaaatgtctagcctgaattcttttcattaatattaataatatatctggggtagaattgtggagataatactgtggacaacctgcctagaagtcatgtttgacccaaacactcaactttacttctataatgcctagtcccaagatatcttttaaaatattcatatctaatgtattgacattttgacttctttcatatctcctcttttgagacacactttatgtgctgatgccagagtacctaagctacttactgttttctcataacaaacctgatcctttgtgagtgatatataaaagagaaactttctggtttattttatattcatttttagttcctttgaaatatagaaacattctttcctccattctatcatttccatctcttacgtgtgtagcaataagtgtttggattacactatatgatggcagacaaatatgctattatccagagttttgcataattaaagta

SEQ ID NO: 55776 - DNA, 1168 bp, Homo sapiens
ttgttcatttcctattaaaaacatactgaatttcttttgtattttaattattttgtatttattattattacaaatatatttgtattatttgtatcattattttgtatttgtatttttttgtatttgtatatttattaccagcaatgctagtaataaataaacccttgagtcctaatgccatatgataacagaagttgattttgtattcctattttgcccaattggctaaggagttggggatgagggaactgtcctctgtgcaggcaactaagtctaatgtaggctcatgattttcaacatgtggctttcctggacattaatatccagtctaaagaagaaattaattttttatgggttaaaactggctgtatcatatattgattaattctatactttgttgtttagaactgagtcacaaygtcttaaggaggatgcaggggggacaatgaatgtattcaatgcctgggctgcagctttcaggcaacaatcttaccacaagggaagaacatgaatggtggtgaatatgtactcatgggtgcactaggattctagatttacatgtgattgattgatttagagacaggatctcattctgttgctcaggctggagtgcagtggtgcaatcataactcactgcaggctcgatctcctgggctcaagcaatctcctgactcagcctcccaagtagctaggactacaggcagacgccatcctgcctggttaatttgtcttatttgttacagacctgggaggtctctctatgttgcctaggctggtcttgaactcttgccctcaagcaatcctcctgcctcagcccttcaaagtacaggcttgaaccactgcacctaagctggattctagatctttttgactaaatgtctttatttccagtggctttcttatttcatgtactttggctacattagcagtaaatttatacaattcaagaaaaaatgtgttttttcacaagtcattctgtagtaattttaattttactaaattataatgtttggttaaattggttattcataattttccaaactaggtcacattcaattccatttgattcaatttaacttacaaatattttatcaataacttctatttgccaggcattttcatggtttcatgagaaaaagaagtgtgaatacctgggatattgtagtta

SEQ ID NO: 55777 - DNA, 751 bp, Homo sapiens
cagtttgtaaatatttcttatttgcaagtagataatagttcaacattctcactttatgtaactaagtgtgtcagttcacgattggtttcctctaatatatatctattctactttttaattatcagaggttttgtggaaatatatctcttcaaaaagtttatatattataatctaagcagtttctgaaatgttaagaacaagaatttgtgaagcaaattaaatgacaaacttatgcaaagatagttttctcaagaattttgaaattatctactggttgataaggtcattttagccaaggtaaatattctcaggatcaattttccccttccttagcctttcagagtatagaccatttaattgagattttattctttttcttaccactttcatttaaacattttaaatgttgtttatattattcagaggcacatatctttctgatagtttaacttgaaagttcaattaagttatcaatagttttctttttgtaagacttttatccttgtgccttggcgacaatttccttcatgatttcactggcaaattgatattgccattttaaatgaagcttaatgtaagagtagaatgttataaggaggcttgatttttttaaaataaagtgggatcatatttccaatggcttgtgctcccacaatgtaatttgggaaacttctcactattgtgggaattttcctttcaawcttctagaatagaaggaaaatgtgtcatagtctttcccctctctgattag

SEQ ID NO: 55778 - DNA, 1440 bp, Homo sapiens
ctgagatgatagtttgattttaactaattaataatttgtattttacatattagaataacttgtgactgacagcatattactactatgtacataattgtatcctacaatgtttctattaaatcaaaaataatttattatgcaatcaaagtagacgtgttttaaaaaactgaaacatggccaggcgcggtggctcacacctgtaatcccagcactttgggaggctgaggcgagtggattgcctgaggtcaggagttcgagaccagcctagccaacatagtgacaccccctctctactaaaaatacaaaaacttagctgggcatggtggtgggcacctgtaatcctacctactcgggaggctggggcaggagaatcacttgaacccgggaggtgggcgttgcaatgagccaaggtagcgccattggactccagcctgggcaacaagagcgaaacttcttctcaaaaaaaaccaaaaaactgaactatatgatacacccagtcatcttgaagaattttcatacttgagcttrtgtttctataatataaacaatgtaaatatctttttattaaagtgttgcccaaatagggcatttaaaagtcagcacattaaattcatgatacatgataacataaaaggaaactattcaaattaaacaattgtaagtattagattgactgtattatagaccaatccttgttcttattatttatgacaaagttggatattaatataatgaaaataccacttttagccctcaagaacagcttgacatattaaatatgtatttttgcctttagaaatgacaggttatgacatatatatcctaagtccaatttgtttcttactatttacccccaaagccccatttttctcagatgaattcattaaagtttcagaaggtaaatgggacctgccatgctgaatattctcaaaagtacatatgaaaaagctatttgacagtatctgttggcatttcaaacatcaggagatgaaaaaacttttttattttattggcaatttgtatcataatatgtaaacgctcttgacagaatgggcacactttaatagactgggaaagaggattatggaatgtgggggcttattttagacatcaaccaaaatgaaatgtatgacctaacatggtagaggtgtctggatataacttcaaagtgacatgtaaacgacatgctctaaaatattgctaccaaggctgtggcatataggtccctcaaatgacaggaaatgcggtttccaaaattcagttagatatttgttgggcttctgaacctccagggtgttaagaaaatacatttcaattcagaagacattttcggtgacaatataaattggaagaaagctcagagttagttatgtctcccaaaagttgtgtcagtagatcattttcaaaagaggaaagagcacaatatgttgttcatatgaa

SEQ ID NO: 55779 - DNA, 801 bp, Homo sapiens
ttggatccttttaaaaacatatacatttaaaaatgttaaataagacctcatttttattttaatattttaaatgacagtattgccattatgctatagtcatttacagatactcttcaagggaaattttaatatttttagcagacggaactatgaacaatacttttggaatactaacatgtcactgtattacattgctttaaattcaacatcttgtgaattatcaaattcaagacagtcatagttttttatacttaaatatattttttaaatacacagttactatgccaagaaaatagtagaccatttttagaaataatgaactctagaaaaacaaatgacattactaaccacttagctttgggctgggtgttcccagtgcaggtctaggatctttcaccaatattttagaaccagctatgaaaagaaataaaggtgtttacaaaagttgatgcaattaattacatacacatgcgcacacacacacacrcacacacacacacagtgtgatgcactgtccattttattctctgacatttcacatagatagttttctctaaaatgttccgttcatcacaacatctcagtcccctactcagcactcgttatgcaactaatgatttcaataattattcccattacagtctattggcacaaggggcagatttgtgttgctttatcatcttgggatgtcatttcttattttagaggcataagccaaagtggagacagttgcctccaacatggaagctgagagctgagagttgtttttgttgacagaaagcaaaaactatttgggtaggg

SEQ ID NO: 55780 - DNA, 462 bp, Homo sapiens
catttttattctgtataactgctcagtctcatgcactgtgttatagcagcacaaatagactaagatagttcatatcattccttgaagtatgttcaataaagcacatctgcrtaacacttagattttatttttctttgaaaagattaacttgcaagaattccatatacttcttttggaaaaaaaggaaatatggaaaaaaataagaataggaaaacaataataaaagaatattacatttttttctccccatttagctaatatagttgaccattgaacaatatgtatttgaactgtacttttatgtggatttttgtcacccttccttttcctcctcctcctcagcctactcaacatgaggatgatatgaactcaacatgaagatgaagacctttatgatgctccatttccacttagagaatagtaaatatgttttccttatgattttcttaacaacattctttt

SEQ ID NO: 55781 - DNA, 553 bp, Homo sapiens
ataggtgggaattgaacaatgagagcacgtggacacaggaaggggaacatcacacactggggcctgtcatggggcggggggaagggggaggaatagcattaggagatacacctaatgtaaatgacgagttaatgggtgcagcacaccaacatggcacatgtatacataggtaacaaacctgcacgttgggcacatgtactctagaatttaaastataataataataataataaaagaaacagagaatcatttagtatagcttgagattagaatgtttccggaaaatatacattaagagaaaaacaaatgtaaagtcatgactggcataaaatgtcaatattatcctgaaaacaataacaaaatatttttttgtcttggagtgatgcaatcattattttagtgacatagcctgcaattcaatatatcctcagtttagagaaaaacaaacaaatgaacaaagaaaaatagagtgaaagcatacaaaagacccaggaaggttgtgtgataatctcagtgagaggagactgtggcatgcagtaacgtaatgacagtg

SEQ ID NO: 55782 - DNA, 535 bp, Homo sapiens
taaaattcacagcttatccatcacttgttgatttaaccagaaaaagaaaaatcccttggagaatcttgagcaggaaatcataacaataaactagtgaacaagttattgttcaaatcaaatgaaatgtctatgaatttgaatgacccagtaaattaagagaaattgtttaattaatgtaccgcttaacatcagcagccacaagagcataattcagactcaaatgagaatttaacatccrcagaaatcttgtgaagaaaatacagtttacttgagtagaatgaggtattattaaacccgatgccagaaatatcctacatagcaactattcaaaaatctctaaaaggttgggttcctgctcagaataaatattttccataatagtatatgaaaaattcttcaagaaatgcttgaaggtgccatatagataacaccaaaagttgcatgctgatatctggtgcttcaaattatccttcttcagggctccagctctaactgtctcataggaccaggagtactgcctatacaggcaacattc

SEQ ID NO: 55783 - DNA, 745 bp, Homo sapiens
cctaagccctggagttcaaggctttagtgagctgtgatagcactaccgcactcctgcctgggtgacagaatgagagcctgtcccaaaaggaagaaaaaaaaagaaaagaaaattagccgggtgtggtggtgtctgcctgtgggcccagctactcagggtcccagctactctggaggatgggaagatcgctagagcccaggaggtccaggctgaagagagctatgatcacrccactgtactccagcctgggtgacagagcaagacctggtctcaaaaaaaaaaaaaaaaaaaaaaacaaagaggaaagagagaacacacacaaaaaaaaacccaacatcaatccacattcactcagcttctgcctttaagtaaaggcctagggaacagtaagacaactgaaggaaaaagaagcacagctaaattcaaagtcaccgtagggcaggtgggggtgaggggtcagtgtgaagggagaaattttcacttgtattctcttattattttgcaggttgaatcactttgagtgagtatatcacaaatgactcatctaaatactatcttacttcaggctggataactgtgtgattatgaatatcttggtaataaatactgaatgaaaattaccaacgagttgaaacacaataatatgtttaaccctaaagccatgttgaacagaaggcctttcctttaaggacgctgatgaaggagaacagttcaggttcacatagatttgaaaacatttctggtt

SEQ ID NO: 55784 - DNA, 526 bp, Homo sapiens
agtggtggaaaaataaacagattccacttcttgatgggaaaagttgcaaagtcacactgccctggagggagagcagggtagaaaactgcagctaattttgcaattaaattttgcaaaataaaccaaaaaaaaatgtgtgtgtccatgagtctgcccacctaggcttttgggaggtgcatgcacatgagaaataaagcaacttcactttcaccacatggcaggtagcagatggcacacattctgagattgttggcaatgggctcttctgtccccccaaacacctctaagagggagactactatcactagtggcagcactagctagaaattccttgcaaagtttcttcccagacccaatgcttagcacagccacagaatgaactaacctctagtaaccttgcatgcyagactggctaataatttgtgaggcccagtgcaaaatgaaaatgcaaagtcctttattctaaaattgttaaaaatttcaagacaactgtcaagagaataagaaggcaagccactgacttgga

SEQ ID NO: 55785 - DNA, 546 bp, Homo sapiens
caaaaacattatggtaactaaaagaagccagacccaatttgtatgatttcgtgaatatgatgttcaggaaaaggcaaaactgtaagaacagaaatcaaatcagtggttgccggggactgggggtgaagaaaggagactgaacagaaaagggacaagaggaacttttcttgcttgcaggaaatgctttatctctcaattgcggctgtcrcatgactatatatattgtcaaaactcattgaactgtacacattttaaaagtgatttttactgtatgtcaattacaccttaataaacctgaaaaaaataaaacttttaaggcattctagctacctgcaaggctgtaagctgaccctattctcatgaagcttatgtgatttagtgatttatcctgcatggttccaagaccagaactgaaagcaatgaatgggaaaaggatgggaaagcagaagtgtgctcagagcaagagtcctcctaatggccactgcgaactgactcgttctccctctccacccggagcttactcaccactaaggctgagaagttgct

SEQ ID NO: 55786 - DNA, 546 bp, Homo sapiens
caaaaacattatggtaactaaaagaagccagacccaatttgtatgatttcgtgaatatgatgttcaggaaaaggcaaaactgtaagaacagaaatcaaatcagtggttgccggggactgggggtgaagaaaggagactgaacagaaaagggacaagaggaacttttcttgcttgcaggaaatgctttatctctcaattgcggctgtcacatgactatatatattgtcaaaactcattgaactgtacacattttaaaagtgatttttactgtatgtcaattacaccttaataaacctgaaaaaaataaaacttttaaggcattctagctacctgcraggctgtaagctgaccctattctcatgaagcttatgtgatttagtgatttatcctgcatggttccaagaccagaactgaaagcaatgaatgggaaaaggatgggaaagcagaagtgtgctcagagcaagagtcctcctaatggccactgcgaactgactcgttctccctctccacccggagcttactcaccactaaggctgagaagttgct

SEQ ID NO: 55787 - DNA, 546 bp, Homo sapiens
caaaaacattatggtaactaaaagaagccagacccaatttgtatgatttcgtgaatatgatgttcaggaaaaggcaaaactgtaagaacagaaatcaaatcagtggttgccggggactgggggtgaagaaaggagactgaacagaaaagggacaagaggaacttttcttgcttgcaggaaatgctttatctctcaattgcggctgtcacatgactatatatattgtcaaaactcattgaactgtacacattttaaaagtgatttttactgtatgtcaattacaccttaataaacctgaaaaaaataaaacttttaaggcattctagctacctgcaaggctgtaagctgaccctattctcatgaagcttatgtgatttagtgatttatcctgcatggttccaagaccagaactgaaagcaatgaatgggaaaaggatgggaaagcagaagtgkgctcagagcaagagtcctcctaatggccactgcgaactgactcgttctccctctccacccggagcttactcaccactaaggctgagaagttgct

SEQ ID NO: 55788 - DNA, 1194 bp, Homo sapiens
ctcatctgcagaatggggctgattgtctgccctgcgtatcttccaaaagcacatgggaaacggacccggaaagtggctatagtctgggggctgtgcctatgccagcccctgtcagccctcccccaggactgggaattcccttcttggggcttcgctgataataatggcagcacacacttgcttagcactgaccgtgcaccagcctgtcctcagggcacttatatgtggccactctgtcctcagaacaacaccctgaagtaggcactctacctccctttttcaagtgaggcagctgaggtccagagaagttaagtaatctgccccaagtcacttagctagtaagaggtgaagctgtatttgaacccgggcaatcaggttgaagatcttgtgctcttaactactgtactctgctgccttctggaacattcagtggatggtcctttctgtgcaactccctccaacactcttctccccagttgctgcagaacttagcatttgcagcagtccatttcagaagacccggatgctcagggatccccagctgagggcatgagaacctgagtctctgctgctgtgtaaggtggatgctggccataggagcacaaaaggttgatgagtcagaggaaggaatgatcgttctcatcctgtggatcagggagggccaagaaggaggtggccttggagtcagatcttaacgttttggagggattttgacaagcttggggaaagagcatttctggcagaacaagccagcacaggcaaaggcatgaaggtgtgggtcatgtagaagctggagagcacactgggtgtctggggttttgttcatttgtttagaaactgggtctcaatatattgccsaggctggactcaaactcctgggctcaagcaatcctctagctgcagcctcctgagtagctgggactatgggtatctgccatcacgcctggctcacgctgagtactgtgtgtttgaagaggataacacaaggcaagattaaaaaggaagattggagctagaccagagcccttgactgcctggtagaagaatttgaactttcttctagagtcagtggggaccagtggaggttttgagcccaggagtgatagtcctgaactgtggttagggacgttgaccctcagggggaggagggctggatggaggaaggtaagcctggaggccaggggatagctggga

SEQ ID NO: 55789 - DNA, 1624 bp, Homo sapiens
ttccatgatagacagttgtttttaatgaataggggtcaactactgcgaaggaaatccagcaccctctttccccaaaattttgtgcacacgctggtacaaagctctagtaccaacccgccttgtaaccttcccctcacctagcaacgtctaaatccatcttctaacagcaaggacaacagctctatctcaaagccaattcaaagacccctccgtacctccatacactctgacccctaagacttctgtaaaacattttagcctaaaataccacctgtttcacaacaagaggcaccttactcaccctcacccatccttctacccaaaattgaaccgtctgttggtccctcaaaatacagacatcgtataaactgcaagacatgcagagcactatcgaagcccaacaatcctacaccccagagatgactctggtagagctttgtcaacagtgtcccatacttttatttgttattattccatcttgggtcagtacaacctccgcctaccagattcaagtggttcatatgcctcagcctcccaagtagctgggattacaggcacccatgactacacccagctgctttttatatttttagtacagacggggtttcactaggctggacaggatggtcttgaactcttgaccctcggggatttgcccaccttggcctcccgaagtgctgggattacaggagtgagccaccgtgctcagcccatttgttattattatttttaaattgagatagggtcttgctgtgttgcccaggctggtcctgaactcctggcctcaaatgatcctcctgcctcaggctccaaaagtgctgggattacaggcatgagccacggcatgcattttttttcatgctttaaaaaaaccgtaaatacgttcccactttaacataaggccttcactytgcatacttctgagtaactttttcatttatccatagattccctaacattatcaacagcccacagtgcccttaccatttcagtaactctcacagcacttactaggtcaaaagagagccacagccgagcgcggtggctcacacctgcaatcccagcacttggggaggccaaggtgggcagatcacttgaggtcagaagtttgagaccggtctggccaatgtggtgaaaccctgtctctaccaaaaatacaaaaattgccgggcatggtggcggatgctgtgatcccagctgcttgagaggctgagggaggagagtagcttgaacccaggaggcagaggttacagtgagctgagatctcacctctgcattccagcctaggcaacagagcaagactccatctttccaagaaaagacagcaatttattaagcacctagacccaaacaacttaagcatttatgtcctaggaacttactagccatttgagaaaatacacacaagttgaaaatactattaatatattaaaacaaaataacatttttatttctttgccaaataaccatctcactcacttatggcgcctgttaggcactgcacctctcaaaccttggaatcagactaaacagcaccacctttatttcttctacaaactgatttttgcctgtacttagcaactgctaaaaacccagtttcacaaaaatatgacattatagaaag

SEQ ID NO: 55790 - DNA, 1298 bp, Homo sapiens
tgcatgtatatgcccatgaatattattttttggcttgcaggtggtcataaatataatcttgtaagtaaagcagtatgacataaatgraatttaaaatctgctgatctagggtagcagaataaaatagaaaagtcaccaaatataaactttaaatagatatttggaaaaagtgacaaaaaaatcaactctttggactcctgattacctaataataaaattatatttgatgattcctgtccttggagtctgtacttttagattatattcaataaccacattgctgactactttgcttctctccatcctcagcatctatctttccttcctaacagcactctgttttccttttcattatacgaactagtgtattttgtaattttcagtgagatattatagcctagggcctgccatcctttctggtggcctgtgcctccccagaagctctttggctttgcttactgatcatgccaaaagagccattggatagtaacatatagtaacatattctttttttttttttttttttttttttttttttttgagatggagtctcgctttttcgcccaggctggagtgcagtggcgcgatctcagctcactgcaaactccacctcccgggttcacgccattctccagcatcagcctcctgagtagctgggactacaggtgtctgccaccacgcctggctaattttttgtatttttagtagagatggggtttcaccgtgttagccaggatggtctcgatctcctgaccttgtgatccgcctgccttggcttcccaaagtgctggggttacaggcgtaagccactgctcctggccctggatagtaacatattcttaactctaccagccaaatgacctctcctcgggcttggaatcttaagcagatgattcaagactagaagaagccgttaatacttgtttatctaagcataaatgtcctaatgttgctgatagtatgacttttcccacagtttagtttgagtagcacaccagaactccctctgttttgctccattttcaaaattgccatcttctcatttttataaactcttagtactcttatggtaaatttcattactgccaacaatatccaggtttgttttgccaatttttaacaaagaatactaactgataaagaaattgtttcttgagaagggcttgcaggcaatgaaagggcaggaaaatatagtatttggaagtagtttattagcaggaaggggagggaggcattcatattccagcaccagacctatagaaatctgtggtgaaataactaaattcactgacagctgc

SEQ ID NO: 55791 - DNA, 1298 bp, Homo sapiens
tgcatgtatatgcccatgaatattattttttggcttgcaggtggtcataaatataatcttgtaagtaaagcagtatgacataaatggaatttaaaatctgctgatctagggtagcagaataaaatagaaaagtcaccaaatataaactttaaatagatatttggaaaaagtgacaaaaaaatcaactctttggactcctgattacctaataataaaattatatttgatgattcctrtccttggagtctgtacttttagattatattcaataaccacattgctgactactttgcttctctccatcctcagcatctatctttccttcctaacagcactctgttttccttttcattatacgaactagtgtattttgtaattttcagtgagatattatagcctagggcctgccatcctttctggtggcctgtgcctccccagaagctctttggctttgcttactgatcatgccaaaagagccattggatagtaacatatagtaacatattctttttttttttttttttttttttttttttttttgagatggagtctcgctttttcgcccaggctggagtgcagtggcgcgatctcagctcactgcaaactccacctcccgggttcacgccattctccagcatcagcctcctgagtagctgggactacaggtgtctgccaccacgcctggctaattttttgtatttttagtagagatggggtttcaccgtgttagccaggatggtctcgatctcctgaccttgtgatccgcctgccttggcttcccaaagtgctggggttacaggcgtaagccactgctcctggccctggatagtaacatattcttaactctaccagccaaatgacctctcctcgggcttggaatcttaagcagatgattcaagactagaagaagccgttaatacttgtttatctaagcataaatgtcctaatgttgctgatagtatgacttttcccacagtttagtttgagtagcacaccagaactccctctgttttgctccattttcaaaattgccatcttctcatttttataaactcttagtactcttatggtaaatttcattactgccaacaatatccaggtttgttttgccaatttttaacaaagaatactaactgataaagaaattgtttcttgagaagggcttgcaggcaatgaaagggcaggaaaatatagtatttggaagtagtttattagcaggaaggggagggaggcattcatattccagcaccagacctatagaaatctgtggtgaaataactaaattcactgacagctgc

SEQ ID NO: 55792 - DNA, 1298 bp, Homo sapiens
tgcatgtatatgcccatgaatattattttttggcttgcaggtggtcataaatataatcttgtaagtaaagcagtatgacataaatggaatttaaaatctgctgatctagggtagcagaataaaatagaaaagtcaccaaatataaactttaaatagatatttggaaaaagtgacaaaaaaatcaactctttggactcctgattacctaataataaaattatatttgatgattcctgtccttggagtctgtacttttagattatattcaataaccacattgctgactactttgcttctctccatcctcagcatctatctttccttcctaacagcactctgttttccttttcattatacgaactagtgtattttgtaattttcagtgagatattatagcctagggcctgccatcctttctggtggcctgtgcctccccagaagctctttggctytgcttactgatcatgccaaaagagccattggatagtaacatatagtaacatattctttttttttttttttttttttttttttttttttgagatggagtctcgctttttcgcccaggctggagtgcagtggcgcgatctcagctcactgcaaactccacctcccgggttcacgccattctccagcatcagcctcctgagtagctgggactacaggtgtctgccaccacgcctggctaattttttgtatttttagtagagatggggtttcaccgtgttagccaggatggtctcgatctcctgaccttgtgatccgcctgccttggcttcccaaagtgctggggttacaggcgtaagccactgctcctggccctggatagtaacatattcttaactctaccagccaaatgacctctcctcgggcttggaatcttaagcagatgattcaagactagaagaagccgttaatacttgtttatctaagcataaatgtcctaatgttgctgatagtatgacttttcccacagtttagtttgagtagcacaccagaactccctctgttttgctccattttcaaaattgccatcttctcatttttataaactcttagtactcttatggtaaatttcattactgccaacaatatccaggtttgttttgccaatttttaacaaagaatactaactgataaagaaattgtttcttgagaagggcttgcaggcaatgaaagggcaggaaaatatagtatttggaagtagtttattagcaggaaggggagggaggcattcatattccagcaccagacctatagaaatctgtggtgaaataactaaattcactgacagctgc

SEQ ID NO: 55793 - DNA, 1298 bp, Homo sapiens
tgcatgtatatgcccatgaatattattttttggcttgcaggtggtcataaatataatcttgtaagtaaagcagtatgacataaatggaatttaaaatctgctgatctagggtagcagaataaaatagaaaagtcaccaaatataaactttaaatagatatttggaaaaagtgacaaaaaaatcaactctttggactcctgattacctaataataaaattatatttgatgattcctgtccttggagtctgtacttttagattatattcaataaccacattgctgactactttgcttctctccatcctcagcatctatctttccttcctaacagcactctgttttccttttcattatacgaactagtgtattttgtaattttcagtgagatattatagcctagggcctgccatcctttctggtggcctgtgcctccccagaagctctttggctttgcttactgatcatgccaaaagagccattggatagtaacatatagtaacatattctttttttttttttttttttttttttttttttttgagatggagtctcgctttttcgcccaggctggagtgcagtggcgcgatctcagctcactgcaaactccacctcccgggttcacgccattctccagcatcagcctcctgagtagctgggactacaggtgtctgccaccacgcctggctaattttttgtatttttagtagagatggggtttcaccgtgttagccaggatggtctcgatctcctgaccttgtgatccgcctgccttggcttcccaaagtgctggggttacaggcgtaagccactgctcctggccctggatagtaacatattcttaactctaccagccaaatgacctctcctcgggcttggaatcttaagcagatgattcaagactagaagaagccrttaatacttgtttatctaagcataaatgtcctaatgttgctgatagtatgacttttcccacagtttagtttgagtagcacaccagaactccctctgttttgctccattttcaaaattgccatcttctcatttttataaactcttagtactcttatggtaaatttcattactgccaacaatatccaggtttgttttgccaatttttaacaaagaatactaactgataaagaaattgtttcttgagaagggcttgcaggcaatgaaagggcaggaaaatatagtatttggaagtagtttattagcaggaaggggagggaggcattcatattccagcaccagacctatagaaatctgtggtgaaataactaaattcactgacagctgc

SEQ ID NO: 55794 - DNA, 1298 bp, Homo sapiens
tgcatgtatatgcccatgaatattattttttggcttgcaggtggtcataaatataatcttgtaagtaaagcagtatgacataaatggaatttaaaatctgctgatctagggtagcagaataaaatagaaaagtcaccaaatataaactttaaatagatatttggaaaaagtgacaaaaaaatcaactctttggactcctgattacctaataataaaattatatttgatgattcctgtccttggagtctgtacttttagattatattcaataaccacattgctgactactttgcttctctccatcctcagcatctatctttccttcctaacagcactctgttttccttttcattatacgaactagtgtattttgtaattttcagtgagatattatagcctagggcctgccatcctttctggtggcctgtgcctccccagaagctctttggctttgcttactgatcatgccaaaagagccattggatagtaacatatagtaacatattctttttttttttttttttttttttttttttttttgagatggagtctcgctttttcgcccaggctggagtgcagtggcgcgatctcagctcactgcaaactccacctcccgggttcacgccattctccagcatcagcctcctgagtagctgggactacaggtgtctgccaccacgcctggctaattttttgtatttttagtagagatggggtttcaccgtgttagccaggatggtctcgatctcctgaccttgtgatccgcctgccttggcttcccaaagtgctggggttacaggcgtaagccactgctcctggccctggatagtaacatattcttaactctaccagccaaatgacctctcctcgggcttggaatcttaagcagatgattcaagactagaagaagccgttaatacttgtttatctaagcataaatgtcctaatgttgctgatagtatgacttttcccacagtttagtttgagtagcacaccagaactccctctgttttgctccattttcaaaattgccatcttctcatttttataaactcttagtactcttatggtaaatttcattactgccaacaatatccaggtttgttttgccaatttttaacaaagaatactaactgataaagaaattgtttcttgagaagggcttgcaggcaatgaaagggcaggaaaatatagtatttggaaktagtttattagcaggaaggggagggaggcattcatattccagcaccagacctatagaaatctgtggtgaaataactaaattcactgacagctgc

SEQ ID NO: 55795 - DNA, 1298 bp, Homo sapiens
tgcatgtatatgcccatgaatattattttttggcttgcaggtggtcataaatataatcttgtaagtaaagcagtatgacataaatggaatttaaaatctgctgatctagggtagcagaataaaatagaaaagtcaccaaatataaactttaaatagatatttggaaaaagtgacaaaaaaatcaactctttggactcctgattacctaataataaaattatatttgatgattcctgtccttggagtctgtacttttagattatattcaataaccacattgctgactactttgcttctctccatcctcagcatctatctttccttcctaacagcactctgttttccttttcattatacgaactagtgtattttgtaattttcagtgagatattatagcctagggcctgccatcctttctggtggcctgtgcctccccagaagctctttggctttgcttactgatcatgccaaaagagccattggatagtaacatatagtaacatattctttttttttttttttttttttttttttttttttgagatggagtctcgctttttcgcccaggctggagtgcagtggcgcgatctcagctcactgcaaactccacctcccgggttcacgccattctccagcatcagcctcctgagtagctgggactacaggtgtctgccaccacgcctggctaattttttgtatttttagtagagatggggtttcaccgtgttagccaggatggtctcgatctcctgaccttgtgatccgcctgccttggcttcccaaagtgctggggttacaggcgtaagccactgctcctggccctggatagtaacatattcttaactctaccagccaaatgacctctcctcgggcttggaatcttaagcagatgattcaagactagaagaagccgttaatacttgtttatctaagcataaatgtcctaatgttgctgatagtatgacttttcccacagtttagtttgagtagcacaccagaactccctctgttttgctccattttcaaaattgccatcttctcatttttataaactcttagtactcttatggtaaatttcattactgccaacaatatccaggtttgttttgccaatttttaacaaagaatactaactgataaagaaattgtttcttgagaagggcttgcaggcaatgaaagggcaggaaaatatagtatttggaagtagtttattagcaggaaggggagggaggcattcatattccagsaccagacctatagaaatctgtggtgaaataactaaattcactgacagctgc

SEQ ID NO: 55796 - DNA, 756 bp, Homo sapiens
caaaacaactttccctaggatcctagaggatacaaatttgtagcaaattccagaaggcagaaattacaggacattcttccaatacagcaccacagcaacttctctgttatttggaaaaccgtggaattggtctttacagtaaggttaggacctcggcactgtgggagaggagtgtctttctgggttgctctgtctcaaccctggaatagcagcagtttcttacatccgctattcttatatttcttagggttctgtttttactatccaatcttttttgttccattccccttttttagtttaaaattcttttattaaactccctccccctgttagaattactgtgtgactcatctctcctgctaggactaagactgacacagcataaatttcacccaggatctggactaacacacaacacacttcaaataatgaatagggcttgactcttcttatcatgccactgtggtagagcaggggacttttgtctgcactcgctgttttttctccctcaaatattttgaaccagctgacccctgtgcctgggagttctttgaaactcaatgagcttgtcaagtcatattccaaagtaaagccagttcatttcrtctaagatttttgataacgccattttaaatagcattttcctaattaggtaaagcaaacatttactcttataggtaaagcaaacatttacccttatagtttatccctaattaggtaaagcaaacatttactcttatagtttatccctacaga

SEQ ID NO: 55797 - DNA, 743 bp, Homo sapiens
taagtttgtcttgtaacctaggttaaagatggataatgccgatggtctcacatattcaggagacaatattctacctcttgttggtttctcctttttgtgctgacaagaagtttctgcaaagatgaaaagtaaaaagataaaataaaacatggaaaacaacatgtatggaaaatgaatgagctggggagagattctgggtgggtcactaaaaaaactgcctccagtagcrgagcaactgcctgcatttggctggatatggttgggatagatagtaatcgtgggccaaaaatgtcaaggtttggaaccagaaataaacttaccttattaataaatctgacacttatgaagtttgtggttttggactataaaatggaagacttcagttgaggttttgtaataattaggtaggtctcttgagcattataaataatgaatgtaatatacatagttatttctataggtatgttgacagttataataacatatttaaataagaatatagtagatattaaacatgttaaaatagtatggttcaattaataaatgtatcacaaactgacttctgtgatgtatacattttatttttaaatgttcatatagcatacgaaataaaataatcatgtgcttaggccacgaaaaatctcaaaaatattacctagatttgtttctagtttgttaccctatcaacagcctagacccggaccctggaaatatatgtcaactggaaaattgatattgtccca

SEQ ID NO: 55798 - DNA, 743 bp, Homo sapiens
taagtttgtcttgtaacctaggttaaagatggataatgccgatggtctcacatattcaggagacaatattctacctcttgttggtttctcctttttgtgctgacaagaagtttctgcaaagatgaaaagtaaaaagataaaataaaacatggaaaacaacatgtatggaaaatgaatgagctggggagagattctgggtgggtcactaaaaaaactgcctccagtagcggagcractgcctgcatttggctggatatggttgggatagatagtaatcgtgggccaaaaatgtcaaggtttggaaccagaaataaacttaccttattaataaatctgacacttatgaagtttgtggttttggactataaaatggaagacttcagttgaggttttgtaataattaggtaggtctcttgagcattataaataatgaatgtaatatacatagttatttctataggtatgttgacagttataataacatatttaaataagaatatagtagatattaaacatgttaaaatagtatggttcaattaataaatgtatcacaaactgacttctgtgatgtatacattttatttttaaatgttcatatagcatacgaaataaaataatcatgtgcttaggccacgaaaaatctcaaaaatattacctagatttgtttctagtttgttaccctatcaacagcctagacccggaccctggaaatatatgtcaactggaaaattgatattgtccca

SEQ ID NO: 55799 - DNA, 743 bp, Homo sapiens
taagtttgtcttgtaacctaggttaaagatggataatgccgatggtctcacatattcaggagacaatattctacctcttgttggtttctcctttttgtgctgacaagaagtttctgcaaagatgaaaagtaaaaagataaaataaaacatggaaaacaacatgtatggaaaatgaatgagctggggagagattctgggtgggtcactaaaaaaactgcctccagtagcggagcaactgcctgcatttggctggatatggttgggatagatagtaatcgygggccaaaaatgtcaaggtttggaaccagaaataaacttaccttattaataaatctgacacttatgaagtttgtggttttggactataaaatggaagacttcagttgaggttttgtaataattaggtaggtctcttgagcattataaataatgaatgtaatatacatagttatttctataggtatgttgacagttataataacatatttaaataagaatatagtagatattaaacatgttaaaatagtatggttcaattaataaatgtatcacaaactgacttctgtgatgtatacattttatttttaaatgttcatatagcatacgaaataaaataatcatgtgcttaggccacgaaaaatctcaaaaatattacctagatttgtttctagtttgttaccctatcaacagcctagacccggaccctggaaatatatgtcaactggaaaattgatattgtccca

SEQ ID NO: 55800 - DNA, 743 bp, Homo sapiens
taagtttgtcttgtaacctaggttaaagatggataatgccgatggtctcacatattcaggagacaatattctacctcttgttggtttctcctttttgtgctgacaagaagtttctgcaaagatgaaaagtaaaaagataaaataaaacatggaaaacaacatgtatggaaaatgaatgagctggggagagattctgggtgggtcactaaaaaaactgcctccagtagcggagcaactgcctgcatttggctggatatggttgggatagatagtaatcgtgggccaaaaatgtcaaggtttggaaccagaaataaacttaccttattaataaatctgacacttatgaagtttgtggttttggactataaaatggaagacttcagttgaggttttgtaataattaggtaggtctcttgagcattataaataatgaatgtaatatacatagttatttctataggtatgttgacagttataataacatatttaaataagaatatagtagatattaaacatgttaaaatagtatggttcaattaataaatgtatcacaaactgacttctgtgatgkatacattttatttttaaatgttcatatagcatacgaaataaaataatcatgtgcttaggccacgaaaaatctcaaaaatattacctagatttgtttctagtttgttaccctatcaacagcctagacccggaccctggaaatatatgtcaactggaaaattgatattgtccca

SEQ ID NO: 55801 - DNA, 946 bp, Homo sapiens
agcttagagtttgaagataaattcaaataggaatcttttctaataacatttacctagcgaagttgaacgccatcttctataggcaggcggctcctctgtgggacttaaaccagattcttagctcccccgtaacgatcatttcttataatttgtattttttgctctaaattttactctggtaagtgtgtctatcattcttccctygttaatctcaatacaccttttttgaatttgcatgtatgtcattctgttgatttcattatgttatatggttttggaaagaaattcacatccctagttccagctatgaacaattatattgacagataattagatgccgactgtttggaaaatagttaaacatatatgtctaacttcaatatctcaaaactattaaagctgtcagctgtactattggaaatatataataaaatagtagctctaaaatagagaaactaaataatagccactatgcacacatatgttcaagttaagaattatctataacattgaaagtaaatagaaatgtcttaagtggactactaaagcatttagattccttctctttggtaaggagtgccaagtagatataaggtattgtttcctatgcaatgagaaagaatatatattacaaacataataatttaaaagaaatcagagagctatagaataaagaagtctatgaactaaaattctacaaagtgatgagcacttgtaaggtgaactgatattaagttattttattccccgaggctgaggcttaccataggtactattgtaaacatatcagtggattttttgacagactggaatgtagcagttcttcaacacagggccaatttactatgtgggcattttttaaaaattattattcagggggagggtgccatggatttagggggctcatctagaaaagtagagtaagatttcttagtttagtgatgca

SEQ ID NO: 55802 - DNA, 1207 bp, Homo sapiens
ttaaattatattattaaatttccatattattagtacttattttatcattttatttcatgtgtcctatttactgaatttaatatttgaataatagtttttcttgtaagatttcttttggatgatacgtgttttgttctgctaaattgaaayttgtactttgtactttttctttgttcatagtctttaactgtagcgtcataccccacatctctttaccactagtgagttaagattatcagcaactgtattgtcttcctaacattataaaatattttaaaaaggtttcatgtttgtttggctcctcaactcctcattttaccaactggaagcaaacacactccaatatacacttttaattcattacactgaacctgagaaaacaaaaagtttaagtatacttttaaatgaaactacaaattagaagagtaaaccagggtaaatgattttcaaatcagtaaaagaaggtgaactcaatacaaaatgcctctttctattctttaaaaagcttcattaaaatataattgacatacagtccttaagtcccaagtttcgtggtgtctctttgcaatcccccttgctgctctttcttgccctctcccctattgttagataacacctgatttgctttctgtcactgtacattagtttgtacattctggaattttctacaaatggaataaatatagccttttttttttcacttagcatcattatcttgagaattattcatgttgttataccaatagatcatttgtttttattccagaacagtatttcattgttctagaataggatataccataatttattgatccaatcacatgataatgcacattaatgagatagcactgtgtgcctagtggaatggctaaaattaagcttgaccacattgagtgtctgtgaggatatggggaaactcagacaccgctggtggaaatataaaatactacaatcacattggaaaccaatttgatggtttcattaaaagttaaacattacctaccatatcatccaggtagtttactccaatgttaagagaaaagaaagcatatttcccttcaaagacaatataatactcttaaatttgattccaaaattacactgcttgctattcacaagaactgcacattcaacagaactgcagcagagtcaaaataatcaaaggcatgtatagatgaggattaaaataatataaaaaatagcatgc

SEQ ID NO: 55803 - DNA, 1207 bp, Homo sapiens
ttaaattatattattaaatttccatattattagtacttattttatcattttatttcatgtgtcctatttactgaatttaatatttgaataatagtttttcttgtaagatttcttttggatgatacgtgttttgttctgctaaattgaaatttgtactttgtactttttctttgttcatagtctttaactgtagcgtcataccccacatctctttaccactagtgagttaagattatcagcaactgtattgtcttcctaacattataaaataytttaaaaaggtttcatgtttgtttggctcctcaactcctcattttaccaactggaagcaaacacactccaatatacacttttaattcattacactgaacctgagaaaacaaaaagtttaagtatacttttaaatgaaactacaaattagaagagtaaaccagggtaaatgattttcaaatcagtaaaagaaggtgaactcaatacaaaatgcctctttctattctttaaaaagcttcattaaaatataattgacatacagtccttaagtcccaagtttcgtggtgtctctttgcaatcccccttgctgctctttcttgccctctcccctattgttagataacacctgatttgctttctgtcactgtacattagtttgtacattctggaattttctacaaatggaataaatatagccttttttttttcacttagcatcattatcttgagaattattcatgttgttataccaatagatcatttgtttttattccagaacagtatttcattgttctagaataggatataccataatttattgatccaatcacatgataatgcacattaatgagatagcactgtgtgcctagtggaatggctaaaattaagcttgaccacattgagtgtctgtgaggatatggggaaactcagacaccgctggtggaaatataaaatactacaatcacattggaaaccaatttgatggtttcattaaaagttaaacattacctaccatatcatccaggtagtttactccaatgttaagagaaaagaaagcatatttcccttcaaagacaatataatactcttaaatttgattccaaaattacactgcttgctattcacaagaactgcacattcaacagaactgcagcagagtcaaaataatcaaaggcatgtatagatgaggattaaaataatataaaaaatagcatgc

SEQ ID NO: 55804 - DNA, 689 bp, Homo sapiens
cactcaattgatctacctgccttggcctcctaaaggggtggaattacaggcttcagtcaccacacccggccaaaaaaaaaaaaacttttgaattgatttattctaccacatttagaacaacctctactttatcacaaacaagctatttgattcttccaatcaggtttatcaaaactgaagattccaatttaacatctttaatccaaacatcagttttattaatatattgacaaaaaaagtaaatcttattcataaygagtttaaaattaaaaattccatatattactgaaattaagctaatataaatctcaatctgattctgataaattaagatgtatacggaaaacaacaacaaccaaacaaaaataagatgtatatggaaaccctaaagcaaacactaaaaaacccctcaaaaattagtgattaaaaaaagaaaatattgaaaatagtgataaaaatcattaaataaattaaaatgttaaattagaaaatattattttgggctgggcatggtggctcacaccagtaatcccaacactttgggaggctgagtgaggaggatcgcttgaggccatgagtttaagacctgtatttgagtgagaccttgtctctacaaaaaaattttaaaagttagctgagtgtggtggtacatgcctgtagtcccagctactctggaggctgaggccaga

SEQ ID NO: 55805 - DNA, 1126 bp, Homo sapiens
aaccccaaagctgagatgactgtgggtctttattttagctggtgaaagaaaataagtttcatctttattgttttgaaaactgcagatacagaaatattttaattttaaaaattatcagctaacacacatccacagttacagtcattacgacaatctcattccttctctgaaaatcatccccaaacaaggaaattaasaaacaaaaccataaactctatcttcatggaagtagcagatatctgtaactcaaatcacaacatgcagacaggaaaaggaaagacaaggaagtaatgacttctcagaggggaagaaggtcaaatccaagttcctgccaatgaagagagctagcatgaaacacaagcctatctacttcgacagggtctggagaccccaggtatcatgaaaagtagacgaaggtgggggctgaaaatggtgaacaaaagctgcctgacaaattctttaaggaaggataacactcctaggtaggtgccccccaccatctcactcatcgagaggcaagagatattatctctggagaaactgaaaaagagcaagatccagactctaagacatcaggcacagagaagggctgaatgtaaaaggctacagactaaagactgggggtcacatgccaaccttgctactctatccaacgccagcaaagtaaaaaccaggcttacactcaaccctcctcccagtcactcctgacaggtgattagacgaatgtgctccaccaaaatgagggacccagggaacagaggacccaacacacaagagatgggaagggaattctcagataaacggtgacagcaattaacataaccatgcaaggcttagagaaaaaccaatcctgatgtgatcaggacaatgaagaagggctccaggagcaatgttcctaggaaaaagtccaaaatcaatagatttttgatggttttaactcagtggaagattgcagtaagagacattttacataactattaaaaagaacggaaaaaaagcatgagattcaatgaaaactaagcaaataaagtcattaactccagtaaaaccaaaagtttgcacgagacaaaaggcaaccatagttatgggctcaaaagtaacaatagctgcattctcataacagtaa

SEQ ID NO: 55806 - DNA, 1126 bp, Homo sapiens
aaccccaaagctgagatgactgtgggtctttattttagctggtgaaagaaaataagtttcatctttattgttttgaaaactgcagatacagaaatattttaattttaaaaattatcagctaacacacatccacagttacagtcattacgacaatctcattccttctctgaaaatcatccccaaacaaggaaattaagaaacaaaaccataaactctatcttcatggaagtagcagatatctgtaactcaaatcacaacatgcagacagraaaaggaaagacaaggaagtaatgacttctcagaggggaagaaggtcaaatccaagttcctgccaatgaagagagctagcatgaaacacaagcctatctacttcgacagggtctggagaccccaggtatcatgaaaagtagacgaaggtgggggctgaaaatggtgaacaaaagctgcctgacaaattctttaaggaaggataacactcctaggtaggtgccccccaccatctcactcatcgagaggcaagagatattatctctggagaaactgaaaaagagcaagatccagactctaagacatcaggcacagagaagggctgaatgtaaaaggctacagactaaagactgggggtcacatgccaaccttgctactctatccaacgccagcaaagtaaaaaccaggcttacactcaaccctcctcccagtcactcctgacaggtgattagacgaatgtgctccaccaaaatgagggacccagggaacagaggacccaacacacaagagatgggaagggaattctcagataaacggtgacagcaattaacataaccatgcaaggcttagagaaaaaccaatcctgatgtgatcaggacaatgaagaagggctccaggagcaatgttcctaggaaaaagtccaaaatcaatagatttttgatggttttaactcagtggaagattgcagtaagagacattttacataactattaaaaagaacggaaaaaaagcatgagattcaatgaaaactaagcaaataaagtcattaactccagtaaaaccaaaagtttgcacgagacaaaaggcaaccatagttatgggctcaaaagtaacaatagctgcattctcataacagtaa

SEQ ID NO: 55807 - DNA, 1126 bp, Homo sapiens
aaccccaaagctgagatgactgtgggtctttattttagctggtgaaagaaaataagtttcatctttattgttttgaaaactgcagatacagaaatattttaattttaaaaattatcagctaacacacatccacagttacagtcattacgacaatctcattccttctctgaaaatcatccccaaacaaggaaattaagaaacaaaaccataaactctatcttcatggaagtagcagatatctgtaactcaaatcacaacatgcagacaggaaaaggaaagacaaggaagtaatgacttctcagaggggaagaaggtcaaatccaagttcctgccaatgaagagagctagcatgaaacacaagcctatctacttcgacagggtctggagaccccaggtatcatgaaaagtagacgaaggtgggggctgaaaatggtgaacaaaakctgcctgacaaattctttaaggaaggataacactcctaggtaggtgccccccaccatctcactcatcgagaggcaagagatattatctctggagaaactgaaaaagagcaagatccagactctaagacatcaggcacagagaagggctgaatgtaaaaggctacagactaaagactgggggtcacatgccaaccttgctactctatccaacgccagcaaagtaaaaaccaggcttacactcaaccctcctcccagtcactcctgacaggtgattagacgaatgtgctccaccaaaatgagggacccagggaacagaggacccaacacacaagagatgggaagggaattctcagataaacggtgacagcaattaacataaccatgcaaggcttagagaaaaaccaatcctgatgtgatcaggacaatgaagaagggctccaggagcaatgttcctaggaaaaagtccaaaatcaatagatttttgatggttttaactcagtggaagattgcagtaagagacattttacataactattaaaaagaacggaaaaaaagcatgagattcaatgaaaactaagcaaataaagtcattaactccagtaaaaccaaaagtttgcacgagacaaaaggcaaccatagttatgggctcaaaagtaacaatagctgcattctcataacagtaa

SEQ ID NO: 55808 - DNA, 3225 bp, Homo sapiens
ttcaaaatatttagtataataatcaattttaaaacaaaatttatctacattatttgggccctaatggtatgttaaataataagaaaaaataaaatgtaagtcattctcaaaattttactctatgaggtataaaatgttaattcccttgacaaattgagcgccaacaatttgtcagtctaggtctaaaattctaaggatacaaaggcaaataaactgaggtctttcatttcaagaatacactcaggagagagatgtgtcactactttcaacctaagttgaaaggcaggtgtctaccaggtgtgcatacatgaaggtcatataatgttttgaaaaatgtacacataccactttcagacaaacactgagagaaatacaccctttagaaaaatataagacagataygtaatagtttccagtgctgatttcctcttaaacttgtaactaatcagagagggaaaaaaaaaatttatggctagcaaagaatctttagaaatgaaaatgaattatgggccgggcacagtggttcacgcctgtaatcccagcactttgggaggctgaggtgggcagaccacaaggtcaggagttcgagaccagcctggccaatatggtgaaaccccatctctattaaaaatacaaaaattagccaggcatggtggtgcgtgcctgtagttccaactactggggagactggagaatcacttgaacccgggagatggaggtcgcggtgagcctagatggtgccactacactccagcctgggcgacagagcgagactctgtccaaaaaacaaaaagaaaaaaaggaaatgaattatggttcaccaaactaaggcattcaaaaggcaatgccatatttattataattttactgtacattttttgaatatcacctgttatacaaaacatatgatgtggtttaaaggtaaaagtaaaccataaatttaacaacatatttaaacattagactaagaagagagagattttaaatatggagttcagaaccatgagactaactcattgttttaatgaaaataaaaagcattaacaacactttttccccatgtaagcctaaggcaatccatgtaaataagaaatttcaagaaaatgtgaaaagcagagttcctggggcttatcactaagtgtaaagtagaaagaaagaggagcaaatcactaaaatcaaattctaatttctgctttgacaaagtagtacttttcctcaaaaatacgtctggatgaatattttggatgattatttaaagcgaataattcaaagcatggaacctgatgcataatattaatcaatatttttaatcttctttaaatgtgaactaaaagcatttttttttttgagacgaactctcactctgtcgcccaggctggagtgcagtcccgcgatctcggctcactgcaacctctgcctcccaggctaaagtgattctcctgcctcagcctcccgagtatctgggattacaggtgtgcaccaccacgcctggctaattttttatttccagtagagacagggtttcaccatgttggccaggctggtcttgaactcccgacctcgggtgatccacctgccttggcctcccaaaatgcaggcaagagccaccgcgcccggcataaaagcatattgtaataacagagcctgaaccttataactatcactgattttactgaagacacttaaaaattcatcacggatttaacttagaaagtttcacctaaagaaaaataacacagtcaaaaactaaaagtgaaaaaatctcaaaagtaacccctacaggattttataatatctctgtttcaatctagcaatcaaatgacaattattacttttatttaaatgtaaatcttgatttttttctacttataaaagcaatatatgctcattgtaaaaaagaaattttttctttaaaacgtggaaatgtatgcaaagacaaagaaagccccaccagcctaaccctaattacccccaacccgcgagataactttactcagtgtttcttctttgatgaagcttgatctcacccaagggcatctgaaaaggagcacgcttctaagcattgaactcagtgtaccatctcaatgctggctcctggcaggagagccagcttttaggaaagcctgaccatcagaaaactggatctgttgccttgacccaactctatgaaatcttgatgtttcttccaaagtgcagcaaaagtatctagagactttttatatcatccaaagagaatcttgtataataataggagtatattaaggtttcaattatcacatttcgtagaactcacctttgattttttttctcttctcagtagagagcctccaatcaggattaaggtcatcatagcctggctaaatatgaaaataatgacttcctgagtgaactatgtaagaaaattataagaaaatcatcaagaactgtggactttttcaaataaagagatgacgctttcccttgatctctcaattacaactaattgaaatctatttattgccatgatagtctggaaaagcaattgttcttacacttaaaatgtgcacatgtacatattatgacttgatttatgaagaatacagcatgcatatgaacaacaggatagcaagtatacaatcaatacatatgaaagcaaaatacactaagaattcatcctatacacatgcacacatgtgatgaataaacactggcctggatacagatcttatcccagccacttataaactgagcaacccctccaggctttaattttcaaagctttgagacttgactaggcaacctccatgttacctcctagtcctttttatgactaagaatttaccaggtaaaaaaaatataaccatgcagtccttcctaaaaatgaatccattcatactgtaatcttagggcaatatggtgtcatgctcttctttgagaatataacagcacattgatatctctcaaatatcaatttgagaataagccattacctgacgacctcttggcttagtgttcccttcttagtctctggaattacaatagtatgggcaaagagtaaaaaaatagttggggtgctcatttgaaatctgaaatctaaaaaaagcgttgctatacttaagtcaaaaaactgtgctttttcatctaatgcaacaaaatacacacatgtttactatcaatttttcaatggctcacacttcagagctatttctttccacagcctggaagaacttcctattctccactatt

SEQ ID NO: 55809 - DNA, 3225 bp, Homo sapiens
ttcaaaatatttagtataataatcaattttaaaacaaaatttatctacattatttgggccctaatggtatgttaaataataagaaaaaataaaatgtaagtcattctcaaaattttactctatgaggtataaaatgttaattcccttgacaaattgagcgccaacaatttgtcagtctaggtctaaaattctaaggatacaaaggcaaataaactgaggtctttcatttcaagaatacactcaggagagagatgtgtcactactttcaacctaagttgaaaggcaggtgtctaccaggtgtgcatacatgaaggtcatataatgttttgaaaaatgtacacataccactttcagacaaacactgagagaaatacaccctttagaaaaatataagacagatatgtaatagtttccagtgctgatttcctcttaaacttgtaactaatcagagagggaaaaaaaaaatttatggctagcaaagaatctttagaaatgaaaatgaattatgggccgggcacagtggttcacgcctgtaatcccagcactttgggaggctgaggtgggcagaccacaaggtcaggagttcgagaccagcctggccaatatggtgaaaccccatctctattaaaaatacaaaaatyagccaggcatggtggtgcgtgcctgtagttccaactactggggagactggagaatcacttgaacccgggagatggaggtcgcggtgagcctagatggtgccactacactccagcctgggcgacagagcgagactctgtccaaaaaacaaaaagaaaaaaaggaaatgaattatggttcaccaaactaaggcattcaaaaggcaatgccatatttattataattttactgtacattttttgaatatcacctgttatacaaaacatatgatgtggtttaaaggtaaaagtaaaccataaatttaacaacatatttaaacattagactaagaagagagagattttaaatatggagttcagaaccatgagactaactcattgttttaatgaaaataaaaagcattaacaacactttttccccatgtaagcctaaggcaatccatgtaaataagaaatttcaagaaaatgtgaaaagcagagttcctggggcttatcactaagtgtaaagtagaaagaaagaggagcaaatcactaaaatcaaattctaatttctgctttgacaaagtagtacttttcctcaaaaatacgtctggatgaatattttggatgattatttaaagcgaataattcaaagcatggaacctgatgcataatattaatcaatatttttaatcttctttaaatgtgaactaaaagcatttttttttttgagacgaactctcactctgtcgcccaggctggagtgcagtcccgcgatctcggctcactgcaacctctgcctcccaggctaaagtgattctcctgcctcagcctcccgagtatctgggattacaggtgtgcaccaccacgcctggctaattttttatttccagtagagacagggtttcaccatgttggccaggctggtcttgaactcccgacctcgggtgatccacctgccttggcctcccaaaatgcaggcaagagccaccgcgcccggcataaaagcatattgtaataacagagcctgaaccttataactatcactgattttactgaagacacttaaaaattcatcacggatttaacttagaaagtttcacctaaagaaaaataacacagtcaaaaactaaaagtgaaaaaatctcaaaagtaacccctacaggattttataatatctctgtttcaatctagcaatcaaatgacaattattacttttatttaaatgtaaatcttgatttttttctacttataaaagcaatatatgctcattgtaaaaaagaaattttttctttaaaacgtggaaatgtatgcaaagacaaagaaagccccaccagcctaaccctaattacccccaacccgcgagataactttactcagtgtttcttctttgatgaagcttgatctcacccaagggcatctgaaaaggagcacgcttctaagcattgaactcagtgtaccatctcaatgctggctcctggcaggagagccagcttttaggaaagcctgaccatcagaaaactggatctgttgccttgacccaactctatgaaatcttgatgtttcttccaaagtgcagcaaaagtatctagagactttttatatcatccaaagagaatcttgtataataataggagtatattaaggtttcaattatcacatttcgtagaactcacctttgattttttttctcttctcagtagagagcctccaatcaggattaaggtcatcatagcctggctaaatatgaaaataatgacttcctgagtgaactatgtaagaaaattataagaaaatcatcaagaactgtggactttttcaaataaagagatgacgctttcccttgatctctcaattacaactaattgaaatctatttattgccatgatagtctggaaaagcaattgttcttacacttaaaatgtgcacatgtacatattatgacttgatttatgaagaatacagcatgcatatgaacaacaggatagcaagtatacaatcaatacatatgaaagcaaaatacactaagaattcatcctatacacatgcacacatgtgatgaataaacactggcctggatacagatcttatcccagccacttataaactgagcaacccctccaggctttaattttcaaagctttgagacttgactaggcaacctccatgttacctcctagtcctttttatgactaagaatttaccaggtaaaaaaaatataaccatgcagtccttcctaaaaatgaatccattcatactgtaatcttagggcaatatggtgtcatgctcttctttgagaatataacagcacattgatatctctcaaatatcaatttgagaataagccattacctgacgacctcttggcttagtgttcccttcttagtctctggaattacaatagtatgggcaaagagtaaaaaaatagttggggtgctcatttgaaatctgaaatctaaaaaaagcgttgctatacttaagtcaaaaaactgtgctttttcatctaatgcaacaaaatacacacatgtttactatcaatttttcaatggctcacacttcagagctatttctttccacagcctggaagaacttcctattctccactatt

SEQ ID NO: 55810 - DNA, 3225 bp, Homo sapiens
ttcaaaatatttagtataataatcaattttaaaacaaaatttatctacattatttgggccctaatggtatgttaaataataagaaaaaataaaatgtaagtcattctcaaaattttactctatgaggtataaaatgttaattcccttgacaaattgagcgccaacaatttgtcagtctaggtctaaaattctaaggatacaaaggcaaataaactgaggtctttcatttcaagaatacactcaggagagagatgtgtcactactttcaacctaagttgaaaggcaggtgtctaccaggtgtgcatacatgaaggtcatataatgttttgaaaaatgtacacataccactttcagacaaacactgagagaaatacaccctttagaaaaatataagacagatatgtaatagtttccagtgctgatttcctcttaaacttgtaactaatcagagagggaaaaaaaaaatttatggctagcaaagaatctttagaaatgaaaatgaattatgggccgggcacagtggttcacgcctgtaatcccagcactttgggaggctgaggtgggcagaccacaaggtcaggagttcgagaccagcctggccaatatggtgaaaccccatctctattaaaaatacaaaaattagccaggcatggtggtgcgtgcctgtagttccaactactggggagactggagaatcacttgaacccgggagatggaggtcgcggtgagcctagatggtgccactacactccagcctgggcgacagagcgagactctgtccaaaaaacaaaaagaaaaaaagraaatgaattatggttcaccaaactaaggcattcaaaaggcaatgccatatttattataattttactgtacattttttgaatatcacctgttatacaaaacatatgatgtggtttaaaggtaaaagtaaaccataaatttaacaacatatttaaacattagactaagaagagagagattttaaatatggagttcagaaccatgagactaactcattgttttaatgaaaataaaaagcattaacaacactttttccccatgtaagcctaaggcaatccatgtaaataagaaatttcaagaaaatgtgaaaagcagagttcctggggcttatcactaagtgtaaagtagaaagaaagaggagcaaatcactaaaatcaaattctaatttctgctttgacaaagtagtacttttcctcaaaaatacgtctggatgaatattttggatgattatttaaagcgaataattcaaagcatggaacctgatgcataatattaatcaatatttttaatcttctttaaatgtgaactaaaagcatttttttttttgagacgaactctcactctgtcgcccaggctggagtgcagtcccgcgatctcggctcactgcaacctctgcctcccaggctaaagtgattctcctgcctcagcctcccgagtatctgggattacaggtgtgcaccaccacgcctggctaattttttatttccagtagagacagggtttcaccatgttggccaggctggtcttgaactcccgacctcgggtgatccacctgccttggcctcccaaaatgcaggcaagagccaccgcgcccggcataaaagcatattgtaataacagagcctgaaccttataactatcactgattttactgaagacacttaaaaattcatcacggatttaacttagaaagtttcacctaaagaaaaataacacagtcaaaaactaaaagtgaaaaaatctcaaaagtaacccctacaggattttataatatctctgtttcaatctagcaatcaaatgacaattattacttttatttaaatgtaaatcttgatttttttctacttataaaagcaatatatgctcattgtaaaaaagaaattttttctttaaaacgtggaaatgtatgcaaagacaaagaaagccccaccagcctaaccctaattacccccaacccgcgagataactttactcagtgtttcttctttgatgaagcttgatctcacccaagggcatctgaaaaggagcacgcttctaagcattgaactcagtgtaccatctcaatgctggctcctggcaggagagccagcttttaggaaagcctgaccatcagaaaactggatctgttgccttgacccaactctatgaaatcttgatgtttcttccaaagtgcagcaaaagtatctagagactttttatatcatccaaagagaatcttgtataataataggagtatattaaggtttcaattatcacatttcgtagaactcacctttgattttttttctcttctcagtagagagcctccaatcaggattaaggtcatcatagcctggctaaatatgaaaataatgacttcctgagtgaactatgtaagaaaattataagaaaatcatcaagaactgtggactttttcaaataaagagatgacgctttcccttgatctctcaattacaactaattgaaatctatttattgccatgatagtctggaaaagcaattgttcttacacttaaaatgtgcacatgtacatattatgacttgatttatgaagaatacagcatgcatatgaacaacaggatagcaagtatacaatcaatacatatgaaagcaaaatacactaagaattcatcctatacacatgcacacatgtgatgaataaacactggcctggatacagatcttatcccagccacttataaactgagcaacccctccaggctttaattttcaaagctttgagacttgactaggcaacctccatgttacctcctagtcctttttatgactaagaatttaccaggtaaaaaaaatataaccatgcagtccttcctaaaaatgaatccattcatactgtaatcttagggcaatatggtgtcatgctcttctttgagaatataacagcacattgatatctctcaaatatcaatttgagaataagccattacctgacgacctcttggcttagtgttcccttcttagtctctggaattacaatagtatgggcaaagagtaaaaaaatagttggggtgctcatttgaaatctgaaatctaaaaaaagcgttgctatacttaagtcaaaaaactgtgctttttcatctaatgcaacaaaatacacacatgtttactatcaatttttcaatggctcacacttcagagctatttctttccacagcctggaagaacttcctattctccactatt

SEQ ID NO: 55811 - DNA, 3225 bp, Homo sapiens
ttcaaaatatttagtataataatcaattttaaaacaaaatttatctacattatttgggccctaatggtatgttaaataataagaaaaaataaaatgtaagtcattctcaaaattttactctatgaggtataaaatgttaattcccttgacaaattgagcgccaacaatttgtcagtctaggtctaaaattctaaggatacaaaggcaaataaactgaggtctttcatttcaagaatacactcaggagagagatgtgtcactactttcaacctaagttgaaaggcaggtgtctaccaggtgtgcatacatgaaggtcatataatgttttgaaaaatgtacacataccactttcagacaaacactgagagaaatacaccctttagaaaaatataagacagatatgtaatagtttccagtgctgatttcctcttaaacttgtaactaatcagagagggaaaaaaaaaatttatggctagcaaagaatctttagaaatgaaaatgaattatgggccgggcacagtggttcacgcctgtaatcccagcactttgggaggctgaggtgggcagaccacaaggtcaggagttcgagaccagcctggccaatatggtgaaaccccatctctattaaaaatacaaaaattagccaggcatggtggtgcgtgcctgtagttccaactactggggagactggagaatcacttgaacccgggagatggaggtcgcggtgagcctagatggtgccactacactccagcctgggcgacagagcgagactctgtccaaaaaacaaaaagaaaaaaaggaaatgaattatggttcaccaaactaaggcattcaaaaggcaatgccatatttattataattttactgtacattttttgaatatcacctgttatacaaaacatatgatgtggtttaaaggtaaaagtaaaccataaatttaacaacatatttaaacatyagactaagaagagagagattttaaatatggagttcagaaccatgagactaactcattgttttaatgaaaataaaaagcattaacaacactttttccccatgtaagcctaaggcaatccatgtaaataagaaatttcaagaaaatgtgaaaagcagagttcctggggcttatcactaagtgtaaagtagaaagaaagaggagcaaatcactaaaatcaaattctaatttctgctttgacaaagtagtacttttcctcaaaaatacgtctggatgaatattttggatgattatttaaagcgaataattcaaagcatggaacctgatgcataatattaatcaatatttttaatcttctttaaatgtgaactaaaagcatttttttttttgagacgaactctcactctgtcgcccaggctggagtgcagtcccgcgatctcggctcactgcaacctctgcctcccaggctaaagtgattctcctgcctcagcctcccgagtatctgggattacaggtgtgcaccaccacgcctggctaattttttatttccagtagagacagggtttcaccatgttggccaggctggtcttgaactcccgacctcgggtgatccacctgccttggcctcccaaaatgcaggcaagagccaccgcgcccggcataaaagcatattgtaataacagagcctgaaccttataactatcactgattttactgaagacacttaaaaattcatcacggatttaacttagaaagtttcacctaaagaaaaataacacagtcaaaaactaaaagtgaaaaaatctcaaaagtaacccctacaggattttataatatctctgtttcaatctagcaatcaaatgacaattattacttttatttaaatgtaaatcttgatttttttctacttataaaagcaatatatgctcattgtaaaaaagaaattttttctttaaaacgtggaaatgtatgcaaagacaaagaaagccccaccagcctaaccctaattacccccaacccgcgagataactttactcagtgtttcttctttgatgaagcttgatctcacccaagggcatctgaaaaggagcacgcttctaagcattgaactcagtgtaccatctcaatgctggctcctggcaggagagccagcttttaggaaagcctgaccatcagaaaactggatctgttgccttgacccaactctatgaaatcttgatgtttcttccaaagtgcagcaaaagtatctagagactttttatatcatccaaagagaatcttgtataataataggagtatattaaggtttcaattatcacatttcgtagaactcacctttgattttttttctcttctcagtagagagcctccaatcaggattaaggtcatcatagcctggctaaatatgaaaataatgacttcctgagtgaactatgtaagaaaattataagaaaatcatcaagaactgtggactttttcaaataaagagatgacgctttcccttgatctctcaattacaactaattgaaatctatttattgccatgatagtctggaaaagcaattgttcttacacttaaaatgtgcacatgtacatattatgacttgatttatgaagaatacagcatgcatatgaacaacaggatagcaagtatacaatcaatacatatgaaagcaaaatacactaagaattcatcctatacacatgcacacatgtgatgaataaacactggcctggatacagatcttatcccagccacttataaactgagcaacccctccaggctttaattttcaaagctttgagacttgactaggcaacctccatgttacctcctagtcctttttatgactaagaatttaccaggtaaaaaaaatataaccatgcagtccttcctaaaaatgaatccattcatactgtaatcttagggcaatatggtgtcatgctcttctttgagaatataacagcacattgatatctctcaaatatcaatttgagaataagccattacctgacgacctcttggcttagtgttcccttcttagtctctggaattacaatagtatgggcaaagagtaaaaaaatagttggggtgctcatttgaaatctgaaatctaaaaaaagcgttgctatacttaagtcaaaaaactgtgctttttcatctaatgcaacaaaatacacacatgtttactatcaatttttcaatggctcacacttcagagctatttctttccacagcctggaagaacttcctattctccactatt

SEQ ID NO: 55812 - DNA, 2104 bp, Homo sapiens
tgcatatttagctgtacattttcaagataattattatttgaatwgagattgccctgtaaatttttaaaaattagaatatatagatactaaatttgttagaatataattttttgtgtttatggaaaagctaattaaaaataattggaaggcgtagcaaagaaaagtatatgaagaagggcatgagaattcattgtcagtgagagtcattataaagtcagaaaatccccaaattatatatttaataattcgccacttgagactctaaaactcaaggggaaaacaacaagcattcttattaggttcacattatgttgacctttggagatagcagagatggttcagcaagctcttcagaacttgtgacttccatgatacaacctgtttctatttttagcacttcccagaatccattttcataaataactaaaatgggacatttggtaatcacatttaatattccattcttccattgtgataaatgaggtactatttccactcacttcatcaagattttagattgtccagagaacacttgcatatattcttagcttacttcaatgtggggtcatgaaaaaagtgggtgctacaagacaggaaaagcaactctggaaaaatataaagcctaagtatcctagatttaataaaacctttgtagctgaatatggtacttgggaataatgatgataagtaatatttacttactctgtactaatgtactaattttgctatcctaccaggcctagaacatcctatttttccttttctgttaatattcttttgatgctttattatgccttcctaatctttacatttttatacatccagggatatattaaattattaaaacttgaaaaataaaacctgtgagaaaatactaacagttggggattttatttcagaaaaagtaatttacatgttatcttaataaccataacctcgttggttagataatattattcctcttttaaagatgcataaactgagtcttggtgggtttggtcaaatcatttacccaaagacataaagggagcaagtggcagagctgcacttggaacccaagcagtcgttactggtaccacttactagctagacctatagatctagcctctggtatgctaaaatagttgttcttccatgtaatagttctttaaattttcctgaatttctcattttttagcatgaaatctgcatctactaatcaagcattattacccaactcgtgcacattttctacaacaaaatctgtacatttgggtattccttttggaaataaaaataaaaataaaataaagaccatactttatttcagggcatttctccactctttctcatattctctgtaaaattaaattttgattggcatgtattatagtgtgattgcattggcccttcatactataatattatagggttgggggtgagaaatgggtacataagatacatataaagaaccaattgattaactgtcttaaaatattcatgggtcctctctccccattgaaattactacaacagactttcccacagttttctacccgacattttattaagtctggttggtcacgaaaacctctcactctataagtgtttgggaataattaccacttgttttagaatagtgcaaacacttcatggatgatctgaaatctgaacgcttcgcgaacatttcatgaagttgagaacaattagattaacatgtgtcagtacagttcttaatttgtaaaaagtcaccattttgtgattagcactgaagagagaccacctgatgtctaactctggattacctttgcaagagtgacttcttttatctatgtgcattcttcctgaggtgggcactgtttcttcaaaatcgagcccagatgctttccctattcctggagaagagtctactattcctgagaagagcggcttttgttcatcatcaatggaggagatgaaagatgaggatctgctttttttctcttcaaagtgtctcttggaactctgataatgtcttatggtatctgcagagtcttcaggatcatttgtactgttttctttgccaaaatatatcaaagaaaagttattttatagcagacaattaaatgtgagacggtatgcatat

SEQ ID NO: 55813 - DNA, 2104 bp, Homo sapiens
tgcatatttagctgtacattttcaagataattattatttgaatagagattgccctgtaaatttttaaaamttagaatatatagatactaaatttgttagaatataattttttgtgtttatggaaaagctaattaaaaataattggaaggcgtagcaaagaaaagtatatgaagaagggcatgagaattcattgtcagtgagagtcattataaagtcagaaaatccccaaattatatatttaataattcgccacttgagactctaaaactcaaggggaaaacaacaagcattcttattaggttcacattatgttgacctttggagatagcagagatggttcagcaagctcttcagaacttgtgacttccatgatacaacctgtttctatttttagcacttcccagaatccattttcataaataactaaaatgggacatttggtaatcacatttaatattccattcttccattgtgataaatgaggtactatttccactcacttcatcaagattttagattgtccagagaacacttgcatatattcttagcttacttcaatgtggggtcatgaaaaaagtgggtgctacaagacaggaaaagcaactctggaaaaatataaagcctaagtatcctagatttaataaaacctttgtagctgaatatggtacttgggaataatgatgataagtaatatttacttactctgtactaatgtactaattttgctatcctaccaggcctagaacatcctatttttccttttctgttaatattcttttgatgctttattatgccttcctaatctttacatttttatacatccagggatatattaaattattaaaacttgaaaaataaaacctgtgagaaaatactaacagttggggattttatttcagaaaaagtaatttacatgttatcttaataaccataacctcgttggttagataatattattcctcttttaaagatgcataaactgagtcttggtgggtttggtcaaatcatttacccaaagacataaagggagcaagtggcagagctgcacttggaacccaagcagtcgttactggtaccacttactagctagacctatagatctagcctctggtatgctaaaatagttgttcttccatgtaatagttctttaaattttcctgaatttctcattttttagcatgaaatctgcatctactaatcaagcattattacccaactcgtgcacattttctacaacaaaatctgtacatttgggtattccttttggaaataaaaataaaaataaaataaagaccatactttatttcagggcatttctccactctttctcatattctctgtaaaattaaattttgattggcatgtattatagtgtgattgcattggcccttcatactataatattatagggttgggggtgagaaatgggtacataagatacatataaagaaccaattgattaactgtcttaaaatattcatgggtcctctctccccattgaaattactacaacagactttcccacagttttctacccgacattttattaagtctggttggtcacgaaaacctctcactctataagtgtttgggaataattaccacttgttttagaatagtgcaaacacttcatggatgatctgaaatctgaacgcttcgcgaacatttcatgaagttgagaacaattagattaacatgtgtcagtacagttcttaatttgtaaaaagtcaccattttgtgattagcactgaagagagaccacctgatgtctaactctggattacctttgcaagagtgacttcttttatctatgtgcattcttcctgaggtgggcactgtttcttcaaaatcgagcccagatgctttccctattcctggagaagagtctactattcctgagaagagcggcttttgttcatcatcaatggaggagatgaaagatgaggatctgctttttttctcttcaaagtgtctcttggaactctgataatgtcttatggtatctgcagagtcttcaggatcatttgtactgttttctttgccaaaatatatcaaagaaaagttattttatagcagacaattaaatgtgagacggtatgcatat

SEQ ID NO: 55814 - DNA, 2104 bp, Homo sapiens
tgcatatttagctgtacattttcaagataattattatttgaatagagattgccctgtaaatttttaaaaattagaatatatagatactaaatttgttagaatataattttttgtgtttatggaaaagctaattaaaaataattggaaggcgtagcaaagaaaagtatatgaagaagggcatgagaattcattgtcagtgagagtcattataaagtcagaaaatccccaaattatatatttaataattcgccacttgagactctaaaactcaaggggaaaacaacaagcattcttattaggttcacattatgttgacctttggagatagcagagatggttcagcaagctcttcagaacttgtgacttccatgatacaacctgtttctatttttagcacttcccagaatccattttcataaataactaaaatgggacatttggtaatcacatttaatattccattcttccattgtgataaatgaggtactatttccactcacttcatcaagattttagattgtccagagaacacttgcatatattcttagcttacttcaatgtggggtcatgaaaaaagtgggtgctacaagacaggaaaagcaactctggaaaaatataaagcctaagtatcctagatttaataaaacctttgtagctgaatatggtacttgggaataatgatgataagtaatatttacttactctgtactaatgtactaattttgctatcctaccaggcctagaacatcctatttttccttttctgttaatattcttttgatgctttattatgccttcctaatctttacatttttatacatccagggatatattaaattattaaaacttgaaaaataaaacctgtgagaaaatactaacagttggggattttatttcagaaaaagtaatttacatgttatcttaataaccataacctcgttggttagataatattattcctcttttaaagatgcataaactgagtcttggtgggtttggtcaaatcatttacccaaagacataaagggagcaagtggcagagctgcacttggaacccaagcagtcgttactggtaccacttactagctagacctatagatctagcctctggtatgctaaaatagttgttcttccatgtaatagttctttaaattttcctgaatttctcattttttagcatgaaatctgcatctactaatcaagcattattacccaactcgtgcacattttctacaacaaaatctgtacatttgggtattccttttggaaataaaaataaaaataaaataaagaccatactttatttcagggcatttctccactctttctcatattctctgtaaaattaaattttgattggcatgtattatagtgtgattgcattggcccttcatactataatattatagggttgggggtgagaaatgggtacakaagatacatataaagaaccaattgattaactgtcttaaaatattcatgggtcctctctccccattgaaattactacaacagactttcccacagttttctacccgacattttattaagtctggttggtcacgaaaacctctcactctataagtgtttgggaataattaccacttgttttagaatagtgcaaacacttcatggatgatctgaaatctgaacgcttcgcgaacatttcatgaagttgagaacaattagattaacatgtgtcagtacagttcttaatttgtaaaaagtcaccattttgtgattagcactgaagagagaccacctgatgtctaactctggattacctttgcaagagtgacttcttttatctatgtgcattcttcctgaggtgggcactgtttcttcaaaatcgagcccagatgctttccctattcctggagaagagtctactattcctgagaagagcggcttttgttcatcatcaatggaggagatgaaagatgaggatctgctttttttctcttcaaagtgtctcttggaactctgataatgtcttatggtatctgcagagtcttcaggatcatttgtactgttttctttgccaaaatatatcaaagaaaagttattttatagcagacaattaaatgtgagacggtatgcatat

SEQ ID NO: 55815 - DNA, 1096 bp, Homo sapiens
caatcagttagggttatcttggagacaaactatcacakaaattattgacaattattgtttgtagatacggaaatgatattatagttatgtgcttttaaaaatagtctttaccttttcagagtacagagtgaaatatttataaaggaaatgttataatatttgggctttgcctcagaacaatccagagttgggggagaagaaggagagagaaggtctgaattttagctgtatattgatttttattgaaactgaatgatggatagttactatttatttataataaacttaaaatttttcaaaataaacaggttaagaaaagaattctagaatcttattcagaaatgtctaagatagttaagaatggagtttcctgattgaaaaaaagaaataggtttacaaacatcatagaggcttacctctgtaagaattgagttggtttcttattaggcaaatttagattcctgtttacacagcagaatgtttactttgccttctgcatatctagttcatattatgtagatctgtgttcagccatacagactggacacaaccccaattttgcccaaccttgaactctttgacatcaagcttctgttaagttggtggatgggaaaatcatgttccaagatactcagagatgctaactgcagaggtccattgctctgagtgtacttagctacattgctcattaagttagattaaaatacagccacatttcagagactcatcaccttaggtctcttactgaaatacttttactttgctagagttacatattaaaccttcaagctttcattctggattgaatatataagaagtatatttttgcatttttctcagaaaactgccactaaatgtttacattgtttaatgtcattttaataaatatttgcattacatatttcttttaatattcgtttctaggaaacggttggtctctcaaggaatttaaaagtttcctctctctctcttattttatttcatttttatttcactttaagttccaggatacatgtatagaatgtgcaggtttgttacataggtatacatgtaccatggtggtttgctgcacctatcaacccatcatctagctttt

SEQ ID NO: 55816 - DNA, 1067 bp, Homo sapiens
tagaaactccctgaatcttaactgaatgttttaccaaattaagcacatttcgtaagtcctcaggtatcacatcacaccagtgcatacatgattgtttcagatgttggttctgaggcattagacatggtggaaggctacaaagagtgccctgaaaaggattaaaagggctttgtcattcccttgtgggaactaatggaaactcaggagaacatattcccacattggagattttggtgtaaacaccagaccaatgacaaagacatccaaagaattatcacggaggctyctttttagattaacttgtctgcagaaaaatttgacctggaaatgccacagttcagaatatggatactgaaaccatcaaaatgagatgaagtcaagaagacagaaaaggtttaagtattttatgagtaagaggggctcttaaaggcagatgtgaactattgataatactctagaaggttcttcacctcaactgtgtttgtatgtgatttaaggatgatttgagaaaataagttgccattcaatgatattttcagggtatttacagaatctcagtgtagttacccacctgccttatgttttgctgaagcaaacatctttttaagaagtattcctaatctgctgaaataatttctactgagatctaaaacatccactttgcaaagcagagctcaatttgacactgagaaatttaaggaattatccaagtttgctgtggcttaggctatgataaattgatgtgtttaccctgtgactgtgctggtgaatgtacagtgatttaaggagccaggaaagggagacaaggaggtggccttagtgctaaaattaaccctggtgctagggtgatcaaccatccaggtttgcatgggattgggggtggagggtttcctaggatgcacaacttccagtgctagaaacaggtcagtgcaacaataatcgctctgtgggtcatcaagactgtgactttgtgggaatggacccacctctctgtttcttttaatacctgtttccccttctaaaatgccactgagacccatttaaacataacttcatctggatatcac

SEQ ID NO: 55817 - DNA, 1067 bp, Homo sapiens
tagaaactccctgaatcttaactgaatgttttaccaaattaagcacatttcgtaagtcctcaggtatcacatcacaccagtgcatacatgattgtttcagatgttggttctgaggcattagacatggtggaaggctacaaagagtgccctgaaaaggattaaaagggctttgtcattcccttgtgggaactaatggaaactcaggagaacatattcccacattggagattttggtgtaaacaccagaccaatgacaaagacatccaaagaattatcacggaggcttctttttagattaacttgtctgcagaaaaatttgacctggaaatgccacagttcagaatatggatactgaaaccatcaaaatgagatgaagtcaagaagacagaaaaggtttaagtattttatgagtaagaggggctcttaaaggcagatgtgaactattgataatactstagaaggttcttcacctcaactgtgtttgtatgtgatttaaggatgatttgagaaaataagttgccattcaatgatattttcagggtatttacagaatctcagtgtagttacccacctgccttatgttttgctgaagcaaacatctttttaagaagtattcctaatctgctgaaataatttctactgagatctaaaacatccactttgcaaagcagagctcaatttgacactgagaaatttaaggaattatccaagtttgctgtggcttaggctatgataaattgatgtgtttaccctgtgactgtgctggtgaatgtacagtgatttaaggagccaggaaagggagacaaggaggtggccttagtgctaaaattaaccctggtgctagggtgatcaaccatccaggtttgcatgggattgggggtggagggtttcctaggatgcacaacttccagtgctagaaacaggtcagtgcaacaataatcgctctgtgggtcatcaagactgtgactttgtgggaatggacccacctctctgtttcttttaatacctgtttccccttctaaaatgccactgagacccatttaaacataacttcatctggatatcac

SEQ ID NO: 55818 - DNA, 1067 bp, Homo sapiens
tagaaactccctgaatcttaactgaatgttttaccaaattaagcacatttcgtaagtcctcaggtatcacatcacaccagtgcatacatgattgtttcagatgttggttctgaggcattagacatggtggaaggctacaaagagtgccctgaaaaggattaaaagggctttgtcattcccttgtgggaactaatggaaactcaggagaacatattcccacattggagattttggtgtaaacaccagaccaatgacaaagacatccaaagaattatcacggaggcttctttttagattaacttgtctgcagaaaaatttgacctggaaatgccacagttcagaatatggatactgaaaccatcaaaatgagatgaagtcaagaagacagaaaaggtttaagtattttatgagtaagaggggctcttaaaggcagatgtgaactattgataatactctagaaggttcttcacctcaactgtgtttgtatgtgatttaaggatgatttgagaaaataagttgccattcaatgatattttcagggtatttacaraatctcagtgtagttacccacctgccttatgttttgctgaagcaaacatctttttaagaagtattcctaatctgctgaaataatttctactgagatctaaaacatccactttgcaaagcagagctcaatttgacactgagaaatttaaggaattatccaagtttgctgtggcttaggctatgataaattgatgtgtttaccctgtgactgtgctggtgaatgtacagtgatttaaggagccaggaaagggagacaaggaggtggccttagtgctaaaattaaccctggtgctagggtgatcaaccatccaggtttgcatgggattgggggtggagggtttcctaggatgcacaacttccagtgctagaaacaggtcagtgcaacaataatcgctctgtgggtcatcaagactgtgactttgtgggaatggacccacctctctgtttcttttaatacctgtttccccttctaaaatgccactgagacccatttaaacataacttcatctggatatcac

SEQ ID NO: 55819 - DNA, 1304 bp, Homo sapiens
gaagacaaactatcctttaagaacctggagctcacaccaagtggcagaccggagttttcagagtagttcactagagtagacactaggaatcatgtctcagattattttttccttggcagtcattcagtttatttatagaataacataaaataaacattctcaaaccatgctgggtgtcatcaagagagatcacttattttcctctaaattaaaacacatgtacacacatacacatwcacacaaagtcttgttttcaagatgaacaatcacaccctccctcccataccctttaccttcaaccccactgccctacgacaccttgtttccagaataggagaaacacagaatcaggccgatgaaggagtttattttgtgtgaaaacccacatatttttaagaatggggattaaaatgacttcgttttttagaagagctggaaattggtagagctttccctgctgaagaaaaagtaacatttgtatgaccaagttactcactttatccaaatattaacaaacacctgcaacagcactaaggacagaaatattgcaaaaggggaaaaaggtgggtgaaagctagccctcttcttattttgggggaggtaagtaggcatgtgactccttttggtcccctctttcccctgcctctgccagcctccacgtgggcacagagccagaagcaagactggtaagagcacgtgtccagtctctccatcaccaactctcactcccatgctcacctggagaaatcattgtgtgagtggtttactagcacttctcaaatccctgaaggaatccccaacaggtgatgagttatttggctggagttccagagatgagagaaagaaagaaaaagagaaaagaagaggaagaagaatcaacattattgagctcctaggaaataccagatatgttatatattctatttagttctagcaatcaaatatgagatattggattcatctgagacctatgtcttaaatcccagctcagcctcttactagctatgcaaccttgtcctctctggaagtcagcagtctcatttgcaaagtggggttgctagtaataataataatcttctaggtttatagagaagattacatgatgtcatgaatataactacttaatgtaataaacagccacaatttatcaaagattagctccattttatacacaaagtatatgattcagaagtgtaggtaactctcccaataaggtgatgaaaacagaacatggcacatttcctcctgggatggtgactgactaattcaaaacattacgcatgaatcatatggtttttaaatgc

SEQ ID NO: 55820 - DNA, 1304 bp, Homo sapiens
gaagacaaactatcctttaagaacctggagctcacaccaagtggcagaccggagttttcagagtagttcactagagtagacactaggaatcatgtctcagattattttttccttggcagtcattcagtttatttatagaataacataaaataaacattctcaaaccatgctgggtgtcatcaagagagatcacttattttcctctaaattaaaacacatgtacacacatacacatayacacaaagtcttgttttcaagatgaacaatcacaccctccctcccataccctttaccttcaaccccactgccctacgacaccttgtttccagaataggagaaacacagaatcaggccgatgaaggagtttattttgtgtgaaaacccacatatttttaagaatggggattaaaatgacttcgttttttagaagagctggaaattggtagagctttccctgctgaagaaaaagtaacatttgtatgaccaagttactcactttatccaaatattaacaaacacctgcaacagcactaaggacagaaatattgcaaaaggggaaaaaggtgggtgaaagctagccctcttcttattttgggggaggtaagtaggcatgtgactccttttggtcccctctttcccctgcctctgccagcctccacgtgggcacagagccagaagcaagactggtaagagcacgtgtccagtctctccatcaccaactctcactcccatgctcacctggagaaatcattgtgtgagtggtttactagcacttctcaaatccctgaaggaatccccaacaggtgatgagttatttggctggagttccagagatgagagaaagaaagaaaaagagaaaagaagaggaagaagaatcaacattattgagctcctaggaaataccagatatgttatatattctatttagttctagcaatcaaatatgagatattggattcatctgagacctatgtcttaaatcccagctcagcctcttactagctatgcaaccttgtcctctctggaagtcagcagtctcatttgcaaagtggggttgctagtaataataataatcttctaggtttatagagaagattacatgatgtcatgaatataactacttaatgtaataaacagccacaatttatcaaagattagctccattttatacacaaagtatatgattcagaagtgtaggtaactctcccaataaggtgatgaaaacagaacatggcacatttcctcctgggatggtgactgactaattcaaaacattacgcatgaatcatatggtttttaaatgc

SEQ ID NO: 55821 - DNA, 1304 bp, Homo sapiens
gaagacaaactatcctttaagaacctggagctcacaccaagtggcagaccggagttttcagagtagttcactagagtagacactaggaatcatgtctcagattattttttccttggcagtcattcagtttatttatagaataacataaaataaacattctcaaaccatgctgggtgtcatcaagagagatcacttattttcctctaaattaaaacacatgtacacacatacacatacacacaaagtcttgttttcaagatgaacaatcacaccctccctcccataccctttaccttcaaccccactgccctacgacaccttgtttccagaataggagaaacacagaatcaggccgatgaaggagtttattttgtgtgaaaacccacatatttttaagaatggggattaaaatgacttcgttttttagaagagctggaaattggtagagctttccctgctgaagaaaaagtaacatttgtatgaccaagttactcactttatccaaatattaacaaacacctgcaacagcactaaggacagaaatattgcaaaaggggaaaaaggtgggtgaaagctagccctcttcttattttgggggaggtaagtaggcatgtgactccttttggtcccctctttyccctgcctctgccagcctccacgtgggcacagagccagaagcaagactggtaagagcacgtgtccagtctctccatcaccaactctcactcccatgctcacctggagaaatcattgtgtgagtggtttactagcacttctcaaatccctgaaggaatccccaacaggtgatgagttatttggctggagttccagagatgagagaaagaaagaaaaagagaaaagaagaggaagaagaatcaacattattgagctcctaggaaataccagatatgttatatattctatttagttctagcaatcaaatatgagatattggattcatctgagacctatgtcttaaatcccagctcagcctcttactagctatgcaaccttgtcctctctggaagtcagcagtctcatttgcaaagtggggttgctagtaataataataatcttctaggtttatagagaagattacatgatgtcatgaatataactacttaatgtaataaacagccacaatttatcaaagattagctccattttatacacaaagtatatgattcagaagtgtaggtaactctcccaataaggtgatgaaaacagaacatggcacatttcctcctgggatggtgactgactaattcaaaacattacgcatgaatcatatggtttttaaatgc

SEQ ID NO: 55822 - DNA, 1063 bp, Homo sapiens
aaccttgaaaacaacatattaaatgagtgaagatagtcacaaaagaccatctagcatcttatcccacttatatgaaatgtccataacagaaaaattgatagagacagaaagtagactagttgtttctttgagattgtgagggaagattggaaataactactaatgggtatggggttaaatgcaaatgatattttggggagataaaaatgttctaaagtcacttgtggtgatagttgtacaactctgaatatacactaaaagccattggactgtacactttagtagattttatgatatgtgaactgtatcttaacaaagatattaagtgaaggaagaggagaaggaaagagagaagtagggaaagcsagttagcagcctaaaggtgccatcagagagttgaagtggatcacagagcgttatttagggaaatggaaagaactgatccctcatatcttttcaaatctccaatgtagccattccaggtatttgtatggccaggctttggggcaaaaacattgatggtcagaataatatagagatagtgagcatttttcgctgattaaatacagaagtaaattctcctttagacttattacgctttaggctacaggctaagcatatcaggttgcagttatatgttagtttggtcaggaaatgtttgtcttctttgacacaagtaactgacctgtaaaatggtgattattgtatcaaacatgaaagcaatgattcgaatctatatttttagtggatgaaagtgagatagaattattgaggatcatttgtttttcaggactccattttgtagagcaatagttgacaaacaatgctccatagaggccaaattcaacctggtggctgtgtttgtaaatgaagttttattggaacaagtaatgcacattcatttatgtactatctatatctgctcttgtgtgcagagttgaagagttgtgacagagacatacacagcacagaaagtctaaaatattaactatccggccctttacagaaaatgtttgctaacccctctctctagaaaaatatgactgattcagctttttaacaa

SEQ ID NO: 55823 - DNA, 705 bp, Homo sapiens
ttctactaatatgtttaatcagcagcgtggccatattttactttcatttccctttcacctatattctctcattagaacgaagatttatcatcatgtatcagaagttctcaaataagaaccctcaaatatgaggaaatctctgaagaatgttatgaatcccctcattttgagggcctccatgttgccttacacatttttcctgtgaattatactctctgacattttctctgacaaattttagcttttccmttaatccagtttccatttatttaggttttctagcatgattttttctccataaatttacttttcatatctaattatctcttttattccaacacacccacaccactcgtgctgctcccatctgtcccctgaaagctctattgaactacacataaaaccctttttcctttaattatataaattatgtcaatttagagaaaacgttgttccatataagcactattcatttggtagagtccattttttcccaagtatgactccagcagcaaacaatccttaatggatttaactaatttttccaatcagtaacatccagattctacacaggttgtgcaacataattagggtcgctcttcatgagaaaaaaaagtataattctgcacaagtttctcttcaggagtgccagaatggtaatttctatgcaaataacagttgaggaataccatcacttgctttaag

SEQ ID NO: 55824 - DNA, 1869 bp, Homo sapiens
aaatgaaaatacaatatccacaaaaagacttgtatgtccatgactttattcagaacagccaaaaactagaaagaacccaagtcccatcaacaaaaccgtatataaacaaattggtacacatttgaatagaaaaaatattttttaaaaaatgaacagataatacatgcaacaacatggcttaatctcaaaaccattatgttcagtgaaagaatccagatacacaagtaaatactgtatggttctgtttactttaagctcaagaacaggtaaaactaatgtatgtgatataaataagaatagtggccacctaaatggtttagagattcactgtaagagggtaaaaggtaacttttgggggtgatggaaatgttctaaatctttatttaagtattggttacgtggacatactcttggccaaaactcatcaaattatatactcacaatatatgtatttcactttgtttaaaatttcacctaaaaaaagtaagaatctaggatttctggtggctccaacatcctataaatattaatttctaatgtcaaaggataatctgaagtttactttatgagtgaaactagtcaataatataactttattaacatgtagtactacttcctcaccaaaagtttgtgagggagagagagagaatgggccagaaataacttttctgttagatgtatgtgctaacatcattgcctcccacctccacctcattgttttttaacactctctctaacactaaataacaagtgattctctcagtagctggatcctaactcttaaggatttgtcgtattagttggtatgcttgggggaggggattgtctttggagtgttggatttgatgtgttatagttaattaaggtatttcagttcttgcttgtaagcatggtgaggaggaattaacgtgaagtttggttcggcatgtactatggacggtcaagcaattatagtactataattacttataacttaatacttgggtctttaagcatctcactctcrttgactaagaaatggctcacctaaagctatgatgcattttcaaacacaagtaaactgaacttgagacgtctttaaataagatctaaattgctcttataatggattaaaaagccaaggttcaaaaagggtaatgactctagctgagctgcaaaaccttgaagtaaagaaggaagggcctttgcccagctggcccacagagagccaactctagatgctaggccagcacaagtgcatgaaccatcaaattctatgaaactcaaaagtgctagagggagtgaaaaggttctaagagagagagacacaatacgttaagtgaattcatgccttgtgtttagaggtgggggggtgaggatagtatgtagttcacgaggaattttaaaatgccatattccttttgaatttcttattctttcaggttttagatttaaggattaggcaattttgctccatgggaaataacctgtattaacagcaccaactttgttaaaatcagtgtatcaaagagaagtctgcattcacatgtttattccagcacttttcacaatatccaagatatgaaattaacctacatttctatcagtgaatgaataaagaaaacaggtatatatacccaatggaatattgctcagtcattaaaaagatttcattctttttatttcattttattcctgtatttgcagcaacaggaatgaatctagaggacaatatagtaagtgaaataacccaggcacagaaaaataaataccacataatctcactcatatgtggagtctaaaaaagttgatctcatagaagaacacaatacaaatgatggttaccaaaagcttgggtggttagagcagaggaaggagatgttgatcaaa

SEQ ID NO: 55825 - DNA, 1869 bp, Homo sapiens
aaatgaaaatacaatatccacaaaaagacttgtatgtccatgactttattcagaacagccaaaaactagaaagaacccaagtcccatcaacaaaaccgtatataaacaaattggtacacatttgaatagaaaaaatattttttaaaaaatgaacagataatacatgcaacaacatggcttaatctcaaaaccattatgttcagtgaaagaatccagatacacaagtaaatactgtatggttctgtttactttaagctcaagaacaggtaaaactaatgtatgtgatataaataagaatagtggccacctaaatggtttagagattcactgtaagagggtaaaaggtaacttttgggggtgatggaaatgttctaaatctttatttaagtattggttacgtggacatactcttggccaaaactcatcaaattatatactcacaatatatgtatttcactttgtttaaaatttcacctaaaaaaagtaagaatctaggatttctggtggctccaacatcctataaatattaatttctaatgtcaaaggataatctgaagtttactttatgagtgaaactagtcaataatataactttattaacatgtagtactacttcctcaccaaaagtttgtgagggagagagagagaatgggccagaaataacttttctgttagatgtatgtgctaacatcattgcctcccacctccacctcattgttttttaacactctctctaacactaaataacaagtgattctctcagtagctggatcctaactcttaaggatttgtcgtattagttggtatgcttgggggaggggattgtctttggagtgttggatttgatgtgttatagttaattaaggtatttcagttcttgcttgtaagcatggtgaggaggaattaacgtgaagtttggttcggcatgtactatggacggtcaagcaattatagtactataattacttataacttaatacttgggtctttaagcatctcactctcattgactaagaaatggctcacctaaagctatgatgcattttcaaacacaagtaaactgaacttgagacgtctttaaataagatctaaattgctcttataatggattaaaragccaaggttcaaaaagggtaatgactctagctgagctgcaaaaccttgaagtaaagaaggaagggcctttgcccagctggcccacagagagccaactctagatgctaggccagcacaagtgcatgaaccatcaaattctatgaaactcaaaagtgctagagggagtgaaaaggttctaagagagagagacacaatacgttaagtgaattcatgccttgtgtttagaggtgggggggtgaggatagtatgtagttcacgaggaattttaaaatgccatattccttttgaatttcttattctttcaggttttagatttaaggattaggcaattttgctccatgggaaataacctgtattaacagcaccaactttgttaaaatcagtgtatcaaagagaagtctgcattcacatgtttattccagcacttttcacaatatccaagatatgaaattaacctacatttctatcagtgaatgaataaagaaaacaggtatatatacccaatggaatattgctcagtcattaaaaagatttcattctttttatttcattttattcctgtatttgcagcaacaggaatgaatctagaggacaatatagtaagtgaaataacccaggcacagaaaaataaataccacataatctcactcatatgtggagtctaaaaaagttgatctcatagaagaacacaatacaaatgatggttaccaaaagcttgggtggttagagcagaggaaggagatgttgatcaaa

SEQ ID NO: 55826 - DNA, 899 bp, Homo sapiens
tgttcaacccacagcctgagggccacatgcagccctgaacagctttgcatgtgactcaacacaaattcgtaaacttccttaagacattgtgaaatttttttgtgattttgttttttagctcatcagctatcattagtgttagcgtattttaagtgtggcccaagacaattcttcttcttccagtgtggcccagggaagccaaaagactggacacccctgacctagggaatgaaggaagatagaacaaggaagaaggccaaggactaaaaccccaggtaacccagtgttatagtgtgtaagctggaggagataaaaggaaataagcaaagaagtctgggaaggaatcctgcataaattatcctatttgccccagtgtaaaaggagaatgaatcaacttgcagttcctaagagccatgctctctactataggaagaaggctgctcaagtgtctacgtcatcccactcatctttcagtctagcatatattcttatatatacagacacagactctcaagaacacacactcatacacaccccctcacacccagcttgcacatccacaagaccagcccaatayacagctagagtgcaaactgaggaggccattcttggaaatatcctggccagggctctgagcagacaggcagagaaggggcatggaatggaaactcactctggaagtttgaggctctgtttcatttcaattacacagaatgtcttcccaaagggagcacaaggcaaaaagtaaattattctacctgtctccaagcattcattcaagttttaaagaagaatggatttcttaatcaagttttattacttatgaacactatctagaagatctctttgaatgtgtttgggcagtgcaagacaaagaattccatggcatcttctcccct

SEQ ID NO: 55827 - DNA, 899 bp, Homo sapiens
ccacagtgaatttaacaaagagactcaaccttaggtgagtctctttgaagatactaagagtgtagtgacccatgcaccttttgagccttctgctcataagtaaagttgatcccaaatgatcacttggctcaatacctacagaagagattagataatcgcatattgacttgagatgttcagcaaagcatgccctatgaagtaagactgggatgaggtctgaagaaaatctagacttaatcagacaatgagccaagggaatcatgcctccagtagagggaagagcgtttgcaaaggcagaaagaaacaaaagggtgagaaatgaatccagcacggctggatcaccaagatagtgctagataagtctggaaagatgcaggaccatgtcacagggccccagaggtcacgtttaacatttgaatctttatatccttgctagtgttggggggaggagcaaagaaagctaatatctactttgccctctgaaaacatccttttggatggagtggaaggagaaggacagtggaagaggagartcggttagaagacaaatgtaatatccaggtgcaagaaaatggttactgggactaggatggtgacagtgatattggggtaagtgggtggtttccggagattccaaatcaatatctcttggtgatatggcaggagagggaagtgtccaaaaagagtacccaggtttctgacctgcgtagaagacagttgttccattcactgaagtacagaactctacaggagcccagtacttttactgctggggtggagatgggggcgggagagtttggttttgaaggtgctatgtatgcagcactttgaagtatctaagtgaagttggcaggtacctgactctcacatgggagttctggaacaaaaatataaatgca

SEQ ID NO: 55828 - DNA, 1565 bp, Homo sapiens
gacagtttccatctcctgctgacttcagctcttagctcagtggctaagcggctgttactgacaggtctagagcatattcgtggatcgagctcaccttacgtgtctgcttcctcctgggctgtcactcagcgcatgttccctctctttagggcctcttaagagaacacactacctgaatcctaccaatggaatgttacaattattagaaacatttttcatatacagtactcatgaaatcattaagttttcatgtagtttttacaattgtaaaagtttgtcatttgtatctcatttgattattaaacagcccctttgtataccggagaatctgttgcattaatgacaggtcatgggcagaaccaaaagcccaggacttcacactccacaaccagaatgttttccatagtattaaatgccagtgagaaatgagaagagaagagttgttccctccaaatcttcactatggaagatttcccaggacaatcttgagtctacagttctgagtgctttgcctgtcttaatcacaaattaatttctctctctctatgtctgcattagaacccagaacagagatacagaagggcgatatcagtaatcaatgctggtgataatgtttgcttggggctgctggggaaacctggctactaattggcaataactcagtgggcgatgttggtccttaactccttaatcgtattagccctttgaccatcggatagcatctctttaagactggcccaatcctgcggctctgctcattccacctgctcattcctcccagcactgccagatgtccaacgagatcatacaatacaaggataacaaatttttttgtgggttttggttggtatatatgaggagaacctttgtgttttatttggataatttgtattcaacaagccctggaaccctaagaaaataggtgatgtgcctatctatctatctcccggtctagctacctgggaggctgaggtgggaggatcgcatgggcccaggagttgggagtccagcctggacaacatagtgagaccctcatctctaaaaataaacaaacaaataaataatacaagtaaatttaaaaatagaaaacaggccaggcgcggtgactcatgcctgtaatcccagcactttgggaggccaaggtgggcagatcacgaggtcaagagatcgagaccatcctggccaacatggtgaaaccccgtctctactaaaaatacaaaaattagctgggcgtggtggtgggcgcctgtagtcccagctactcaggaggctgaggcaggagaatcgcttgaacccagggggcggaggttgcagtgagccaagatcatgccactgcactccagcctggcaacagagagagaccctgtctcaaaaaaaagaaaagagaaaagaaaacagatgaggacaagggagaaaatatatttttaaataagtgtttagcttagtttccaataagaaaatctctgtgtctgtttcaaggaatttgggggtttcttcctggcttttcatgacatccrtctcccctgtcacttaggacactcagtgggtgtctctgtgatcctctg

SEQ ID NO: 55829 - DNA, 735 bp, Homo sapiens
acgctgaaagaattgcattttatgttgataatttctacgtctgatgaattattatgaaaaggacaacaccttcattttggataaagccaacttgataactaaaatgggttattccagcttctagcatgtggctttgcacatagtgagcctgtggtttttgaacagtttctccagttgagcattcagaaatccccaaccaaatcaggttgggttttgtttttttttttttttggcagagcaatatagatggagcaaataataagttgcagcatcaactgaatccccaagattattctctcaactccctttcaccctaccctgaaccctgagcttctaggagataccaaagtctacagctcttcacaatagcaatgtctcccagaaataatgatgacatttatgccccgtgtcaaacctttacggaggaagaacaagaatatagaaggggtctataggagtttgttcctctaatttgtatcttaaactttagaagttgtccctgtgtataaactgagatcttcggatggggcacattggttggtgaaatagatccctttatgaagtcacactcctaagaaacagawggaaaattaatgtttaaggaaaactgtgttgttgcaaaaaacgtaaaatttgtaaagggactctggccggcaatgcaaatatctggaacaaaggaagaaagtcgggcatctgcaatcctactatgcgtgacgcttatgctggaggagtcat

SEQ ID NO: 55830 - DNA, 990 bp, Homo sapiens
cattcagcgagtgccactggccgcagctggcttcccagtgaggggttcccttcttgccaagtccagcctgcagaaacctctgtgccacccagtgggctacagctgcagtgagactggactcagccttggggctgattctcccctccttgaagagaaggggccaatttctcccttccatgaggcttttaccttagccctagagtggcggctacttcctgtgtgtgctttggtggtattctttagtgctctctttaccgtttcttatttatgtttatttatttatttgtaaagtctgggggattcccacatcagagactatacccctagaaatcctgatcttccagttaagaggggtccccatatccaatgtcctgccttggtgaggtctccgtgcgtgagactcagaactctgctctctgtccctgcccctgggatcccagtctctcccctgccctttggtgctagtgtctgaaccccaagcccgatcccacacatcagtgttccgctcatgatggaaccctaggctgctgctcttgtattctaaagtcttataggaacctgacctcttcacttacatagtctacggctgctttcatgccacagtggcagagtgagtagctggaacgagaacctacagcctgcgagcttaaacatttaccatgtagcacattagagcaaaggcgcgcctgtccctgccttataccgagggtctctgacatccaccctgagaaaactayctctgagggtccccacagcctggattttccctaagggtccctacctcccaaagtaggtggccctggccctgtgaaacctggtctagggttccccaggtctgcaacctcaatcattagtcctgtgcacctcccgccatggacaccccagttacactacccgcagccccagagtccccatcctccatccctagtcccatcagccccagtcccagcccagcccagcccagcacctttgttgacgcagctcaggatg

SEQ ID NO: 55831 - DNA, 727 bp, Homo sapiens
caggaaaattaaaaattcgctgggcttggtggtgcgcacctatagtcccaggtacttgggaggtgaggtgaaggattgcttgagccaaggaatttggggctgcagtgaactatgatggtaccactgcactccagtctgggtgacaagagtgagaccctgactctaaaagaaataaataagaggctaagtagacaggccgtggggctgatgagcagtgggaggggtgagaccccatattctgccccagatgactaggttcctacctcatagtagrcaccattgtggtagcagccacattgctggatgggcacgcaggcttggccgttgtagaggaagccggagtcacactggcagccctcagcacacccatctgggcactgcagaggggcactgagagccgagcagcccagggagcaggtgtccgcacagagctcgtagtgactgttctgagggcattccatggctgcaaggagggggtgccgatcagagccctggggagggaggggctgcaaggcccagggtctaccccttctgtgcctcaagctctcccctccctgcccctccggctctccctcactcacgacagaaagtttcattcctccagggctccacctggcctccagctgcctggcaagcactcacgtaggcatggatgttgctgcagagaatgctcaggttcccaccacccaggcagagatcaaagatgcaatctttcaagggaccctgg

SEQ ID NO: 55832 - DNA, 727 bp, Homo sapiens
caggaaaattaaaaattcgctgggcttggtggtgcgcacctatagtcccaggtacttgggaggtgaggtgaaggattgcttgagccaaggaatttggggctgcagtgaactatgatggtaccactgcactccagtctgggtgacaagagtgagaccctgactctaaaagaaataaataagaggctaagtagacaggccgtggggctgatgagcagtgggaggggtgagaccccatattctgccccagatgactaggttcctacctcatagtaggcaccattgtggtagcagccacattgctggatgggcacgcaggcttggccgttgtagaggaagccggagtcacactggcagccctcagcacacccatctgggcactgcagaggggcactgagagccgagcagcccagggagcaggtgtccgcacagagctcgtagtgactgttctgagggcattccatggctgcaaggagggggtgccgatcagagccctggggagggaggggctgcaaggcccagggtctaccccttctgtgcctcaagctctcccctccctgcccctccggctctccctcactcacgacagaaagtttcattcctccagggctccacctggcctccagcygcctggcaagcactcacgtaggcatggatgttgctgcagagaatgctcaggttcccaccacccaggcagagatcaaagatgcaatctttcaagggaccctgg

SEQ ID NO: 55833 - DNA, 557 bp, Homo sapiens
ctcctgccctcccggggacctcaggggaccatcctgccacacatacccggactttgccgatctcgtccttgtggatggagatgttggtgccgagggcagccacggtgacgactctcacgtaggayacagcagggttgccccggttctggttcttggtggtgacggtgaagggtgtcaggccctgggtgctgacccccgggcagccagttgttgccagcacatagttacaggtgccctggaagtcaaacttccggccatcgaaggagtggtagtgtgggtcgccccacagccagcacgtggcctcatagttgggcaggcacacgccctggccaccctgctccttgcatgtctcctgtggccggcatgtcacgccgtggcacgggtctggggacagaagagggaggaggaccttgaggggctgcccattgtaaaggatggccgctccctccacatctaccccagtctgtgccagggatctgagggttactgcaggcaagaccacattccagagtcctcatgtctaggacccaggtcctatagtttgcttttttattttg

SEQ ID NO: 55834 - DNA, 557 bp, Homo sapiens
ctcctgccctcccggggacctcaggggaccatcctgccacacatacccggactttgccgatctcgtccttgtggatggagatgttggtgccgagggcagccacggtgacgactctcacgtaggacacagcagggttgccccggttctggttcttggtggtgacggtgaagggtgtcaggccctgggtgctgacccccgggcagccagttgttgccagcacatagttacaggtgccctggaagtcaaacttccggccatcgaaggagtggtagtgtgggtcgccccacagccagcacgtggcctcatagttgggcaggcacacrccctggccaccctgctccttgcatgtctcctgtggccggcatgtcacgccgtggcacgggtctggggacagaagagggaggaggaccttgaggggctgcccattgtaaaggatggccgctccctccacatctaccccagtctgtgccagggatctgagggttactgcaggcaagaccacattccagagtcctcatgtctaggacccaggtcctatagtttgcttttttattttg

SEQ ID NO: 55835 - DNA, 1945 bp, Homo sapiens
atgactggaaaatgccaggtaaaaactggttatattgtatggtgagccccttatttataaaagggagctgggcatggtcgctcacgcctgtaatcccagcactttgggaggccaaggtgataggattgcttcgggccaggagtttgagaccatcctgagtaacatagtgagagcccgtcttcacaaaaattgaaaaattagccaggaatggtgatgcatgcctgcagtcctaactacacaggaggctgaggtaagaggatcgcttgagcccaggaattggaggttgcagtgaaccatgagtgccacgccaccacacgcgagtctasaagacaaagtaagaccttgtctctaaaaattacattaaagtaaaaaaacaaaaataaaggaaatacacatatacagacacagaaacaaagacacacaaacacatgcacacacagagaaagaatgtcaaagggtattgaaggtatttctggtcattgttttactctttattctttccccattttcttaactctctatgttgaacatacattagaacagatatttacttcataatcagaaagaatgctgtacgtcatcactacttctggaaggatccccaaaggcttagctgttatctttccacttcccactggctgggtgcaagagtgtggtacttctggcagcctcagtcagttctgcagtacttctttggttttaagcttagtctaggcaaagccaaaaatcttgaattaaggaagcaaatgctttgtgtttcagattagattaaaagaactaaatatattaactatacctgctgatttaaaggccgtggttaggaggcacagtaggatgaggctaccatgcagaggggtacaatcccataaggtagttcattatattatccccattttacagatgagaaacttgaggtagcttactgtggccatgcttcaaattacagcaagaaggtgtaaggcactggagagggattgaagggaaggaaaatgatttaaaaataaacaagaaggtagtgtgggatagtggttagggctgtctggactctggaatcagaaaagagtcgtcctaagcttggtgccaccacttcctagacatttaatcttggatgagttactcagtcatttgaaaaacctttactaagtaactaccaggtgccatgcagtagtccaggtgctggagatacagcaatgaagcaaggccacagaaagccctgtcctcatagaattaacattataatagaaaaatcagatcatacattagaaaaacaagtacagcatagtttctcagatgatcttaggtgcaatgtagaaaatgtgtggaagtttccgttgctttgtctgcaaaaatgagataataaaattgctatttcattgagtactgtgaggattcctgagatcacgtacagagggctgagcactgttcccagtccaataactattaatcatgaccattattttgagatgaagaaggccaaatctattcttgttgtctgagtgacaatgcagggaaattttaagaaatggctgcaaccattcagaagttgcagaggcaatgtgatagggaaaaattaaaccaatagcactgtagcagggtcttgagtttcctaatggctaaaacaaggagcaaaattctcttcactttggggcttatccaaccctacaagaagtcagagaaatccccaaacatttctatcagttaataaaggtaatatctgctcctctggtatctccactccaggatggaatttaacaaggtactaagtctgggtttcacctgtttccatgctgctccaccatgatttcctctgccatgtttctctaaggtggtctagacaccaaaccgtgttcttggagaggcccagaggaacagctgtctgttgctcttctaaatccacatattttggaccatctgggagtcaagagattagttaaggtactggagt

SEQ ID NO: 55836 - DNA, 1945 bp, Homo sapiens
atgactggaaaatgccaggtaaaaactggttatattgtatggtgagccccttatttataaaagggagctgggcatggtcgctcacgcctgtaatcccagcactttgggaggccaaggtgataggattgcttcgggccaggagtttgagaccatcctgagtaacatagtgagagcccgtcttcacaaaaattgaaaaattagccaggaatggtgatgcatgcctgcagtcctaactacacaggaggctgaggtaagaggatcgcttgagcccaggaattggaggttgcagtgaaccatgagtgccacgccaccacacgcgagtctacaagacaaagtaagaccttgtctctaaaaattacattaaagtaaaaaaacaaaaataaaggaaatacacatatacagacacagaaacaaagacacacaaacacatgcacacacagagaaagaatgtcaaagggtattgaaggtatttctggtcattgttttactctttattctttccccattttcttaactctctatgttgaacatacattagaacagatatttacttcataatcagaaagaatgctgtacgtcatcactacttctggaaggatccccaaaggcttagctgttatctttccacttcccactggctgggtgcaagagtgtggtacttctggcagcctcagtcagttctgcagtacttctttggttttaagcttagtctaggcaaagccaaaaatcttgaattaaggaagcaaatgctttgtgtttcagattagattaaaagaactaaatatattaactatacctgctgatttaaaggccgtggttaggaggcacagtaggatgaggctaccatgcagaggggtacaatcccataaggtagttcattatattatccccattttacagatgagaaacttgaggtagcttactgtggccatgcttcaaattacagcaagaaggtgtaaggcactggagagggattgaagggaaggaaaatgatttaaaaataaacaagaaggtagtgtgggatagtggttagggctgtctggactctggaatcagaaaagagtcgtcctaagcttggtgccaccacttcctagacatttaatcttggatgagttactcagtcatttgaaaaacctttactaagtaactaccaggtgccatgcagtagtccaggtgctggagatacagcaatgaagcaaggccacagaaagccctgtcctcatagaattaacattataatagaaaaatcagatcatacattagaaaaacaagtacagcatagtttctcagatgatcttaggtgcaatgtagaaaatgtgtggaagtttccgttgctttgtctgcaaaaatgagataataaaattgctatttcattgagtactgtgaggattcctgagatcacgtacagagggctgagcactgttcccagtccaataactattaatcatgaccattattttgagatgaagaaggccaaatctattcttgttgtctgagtgacaatgcagggaaattttaagaaatggctgcaaccattcagaagttgcagaggcaatgtgatagggaaaaattaaaccaatagcactgtagcagggtcttgagtttcctaatggctaaaacaaggagcaaaattctcttcactttggggcttatccaaccctacaagaagtcagagaaatccccaaacatttctatcagttaataaaggtaatatctgctcctctggtatctccactccaggatggaatttaacaaggtactaagtctgggtttcacctgtttccatgctgctccaccatgatttcctctgccatgtttctctaaggtggtctagacaccaaacygtgttcttggagaggcccagaggaacagctgtctgttgctcttctaaatccacatattttggaccatctgggagtcaagagattagttaaggtactggagt

SEQ ID NO: 55837 - DNA, 1040 bp, Homo sapiens
attgtgctctaagggattaaaactgaaaaacctaaataatgtggttccagagtctacattcttaataccctcttagcatttttaatattctataatttctagagtttctaataagaaattctgtgtgtgttaagtttacacagctttttgcagctgataaaagcttatacatatgycatcttatgttagcattgctggtctggaagaagccaaacagaggtagttattgttcctctcttacgcttgaggacactgaggctcagagggttaatgccctgcagaaggataccatactgatgagtagcaaacttgagactcaaacccctacatcctgacgtcccagccagcattatccgccagaaaacatgtttacggtacccaaaatatactgaagttttgagatgatcacgcctaagaaaaaaaacaagtccctatcttcaaggcagggagggctcaaaacaccacagagagcattttcctcttaggaaagttattagtaattaacaagcttcataatgacatgttatgacatggttaggtaaattactccagaagcagtagaaggaaacaaatgtcacattctacaagtcctggccaatgccaaggattcacttggaaggttaactaagatggagctcattatgctgtattaggtatcagagtattttgtcttcttgaagataaaaccttggtgactgatattaccataacttgagggcaggaagagagatctgatatacagaccatgaggcactttgaaaaccctagacatataatgctctttaccttgacatttcccatcctctaatgatccatctacccagtatttttaggtcaaaaaaatatatatgatacaatgctgcttcatgggtcaaaccacggtctctgctggtattttaatactgcatcattatcaacagaatacgtaaatcactcgcatcttaagcatttaggcaaatggggaattttgcttagaatttcagactgtgcccaaaagtaaagatgttcaatgcactgatttctgtgccaagcctagtggc

SEQ ID NO: 55838 - DNA, 651 bp, Homo sapiens
tcatcagcttggtatgtggatgggaaacctgtacatattcaagagaagggttttcacttggaggctgtcagcgtcygtgatgccaactcaataaatcctggctgaattcaactgggtgtgctggctgggtacttacccacctctgcgaactctacagagctcacgtctgtggactgcatagagcttgaaggtttcattagctgccctcccccaagtagtatctataaacatgttaaaaatatcgcctttaatgctgttaatacttttactacatacacaaacgccggcgttgtaaaaaaccaatagtacctttgatggggcgacttagaaaagaattcccattccctgaagaaacaaggagagctgcttaagattgctctacacagggatgcagataattattttaaggcaaagagattatagaagcctgttccggttagaggataagtggaaaagccgagcttacaccaagaatcctagtcacaggttaaaccagagataaagaggatcatctactctgggttctcttagctgcctgggaaccctcctttgtcaaagcaccgattttattgggatgggggtggaatccctccttatgtcataaaaagcaacacatggcatttgctgctccccacccccaatatatttggc

SEQ ID NO: 55839 - DNA, 1403 bp, Homo sapiens
  misc_feature (1)...(1403): n = A,T,C or G
atcctgatttccatccctcttgctttgtagggtcacccaaactgtcaaacctcttaggataaaagtaattttggtgttctgggggctcagcttacctccctgagttctctgtttcattagattttgcactgatatttccttacagtattgataactttttatgcatttaaggagtattaaagttagccgttgtctttagtggaagtgttggtccaaataatctggtatgtaatatgagaaatgtgaagcctctgtttttgtccttattaattacttctttatatttacttgagatttttgagtaatttttctaacttcttgaattgaatgcttaatttgctttttgtctttcttatttctgaaaatacattcaaagctctaaatgtgccactgagaacggctttgctcgtgaccatgggttttagtacggagtactctcattatttgagatttttcatttcrgtttttatctttgcttgcattcgttagttatttggaggttttgtcccgtgcttttgagtatggtgacattttggggccattgtttgagtattcatttctagttttattgccttaggttcagaaaatgtcgtctctgtgatttctacttttgtggaatctattgagttttcttcattcactaaagcacgggcatattttcaaataaatattccacaagagcttgaaaaacacatagattttccatttgttgtggaagaagctctctttatatctctgtccaatcaagcttttacattgatattctaatcttctctttattaatttttcactttataattttttgtggcatcttaaattctcaccctatggctgtgaacatgtatgttttttctgctttcctgtttttgttttatattattcagttttacatattatagagatattttatttagtatacaatattagatatatattctgttttatatactttgttttatatattttgctgttatgttgctcaatgtgtgagagatatttaaccaagagggattatacttttatataaaatataattccttgtcttaaatttcctttctgtcttgatttttggtctgatgctaagtttcagcttccccgaatagacaaggcactctttaatgatttccattcctccatcttctataggttgttaatctaatataaagttttagttccatattattatctgcattaccctctcaccttttaaaaatacctaccatacctatattataaatataattgtaattgtaaaaaatagtatttttaaaattatttcttagattcgccatctttttaaaannnnnnnnnnnnnnnnnnnnnnnnnnnnnnnnnnnnnnnnnnnnnnnnnnnnnnnnnnnnnnnnnnnnnnnnnnnnnnnnnnnnnnnnnnnnnnnnnnnnt

SEQ ID NO: 55840 - DNA, 2498 bp, Homo sapiens
tgagtccctgaatgtctgtaaatattcttattttgacaactgatatttaggctaggtatgaaattctaggtacaaattttttgtccttgtgcttgacacattgtttcactatcttcaagggcctatttttgtggattagacagccgctccaatctaattttgttccccctaggtagctgtctacctacacgtagggtctctagctactttgaggatgaatggaggaatgggctcatttttatttttatgttttgtagaactcttgatctcttgattaaccctttcaataagataagacaaaatgaaacaaaactcacgacatttttcagcacagggagaattactccattaattctttattttctccctccatcatcctgttttcacctgacaagtctattagataggtgttagagcttctgaatcagtctttgttacctttcaaattttctctcacttttcacctttgtccttttggactgagttttgagagactttttcaattctccatcttcctattttgatatttggctttgtcttttaattcttattgaatttttcaatctagaaatcatattttttaatatttataaattttattagatgaattaatgggtatcctagcatatttctctaagcttgttaattttacttaaaattttcttgtttccatcatttatcttcctttacccctctataattggtactgctatttcatgccatttttctccaatatttgaatattcttaattcttcatttcatagaagagattataagccaaatagtattgatgactgcagtgtgttacctaggcagcgactgcaaattctgattctaggagcactggtggagtccgctgttatgcggaggactcagccaggtgagcttctttttagggaacattagcagcttgtgagtcctcaggattctcattctcaggggagtggccagggcagtggtcagttattggtggcaactcccagtttctctggccttagaccacactttgaggacatctttctcagaaatcccacttaagagagccgtattacttactctcttgattctgagggttatgaggctcagctgggccatgcttctactccctgtgccattggctgcatctgcagctgcctggtatttcagctgagctggaaggccccgtggggacgggctcaggatgagtgggatcctctttccctgtggactctccacatgtggtccctctaggtgatctcctcagcagggtagctggatttcttcctgtattccatcatgtaatggagtcacaggccaccctggttggatgagggaggtgtctgacaaggaagtgaacacagcaagctatggctccttgaggaccagcctttagcttactggaatttgccatcaatcaatttttatgtgttctgtatttttcagaatttccttcctgtttcgatctattgacagtacccctctggtcttccagtatggtagtgagtttaaaatatatctatttcttcagttatttcaacaggatttagagagagatgagagaataataggtcttcagtcagccatagtaattagaatcctgttttctaatttttaaatagaagaacatcgattccattagtaagtcagaaatacaaaacaaattttcagacgtggttgtccttataacttgcattgtttatcattgtctctttttaaaggaaagcaattgaatgtttgcactattatctatttctttctatatttttattctttcctaaattttacctacaaattagagaatttcatttgtttcttgacttttctcatcatcacttttccactaactactgtggcttcatcccttttttttttttttttttttttttttttgagacaggttctggctctgttgcccaggctggagtgcagtgacacaattatggctcactgcagccttgacctcttgagctcaagggatcctcccacctcagcctcccaagtagkggaggccacaggtgtgtgccatcatacctggctaattttttaatttttactttttgtagagatggggtctcactatgttgcccagggtggtcttgaactcctggccttaagtggttctcccacattgtccttccaaagtgccgcaggcatgagtcactacacctggcctcatcctcctattttatgcatgataacaaaggtaaggaacaccatgaattgagtatcaaggttttgaaaagatagcctctttcagtgtgtgtgtttagcctttttcagtgtgtgtgtgtgtgtgtgtgtagtgcatgtgtgtgtgtgtgtttggaggcttttgagatggagtttttcgtatatactaaatcacaaaattaacaatatgatagatttttattctttctgcaaagtaattcttcatttatatgtaaggtaaatgaattaattctcacagaaaagcaaaacaattttgttttatttctgtgaaccaagttagcatgaaattctagctctttttgtaaag

SEQ ID NO: 55841 - DNA, 1652 bp, Homo sapiens
tgcatggtttaaatttattatgaattttttattattaggcataccattagtagtctccctgtaagttctacggtttttttaaagccaagcagataaaatgttttgctgattttactgcttgcatgtaaattacaaaacttagtaaaaatctgaagcatctttatcctcagaaagagttgatatgtatgtaacttattgcgaatttcaaataagatttacagtttcatttttaagaatggtacctttatatgaatcatgctagtaaggtttatcattgacaaatagatgtaccatattttattgaatctaaagtgtcattgattataaaacagacacaccattaattttatgtgtcagtagaagacaaatattgccagttaaaactatggcatgtcattgattattaaatgattcctgattgcagagatgttcgtaaaaaacaatatatatcttttttttttttttttgagacggagtctcactctgtctcccaggctggagtgcagtggcacatctccgctcactgcaagctccgcctcccaggttcatgccattctcctacctcagcctcccaagtagctgggactacaggtgcccgccaccacgcccggctaattttttgtatttctttttagtagagatggggttttaccgtgttagccacgatggtctcgatctcctgacctcgcgatccgcctgcctcggcctcccaaagtgctgggattacaggcataagccaccgtgcccggccaacaatacatatctgttaagaattcaactgtgctgataaatgtattggctgattaatacgtagctaacaacttggatccttatttcttacttacattaaatacatcagtaaattcagcctttctgaaaaaggatgtccaactttaaacaggaagtaatagtctaagttcccaaaagcttataatacaatgtaactttcgcatatttaaggattacagttttaactcccttttaatacatgcttgtttttctaagatgagtttaagcttggggtcttgagttgaactttaaatgggcatcatttcactgagcgtgtgtatgtgtgtgtgtgttttgagtttatatttgaggacttaaaaataggctcagtacctttcactgagcttgcaaagaaaaaataatgtgacattatatttttgccttttttttctcttatgatgaattggatgtattaattacaacaaatggactaattgggtaagattcattgtttgtccaattattgsaatgagagaatcaacagggggcaattacagattgatgcagtgtagaacacagcttgttgcacagcaagtagtactaacacttgggcaggattgaaataagtgcataaattacatctgaaaatcaaatatagacatattaagtataaacattgtggttttctactgcctatacttatcaaatgaatttacatttcaaattcatactttagtttgaaattgccctttgctgtcagaaacatcctatgttttgatatttaggttttttccttgcctgagtatctgttgctacattttgctaacattgataacagatccttttaatgttttcaagaccaaaatttgcataaagctttttattattaatatattctgtatcactttgttgctttctttggg

SEQ ID NO: 55842 - DNA, 1568 bp, Homo sapiens
ggggatccacctgctttggcctcccaaagtgctgagattacaggcatgagccaccrcatccagcctgcacaatatttttaaaagtggttttacccacattatttgagttttttagtagtacattggaatatatatagatatattaatataaaagttggtattatttcatggaatttacagatttgaggtgttgagagggaaagtaacctctaatgtagatagctactaatggtttagtagaaacttggctctaaatttattatgcattctatggtacctaactgccttttactcacagcaaaaaaataacaaaagttcatagagcacctattgtgtattaggttggtgcaaaactttcagtggcaaaaattgcaattattttgcaccaacctatcaggtattgtgctaagtacttaaaagtacaagtataaagagactatttttgggagtggaggggcagacagggtctggctgtgttacccaggctggagtacaatggtgcaatcacagcacactgtagccttgaactcctgggttcaagagatcttcccacctcagcctcctgagtaggtagaactgcaggcgtgggccaccacgcctggcgaattttaaaatttttaaattatagctgtgagtcaccaggcatggtgctttgggagcaccagcactttgggaggctgaagtggacaggtcacttgagctcaagagttttgaaaccagcctgagcttcttggtgaaaccctgtctctactaaaaatacaaaattaactgggcgttgtggtgcatgcctgtagtcccagttactcgggaggctgaggtgggaggatcgcttgagcataggaggtcaaagccacagtgatctgatatcatgccctgcactccagcctgggtgacagatgagaccctgtctcaaaacatataaataaatgaaataaaacttttttgtagagatggatctcactatgttgcccaggacagtcttgaactcctggcctcaagcagccctcccaccttgacctcccaaagcactggaattacaagcatgagccatggcttctggctaaagaggactttaaggctagatctcaactggtgtttttgttatgttacaagaaaaaaggtagctccaagtcagcttaaacaatatcagaaatgtcaatattatgaatttctttaaaatatctgtattgaaagtctcattttttctaatcttttattttgaaaaaatttcaacttatcagaaaggtgaaagaatagtaccctttacatatattcactaattgttaattattttgccacatttgctttctcttactatttttatttctaatttttctttggctgaaccatttgacagtaagttgtagacatcatggagatgttgcccctaaatattttaacatgactccctttagaatgggaacattcacctccatgaatataagacttttaccacaaccaagaaatataacataaaataacattatatactatatagtccaaattcaaaatttttaacttgtcccaataatattctttagagagatatctggtttaaatttcaggat

SEQ ID NO: 55843 - DNA, 995 bp, Homo sapiens
gtacagcaggttcttgactaacacaagacaagagaggtgtctagaatgcaaaatttaaagaggctcttactctgtgcaattgcaggatcagcttgcacaacactgagaatgagtggctccttaaattctgtacaacaggcataatactctctgtatggcattcttattaagtaagggagtcgcttcagtaagacaggtattgcattcattagccaattcagaaacactgacaaaaagcctatccagtgtttctgattaccaacatagtaggtcctccatcataactaatgaattgatgaagaaaacctagtccagattttcttagtgagatggaaaaaaaaaaaatctataatggcttctaaggaaaacatgtctcctaagaattttattggtaggtcacaaaaggttctctggctgggcgcggtggctcacacctgtaatcccagcactttgggaggycaaggcaggcagatcactggaggtcgggagttcgagaccagcctgacaatggagaagaccagcctgacagtggagaaaccctgtctctattaaaaattcaaaattagctgggcgtggtgctgcacatctgtaatcccagctactggggaggctgaggcaggagaatcgtttgaacctgggagccggaggttgtggtgagctgagatcatgccatggcactccagcctgggcaacaagagcaaagctccgtctcaaaaaaaaaaaaaaaaaaaaaaaaaaagttttccgaagatgataaagttatcacctccatagaaggacaaatcacacgttaaaaagacacactactgggaagttaaagaagattgaaattaaggagaaagccattcatcataggatatctaagttcaatgacatgctcagaaataagatctacgtaaaataaggatttataagagcctgaaagatatcaggaactaatgattcaagaaagatggtgtctagcctttataacaccttgtcagaccatatatgca

SEQ ID NO: 55844 - DNA, 683 bp, Homo sapiens
ggatcccacaggcagcctcagcaatggccaatattgaatttctagacagcccggtggataggggctctgcaacagatttacattagtttaaagaaaacatagaatgtgatatttcttgttgcttacagaatgaatttacacctgcaagagttatgtcaggatgtatataaagtttaggaaagaataaaacaaaatagaaactaagcccatatttatacaataagccaaccagggcatctaaaactgcacagaagcaggacagagtttaaattaaaaggtcttggagtacaaaacaatttatttgaatgtaaaaggcaaaagtgagtcaggtctcttgacctattccaacaatacactaatcttttccataaatgataataactgtagttctacgtrctaggagccaaccccatccaatcacttcagcactcttttttttttttttttttttttttttgagatgaagtcttgctctgtcacccaggctggagtgcagtggcacaatctcggctcactgcaacctccgtctcccaggttcaagtgattctcctgcctcagcctccctagtagccaggactacaggcacctgccaccatgccaggctaatttttgtatttttagcagagatagggtttcatcatgtaggccaggatggtctcgaactcctgagctcaggtgatcca

SEQ ID NO: 55845 - DNA, 950 bp, Homo sapiens
tctgaagaaagagttaaaggtggctgggattccatgtctctaatatttaataagcrtctttctactaccagattttcaagggaaatctgaatatcagacatactactacaaaatatcattctcttgtgctgctgtggccacaaacctttctgtaaatttcccagctctagtgagatgggtcaaatcacttgcaagccacagtgaaaatattaggcctttagtctaaaacctagaataaaaggaaaaaaaaaaacctttcttaaacactttatggtagatccaaatcttaattttggccctcaagatcttgccaatgggatggccaaaagtaatccccggtgggggaaaatatcaaaggaaagaaagaattttccctttgggtttagagcagagttcacctaatgaacacaccgctgagccttcctaatgcaataaggtcccctcttttggggagtagcccaaaatttatatatcatacaaaacaagaagccaacaatcagatcaagtaattccaaaaggaagattccaaggggaacaagtgatgcagacatacatattttgagactcttcttcaggagaaaagggaaacatacttgccctgaatttatgggttaatataaacttgaacttgccccatagcatacctcaccttctcaggtagcaagcgggtttgaggggcatctctgagaggtctcctacttgcctagtggcctgaaatagcaggaaatcttcctacctactttgtggatcacgcttcattagaatacctactggttttggtgattggttccctctcttttctcttttctgaaatacctgtcagatatacataaaaaagtgaatacatctggcatttagaaagcctaaattgagatcctttaaattaaaaaggccactctctgctaaaggaaggaagttacattacaagtaacactccttgaggaaaaaaa

SEQ ID NO: 55846 - DNA, 1128 bp, Homo sapiens
ggccttccctttcctgctgttctacctatcttagtgttgatatccaggtaggcatgaacactctgtggagacaggcaygggcaggtgtgggcagccaattgcattcagctcagcagtgagaagggtacagagtacagggcatgagcaatttgaagaggtctggaaactcaaggtgaagaaagaaaagaaagaaaataatacactgaagatctctaaaagaaattgaagaatcttgtctgggattagacattgaaaaattttggacaggtagcaaagtttttggtgttacttgtagactcaagcaaatcagaaatgagcatatacacttctcaaaacctattatatcttcatgtggaaggcataagaatagtctgagacatactttttgttttgggggcacttatgggttgcttccttaagtcaaaggctccctttcctttgaaatggaaagcagagagaaagctggactctgctagccctacttactgaaccatgcaaatcctttcttggggaaggccatccactattccacacccatgatgaagaccctcatggaatttacgagaggtgcaataaatgttcacgtcttgcaatgttccatttcccagaggatccttcctccctggccacatccggacagagtccagacctttgggggctcagaggcctgttgctgtgggtaatgtgaatgattatttccattccttaccaaaacagggggagaacagcatcattatgcctttaattttctgaagatttatggtaaagcagatacagagcttttccaattttagaagtaagacaaagagaaacaaattcaaaatacatccataaaaactgaggctagacaccagactaggaaaagaaaaaccgactatatagagttttcctgtagaattcactatttcctgtgtgctaggtactctaacttggcacagatagtgagtgagagtagtatgctgacaagacataacaaaggatgagaaaaaagtaggcaggagatgtcagagccatgacaagccctgggaagtatgctttattacgctgttgcaaggaagatcaaggagaattcattgttaaagttcttttgaggacaggcctgaaatacagttatatctcaattattac

SEQ ID NO: 55847 - DNA, 1128 bp, Homo sapiens
ggccttccctttcctgctgttctacctatcttagtgttgatatccaggtaggcatgaacactctgtggagacaggcacgggcaggtgtgggcagccaattgcattcagctcagcagtgagaagggtacagagtacagggcatgagcaatttgaagaggtctggaaactcaaggtgaagaaagaaaagaaagaaaataatacactgaagatctctaaaagaaattgaagaatcttgtctgggattagacattgaaaaattttggacaggtagcaaagtttttggtgttacttgtagactcaagcaaatcagaaatgagcatatacacttctcaaaacctattatatcttcatgtggaaggcataagaatagtctgagacatactttttgttttgggggcacttatgggttgcttccttaagtcaaaggctccctttcctttgaaatggaaagcagagagaaagctggactctgctagccctacttactgaaccatgcaaatcctttcttggggaaggccatccactattccacacccatgatgaagaccctcatggaatttacgagaggtgcaataaatgttcacgtcttgcaatgttccatttcccagaggatccttcctccctggccacatccggacagagtccagacctttggggrctcagaggcctgttgctgtgggtaatgtgaatgattatttccattccttaccaaaacagggggagaacagcatcattatgcctttaattttctgaagatttatggtaaagcagatacagagcttttccaattttagaagtaagacaaagagaaacaaattcaaaatacatccataaaaactgaggctagacaccagactaggaaaagaaaaaccgactatatagagttttcctgtagaattcactatttcctgtgtgctaggtactctaacttggcacagatagtgagtgagagtagtatgctgacaagacataacaaaggatgagaaaaaagtaggcaggagatgtcagagccatgacaagccctgggaagtatgctttattacgctgttgcaaggaagatcaaggagaattcattgttaaagttcttttgaggacaggcctgaaatacagttatatctcaattattac

SEQ ID NO: 55848 - DNA, 3266 bp, Homo sapiens
tgtagtaggcactcagtaaaattatgatgaatggaggaaagaacattgtatatgagttgttaaggtaaaacttgagactttggagaaatgacatgtcattaaaggtgtgtcactttaggctctaactctagactcctcagagtttattggttgattctcctgtgcctttggggcacttcctgaagactgattaactcccctttaaggaggaggaagccagtactgtagatgaataaataacacactcaaagacacacaatccataaataacggaggccaggacaggacacatgtcaatttgacaaacatttatttaataaattctttgtgctgagcattgggttagttgtactttcaaacacaatggagccatgagggactgttgctcccagctggctttcttcctggcagcctgctcttttctctggaaagctgtccacatccaggctctgcctgggggctcttccctccaagatgctatgccacaaagccctctagttctcctctcctgacaatgagccggctggcccttttcagtttcaaggatttactggtagatgctttgaggctacagaagggagtattaaaaataaacgtgatcattataaaattctaagaaatcagacaacgtctttaaagtaatggtcctagtcygtagctcctgactccttgctgagcattacacagaagtcttaagatggcctttccactgctccgctcaacggggcccacatcttatgttttcttctctgggtccatatttttttattataccagccaagatcactcatatctgccagactccccagcctgccaagacaacggcagtctgatccattacttgaagagccaccaaaaatcagagaaaactgatgtctgaaacaacagaaacattttctcattgagtaaaatataatatgggttgattgatagggttggttgaacattatctgtacctacagttatacctgcttgctcctccaggggcagtggttcactccctggctgcacattagatccacctggggagcttttaaaacagtgcatagaccccatcctggaccaattaaaccaaaatctctggggtagagtccagatatggatttttttaaagctccccagtgattctaatatatagccagaactgagagctaccgctatgatcaacttgtttcctttcctctggggtatctgaaactttgtgattaggtcagtctttaaagctgttcagagttaattaacacatatgcatttagactggctccattgagccagccaaggcaattcccaaaatagaattcaagggttcagaactaccttccgtcttctttcctaaaagcatgtgataagatgcccccaacaaatcaccacgtaaatatcctactgaccctgaagacatctaaaacataaccactgacctcttatgctagtgttctctcttggagtttccaggttcttttgccttctgtcaagaccctcaacacctagtcccaacatcttttccaagttatcttccactaaatctctcaacacataccccattcctggcaattgatctactcattgtcttcactttacacccccattttagactgccatgtttaaccctggcattcacctgcctgagctgaccaggagtgcccctcctcactattcatctatctgtaacctatctttaagtctcaatccagaactcatctttgagatgcaaccttctcagtgtgaccactccagctctcagaagctgcttcctcttctgaggttattgtcatcgtatataccacttattggggcacttcaggtatactcattctatgggcaagtgtgtgtgcattccccactgggctgtaacacttacaaatggtggaaatcaagatttctcgattgtgcaacccaatgtaaaataatgaaagcctgggctccctttattctgagaggtttaaaaaaaaattctataaggatgagtacgtaataaattatttgatcgttaagacgaccttatgaagcatcattgttattgtcaccatgttggcagttaaaaaaccaagtggagaatagtccgcctttatcccccaaaacaccaagacagacagaaaaatgggcacaaggaaaccaagactcagagtgagtcacacagcctttaataacatagccagagccaaaattcagggtctacactgccagctcagtgttctttcaactaatagattgattcacaaattttagcatgcatcagaatcacctagaaggcttgttgaaatgattgataggtctggactgggtcctgataactgcatttctagcaggtttctagatgatgcttatggcactgacccaggctccatacttttgagaaatactgcttcaatataagcttctttcttgaaagaagagagatagaaacagggattccagccccaccagaagagatgttagagatgttagaaaagcaaaccaaatgtcatatggaaataataagaaataataaataactgaatttatttcaacaaaagattttctacaagagtaatttgttataagttacaaataaaaactcaaagtcataatacagaaatcattcttactaagacttcaggccaaaatatcaatatgttcaaaggggctgaaatgaattcaggcattatacatccataatacattagaaacaattcattaaaaatggcagagaaagaatggaagccagaccacccatactctgaaaattcccttacatgggatgtggcttggcagcaaatcaattgatccctccatcaatctgcctatcacttaatcaatggcccttttctacatatcaactttatgccactaaattctgtaggccaatgagtaaaatgtaaacatggcccagcacagagttcctgctcatcaaaaatatatcatctagtttaagacaaaatctacaactgggaaaatttagacaacagtgttgaaaccttattaaaattaagtagaaatgacatatgatatagatgttcagaaaatagagatcaaggcaaactggattagagaaaaatatgtattcacatggctgtaagctagggcttagtacagtgtcaattactagtcatcgtatgaattaatgaataaacaaagtttaggaagttaaactagatctttttaaatgggtaggatttggatgggatggagagaagagcgaatggtatttgagacagaattagtgtcatgagtcaattgacaggaaggaacctgcttgcctgcacgtgcatgtgtgtatgtgcacctat

SEQ ID NO: 55849 - DNA, 582 bp, Homo sapiens
gcgagacactgtctcaaaaaaaaaaaaaaaatctacagattaacatggaacttcagactgaagtagcacaacagtattaatcaatactaagaagtacagaaaacaaagggaaaacctctagatgttttagtcaccgtaaagtgagatggttgagacaatgctccaggatgatattgaaaagacacacagccattcttttgtttctggatcattctttggataattttcttaacaaatttataatttaaagaaaaacagatttgtaaaactgtattttatatgaacactaaactctttgttagattaatgcttgattagattaagtataaattttggctaagaaagtagcataggaaaattaaaaataaaagcatgcacaaaaataaaccaggtgccaggcccagtggctcacacctgtaatcccagcactttgggaggctgagatgggcagatcacttgaggtcagaggttcaagacgagcctkgccatcatggtgaaaccccgtctctactaaaaatacaaaaattagccaggcgtggtgacacgagcctataatctcagctactaaaaatacaaaaatta

SEQ ID NO: 55850 - DNA, 1404 bp, Homo sapiens
gaggcatttttgattgttgtggttggggggacagtgaaggtggcatctagcaggtagaggtcagggaggctgctaaacatctttcaatccacagacagccccccataaccaagaattatcaggcccaaagtgtcaactgtgctgaggttggaaaccccgttctaaaggaagagacctctgacccttccccaattgtgcaatgatagtaataatgcacatttgacaagcacttactgtgtgtcagatgctgttcttagggttttacttgcagtacttcactgatttctcattatcaatgacaaaggaagtcttatcatcatccccattttccagatgtggaaaatgagtcccggagagattaagtgttttgctgcaagtctccaagctagaaagcaactgggtcaggatttgaatctcagcagcctatggcaaagttcatatacacttaaccttatttataggttgcctctctcctggacaacaaagcttgctaaagttcattgttctcagttggaagtawagttttttttttttttttttttttttttttttttttttttggcttgcgtgaacagagcaacctagaagagggagtaaaggagaagggacaatcccaaaaatttgtctttgtcaggagaataatcaaagtccccttgtctctattgctgcactggagtggggggatcctggtgaacatgaaggaagagatgcacctgaccagacaggacccgcattaatgacagggcacactgtttcaggcaagccgctcctctgaagccacacacaccctgctcgctgatctccctgcagtagaaggttaagtctgcagcatcagccagccccggaaccctttgaaataccatgtcggaaacttcttggcaaagcctaacaatagaaaccataagcagattctaaattaccattatcattaatcggggttgacatgtaactggcccctcctaagtactgctcaatcactgcccccctttattcctttctccaaggttcccacaggcctccttagactaaagggtacctgagccgtgccccagtgtgtggtcctcggcagaacaatggaagcaaagtaatccctgacagagccgggctgggaccttcgacataaagcagatatggggcaatgtgagaaagggccatggggagaagctcagacagggaagaagaccgggagagcagccaggtattaagaggccgggtaggggcaaggagagccaataatacagggtgggtgaaatggaatgaacacggtttgtgttcagagttggcatttgtcactttaatggattccaaagaaggaggcaggcatgctttccaactagcctgggaaaccagctacatatgggagaagagtttttaaaaagcccttcattcaagaaacctatgtgt

SEQ ID NO: 55851 - DNA, 1404 bp, Homo sapiens
gaggcatttttgattgttgtggttggggggacagtgaaggtggcatctagcaggtagaggtcagggaggctgctaaacatctttcaatccacagacagccccccataaccaagaattatcaggcccaaagtgtcaactgtgctgaggttggaaaccccgttctaaaggaagagacctctgacccttccccaattgtgcaatgatagtaataatgcacatttgacaagcacttactgtgtgtcagatgctgttcttagggttttacttgcagtacttcactgatttctcattatcaatgacaaaggaagtcttatcatcatccccattttccagatgtggaaaatgagtcccggagagattaagtgttttgctgcaagtctccaagctagaaagcaactgggtcaggatttgaatctcagcagcctatggcaaagttcatatacacttaaccttatttataggttgcctctctcctggacaacaaagcttgctaaagttcattgttctcagttggaagtatagttttttttttttttttttttttttttttttttttttttggcttgcgtgaacagagcaacctagaagagggagtaaaggagaagggacaatcccaaaaatttgtctttgtcaggagaataatcaaagtccccttgtctctattgctgcactggagtggggggatcctggtgaacatgaaggaagagatgcacctgaccagacaggacccgcattaatgacagggcacactgtttcaggcaagccgctcctctgaagccacacacaccctgctcgctgatctccctgcagtagaaggttaagtctgcagcatcagccagccccggaaccctttgaaataccatgtcggaaacttcttggcaaagcctaacaatagaaaccataagcagattctaaattaccattatcattaatcggggttgacatgtaactggcccctcctaagtactgctcaatcaytgcccccctttattcctttctccaaggttcccacaggcctccttagactaaagggtacctgagccgtgccccagtgtgtggtcctcggcagaacaatggaagcaaagtaatccctgacagagccgggctgggaccttcgacataaagcagatatggggcaatgtgagaaagggccatggggagaagctcagacagggaagaagaccgggagagcagccaggtattaagaggccgggtaggggcaaggagagccaataatacagggtgggtgaaatggaatgaacacggtttgtgttcagagttggcatttgtcactttaatggattccaaagaaggaggcaggcatgctttccaactagcctgggaaaccagctacatatgggagaagagtttttaaaaagcccttcattcaagaaacctatgtgt

SEQ ID NO: 55852 - DNA, 696 bp, Homo sapiens
ttgctcagttacttggtgctgtgcaagtttttggccttccaaagacactagacaatatttaaccactatttcacagggcaacgaatcggtctatttaggtaatactgtaacaaacagtgcccagatttcagtgacttaatctgacaaaggtacacttcttgtttatgtcccagtccaatgtggatcagctggggttggagtgggtggggtgttttgctccacgttgtcatccagggacccggatctttttgtttttagtggcccctttggccacttacgcctcagagtcctctgctgggtattctgcatctgattggccaacaaatgaaaaaagagtgtgcggggaaggactgtctgaccccagttgcctccatctagtaggggcacactactcggactcatayacctgtggtgaagattggccatgtggcatcactttgatgcaagggagatggaaaatgtggtttagctgagtatccatgaaggggaactgggtctagtgaacatctaaattttcaataatcccttccatggaggaaaataacataattacataggaaactttttaaacagaatgttaaaatctgggtgaagattttttaaaagatactttttacttcataagagacaaattaagaatacaaattaaatggtaagggcattaaatatacttgatagctagtacctgatattaga

SEQ ID NO: 55853 - DNA, 999 bp, Homo sapiens
gtattatttaccttatcctaccatcaataaagttaatttgtaaaatttgcacagcaagttgatatttaaaggtctctgttaaagaataattgtaccaggtggatttaaactgcaaggaatacttgaaaggaggaactcaactctcttgaaacaaaaggtgaaagagtttttaggtgctgagatgactaataaagaaatactgaaagaggttgagtggggtggggaagggtggttagtcaatgcaatgagatcatctgtatttgctaattggtgcttatggaagctaagcccctactcccccacagaaattgggagaaaagggcactatggccttcagtgattacatttcaaagaggtggctcccaggtccttgagaaggacatttctgggttgcagaagatgtacctctcaaagggacagatacaaatttacaatgaagtggtttctaaagtgaatgctctaagaaaagtgaggtcaggaacctacagttagaaagaaatctctctaaagtttagtcaagcttaggggaacttcaaggccatattgactacctcaaaattatggctgtcacacctcaaaatccctcccaagggaagaggaatatgaactacctcattccatgtcagcttatttgtctttgccctattctctcccccataaaatgcaggtgtcagtaggaaaaaaaacacacaaaatactcatcttccaatatctctacagatagataattttcaaamtagggcataatattgcctgattcatggataaaatagatgtttgctagaaagcaacttttcttcttctatcaaatatgtatgcgttaatactcagaatcacaaatattgactgagtgcctcccatagctgaatcttttacttagaacaatgctaactactaaagtgtgctagaaaaatatgattatactcacttctcctatgaggacaatgcagttgggaaagtgcttagtcccattacagatacaattgatgtcaatcatgt

SEQ ID NO: 55854 - DNA, 999 bp, Homo sapiens
gtattatttaccttatcctaccatcaataaagttaatttgtaaaatttgcacagcaagttgatatttaaaggtctctgttaaagaataattgtaccaggtggatttaaactgcaaggaatacttgaaaggaggaactcaactctcttgaaacaaaaggtgaaagagtttttaggtgctgagatgactaataaagaaatactgaaagaggttgagtggggtggggaagggtggttagtcaatgcaatgagatcatctgtatttgctaattggtgcttatggaagctaagcccctactcccccacagaaattgggagaaaagggcactatggccttcagtgattacatttcaaagaggtggctcccaggtccttgagaaggacatttctgggttgcagaagatgtacctctcaaagggacagatacaaatttacaatgaagtggtttctaaagtgaatgctctaagaaaagtgaggtcaggaacctacagttagaaagaaatctctctaaagtttagtcaagcttaggggaacttcaaggccatattgactacctcaaaattatggctgtcacacctcaaaatccctcccaagggaagaggaatatgaactacctcattccatgtcagcttatttgtctttgccctattctctcccccataaaatgcaggtgtcagtaggaaaaaaaacacacaaaatactcatcttccaatatctctacagatagataattttcaaactagggcataatattgcctgattcatggataaaatagatgtttgctagaaagcaacttttcttcttctatcaaatatgtatgcgttaatactcagaatcacaaatattgactgagtgcctcccatagctgaatcttttacttagaacaatgctaactactaaagtgtgctagaaaaatatgattatactcacttctcctatgaggacaatgcagttkggaaagtgcttagtcccattacagatacaattgatgtcaatcatgt

SEQ ID NO: 55855 - DNA, 1731 bp, Homo sapiens
tgctatcttatacactgagcaggactctaaggtagaaatcgccaacagataacaccctattggtagtttcccgtatgatgtagaaacacggttttcaacaaaaggaaaggaaaaatggttcaatatagaagattttaatgagaatcatccatctggctgttgcctcagccatagttcttctaagaggcaaacacactgtttcatttttcaagtcttcttatgtttacttccaaatcatctgtatcaagcttatactgtaccttcataatttatattcattagataccaataaaagttgattattttctgttgagatttttctaacattcagctgtgagatactgatttagttcccttataccgctycattctctttcctctctccttgattattctgagtttcttaattctattattaaaattcaagcttcacaattaatctttcttccctttccacaatagtattgcatttttaatataaaatatgtacaaaatcctgatttactcacttttgataataaatataatattagataatttttgtgaagatatatcagttttaaaattagagtttttttgtatacttaaaatctttcaaaaaaaggaatgatataaattttccaacacatactgatcaaatatatctattttcatctggactgttcgcttttgcaccccaggtgtaaatttttcagtggtgcttttggcatatacttttcagaagagtcatatagaaaaaaataataaaagagattttacactaaaaaaattcattgatatgtcttgttaaaatactgtcttctcaaatcccagaggctcacacctcctggtgtgatactttgtctccacctgtgtgaatcagcatgatacatacctcagcacaggaaatctataacataatgctcactaaatgccttcagaaagggaaatgttaacaccaaaaaaggcctgttttttgttacaaaaaatatttgaaatgtgcttaggtatttatcctccaattattatagcaattaataatagattaaaaggatttactatctttggaaaactaaatagtatgtattacaggcttggcacagtgataagtttttttccctagtccaatttccttgttttctgacccagaaaagcttccaggaaaccttaactgtaaagaggcattctgctttctctttcagtttaaaggcagatgtttacttttgaattacaaaagattatgctatattcatatcctattcaatagttaataattttccttctattgcaaaagaaaatcaaatatgtttctacttatttctcacaaaatgaaggtaaaacttcattatcaaattgtctttctgaattgcttaatgtccaattgaagatactgttttcttagagatgacataacacttgatttctcagctgcctattgtaaaacatttattgtttcttctctgttttagattttgtaccataacctttccttggttgcctttgttacattacagttttagatacattttacaaacaaaagaatttctaggttttggtcagattgaagctttagtttctgccaataacacaaattagatgtcctgaaaatgttctcaataaaggcaacaaaataagccgaataaaatagaataaataaactttaaatatgtaaccaagattacaagccattaaagtaattctattcaagggggaaccacaaagattccaaaagatgccaaataaagacagaga

SEQ ID NO: 55856 - DNA, 1042 bp, Homo sapiens
cataactgtaaaaggtatatatttctaatgtacatatatgacataaataaatctgaagccaagctatactgttccacaaaataacttaattttgaaaagaaaagctttctattcttccctgaccattcaaacaatatactgaatgtaggcctcaaagtgccaattaaaaaatgcctttttgcagaatgccctatttgaggtgtcaggtaatgaaaagttaccaactggtattagagaaaaagaataattttccaagagaaaaatattgttgcaatttagttttattctacatttaacgaaattatttcaatagacctcaatctgaagaaataatagcacagaaatatccaagtaattactggctatttaaaaccccccacttttttttggtttgtttgtttttcattctctagagtaaaaacatagaggaaaggaaaagwaaagtgatatatttattgtcttcctgataaaaaattaaaaatttctgagtgagtcttactataaatgtctggtattttatttactatcattgtatgtcaactaaacatcatataaaacatgtcatgctgtaaatgggggagaagatactaccagtttcaaatgtttcggaaacataagttttatctagataggccaacctttcattttctatcggtatatactcagaagcctgatagatgtgccttggactcttcagtcccacacatcatcaaagtccactcttatgatgttcttattatagttaacatttcaattctctcatttcaagggcccaggatggcttgtattatgacaagaccaagggtggctgcctctcctttgacctattacaatgacttttggtcccaaagattgtcagaatgtaagcctctgttactgctaatgatatctcaagaatatgtgaaaagggctggcacaatctgtagaaaatggctacatatctggaatttaataatgacttttcatatggtcaataatgaagacttttcataacatcagttaaaggcaagacagtagcggttttacctctgcttcagcaaaa

SEQ ID NO: 55857 - DNA, 590 bp, Homo sapiens
tctcagtaatcccctgcaagaaggaatgaaagtgagtgtttgtgaaagcttactacattgtgccaggcgctctcgtcgtgctttacatgtcatttttttttccacaaataaatgatgtaggaactttcattatccccatttcacagctgagatagttgaggcacaaatacagtaaataacctgacaagagctcacaactcatttgtgggtagcaagwtttgaaaccaagacgtgattcaaatctttggctcccactagttatgtcatggagctttattccgacctatttatctgtcaggaaaactagataagacaggttaagagttttggcagtgatgtcacggtgaatttgtagaatgcatggtcatcttaaagctgggcattttataccataaaacaactgctgacgcgatcatttaaaattacaaatcagaccacttcactcccctatttaaagccctccaatttatgtcataataatttatgacataaaaactccttataatggcctgtaagtcccctgtggtctgttgcctgcccgcacccccagaccctggcgcccccagtcacctcagctcctcggctcattg

SEQ ID NO: 55858 - DNA, 2579 bp, Homo sapiens
ggaagtttagacggtaggtagtataatttatcatcttagagctacacataagaaatactcctgttgagaaatacatactagtttataccagatgttttatacaggtcctcttaagatccttatatattttatgttagacaaacagtaagtaatttgcctttaaacatcatttaaatttattagtgtataaattctaaagagtccaaattaaatatgttgatattgagaacatttcagttttcagttttgctaacagggtttaagcttaatcataacaattgcagaagtttgattatgtcaagaaatagccaactgaaggaataatttataaatggtcattacctttaaggggctagctgaatacaatgtaaatactcatgcctgtaatcccagtactttgggaggctgaggcgggaggactgcttaaacccaggaggttgaggctgcaatgaactgtgattgtaccagacctgtactctgaaatctttatcatactatttttaatgcatgaaataaaaatggtttatatgtacatagaatacacacacacacacacccctaggtcaatttcttaggtctcagttgtggttaaattcacttttaaatacaaggttccaagtatccaagttgccaggccagttgcctgtacctggaacagcctttccaccgaataagaagagtccctacttaaacagcttaagctaatttccatcatactatttatcacagtctaattaccagtttatcagtctcccattaaagtgggggctccctgagagcaaggactgtcatcttcactttgccttgaaaagtagacataggtcccaaattatctgctaaatgagtaatgaacaatatttctattcagaaggtgtgtgcttgcccataattaatacgcaaatattctaaactataatctgatttaaaatccccaaatttaaacaagaaaattataccaaggctttgagatttagcttgtgctaaatcattttttaaaattgtagctctgaggcattttattataaaaacttagtactcatatacataaactaatacgaacttaaaattcatcatacatttacttcattttttagcttgaccttctagtaaatctttagcttcattgattttggctgctatataaggagatcctcctataggaagaaagaaaaaagaacagttacaatatggattctcaatttctgcttggtaaaaagctactcttgtttcaaggactccaatgcttatctgagggagatttagcagaaacagtgttttaatttttaaaaaataaccctgacactgcaactggatgaccaaatatatggtaatatatgtgaccaatgaraaatgaagtaatttacgtgggagatatttctacaaaaataacacctttttagaaagcttaaactgatagaaataggatttctatcatatatattagatatatatgtatatgcctttgaactggtgttagcctattcatgattacaggtcataaatgaacatcaattataccatgttattttaataccatgatattctcagaggcttctgagctgtttactggaaagatcccagtttgctttacatcctttttctgtccagtttttcttttcctgttatctactgtcccttcacaatgtcatctacagctgctttcctacgaatctgctggaggagtgattctcaaagtatggtcctaagaccagcaagaaataacaggaaatttagtataaatgcatatttatggggctccactgccgacctactgagtcagaagccctccatataaaacaagctaaatttcataaaagatactgtgaagtagatatcaaacaattataaccctgtttaaaatgtcaaaaccctttttattaatgaaagccctctcctgtataagtaaaaggatacaaacactagaacatgaattctgtggtctattttttggtattcaaagaaattcttgctttccttcaacacagccaaggctgcatagaagtctatcacaaacgaataaataaatcccataagtttctatctaggtaatctccgtttcaaggtatctaaaatggataaggaaaaattacattttagttttacgaaatttaacgttttaattataataaatgtaggccagaaaaacccacaaaacatagtaatagtagcacttacatctgctcattctgtaagtaaagttttcacttaatttcttttaagacaccaaaaatatatggctccagcctaggagacaggacttacagatttaagtgttacctttctaatagccaggaatttgagataaaattatcccattaataactattggtcacaccaacaacatcaacgagaatttaatgactacttacctttgtcaggatgatttaaaagcataattcgtcgatgagcatctcttattttccctttattggcagtagggctaattaaaaaaagaaatggtatttacttcatcctacttctgcatcacatcaaaaaactgtacataaaggccaattaaagacactgtgaaactgtagtaaattaacacaacagtatgaaaagctgtttagaaacctcaa

SEQ ID NO: 55859 - DNA, 857 bp, Homo sapiens
cacttatttgatagccatatcttctgctcgattataaataccataacagcaaataatccttccccagagccaaacacagtgcctggcatatagtagccgttcaaaaatatttgtggaatatatgaatgaatgaatgaatgaatgattgatttaattgcccagaaagagtaggtggagagaggaaaggagataaacagaagctcatcaatattttctaagtagagcatgctaaggaaaaacagaggtagagattatcttcattttacggaaattcctgagaagtaatctccattaaaaaaataagagataagtgtcatgtcacaaacttcaaagttacagttaagatagctatcgtgtgttaaatgtggtaaatcatagcctcaaagaaatatttcctaacccccttgtctctcctgccctcttaacctacttaatttattttcatactactaatagattctttcatatagctgaatcaatccattcatatatgcatacatttgggtgtactgtttttacaaactgtattattattataataaggttgttaaagtttgcttgtggtctctctctttcccataagaatgttagtttcaggagtccaaggactttgggtattttttttttttttttttttttgagggtagagtctcactctgtcacccaggctggtgtgcaatggtgcaatcttggctcactgcaacatccrcctcccgggctcaagcgattctcctgcctcagcctccagagcaggtgggattacaggtgcccaccaccacccccagctaatttttgtatttttagtagagatggggttttaccatgttgtgcaggctggtctcgaactcctgtcctca

SEQ ID NO: 55860 - DNA, 634 bp, Homo sapiens
gaagtactactttaagagagaaaaagtacactttttaaagagctcataactttgcttaaatgggaggtgacaatgggtaatttaaacgtcttaatttaaataataaaggaaaatctaaatataagatgtttctttgttaagactttatctctgcccaagctgacttagaagaaatagaaaggccatataccaggaaagattacttggagcacaataagtggtatgaaaaataactaatatttacttagtgtttactaggtactgttctaggttctgtatcaatatcttcttattgaattttcaaaacaacctcattatacaaatgaagaagttgagaaaagttaaataacttgcctgtgatcctctagtgagggaatgccagagccagaatacagtcagaaaggatgattctgacatgtcctcttaaactccttgcaaaattgtcttaagaatctgcacwggaaaggcagacttacatgtatgggtaattaagagctgcactgtttttgttttgcttttacagatgttgcctatgaattttgtgtctgagttttgttgccttttgttaactgtagggtaaacccaatccattcaagtagacatgtttactttctattccccagagtccagaaaa

SEQ ID NO: 55861 - DNA, 954 bp, Homo sapiens
catgttatttgctgctggatgctgaaaatttctaaagactagcatttcacagttgttaggaaaaaagcctgccaatttagtaatatgtttaattcaagagaaaaagttgggaagcccaaatgtatgatcacagtagtgagccaccttcttcaacatctgtaacaaaactggtatatattgatctgcatcactgtgttttctccatagtttccaaattctaaaggaaggttctggctgaaaccccgacactagccagtccaggcagtgcctgccctttgtgtccggaacctttctgcccttctttcatgttggccctgcattttgacatcmgtgatgccctcttgcatgaagcactttacttctctacattctctatttgaactagatagaaaggtcactcattacataaagtgcagaggaggatcaaggaatccaaaggatatagaaatttaccctcaggtgatgctaagcactttattaaaactctcaccagctccgattgatgacaaatatcaaaacatgagcagcaggaaaagttaaatataattcattatgtcattgttggaacaattcactaaggtgagagttagggactaagatgacgcagactccgtgcctgtgtccatatcttcagcatatttcactgtttctgaggctgacattacctttaaaatcatcaccagtttacctacaagtggtggaatggagactgtcctgggcttaaaaacttgtgagaatgtgtgtgatgactcagagtgcaaaatgctctttgccaaaaaaatcatccccacatgactgaaatttaccctctgaaggctacagaatactctggtgacttctgaagtgccagtcaatattctggaattccaaacagttaatgcagatcaaacagggcagcatttgaatcccattattgagtgaaaaatctcaataatcacaacttcagattatgca

SEQ ID NO: 55862 - DNA, 954 bp, Homo sapiens
catgttatttgctgctggatgctgaaaatttctaaagactagcatttcacagttgttaggaaaaaagcctgccaatttagtaatatgtttaattcaagagaaaaagttgggaagcccaaatgtatgatcacagtagtgagccaccttcttcaacatctgtaacaaaactggtatatattgatctgcatcactgtgttttctccatagtttccaaattctaaaggaaggttctggctgaaaccccgacactagccagtccaggcagtgcctgccctttgtgtccggaacctttctgcccttctttcatgttggccctgcattttgacatccgtgatgccctcttgcatgaagcactttacttctctacattctctatttgaactagatagaaaggtcactcattacataaagtgcagaggaggatcaaggaatccaaaggatatagaaatttaccctcaggtgatgctaagcactttattaaaactctcaccagctccgattgatgacaaatatcaaaacatgagcagcaggaaaagttaaatataattcattatgtcattgttggaacaattcactaaggtgagagttagggactaagatgacgcagactccgtgcctgtgtccatatcttcagcatatttcactgtttctsaggctgacattacctttaaaatcatcaccagtttacctacaagtggtggaatggagactgtcctgggcttaaaaacttgtgagaatgtgtgtgatgactcagagtgcaaaatgctctttgccaaaaaaatcatccccacatgactgaaatttaccctctgaaggctacagaatactctggtgacttctgaagtgccagtcaatattctggaattccaaacagttaatgcagatcaaacagggcagcatttgaatcccattattgagtgaaaaatctcaataatcacaacttcagattatgca

SEQ ID NO: 55863 - DNA, 954 bp, Homo sapiens
catgttatttgctgctggatgctgaaaatttctaaagactagcatttcacagttgttaggaaaaaagcctgccaatttagtaatatgtttaattcaagagaaaaagttgggaagcccaaatgtatgatcacagtagtgagccaccttcttcaacatctgtaacaaaactggtatatattgatctgcatcactgtgttttctccatagtttccaaattctaaaggaaggttctggctgaaaccccgacactagccagtccaggcagtgcctgccctttgtgtccggaacctttctgcccttctttcatgttggccctgcattttgacatccgtgatgccctcttgcatgaagcactttacttctctacattctctatttgaactagatagaaaggtcactcattacataaagtgcagaggaggatcaaggaatccaaaggatatagaaatttaccctcaggtgatgctaagcactttattaaaactctcaccagctccgattgatgacaaatatcaaaacatgagcagcaggaaaagttaaatataattcattatgtcattgttggaacaattcactaaggtgagagttagggactaagatgacgcagactccgtgcctgtgtccatatcttcagcatatttcactgtttctgaggctgacattacctttaaaatcatcaccagtttacctacaagtggtggaatggagactgtcctgggcttaaaaacttgtgagaatgtgtgtgatgactcagagtgcaaaatgctctttgccaaaaaaatcatccccacrtgactgaaatttaccctctgaaggctacagaatactctggtgacttctgaagtgccagtcaatattctggaattccaaacagttaatgcagatcaaacagggcagcatttgaatcccattattgagtgaaaaatctcaataatcacaacttcagattatgca

SEQ ID NO: 55864 - DNA, 663 bp, Homo sapiens
aaacagcaagaatgtagacatgacataatgagtgtgagaatttgcacaaaatattcaaatgacctgaatagctatcctagttcattcctttaaatattaaaagctagatgtcaagttgtctcaatttaaaaaccacttaaaaagctgtatcagccatttcaaaaataggacctattatacatataaagcagtgtagttctatattggttcatgtaaacttcctaattaataaaatcaacaacagccgtgacttgagtttccaggaaactctagataagttccttaatatgttgagtacttgtaaaataattaaaacatatttttgctctttacaggagaattcagttacattgttatctkacctcgaatactgaatgtcatcaggtctatgtaacttattcaggttgaatcttgaatatatcaagaatatattcagaatatacaccctggaaatattcaaaatagcattggaataagatataacttattcagggaaatcttggagtcacagttgactttcttttacatgtcttaatcccctcatgtagttgctaagaactgctgattcaggcttcttaaattccctcacagcaacccccctgccggcacattaaactagtacatgagacaaacacctgcaatgacctgctcactggagacttc

SEQ ID NO: 55865 - DNA, 663 bp, Homo sapiens
aaacagcaagaatgtagacatgacataatgagtgtgagaatttgcacaaaatattcaaatgacctgaatagctatcctagttcattcctttaaatattaaaagctagatgtcaagttgtctcaatttaaaaaccacttaaaaagctgtatcagccatttcaaaaataggacctattatacatataaagcagtgtagttctatattggttcatgtaaacttcctaattaataaaatcaacaacagccgtgacttgagtttccaggaaactctagataagttccttaatatgttgagtacttgtaaaataattaaaacatatttttgctctttacaggagaattcagttacattgttatcttacctcgaatactgaatgtcatcaggtctatgtaacttaytcaggttgaatcttgaatatatcaagaatatattcagaatatacaccctggaaatattcaaaatagcattggaataagatataacttattcagggaaatcttggagtcacagttgactttcttttacatgtcttaatcccctcatgtagttgctaagaactgctgattcaggcttcttaaattccctcacagcaacccccctgccggcacattaaactagtacatgagacaaacacctgcaatgacctgctcactggagacttc

SEQ ID NO: 55866 - DNA, 663 bp, Homo sapiens
aaacagcaagaatgtagacatgacataatgagtgtgagaatttgcacaaaatattcaaatgacctgaatagctatcctagttcattcctttaaatattaaaagctagatgtcaagttgtctcaatttaaaaaccacttaaaaagctgtatcagccatttcaaaaataggacctattatacatataaagcagtgtagttctatattggttcatgtaaacttcctaattaataaaatcaacaacagccgtgacttgagtttccaggaaactctagataagttccttaatatgttgagtacttgtaaaataattaaaacatatttttgctctttacaggagaattcagttacattgttatcttacctcgaatactgaatgtcatcaggtctatgtaacttattcaggttgaatcttgaatatatcaagaatatattcagaatatacaccctggaaatattcaaaatagcrttggaataagatataacttattcagggaaatcttggagtcacagttgactttcttttacatgtcttaatcccctcatgtagttgctaagaactgctgattcaggcttcttaaattccctcacagcaacccccctgccggcacattaaactagtacatgagacaaacacctgcaatgacctgctcactggagacttc

SEQ ID NO: 55867 - DNA, 714 bp, Homo sapiens
cacctctagggttcaagcaattctcctgcctcagcctccgagtagctgggattacagaagccaggctaatttttgtatttttagtagagacggggtttcactacattggtcaggctggtcttgagctcctgaccttgtgatccgcccgcctcggcctcccaatgtgctgggattccagacgtgagccgcggcgcccagccctggaacacattcttgtcatgaagtttccattcacgtggagaagacatgcaatgaacaaacacattcacattacgcctggtgatggtaagtgtctgaagaaaagcctacagcaggattcaaggaaaaatagtagctcagyccagcatagtaccaatgttatttagcacagggtgatgaataaaaatcttcctggtaagatgattgtctagcagagttctgaatgaaagagagagaggaaaattctgatatctgaaagaagagagtttcatataggaaaaataggaagtccaaaggccttcacctactccctgtgtaacagaaaggacatgtttctcacaggggctggagagagaagtcaaatttgtgtataaaagtaattagaatgatgggaaacttccacccaggggacagtatagacagtgctagggtgaagacaagattaaaaggattttattaaatttgaggtataatacaagaattcataaaaagtcaagcattgaaaacttgaggatg

SEQ ID NO: 55868 - DNA, 714 bp, Homo sapiens
cacctctagggttcaagcaattctcctgcctcagcctccgagtagctgggattacagaagccaggctaatttttgtatttttagtagagacggggtttcactacattggtcaggctggtcttgagctcctgaccttgtgatccgcccgcctcggcctcccaatgtgctgggattccagacgtgagccgcggcgcccagccctggaacacattcttgtcatgaagtttccattcacgtggagaagacatgcaatgaacaaacacattcacattacgcctggtgatggtaagtgtctgaagaaaagcctacagcaggattcaaggaaaaatagtagctcagcccagcatagtaccaatgttatttagcacagggtgatgaataaaaatcttyctggtaagatgattgtctagcagagttctgaatgaaagagagagaggaaaattctgatatctgaaagaagagagtttcatataggaaaaataggaagtccaaaggccttcacctactccctgtgtaacagaaaggacatgtttctcacaggggctggagagagaagtcaaatttgtgtataaaagtaattagaatgatgggaaacttccacccaggggacagtatagacagtgctagggtgaagacaagattaaaaggattttattaaatttgaggtataatacaagaattcataaaaagtcaagcattgaaaacttgaggatg

SEQ ID NO: 55869 - DNA, 714 bp, Homo sapiens
cacctctagggttcaagcaattctcctgcctcagcctccgagtagctgggattacagaagccaggctaatttttgtatttttagtagagacggggtttcactacattggtcaggctggtcttgagctcctgaccttgtgatccgcccgcctcggcctcccaatgtgctgggattccagacgtgagccgcggcgcccagccctggaacacattcttgtcatgaagtttccattcacgtggagaagacatgcaatgaacaaacacattcacattacgcctggtgatggtaagtgtctgaagaaaagcctacagcaggattcaaggaaaaatagtagctcagcccagcatagtaccaatgttatttagcacagggtgatgaataaaaatcttcctggtaagatgattgtctagcagagttctgaatgaaagagagagaggaaaattctgatatctgaaagaagagagtttcatataggaaaaataggaagtccaaaggccttcacctactccctgtgtaacagaaaggacatgtttctcacaggggctggagagagaagtcaaatttgtgtayaaaagtaattagaatgatgggaaacttccacccaggggacagtatagacagtgctagggtgaagacaagattaaaaggattttattaaatttgaggtataatacaagaattcataaaaagtcaagcattgaaaacttgaggatg

SEQ ID NO: 55870 - DNA, 591 bp, Homo sapiens
ctcctttcctcttagcaaaactgcaaatggttaagaaaccatattttaaaagtagaaaatccagaatcgtttttataagcaagacacctggaggcttagaatttaaaattaagaaaatagtagaagccaacaaacaaaaaaacaaagaggtaccacgtacaaaaactyccctattggaagaccaggacaaagacaataaagatacatttatgttaaaatatttggcttcagattaaatatggagtgaatattcagggtggtagaaaattcagttttatctgaacccattcttttatccttagccattgctttctattgtttaaagacgacgttatgcaggatagactgactggggagacagagcagacccggcatgagaatttcttccatgcaagcctgcattcttgtcatgtttctgtgggtgcttttcagaatacagtggaaacaaaaacagcaaagtgactcactccatgataaatgaatgtacccaaaaacatgaacctgtaataccagccagaatgacggactcaggcttgtcaagaaaaacatgaaagaaaataggaaagggtttcttacgatgccaacttaatc

SEQ ID NO: 55871 - DNA, 591 bp, Homo sapiens
ctcctttcctcttagcaaaactgcaaatggttaagaaaccatattttaaaagtagaaaatccagaatcgtttttataagcaagacacctggaggcttagaatttaaaattaagaaaatagtagaagccaacaaacaaaaaaacaaagaggtaccacgtacaaaaacttccctattggaagaccaggacaaagacaataaagatacatttatgttaaaatatttggcttcagattaaatatggagtgaatattcagggtggtagaaaattcagttttatctgaacccattcttttatccttagccattgctttctattgtttaaagacgacgttatgcaggatagactgactggggagacagagcagacccggcatgagaatttcttccatgcaagcctgcattcttgtcatgtttctgtgggtgcttttcagaatacagtggaaacaaaaacagcaaagtgactcactccatgataaatgaatgtacccaaaaacatgaacctgtaataccagccagaatgacrgactcaggcttgtcaagaaaaacatgaaagaaaataggaaagggtttcttacgatgccaacttaatc

SEQ ID NO: 55872 - DNA, 591 bp, Homo sapiens
ctcctttcctcttagcaaaactgcaaatggttaagaaaccatattttaaaagtagaaaatccagaatcgtttttataagcaagacacctggaggcttagaatttaaaattaagaaaatagtagaagccaacaaacaaaaaaacaaagaggtaccacgtacaaaaacttccctattggaagaccaggacaaagacaataaagatacatttatgttaaaatatttggcttcagattaaatatggagtgaatattcagggtggtagaaaattcagttttatctgaacccattcttttatccttagccattgctttctattgtttaaagacgacgttatgcaggatagactgactggggagacagagcagacccggcatgagaatttcttccatgcaagcctgcattcttgtcatgtttctgtgggtgcttttcagaatacagtggaaacaaaaacagcaaagtgactcactccatgataaatgaatgtacccaaaaacatgaacctgtaataccagccagaatgacggactcaggcttgtcaagaaaawcatgaaagaaaataggaaagggtttcttacgatgccaacttaatc

SEQ ID NO: 55873 - DNA, 1229 bp, Homo sapiens
actcccgacacgcttcatctctagcttttaacagcctgtcaaaatatctattatgtaccaccactctctctttatggacaagtaaattgatgttcagagaaactaagcaacttgaccaagtcactggtctaataaatgctggagtggaattcaagctgtaggtttttcactccaggatctgtgctttccctatgtgctacgtttaacaaatattttacagaacaagtgtttgtatctctgcaaaagtccctaaaatgcgtatctttattttcacataggctataaatatcctttattagattattctgcgtaaattattgttattcattccagaaatttaccaaaagatgccaaaatattaagcaaaagcaagttaacaatataatccaataaggagatgatatttttcttctatattagcaactgtatatgggaaaattctgctatgagaatctaatcaaaagctgctaacagactgcagaatgggtacaattaccttcatagtttgttagttaaaattatattttgaacctttgtagaatgaaacgtctatggaaacaagcaatattcacagaaaaaaattagctttttaaacatattatgtactatctcaarttatctgaatctctgtgaaagtctctgatgttaaaactttatttaaattccatgaattaaaatatattataatcaatgcaagtgacatggtcacctgcagccaggagaaatctatgtatattggcctgcagcccatattagaaaattgtatattatataaatatatataattttatttacataatatatattatatgcacatattctatttcatgagtggaggtaaaaacacaaatgtatgtgtgtgtgtgtgtatttcctatttcatgagtggaggtataaacatggttgcatatgtatgtgtgtgtgtgtatttcctatatcattagtggaggtataaacacaaatgggtgtgtgtgtgtatttcctatatcattagtggaggtataaacacaaatgggtgtgtgtgtgtatttcctatttcatgagtggaggtaaaaacacaaatgtatgtgtgtatgtgtgtgtgtatatttcctatttcatgagtggagatataaacacgaatgcgtatgtgtgtatgtgtgtgtgtgtatgtatttcctacttcataagtggatgtataaacacgaatgcgtatgtgtgtatgtgtgtgtctatatttcctatttcat

SEQ ID NO: 55874 - DNA, 740 bp, Homo sapiens
ttcatttttttttctagccttgtcgtaacaataaacattctgctcttatccttggatctccatgtgagttttcaaattcccctctcctcccctccatccatctaaatctttccctgcctttaattctccatcccgtaaagccttgcctaataattctggtctgtatgtatgttcctgtcamtatgtttagcctttgctgcacagattgcataattcactgcttgatctattgtcttttctaatgactttgagaattggttttctgttgctggtaataatataagcccttaataatcagcaaccttgtcttacacatagtagtgctcagtaatatttgctgattttcagattgcttcacattatttgagctccatattcccctaccctttttttgtttctatgcaaaagtgaaaattctcagacaaggttgctgggagccaggaataaatacccatctaatggtagcaacacttgtaagaaaagtacaggactcacatcttgcgttttcctaatccagcctttccccttgctggtgtgaatgagatgtatgcctccgccagagtagctggccaagatgcacccacacaggactgcgagcgtcttagactgctctctgagttggaatttagggcctgaattagtcaagcatcaaatgaagaaataatgagatgcaaactctccacatactatcttcacagctttaaaataaaacaaaatgtaatggcctttaaaaggaaatg

SEQ ID NO: 55875 - DNA, 534 bp, Homo sapiens
gaattcgagattgcaatgagctatgattgcaccgctgcattccagcctgggcaacagggcaagaccctgtctccttaaaaaaagaaaaaaaaaaaagagcagattttggttcaagaatagggtagagcctgagattctgccytcctaacaagctctcaggtgatgccaatgatgctggtgcatgagccaccttttgcctatcaaagacctaaaagatgaaaaaaagacatgatatgttaagattgtgcctgacttgccgggcgcggtggctcacacccgtaatcccaacactttgggaggctgaggcgggtggatcacctgaggtcaggaggtcgagaccagcctgaccaacatggtgaaaccccgtctctactaaaaataaaaaaaaaattagccgggcttggtggcacacgtctgtaatcccaggtactcaggaggctgaggcaggagaatcacttgaacccaggagggggaggttgcagtgagccaagattgcgccactgcactccagcctggtgacagagtgagactccg

SEQ ID NO: 55876 - DNA, 534 bp, Homo sapiens
gaattcgagattgcaatgagctatgattgcaccgctgcattccagcctgggcaacagggcaagaccctgtctccttaaaaaaagaaaaaaaaaaaagagcagattttggttcaagaatagggtagagcctgagattctgccttcctaacaagctctcaggtgatgccaatgatgctggtgcatgagccaccttttgcctatcaaagacctaaaagatgaaaaaaagacatgatatgttaagattgtgcctgacttgccgggcgcggtggctcacacccgtaatcccaacactttgggaggcygaggcgggtggatcacctgaggtcaggaggtcgagaccagcctgaccaacatggtgaaaccccgtctctactaaaaataaaaaaaaaattagccgggcttggtggcacacgtctgtaatcccaggtactcaggaggctgaggcaggagaatcacttgaacccaggagggggaggttgcagtgagccaagattgcgccactgcactccagcctggtgacagagtgagactccg

SEQ ID NO: 55877 - DNA, 989 bp, Homo sapiens
catttttaccttattggtggtatctatcaatcagaatagggaaaaggcataataagcaaggcagagataaattcatttatgtaagttgcccccgaattactcatttgtccaccatctactctggctggctgatctactcttctccaggctcctagttttccttctgcctctgattggacatgttggctctttgtttctccttgctccactgtctttatttctgaattgtcctttggtgctaatccctcacattatttcaactgttgtccctatgctgaggccttctacatctcaaccccacgtgtgagttccaggcaaccattcctgggctgtctctggccattgccacctgactgtcccataaaacaaaattcagtcttctcaaacccagtgcctcctccatcatcaggctcacagaggtactcgtctcttccctctctccctgaygtgcagtcatgtctgactactgattttttcctacatagttttcctgaatgaaagttgtcttcccactgtccctacgagtctggtcccttcctgctaacaaagtgtattcctggaaaagaacagcctgtctctctcctccaaagaatcctatatgctgtagcacaacataaaccatttaactgcttcaatctggcccaaaacggtccaaagttccctattttcctcaagttaaagtcaaactctgctcttcaacaccctccaaaactagactccaaatttcccctccagcgagccagacttgtccactctgaactcccaaacctacctttagcttccccatctctttgtatgcctttgctcagaccagtccccttgcttgaagttcccttatgcaatttcaatacaggcatcatgtaagtcccacttcaacttccatgtcatccatgaagctcttctgacttaataacaaggctacagctttcctctgatttcctgtcaataaccccagtagttgctagcacttacactgcatatataaccaa

SEQ ID NO: 55878 - DNA, 612 bp, Homo sapiens
ccctgtggagccaaagctgccctcacgcgtcaccacccaactcccagcatggggcctctccaggctcctcctccaatacagtctccttctgactctgtgcccactcctcctcatacytgggctgcgtgaagctccttccatgaccccactcccccaccaagtctccctgccctgtgaaacagcctcaggaagacatcccgcactcccagcggacctgctccttcgctctatcaaaccaagctctgcttccagtctctgccagcccagcctgctcctgactcccagcacacagtgtcctctctaaagctgttccttaattgtccccaaacagagcctgctgactcctctcagaggcaatttccctgccagtctgcctctctcctctccgggaagccttccctggccgcccatccctgtgtacacggtcaccatttagttgttcctaatggtttcctgagtcttgtcacttttgctcatgtcccctgatagcctggtctaaggtagggcctgcagaagatgctgatgactagataggagctctgggtgcctggctccaacattctcccatggtcacagccactgctgtccttgctgtgagtttaggagctgact

SEQ ID NO: 55879 - DNA, 659 bp, Homo sapiens
actgagcaggtggctggcagcatgcgccaggcccaggcccaggagaaagtggagcacagaaatacagctgcacctgtgggaaaggagaggaaagaaagcaaagagggggcagttctgagccaacacccacatcctttcttggtggggagggagctgagacagcaactgccagctgaaggattgtccctctgaggaaaaataaacccattagcctccacccctgagacactgaggttctttcatatgcagatggcctcctgcctccaccccaggacactgaraattctggggccccggacacctcaagtatcctgacaggagggctccgctaatccccttactcccttcttgagcctcccaagagaatggaaggaggaggtccacgtgagtaatcccatcaaaactcctatggctggagcccttaaatgggggcacaggaggccaggtgggaagcctcttttgttccaatgggctgggtactgactgaggcattctccatgcccggacaccatggctgagtgacggtgtcatcactagcaccaaggcctggtgatgggcagacaaagaggcctgtccatccatctcataccggcctcatagccttgtggcctggaatggagctgggggctgatttcaatcaaactaggccagtctccatg

SEQ ID NO: 55880 - DNA, 659 bp, Homo sapiens
taatggcattgcaagttgctttattttccaaagctctgccccagggaaaggcgatccatctgcctgcaaaccggggatggaatgcctgcctcatcctcttcctagccagctcaggctgagggctcttcctggggcctttggtctggccagcaaaggtggcagacactgataataggggagagtcaaaggttaaacagcagagattagatgaacacaaagacttgttaggaagtgttaacatcttccctgcaaatatacacaaaaagcagaaccaggagggaagcagcccagcagaaccattcccccaggctggggcagtgggaccggaaaatgaatcccagggctkggccacaacagcaaggacaggatcagagggaactttaggtgcatagcttgcacctgctttccttgaactactcctaccaccaggcaagaggaatggaggcagagcaggtggaggctcagcttggttttgagtctcttgtaatagatttagtttattggtcgaggttaaccaacttcttagaagctcccgataggctcaagggagtagggagcatctgccttttctcctcctggggaagcccacccccttctcacacccattcccccagacatagggtttttccatgataggtactgtacttgactttctcacc

SEQ ID NO: 55881 - DNA, 595 bp, Homo sapiens
gcccactcggcctcccaacatgctgggattacaggcgtgaaccaccacatccggccataatttccgtattttttgtagagatgaggtttggccatgttgcccaagctggtctsgaactcctgagctcaaatgatccgcccactttggcctcccagagtgctggaattacgggcgtgagccactgtgcctgaccttattaattctttaggacccagaaacatcatcacttctgttgggtcttcctccaaagagatgtcacttacaccttcactctttcctaccattttatacaagactacaacctctatttaacgcttcttattatttaagtacatgtttttcccaaccactctgagtcctgggacaacatatctttttctttctgttctagtttagagcttggcacatagtaaaagtcttcctaaatgttgcacgaacgagtaaatgattttaatttccacaaactccaggcttccctgattggcccctgcctgtgaacatgagtcaccagttgttatcttgaaagcctcaggaacttcagacgcaattcatcctggctacccagtgggtccagaaaggacccaagtgcacaaag

SEQ ID NO: 55882 - DNA, 664 bp, Homo sapiens
gaatgggctttgcatcttgcagagggatttctgccagaggtgagtgtgggcacgtcacgggggctgctgacggggtgctgtatgtgcctgagtgtggatgtgaccaaacttggggatatgttgctgttaaatgaagcgaggcattaccatggcaacatagctctctgctcccagccagatgccaagcccttaaattatatttttccggctgaaagcacctcaattgcctctggtctccaaagcaatgggaccgtgggagcaccagatgcctcaccgttgtctccaacctttcgacaaagcccaagaggcgataagcaggggagatggcacagggggcacgggtgaattttgtttgttgggggggggtgcctgggagtagtgtctggtgaagggggctggagagagccaccgacacactctacttttatcatctcctggtccagtcacctagcacttcattccagaagtaaaatgtgtataataacaccattagagttgccagtaatttcttccactagatgaaggggtgggttgccccyccacacctgtgggtgtttctcgttaggtggaacgaaagacttggaaaagaaagagacacagagacgaagtatagagaaagaaaaaagggggcccaggggaccggcgttcagcatagggaggatcc

SEQ ID NO: 55883 - DNA, 601 bp, Homo sapiens
aaccccgtctctactaaaaatacaaaaattagccaggcatggtggcgcgtgcctgtagtcccagctacttgggaggctgaagcagaagaatcatttgaacctaggagatggaggttgcagtgagccaagatcacgccactgcacttcagcctgggtgacacagtgagacgctgtctcagtaaaaaaaagtatatatattatatatacacacacatatatacacacacayatatatatatatatgaaacattctctttgaaagagaatgatcttttatcttatcaacttctccaagtgtggagattcctggacaaaataccaaaagtttgctgatgtataaccagtctctataataaaagggctatatgaaaccctctgacagtactatcagctgagttttccaggtacctaggcactggtaaaacacttttaagcattttgtcatgatttctttaataggccatacttaatactgcactataattcaacacactctcagaggtgatgttagtggacctattctatcatatgctaaactgaacgacaccactgagcttttataaaaggttttctctttcctcccttgccagactgttaacca

SEQ ID NO: 55884 - DNA, 398 bp, Homo sapiens
ggatccacattaaggaagttgatctcactcagtctcccatccccttgccttttgtttcttgtgtgtctgtgacttgtgttttcctcgtctaaattttaagctctgggagggcaaggatgatgctctgagcttttttgggggctgtggcacagctgctggcagagtccagagcaggaaggcagagcggaagtaaaggaaccgagagggctgggaccacagaagctagagctgtcgccctgccatccccaaaccgcataggattgaggctgtcttggggctgagctgtagagtgaagctcaggctttgccctccttccaaataacggcagctgagggatactattcagcccgaggtgcgtgtgtgtgtgygtgtgtgtgtgtgtgtgtgtgtgtgtgtgt

SEQ ID NO: 55885 - DNA, 515 bp, Homo sapiens
tttttgtctctccccacctcccaccctgctatcaacattttaattttacaacttatcttaaaacacaacaaaacaaaacaatgatcggccaggcacggtggctcacacctgtaatcccagcactttgggaggctgaggtgggcgcatcgcttgagcccaggagtttgagaacagcctgggcaacatggcaaaacccagtctctgcaaaaaatacaaagattagctgggcgtggtggcacaagcctgtagtctcagctacttgggagggtgaggtgggaggatcgcctgagcccgggaggcagaggctgcagtgagctgagatcacaccactacactccagcctgggcgacagagtgaccctgcctcaaaaacaaaaatcaaaaaccactccrctatctgactaaaccagtgatgtcgctgttctgccactagatggccataatggctcagctaagtcacccaaaccctgtccctttcctgactgttggtggggctgtcagaccatgccttcttct

SEQ ID NO: 55886 - DNA, 532 bp, Homo sapiens
  misc_feature (1)...(532): n = A,T,C or G
aaagtctnnnnnnnnnnnnnnnnnnnnnnnnnnnnnnnnnnnnnnnnnnnnnnnnnnnnnnnnnnnnnnnnnnnnnnnnnnnnnnnnnnnnnnnnnnnnnnnnnnnntgacttactcaggactatacttcactctacactcccaggcagaattatatgcagaatttctatacctttaatacattgtccaaacccaggcatatgtgtatcttccagtttttccccttattttaacagaaaggcacatttaaaatatgaaagcattcctggttgaagtcatgagaaatcatgaaatcatcctctttgaaaagaatggaaagaagagggaatttttcagagtgagtggctttttgggcactgcaagaaagttaaccttaaaaagagacaacctaataatgcctgatccccccgcctccccaccacccgccaaggttgaagctggagtctgcatccaacactggggtctgtggggacctcccagctytctttgcaagggtgattgccaaaatgccacatgggacctgaaaaaggct

SEQ ID NO: 55887 - DNA, 599 bp, Homo sapiens
agcgcctctgagccgtgcacagccaacatcctgacaataatttagcttcccgtataaatctgcttacaggcaaacaatgtgcttgatagttccatttctcatcggaaaataaataggttttctgttttgcaaatttcgaagacaagaacaaaaacctacaagggaagtaattaggtttggcaaggctttatggtgaaggtagcaaatgagccttgtcaatgcggtaatgggtcctaaggtggggaacgcagatattatttttctctcagtgctgcggatgaagaaaccaagacacaaggcaaataagccactcaccccacaccataacactgttaagtggcagggccgggctttgaactccgaagtgcctggcggtgcacacactcctgccccactgggtgctgcctcctctcatacactctctactccctgcgggcaccaggccaccatcagagctggggtctttccgaagagtgagacgggccgactttgcaggatgcacagaggaaagagatgccagagaagtggctggaaggaaagagctaagggtcctcagacaacagtcagacatgcygagatgtcttgcttcctcatggaaa

SEQ ID NO: 55888 - DNA, 1098 bp, Homo sapiens
tatacattactccatataattttaaataactaaagaaactaaaaatctgccaaaagaaacatgactgttaaccacagtcaccttcaatatttctctattcatttgactcacttttttcccaaatttgtaattatcacattatgttaattaagctttctgcttttccccttaaattctaacataagtgatttgactggctactatatagcttgaaaatattgttttaaattgtgcttacattttaaatacataggcccatgataccatcaccacaaataaggtaatagatatatccagcccctccaaaatttcttgtgtcttcttgcttttctttcttttctcctttattcttttcttctttcttccttcctatttcttttggtgagaatacttagcatgagatctacctctctcaagaagtttttgagtgcacaayaccatattgttaactataataactaggttctttcttattttctttcttttcttccactttcttagcataagattgcactacgctacttgcttctgtctcttactagtgtgaccttttgggcaacttattaaccctctctgtgcctcagtgcctgagttcttccattgtaaaatgaggataataatggtatctatctatttccattttacgtgtgtatttgatttgacaaacaattatatagcattcaggatcaggacaagaggtagacacaatgaatatcagtgcatttaatcccaaaagggctgtgaaaactgtgaaaattgtcagaatcaatatggagtcacttgtattaaaaatcctggcaaatagagccagggaaggccacggaggaaggattttcatgcctaaaagtcctgataacaaaaactatcacaaaagactctgcaaaacccacaaccttgcacaaaggtcatcgcaaccttaccaaaaaaaaattattctgtgaggacatctgcccaggaactgcctgttcaaacttggactggcactaccctggttatttgtccttatagccaaggaaaatcatctcaaaacaattatgtaatcctcattttccctttaaaaacatttgtctttcttcacctccctgaatccacacatag

SEQ ID NO: 55889 - DNA, 1098 bp, Homo sapiens
tatacattactccatataattttaaataactaaagaaactaaaaatctgccaaaagaaacatgactgttaaccacagtcaccttcaatatttctctattcatttgactcacttttttcccaaatttgtaattatcacattatgttaattaagctttctgcttttccccttaaattctaacataagtgatttgactggctactatatagcttgaaaatattgttttaaattgtgcttacattttaaatacataggcccatgataccatcaccacaaataaggtaatagatatatccagcccctccaaaatttcttgtgtcttcttgcttttctttcttttctcctttattcttttcttctttcttccttcctatttcttttggtgagaatacttagcatgagatctacctctctcaagaagtttttgagtgcacaataccatattgttaactataataactaggttctttcttattttctttcttttcttccactttcttagcataagattgcactaygctacttgcttctgtctcttactagtgtgaccttttgggcaacttattaaccctctctgtgcctcagtgcctgagttcttccattgtaaaatgaggataataatggtatctatctatttccattttacgtgtgtatttgatttgacaaacaattatatagcattcaggatcaggacaagaggtagacacaatgaatatcagtgcatttaatcccaaaagggctgtgaaaactgtgaaaattgtcagaatcaatatggagtcacttgtattaaaaatcctggcaaatagagccagggaaggccacggaggaaggattttcatgcctaaaagtcctgataacaaaaactatcacaaaagactctgcaaaacccacaaccttgcacaaaggtcatcgcaaccttaccaaaaaaaaattattctgtgaggacatctgcccaggaactgcctgttcaaacttggactggcactaccctggttatttgtccttatagccaaggaaaatcatctcaaaacaattatgtaatcctcattttccctttaaaaacatttgtctttcttcacctccctgaatccacacatag

SEQ ID NO: 55890 - DNA, 1098 bp, Homo sapiens
tatacattactccatataattttaaataactaaagaaactaaaaatctgccaaaagaaacatgactgttaaccacagtcaccttcaatatttctctattcatttgactcacttttttcccaaatttgtaattatcacattatgttaattaagctttctgcttttccccttaaattctaacataagtgatttgactggctactatatagcttgaaaatattgttttaaattgtgcttacattttaaatacataggcccatgataccatcaccacaaataaggtaatagatatatccagcccctccaaaatttcttgtgtcttcttgcttttctttcttttctcctttattcttttcttctttcttccttcctatttcttttggtgagaatacttagcatgagatctacctctctcaagaagtttttgagtgcacaataccatattgttaactataataactaggttctttcttattttctttcttttcttccactttcttagcataagattgcactacgctacttgcttctgtctcttactagtgtgaccttttgggcaacttattaaccctctctgtgcctcagtgcctgagttcttccattgtaaaatgaggataataatggtatctatctatttccattttacgtgtgtatttgatttgacaaacaattatatagcattcaggatcaggacaagaggtagacacratgaatatcagtgcatttaatcccaaaagggctgtgaaaactgtgaaaattgtcagaatcaatatggagtcacttgtattaaaaatcctggcaaatagagccagggaaggccacggaggaaggattttcatgcctaaaagtcctgataacaaaaactatcacaaaagactctgcaaaacccacaaccttgcacaaaggtcatcgcaaccttaccaaaaaaaaattattctgtgaggacatctgcccaggaactgcctgttcaaacttggactggcactaccctggttatttgtccttatagccaaggaaaatcatctcaaaacaattatgtaatcctcattttccctttaaaaacatttgtctttcttcacctccctgaatccacacatag

SEQ ID NO: 55891 - DNA, 1098 bp, Homo sapiens
tatacattactccatataattttaaataactaaagaaactaaaaatctgccaaaagaaacatgactgttaaccacagtcaccttcaatatttctctattcatttgactcacttttttcccaaatttgtaattatcacattatgttaattaagctttctgcttttccccttaaattctaacataagtgatttgactggctactatatagcttgaaaatattgttttaaattgtgcttacattttaaatacataggcccatgataccatcaccacaaataaggtaatagatatatccagcccctccaaaatttcttgtgtcttcttgcttttctttcttttctcctttattcttttcttctttcttccttcctatttcttttggtgagaatacttagcatgagatctacctctctcaagaagtttttgagtgcacaataccatattgttaactataataactaggttctttcttattttctttcttttcttccactttcttagcataagattgcactacgctacttgcttctgtctcttactagtgtgaccttttgggcaacttattaaccctctctgtgcctcagtgcctgagttcttccattgtaaaatgaggataataatggtatctatctatttccattttacgtgtgtatttgatttgacaaacaattatatagcattcaggatcaggacaagaggtagacacaatgaatatcagtgcatttaatcccaaaagggctgtgaaaactgtgaaaattgtcagaatcaatatggagtcacttgtattaaaaatcctggcaaatagagccagggaaggccacggaggaaggattttcatgcctaaaagtcctgataacaaaaactatcacaaaagactctgcaaaacccacaaccttgcacaaaggtcatcgcaaccttaccaaaaaaaaattattctgtgaggacatctgcccaggaactgcctgttcaaacttggactggcactaccctggttattkgtccttatagccaaggaaaatcatctcaaaacaattatgtaatcctcattttccctttaaaaacatttgtctttcttcacctccctgaatccacacatag

SEQ ID NO: 55892 - DNA, 1624 bp, Homo sapiens
ggctgttttatgttatcagtaaggcttccagtctacagtaggctattattagttaagttttgggggagtcaaaagctatatacattattttctctttttttctttaagaaacagggtcttgctgtgttgctcaagctggcctcaaagtcctgggcacaagcaatcctcccgcctcagcctccctagtatctaggactacaagacatgcacagattttcaactgcacaggaggtgaccccygcacctccaatccccacgttgttccagagtcaactgtaaactattttctataccctctaactgttgaggtcaggctcaaactgagaaaggaaattattccagcaaacttagaacaaaggaacaggagggaagtaaagtaccagcaactggtactttaattgaggcagagatccttaattagaggacaaattcctcaagtcctgggagcagacacaagtctaagttaaggggtgagggttacctgtgatgaaagcaagctcccagaagctaacctcttcctctgggaggccacctcatctcccaggcatgctctgatcacacagctctatgctccgcccccttcgttcactcctccacccagcatgtgccaggcactgttccaggcatgagggccccacagtgagccagacaaagcccctgtccctgccccacagagcttgtgatacgaaggggcactagtaaaggaggggagggataaaagacagagaaagaaaacacacagcattgtcagatgagcggtgacaatagacaaataatgtcccagaacacgtatgtcagatgggaaggtgaacagggctggccagggtggagatggggacaactttcacgagtgttgaggggaggggctgagtgaatctcagcaaggacccgaaagagataagggaatgagccacaggtgagtgcctggagaaagaacattccagcgagggcatgcatgggaagagcagggaggccgaggcagctgtgagaagaggggtgggggcagaagcagagaggggcacgcctgctactttgctgtgatttgtttgttttgttatctgtgggcctgactgaactggaggcgccttgagagcagggcctgcactgcacatgcacaaccctaccgagagcccatgcaggccggaaccaggtgcagcagatgggagggggcatggatagggaagaactgtgtgaatcaggaaactgttccaaaggaaaaatgagccgctaagcaaggctgctggcaggtgcaggtaacacaccagaattcactgtgagcttaaagcctttcgccaaaggcttttaatttcaacacatgcaggacattttccaagaaaacactcagctttaatcttataatggaagtcaataacaaaacaggatttgcattgctgtatgcaaatgaaaaaaatatatattcattttccagactactttgctagaaaaatcactccctacaatttaaaaatgtctatatttaactcattttagctacacaggtggtgttacatacattgtctgtttacacagctttaacagacaaccataacatactttccagctcactggagaagactctggagaaaaaagctacttcttaattctgtattctagcaataatagg

SEQ ID NO: 55893 - DNA, 1004 bp, Homo sapiens
ttttaacatctctgaaatcaggctgcatgttatgatctatggcatgtcatcatgtaattggcagcatgttttactttctcctaatggtgtacctttcaatcaatggcagagcaggtgaaatacgatttgtccatggaagcagctataccccggctgcttatgtgacacaggattaaaaagtgaggagaaggacttaattatttgtcttctttatttcctacacacacagccttaatatatgatagtaggcaaatttatacatttcacacaaatactgctgaatttccccatttcttttcagaaaaggaaaagatattttggttaaaaaaaatatatataaagcatttgttctgtcccctacagtcaatggctcctactggcacaagrtcctgtctgccattcacaagttgtatgaccgggggcacgccacctactctccctgagctctgagtttctcaaggggaggtgtgccctgacactgagttgctttgagcatcgggaaacactcagcccgtggctctcagcgggccttcactcattcagctcacacgctctatctcctgctttcattcaacttccacccctacctccatgcccaccccccaactagaggaatttccagaagtaatgcacagagtaagcctgcccaggctggcaaactcccctgaacctcctcctttacagaaaatgtgttctaccacccctagagcagcagggatcaaatgaaacccggcctttgaaggggatggcttgaaaaaggcagccaggaaggacaggtcagagaccacccacattccggcaagggttcctgtcctgttagattccatctgccagtgacccagaggacagagccacacagattcagtgccatttttcacaacagccagaacagtgtgctctttagctgagctaaaggggaagaggacagaggagaaaagaaactgaaggtggcagaggagtggagtagaactgatgagtggcaggttcaaatccaccatagacaa

SEQ ID NO: 55894 - DNA, 552 bp, Homo sapiens
caaaaattatcctgggattctaagcttgttgcacaggaaaaatacgttgttatgtaaggaaaactaatcaaagttctctacctttcctggtcagcagcatgtgtttccaaaaaatttaagagaaattaatgggttaattgagaacattctacatctcaccatgtttgctcttatcataattcaccattgctgatttctctacctacagagttgctgaacctggcttgattttcccatagaactgaagcctgaggaacttatatttgttttgtctgagtttctttctcgggaaaccaaccatcagggctcccagatagtatcagggaactgaaacttttcagatgatggcatccagtcatgagatgcacctgctgcctgttgaccaattcctcttctttacctctctctaaccccctgctatataaacccctaactttagatagttagggagatagatttgagactggtctcccatgtcccagctgatgtcacctgcattaaagcytttcttccccagcaatactcatcatctcagtgattggctttctctac

SEQ ID NO: 55895 - DNA, 658 bp, Homo sapiens
cttctaaataattccaatctttggtcatattttcaaatgctgttgcttcctgaaacaacattggctgctgccacagggaccatatagtcttggggcctgggctaaagagcagcttcagcaggactggggaagagacaagagagggcaccaggaatgaaggcatgcagcataaaggactctgaaagcgagtcaggtgaataaatggaagaaataagaaataggtctcacatctaacaagatgagtacagcttcatggatgagggaaaggagttttgctttcctgggaggtctgttggtctggccagttttgatgctgccagagctgtagcccatgtattaatctttccagaataaagcagagtccaagtgaacttgggcgcaggcttgatgactcctaacaggggtggcaggatctgtttccaatggaaatattatatctgtgtacataaagatatgtcaggagattatcctgcagaaaagagataycccaaatggagtctacctgccactgtgatcagataattccttagggagagaacttgatactcagttgtctaaactgggattccttagtcagaacagccgtaagacaggatggtgatgaggccaggggagttcacatgaggactgcaggaattccagcaagcttaggaaaaca

SEQ ID NO: 55896 - DNA, 1115 bp, Homo sapiens
agaaagaaggaagcacagcagggaaggaaggaggggaagagcgagggagacagggagatgggaagggagggagaaagaaggagagaaggaagggagggagttaaaatttcacaagggatctatctgggtaaaatgtatgccagagccaagcatctacaaacacataaatgcccccattttcctgacatctgttcaggagatccttaacagccctgacgatctgagccagctacattagtggatgtgtcacagagctcaggaagaggcagtttgactataattctgtcatcatctggtctcctgatgagaccacagcactgcatggctgtctgaggctcctgggctctgagggactgggtaaggttactcggtctggtgtctggtggttcccagacctagctgcatgtcaccttgggaacttgctttcccccatatgttttgggtaggaagacttgctttttattgaagtagaacgatcctacagaaaagtgcacaatctgagtgtgtggcatggtgagttttcacaaactaagcacacccatgtaggcagcaccacctccaaagataaccaaggtggcttccaacgtcatggtctagttttgtctgttttttacctttatatacacagagtcatgcactctgcaccacgttgtgcctgatgcttcttcttcttcgcgttkatgagtctcgtccatgttgcacgttgggtgttttaagtcatgcagtgactcatttgctgtggcacctgtgccatgcgaggtaaggtgataatgtggagaaactagacacaggggtccaggggtccaggagcactctgcactgtcttcacagcttttctgcttatttaaaactattacaaaatcaaaagttttttttttttaaaatcagagggaggattgagaggtgagagaggagactttgattgggcgtagaaaccttttctttgggggagagaaggtgcatctaaataagttcttttatccatgagcctttctctagtgttgcagtgggaaaatgggatgctccagataggccactacaaggaacttagccaagtaatatggtattatgcttccaaaaatgaagatactgtgggagtattattaacggtgcca

SEQ ID NO: 55897 - DNA, 1115 bp, Homo sapiens
agaaagaaggaagcacagcagggaaggaaggaggggaagagcgagggagacagggagatgggaagggagggagaaagaaggagagaaggaagggagggagttaaaatttcacaagggatctatctgggtaaaatgtatgccagagccaagcatctacaaacacataaatgcccccattttcctgacatctgttcaggagatccttaacagccctgacgatctgagccagctacattagtggatgtgtcacagagctcaggaagaggcagtttgactataattctgtcatcatctggtctcctgatgagaccacagcactgcatggctgtctgaggctcctgggctctgagggactgggtaaggttactcggtctggtgtctggtggttcccagacctagctgcatgtcaccttgggaacttgctttcccccatatgttttgggtaggaagacttgctttttattgaagtagaacgatcctacagaaaagtgcacaatctgagtgtgtggcatggtgagttttcacaaactaagcacacccatgtaggcagcaccacctccaaagataaccaaggtggcttccaacgtcatggtctagttttgtctgttttttacctttatatacacagagtcatgcactctgcaccacgttgtgcctgatgcttcttcttcttcgcgtttatgagtctcgtccatgttgcacgttgggtgttttaagtcatgcagtgactcatttgctgtggcacctgtgccatgcgaggtaaggtgataatgtggagaaactagacacaggggtccaggggtccaggagcactctgcactgtcttcacagcttttctgcttatttaaaactattacaaaatcaaaagttttttttttttwaaatcagagggaggattgagaggtgagagaggagactttgattgggcgtagaaaccttttctttgggggagagaaggtgcatctaaataagttcttttatccatgagcctttctctagtgttgcagtgggaaaatgggatgctccagataggccactacaaggaacttagccaagtaatatggtattatgcttccaaaaatgaagatactgtgggagtattattaacggtgcca

SEQ ID NO: 55898 - DNA, 1115 bp, Homo sapiens
agaaagaaggaagcacagcagggaaggaaggaggggaagagcgagggagacagggagatgggaagggagggagaaagaaggagagaaggaagggagggagttaaaatttcacaagggatctatctgggtaaaatgtatgccagagccaagcatctacaaacacataaatgcccccattttcctgacatctgttcaggagatccttaacagccctgacgatctgagccagctacattagtggatgtgtcacagagctcaggaagaggcagtttgactataattctgtcatcatctggtctcctgatgagaccacagcactgcatggctgtctgaggctcctgggctctgagggactgggtaaggttactcggtctggtgtctggtggttcccagacctagctgcatgtcaccttgggaacttgctttcccccatatgttttgggtaggaagacttgctttttattgaagtagaacgatcctacagaaaagtgcacaatctgagtgtgtggcatggtgagttttcacaaactaagcacacccatgtaggcagcaccacctccaaagataaccaaggtggcttccaacgtcatggtctagttttgtctgttttttacctttatatacacagagtcatgcactctgcaccacgttgtgcctgatgcttcttcttcttcgcgtttatgagtctcgtccatgttgcacgttgggtgttttaagtcatgcagtgactcatttgctgtggcacctgtgccatgcgaggtaaggtgataatgtggagaaactagacacaggggtccaggggtccaggagcactctgcactgtcttcacagcttttctgcttatttaaaactattacaaaatcaaaagttttttttttttaaaatcagagggaggattgagaggtgagagaggagactttgattgggcgtagaaaccttttctttgggggagagaaggtgcatctaaataagttcttttatccatgagcctttctctagtrttgcagtgggaaaatgggatgctccagataggccactacaaggaacttagccaagtaatatggtattatgcttccaaaaatgaagatactgtgggagtattattaacggtgcca

SEQ ID NO: 55899 - DNA, 1115 bp, Homo sapiens
agaaagaaggaagcacagcagggaaggaaggaggggaagagcgagggagacagggagatgggaagggagggagaaagaaggagagaaggaagggagggagttaaaatttcacaagggatctatctgggtaaaatgtatgccagagccaagcatctacaaacacataaatgcccccattttcctgacatctgttcaggagatccttaacagccctgacgatctgagccagctacattagtggatgtgtcacagagctcaggaagaggcagtttgactataattctgtcatcatctggtctcctgatgagaccacagcactgcatggctgtctgaggctcctgggctctgagggactgggtaaggttactcggtctggtgtctggtggttcccagacctagctgcatgtcaccttgggaacttgctttcccccatatgttttgggtaggaagacttgctttttattgaagtagaacgatcctacagaaaagtgcacaatctgagtgtgtggcatggtgagttttcacaaactaagcacacccatgtaggcagcaccacctccaaagataaccaaggtggcttccaacgtcatggtctagttttgtctgttttttacctttatatacacagagtcatgcactctgcaccacgttgtgcctgatgcttcttcttcttcgcgtttatgagtctcgtccatgttgcacgttgggtgttttaagtcatgcagtgactcatttgctgtggcacctgtgccatgcgaggtaaggtgataatgtggagaaactagacacaggggtccaggggtccaggagcactctgcactgtcttcacagcttttctgcttatttaaaactattacaaaatcaaaagttttttttttttaaaatcagagggaggattgagaggtgagagaggagactttgattgggcgtagaaaccttttctttgggggagagaaggtgcatctaaataagttcttttatccatgagcctttctctagtgttgcagtgggaaaatggratgctccagataggccactacaaggaacttagccaagtaatatggtattatgcttccaaaaatgaagatactgtgggagtattattaacggtgcca

SEQ ID NO: 55900 - DNA, 701 bp, Homo sapiens
aggctcccactcccgggccctccggtcgaaccaagggtcccgacagggcccgaggcacccgcattcctaggagacaggagctcggccagggcgcatcaccgggtcctgctccgagccagaggatgyagtgtagacacccacccccacaccgcccctccacagagctcctctccccttggggcgtcgctgggcacagggcaggtcgctaggaatccccagtaaaaccacgctcgctcagaggttcgcggcttcctcagagggcgctggggaaagagaggggacctgatttcttcgaccctcggaggaaaagtgctcggggcctcctagggacacagccctggaagctcacctcatcttagcttaggccgcggcgaggtggggaggagagttaggagagggggagaggggctctgcgccctgcagaggcctttaattctggaggaaaaagactgggacacacccaagcgagccaaggcccgagccccacgcacctccacccacccggggcggcgcacagccagctcctgccgggcgtgagcactcgatcaagggagcaagtggaatgaaaatccagctgggggggtccccatcgacacaactgtcccgcagtcgagcttctggattcctgggagatgtggagagcctggggccggctcccgctccgcagagcagactggactgccctaggtgcctggaatgcg

SEQ ID NO: 55901 - DNA, 1368 bp, Homo sapiens
tactcaatgaattaaacacaatctctactagccaaataaaactgccttcatgtggctcaaaataagtttgaataaactgaaagataaataaaatgcacgggggacacccaggaagagagctgatgtgtgtgagcttggccaaaagacggcttttggactctgctcaactcaggggttttatgacacctaataaagctatacttagagaagacaaatattcaataaatatgagcacatacttacaaacatatgtactgttttcacytttcttcttccaaacctacttttacagcagtttattattggatatgaatttccccttctccatttctcatcacaaattaggtgggctcctaaagcgtcccatttctccctttagatttggggccccccagctgataaaggagttgtgattgcaggtggatttgatctgatttcccctgaacaggctggcggtgggaagcaggcattggagtcccacggctcactggactgcagcagcgagcccttcacggttgcaaaggaaggaaattcctagcggggcaactcttcagcgtccgccccacagacctagcacgatgtccttttctgtctcaagatacatctggctgggcttccctaaaaccgggcttagttggactccttggacctggggatgaattcttgccaactatctccaaatatttcccctacaccatgccagtgcaattcatgtctccaaaccccctctcctccacaaaaacgaaacaaaacaaaaccccaggtccaggagctcaggcccaggccggatccaagacgcggcagccaggcagccccgccgcgagcctgtgcgggcttgagccggcttggcccccggaagccccagccccgcgctcggcagcgtgcgcccagcgcccagaagaagcagctccaggcggccgcgctccccgtcccgccgcggtgcggtcggatgcccagctcgcgtccagacccgcgggatgcagacccggatcagtcaggcttgagggctgctccgcatagaccaacgtccggggaaggcacacagtggccgagggcccgcgcgcttgggctacggctgtgatggtatctgcgctgcttgcgccttggggatgggaggccgcctttgctgactgaagggcctgaagaggaggcttctggggtccctgtagcctcaccctggattcacaaaatcaaacactatctcctttccccttcaccacccccaccccacgaatacacatggtgaagagaggttcacttctgttcctgttgctgagtttcagctatgcccctcggcctcggaggatggctcacctttactgtgaatttctagctgaaagaacaatgctgagaacagggataacaaga

SEQ ID NO: 55902 - DNA, 2364 bp, Homo sapiens
ccaagatgacatttccattacttcgatgtttttatgttctatacctctctcttgctccatatattttgcagtggtgcagatatattgatccataaatgactggtattacatactgaatcaaggtacatgcattcaactctagagagaattgtttctgggtgtttttcactatgtgactcaccactgtgaaggtatgaagatgagtttatgccgctaatggggtagctttgttgtgatgtaatttcagtagctgcccatggcagctgttagtcgaaggtaaattcaaagccagatggtttagatatcacagtggtgaagatcaacagagtaccgtgaaaccaggactcggtcatggcaacctgagactgttctagctaactctttctaatgtgtttcatctggcactttgccagttcagtcccttgcttacctttccccatttgaaaaactctgcttttggagggagaatggattacaggtcttgacagaggcttggactcttgacttcttggtttgtttttttaaatttaaaaaagaatttcagttcttttgtgaccatcacattactgaagttaacattgatgtcttgctcaaacttattttttttctctcacacatttcaaaagaaccaagttaatacattgaattgagcagtctgataagaaggtagtgtgggggggtctccgggtccacagaatttccttgagtgtggattgctgtgtaggaaaagctctctaaattttttctgctggctgaatgtagagtaatgtgaccctgttgctctccgtggtgagctttccataattgagatattcctggattcattgccaggagtggacttcctttacctctgctctgccacagggtggctgctgcctttctcctttaataaggtatgttcagtttcccccactcaaagaccatttcatcccttagacattctacccaggacattgaaaatagaaacaaggccaggcacagtggctcacgcctgtaatctcagcactttgggaggccaagatgggcggatcacctgaggtcaggagttcaagaccagcctggccaacatggtgaaaccccgtctctattaaaaaaaaaaaatacaaaaaattagctgggcatggtggcaggcacctgtaatcccagttacttgggaggctgaggcaggagaattgcttgaacctggaggggcagaggatgcagtgagccaagatcacgccattgcactccagcctgggcaacaagagcaaaactccgtctcaaaaaaaaaaaaaaaaaaaaaaraagaagaagatgccagtgaaggaaagttagaaaccactgcgtgtcctaagcagttcctaactcccatggacaattctagcatgagttttgtaatagtttataattgacatataggtagaaaattgataccaagaaacccagctgttcctagagtactagtagtaactcagaaagagtagagaattgtactgtaaaatgagcagattgccttttcactttctttttctactccatcaaagtgccagcttgctccatctttgctaaacgttagattaaatgtcttatttatcatgatacctctgatgttcaaaattacatatgttgctgtaattcttatgaattgtgagcatacattcttctgcgtaaacagatggtactgttgacacaggctttataatcctagtaggctggacatcaaaattttatatttctaccattaccttaattgtagagaggttctggggtgactgtggaaagtcatctaacatgtgttctctttctttgcactgctgggtttctaaatatttattaatcattatttatactctgtaatgccatactttattggtgaatgtaccatctttgggaggtcattagatattctttagtatctaagagaaatatctacctatcagtgaatttcaaattatagtttatggtcttcagattaatgaaaagcaagttcccacccccaccaaaaattaaaatgacacaaaaatgcatcttgggaacatcacaatattttaaactgagaatactaattttttgagatttgattatatcacatatgacttagattctgatagattatgaatttgtaatcagttcaattttgtatactgaaattatctttgcactctgaataaatgaagtatcaagcaaaattttaagagtaacaatattttaagagatataaacacagttaaaatctttgaggtattttaccactcacttttagaattatcaaatgctgctttgatcttttcatcaaatcagaacagatatctatatttttattggcaacaataaaaacagtctgtgaggaaatgaaacaatccagtctttcattttcttgctcat

SEQ ID NO: 55903 - DNA, 638 bp, Homo sapiens
acggccgctgcctaagctggaaagtaagtgtgtgggctcgcgggagggcgcggagactcctgcccacgagaccctcggccctcgccccgaacacgcgccagggccaggacctgcgcgccgggggccgggggcctccctcccgctgccgcgtccccagcgcctygcggccgccgcggctttcctgccccgcctcgtgttcctgcccgcactcgcctgctgctcccctccccccggcaggcgcacaagtttcaccctccatttgcttttcccggcgattcctctccccggtctcccgtacgcgcagcgcacgacctctgcccacgctgggctgttcggattcagagctcccagccccgaacttgagcgccgcgctgagccctgctggacgccctcgcggcggcttccccgctgcctgccgccgcgcgccccaagtcgccctcgacaccactgggcgcccgccctcctcagcactcggggccggctgtctgtccttctagccccagatcctgcaccttggtcccctccccgtcttcccacgcccctgctgcccgcgcggtcttgcgtttgtccccgaagtcctgtactccttgccggtcctgcccacccctctgcctagtgcgcccctctctaccggccgc

SEQ ID NO: 55904 - DNA, 638 bp, Homo sapiens
acggccgctgcctaagctggaaagtaagtgtgtgggctcgcgggagggcgcggagactcctgcccacgagaccctcggccctcgccccgaacacgcgccagggccaggacctgcgcgccgggggccgggggcctccctcccgctgccgcgtccccagcgcctcgcggccgccgcggctttcctgccccgcctcgtgttcctgcccgcactcgcctgctgctcccctccccccggcaggcgcacaagtttcaccctccatttgcttttcccggcgattcctctccccggtctcccgtacgcgcagcgcacgacctctgcccacgctgggctgttcggattcagagctcccagccccgaacttgagcgccgcgctgagccctgctggacgccctcgcggcggcttccccgctgcctgccgccscgcgccccaagtcgccctcgacaccactgggcgcccgccctcctcagcactcggggccggctgtctgtccttctagccccagatcctgcaccttggtcccctccccgtcttcccacgcccctgctgcccgcgcggtcttgcgtttgtccccgaagtcctgtactccttgccggtcctgcccacccctctgcctagtgcgcccctctctaccggccgc

SEQ ID NO: 55905 - DNA, 638 bp, Homo sapiens
acggccgctgcctaagctggaaagtaagtgtgtgggctcgcgggagggcgcggagactcctgcccacgagaccctcggccctcgccccgaacacgcgccagggccaggacctgcgcgccgggggccgggggcctccctcccgctgccgcgtccccagcgcctcgcggccgccgcggctttcctgccccgcctcgtgttcctgcccgcactcgcctgctgctcccctccccccggcaggcgcacaagtttcaccctccatttgcttttcccggcgattcctctccccggtctcccgtacgcgcagcgcacgacctctgcccacgctgggctgttcggattcagagctcccagccccgaacttgagcgccgcgctgagccctgctggacgccctcgcggcggcttccccgctgcctgccgccgcgcgccccaagtcgccctcgacaccactgggcgcccgccctcctcagcactcggggccggctgtctgtccttctagccccagatcctgcaccttggtcccctccccgtcttcccacgcccctgctgcccgcgcggtcttgcgtttgtccccgaagtcctgtactccttgccggtcctgcccacycctctgcctagtgcgcccctctctaccggccgc

SEQ ID NO: 55906 - DNA, 1173 bp, Homo sapiens
ttttccttaatacgggagagcaaaattttgacagaaaatggttcgctagaattgagcttagattctttttatttttaaagagaaactagaagaatgcttctcttcttgaatgcagtatattgctgtaggagtatcttcgttttggtgcctgtgaaacagttatggaaaatggcaacatgaaaacgagaacaactaatgtctgaaataagtgtttctggrtgttgaaaagcatcatatgtgtgtttttatttgacacaatttgctttgcaggttgcatttatgataaacctctttgcacctggttattttatgtcagattcagtaaaataataagtcagttgtctgaccaatcagctttcttccaacacctactttgtgtagatcatggacattgaaaactattaaataggagcctttagttaaggactcaacagaaaggaaaaaaaatagaaaaaaatattttgcactcagaaacgtttatgttttggttgctacgttgtttttcagctatgtgcataatcagtgaatcttctaatttagaggtttaatttgtgtccagtaacactgtggaggatattgggaggtgtttgtaaatgccaacaggaaacttttattatgtaacagtatcatattacagcagtgtttaacccatgcttaacccgtgcttttttgacttgatgtcaagattgggaagtaaaagcaaatttagtttccctgccgcattagaaattgaaaaccctgttcagatgtatggatcacacacacacacacacacacacgacacacacacacacgattggctgtgcagatagttttgcctgcttcaggtaaaggtaacctttcagttagaaatgctttctatttgttacagatattcaaagagtggaagtttttcaactagtgatcctacacaattgaaaataaccgaaattgtattttgaccaaagtgcattccctccccaccccctactattatgtaaggagagggtgctgcatctggtgtcttatgtattatactgaagagtctaagttgggaaagctaaatatccaattattttaatttttacctgtattgtttttggagggagataagggagcagagtattgatggaaaacaagggaagaagaaactaggggcagctagtattcagccagaaagtaaaattatataca

SEQ ID NO: 55907 - DNA, 873 bp, Homo sapiens
tttttttttttttttcttttttttgcatgggacaggggcctgtgtcacagacccctgctttaaacgctggttctgagaaagctagggttctcactcaagggactccaggggaggtgtggcccaatgcaggytcagggtcgggcacagggcaggtgggggagaggcaggtgcctgtgggcttgggtgcgctcacaccagaggcacctcacttacttgtccacaaatagcgcgggggagtcgggccgcgtagactccaggtcctgcatggcgttccactcgttgatgcagctctgctcggagctgatgcagctctcatagtaggtagcccagatgagagctacacccccggggaagtagttgtgcctccgggccacttcgcaggccttgtgaagcacctgcagggcagacctggggcgaggagaagacagggtcaggcctgggaaggcacaagagatgcagggttttctcctctgacaaaggggttcaaatacgggaagggaagggcaatgattgattggttgattatttctttttgggacagagtctcgctctgtcactcccaggctagagtgcagtggcacgttctcggcccaatgcaatctccgcctcctgggttcaagcaattctcctgcatcagcctcccgagcagctgggaccacaggcgcccaccaccacgcccagctaatttttctatttttaggagagacagggtttcacaatgttggacaggctggtcttgaattcctagcctcaagtgatctgcccgcctcggcctcccaaagtactgggattataggcgtgagccaccatgcccggctgagaagtgcagtttgtaaagggctcactcttggagtcacacttacacatacaggc

SEQ ID NO: 55908 - DNA, 1167 bp, Homo sapiens
gcataaaaagatcaaactagcagtcttagggagaaaaaagaagacttccaacttatcttttcctacagtagcactgtaaagcaacagtggcccacagaagagagagcctaaaggacagttactctatttctaaaacagacaacgtgcatcttattaaatatcacccccaaagaactgtggccagccctcattggctccagcctctctcttgcttgccaagaaaaactaggatgacattgttaagctaaagatactactaaccacaaaattaattcaccatctagcttccaaagtgactagtttcctaataaatccctctgcttaacagagatgacagcgcactttcacgtgtgttcctcagtccccactccagccacatttgagtttttatgttaataaatcagtcaattctttaagttcctaagaatgaaaggaattagaatctttaactaggaaagaatgcttgaccattacgaaaaggaatttaagtatctttcctgtgaagtaagcaaataatggtgattaaacatttgtcataaggaagggatgcttgtgaattttgtcatgcacccctatgatatcaaaagtagaaaatacagcctgacggcttcactctcctaacacttcctttcccatgtgtgtctactatggtctctcatraaaaatctacagctttgttcatccagaatgaaggcctcagcagttgttgagacatggggacccacacccagttccacaatggagcaagaaagtctcttacaccaaaccaccatgtgaccagacttgcagtctgtcttggtttcccaaagacagaacaaccacattgtgaaacaataatcaacctttgctaatcctaagtggttttcattatgtctgttacaatctatatattaatagttcagtactgggcctgtgttgttcctgtctaaacttggtgttttcaaatacagacggcctactaatgccaatttttctggcaagatgcaatgcaagggcacctttgcaataataatcggtcttccaaatacaagacaaatctttaaaaccactgcttactagtgctcagattataagactgaggaaatttaaaaggatcaataaaatactgtcaaggagctttacattaaaaatagaaatcaagtttaccaaaggtttatccaagagata

SEQ ID NO: 55909 - DNA, 753 bp, Homo sapiens
cttgagcccaagagatcaaggccacagtgagctatgatcacatcactgcattccaacgtgggcaatagagactctctcaaaaaatagggcctggcgcagtggttcatgcctgtaatcccagcactttgggaggccgaggtgggtgaatcacctgaggttgggagttcgagaccagcctgaccaacatggagaaaccccctctctactaaaaatacaaaattagccaggcgtggtggcacatgcctgtaatcccagctactcaggaggctgaggtgggagaattgcttgaacccaggaggcagaggttgtggtgagctgagatcacaccactgcactccagcrtgggcaacaagagtgaaactccatctcaaataaataaataaataaaaataaaaaaataaaatatttgtcaaataaaattaaagattgttccaagttcatgctattgttttagctactaccatgtaattgcctctcagagtattaggaatccagtttgaatgtgattttaatatttaaggagataattatggattgagcagaagagaggggagattgtgattctttatttgagctaagttagaaaagggatcaaagaacggatggaaatggcatgaagcccagggtgttggcagagggtagccagagtggccaggctggttggtgcagtcacttaacacacatttcagagcactgaccacaggcccagtgccaggcactacagactgtggaaaccataaaagcagttgctga

SEQ ID NO: 55910 - DNA, 706 bp, Homo sapiens
ctagtatgtagcccacagagagggtatggatggtatcgaggttaagaacatgggcttgggggtgcacacatcttggagaaaattgagtgtatgccctttattggtgatgggaacttttgcgagaatcttaaactctttatggctcagatacctaaactttaaaatgaaaataaaaacacacacctcataggactgttagttttaaatgccataatatctgtaaggcacttggcataatgtttggcgcttagtaaatagtcaataaatacaaacaattaaaaatgcatccacgatctatcatttcctgattcagagaggaaaggaactaaaaatgtactaggattaaaacggtttttggaaggatgtatattcttgtgactaatgtttattttagaaagacggaagtgaaaaaatagctgaaataattgctttaatgggcaacatatttacaaaaactttttttttaattttcacagaaccagaaattatggtgctacaaaaatacctgcttatcttagagccaaaacatttcaattttaaaaaatggcctcgtatggcagatacataagtcaggtatgccactcctgggatcatatcggatgggaggcaggattagattacagctccagacagagcggcatgcagaggcttgccttgtgaattttagctccagatcgactgcaagaacaaaccagcaatmctgaga

SEQ ID NO: 55911 - DNA, 618 bp, Homo sapiens
ctcccagcctgaaggaactgtactcatattgccctgggttggcagcctgggttctctgctgagttaccccaaagtggtttcaggacagcacaattatttattaagtagctctggtgctgaccttaagaaaaaacagaacaacgaaagtattaagcgtaaaacctttctcttttaatgaatragtaaatattcatgttattattcctagaaataagaactctgtccgcctgggtaacatagtgagacaccatctctacaaaaaaattaaaaagctagccaggcgtggtggcatgcgcctgtagtcccagctacttgggaggcctaaggcaggaggattgcttgagcctgggaggttgaggctgcagtgagtcatggtcatgccactgccctccagcctgggtgatgcagcaagaccttgtctcaaaaaagaaaaaaaaaaaggaagaaagaaaagaaaagaaaaaagaactctgaagaccttgggaaagaatggtacttagtagttagagttctgtatataaggaaaatatttccaaatgctctatgaggtctggaaagttatttcactaagtacattcaaagttgcaacaggagatcattttttgctggatggtttta

SEQ ID NO: 55912 - DNA, 618 bp, Homo sapiens
ctcccagcctgaaggaactgtactcatattgccctgggttggcagcctgggttctctgctgagttaccccaaagtggtttcaggacagcacaattatttattaagtagctctggtgctgaccttaagaaaaaacagaacaacgaaagtattaagcgtaaaacctttctcttttaatgaatgagtaaatattcatgttattattcctagaaataagaactctgtccgcctgggtaacatagtgagacaccatctctacaaaaaaattwaaaagctagccaggcgtggtggcatgcgcctgtagtcccagctacttgggaggcctaaggcaggaggattgcttgagcctgggaggttgaggctgcagtgagtcatggtcatgccactgccctccagcctgggtgatgcagcaagaccttgtctcaaaaaagaaaaaaaaaaaggaagaaagaaaagaaaagaaaaaagaactctgaagaccttgggaaagaatggtacttagtagttagagttctgtatataaggaaaatatttccaaatgctctatgaggtctggaaagttatttcactaagtacattcaaagttgcaacaggagatcattttttgctggatggtttta

SEQ ID NO: 55913 - DNA, 618 bp, Homo sapiens
ctcccagcctgaaggaactgtactcatattgccctgggttggcagcctgggttctctgctgagttaccccaaagtggtttcaggacagcacaattatttattaagtagctctggtgctgaccttaagaaaaaacagaacaacgaaagtattaagcgtaaaacctttctcttttaatgaatgagtaaatattcatgttattattcctagaaataagaactctgtccgcctgggtaacatagtgagacaccatctctacaaaaaaattaaaaagctagccaggcgtggtggcatgcgcctgtagtcccagctacttgggaggcctaaggcaggaggattgcttgagcctgggaggttgaggctgcagtgagycatggtcatgccactgccctccagcctgggtgatgcagcaagaccttgtctcaaaaaagaaaaaaaaaaaggaagaaagaaaagaaaagaaaaaagaactctgaagaccttgggaaagaatggtacttagtagttagagttctgtatataaggaaaatatttccaaatgctctatgaggtctggaaagttatttcactaagtacattcaaagttgcaacaggagatcattttttgctggatggtttta

SEQ ID NO: 55914 - DNA, 847 bp, Homo sapiens
cccatttgctgagagccacttccactcaataaaaccttgctctcattctccaagtccacgtgtgatccaattcttctggtgcaccaaggcaagaaaccccgggatacagaaaccccgggatacagaaatccctctgtccttgtgataacgaagggggtcgaattgagctgatgaacacaagtcacctatagacgggaaactaaaagagcaccctataacacatgcccgctggggcttcagaagctgtaaacaatcacycctagacactgccctggggtcggagctctatatagccttcccatctccattctcccttagaggtttgagcagcggggcattgaagaagcgaggcactcccccgtcacacaccctgtgagggggacgagggaacctttcccgtttcggtaatacagagcacatattaataatggccagaaaagaaaagcagacagtgaaaattttgttttgttggacttcatatttattatcatgccagtaaaaaaattaataataaaaaaagaataaataaataaaggccaggtgcggttcctcatgcctgtaatcccagcactttgggaggctgagatgggtggatcacctgaggtcaggagtttgagaccagcctggccagcatagtgaaatcctgtctctactaaaaatacaaaaaaaaattagctgggcctggtggcaggcacctgtaatctcagctacttgggaggctgaagcaggagaatggcttgaacccaggagacagaggttgcagtgagccgagattgtgccattgcactccagcctgggcaacaagagcaaaactccgtgtcaaaaaataataataataattaataaa

SEQ ID NO: 55915 - DNA, 760 bp, Homo sapiens
ccattcccagaggcagccactgctactggttcgatgtgtatccttctcgagaccctccatgcatgtacaagtgtccatgtttgtatagatgtaaacataatgtgtgtgcctacatacatatgtagatacacatatatatacacatataccctcaaggaatgtacatttggaatggaaacttttattttaatcatctgcattacttagtacagtaggccttgtagttccttttctcccgacctctttgtcttgggaagtggcataagcattccagatctttttgaccaccttcttgcttctgtggctctcggtcctggctgcacagtaaaatcacttggtgagctttaaggaccatcacctgtgccattttcccaaccagttaaaacagcctcgctcggcagggatcgggggtccctctgtgtggagggtgttggraactgaatcaggtgtagcatcagtaggcctggcagagccacggaattcaagctgcagtgtgttccacaggactggtagacctggacaagtctgtgctggcaaggaaatgtagaatcccaaattccatgcagattgacggtgaatcctgccaggttgccttccaccacagctagctcgtgacttcacccttcattgggccaggcagaatgaccggagccagcgccactgtgctgcagaagcagcaggcccaaatgctgcaagagttaataaatgtccagtacccacggagaggagaggaaactagggtgcttgatgactaaacacc

SEQ ID NO: 55916 - DNA, 1623 bp, Homo sapiens
ttgcgccctgatgtttattgcagcactattcacaatatccaagatattgaatccacttaagtgtccatcaatgaataaacagataaagaaaatttgttatatacccacaatggaatattcagccttacaacacagcctccctttccatcccagttcttacaccctctattatttacaggacctcattcctagccatttgtcagcaaatcccaatttatctgtttgctgataagatttaagatgttaggggcagggtgtggtggctcacgcctgtaatcccagcactttgggaggccgaggcaggcagatcacgaggtcaggagatcgagaccatcctggctaacatggtgaaaccccgtctctactaaaaatacaaaaaattagccgggcgtggtggtgggtgcctgcagtcccagctactcgggaggctgaggcaggagaatggcgtgaacccgggaggcggagcttgcagtgagcagagatcgcaccaccgcactccagcctgggcgacagagcaagactccgttgtaaaaaaaaaaaaaaagaaaaaaaaaagatttaagatgttaccatcccaacataatatgaaactcttaaagttcatggagaccccttcaggacccaaagatgttcatttttgatggtgggatattaaaaatcataggtatgaagggaatatggaatttcaaagctggtctgtttcacgaccctcttttgatgcattagaaaaattaagatccagagagaggaagaggcttgatcagatccacgcaataagtcagtgactgaccaaggccactacacatgtcagatccaagggctccttgcccattcagatcataacttatagatgcccatgcagtcagcttgaaagttaaccttgaccccagaggtctttgtgatgcttggcaaacatactggcttgccctctaagctgaggggataggaagcaggtgtcggttttgttaatattgtgagggatcccaaaggttatatgaaccaattccataatataacaactttctgagaggaagtggtaggagaaagaaagtgaggaaggttaaagatacttgttcctaaatttgtatttaaaaccagtgagtttcaaatctgggctatgactcagaaacacctgtaactatattcacaaactagggtaactaggggaattactttaaggtgggttataaacataaaagctaaaactataaagtctctagaagaaaacacaggacaaaatctttgccatctggggttggcaaagatttcttaataggatgcagaaacagacagctctatgaaaaaagagaaaacttagacttaattgtacttatccaaaacactattaggaacgtcaactggcaagctacagaggaggagaacatatttgcaaaacatacatttgacaaaggacatatccaagatgtacagtgaactcataaaactcgaaaatataaagaacagtctaactgaaacatgaacaaaagacttgaggagacgtctcacaaaagaaggttgcccagtaarcacatgaccaggtgctcaacatcattaaatatcaggaaaatgcaaccaaattctcttatataattagtgggagtgtaaggaaaatagcacagccat

SEQ ID NO: 55917 - DNA, 933 bp, Homo sapiens
attcctcaaatacatgacatttatcaacatatttctaaataacccatgacccaaagaagaaatcacatggaaaactaggaaatatttcaaactgagtaataatgtaagtataatatatataggtatctggttactgccactgcatacaaaccacttcaaaactaagtggcataaaaataatcattttattgtactcatggattctacggttcaagaattcagacacatggggatgacatgtctcttccacaatgtctggtcttcagctgggaagactggaacaactggggcaactaatgactgagactagaattgttgggtggtatctttggcccctaggcttaggatgaccataggctcagctcattgaagtcactgaacaaaacatccacaaacggcctctccacatagcctgaaatttctcatactatagaggcttcaaggcagccaaactttcttcatggtcttcctgggctacaaaagtgagtgtcccctctaaatattggtaaagataagaaccaaatgaagctctttgctgatggaacaactgctgtataaaactgtctggctttttttttagtaaacatacatatgtacagcaatatagataaacttcaaagacattatattaaatgaaagaagttaaagacaaaataatatatgcacacatgattccatttatatgaacaggcaaaaccaatctagtgtaatggaagtcagaagagcagtaccttatgttgtgcctcaaagacagcacaaaagaactttcaatattattaagtaaatagaaattattacaggtgtgatgatagtattgtgcttatgtagtcaaatcccttatggttgaaatatgcacgcagcaagtgtcatgatatctataagtcactttcaaatagctcagcaamatttcaaatacctctgtataaagagaga

SEQ ID NO: 55918 - DNA, 583 bp, Homo sapiens
tttgataaagaatatctattcaaaaactacagcaaacatcacctttttatgaaacccaagaaattaggatgattattattgcaatactctgtaagagttttctagaggacataacaaaataaaataaagcatgacttttaatggaagaacaaaacgctactattaggtgacgtaatagtcatcttagaaaactcttaaagcaagtcagtcagtaaaatggccacaaacatgataggtgatatatttaagagttttggcaaagatggatckgagagtcaggggaaagaaaagaatatggaaagaacccattttttgttgtggtggttgtttcttttttcttttttgttttttaatttcagagaggatgttcacctatggaacgggtatatttgaagtaggtagaaggaagaggacgaagagaatgagcctgattttgaatacaatgttttcaatatgactgatgcattttaaggaagattccatttatgtattaataaggataaattacactatcctgtaataatagcttccaaatcttggtggcttgtaccaaacaagacttatttcttactctcaaaaaata

SEQ ID NO: 55919 - DNA, 1025 bp, Homo sapiens
ttataataatttaaataaaataaatttagtacacataaaatttgtatttttttttttgagatggagtctcgctctgtcacccaggctggagtgcagtggtgtgatctcgtctcactgcaacctccacctcccaggttcaagcaattctcctgcctcagcctcctgagaagctgggactacaggcrcccaccaccacgcctggctaatttttgtatttttagtagagacagggtttcaccatattggccaggctggtctcaatctcctgaccttgtgatccacctgccttggcctcccaaagtactgggattaccagcgtaagccactacgcctggccaaaatttgtattttgaaggctttcataggttcattccatatgtcccataaactactaaattcctcagcctctcatattctactgtattcattcaacatatatttactgagcatttaccacaatcagaccccattccaggtaaactttgagagttttcaagactatgatcctagcagttttaaataacatattgccatatgacctcacccaaatcctaacatttcatagttagtctaaaaggtgtgtgttctacctttgatcaccaggattagcaaaaatttttcaaaaatttggaatcatatcaattcaaggccacttataagctatcacccatatttagagtggatggtgtagggaattagagagcaaaagcaggttggaggcctatgaaccactcacccccctcaactttgtaatctcaatgtctacatttacagacctgtggacagctccagagcacctccgccaagccaacatctctcagaaaggagatgtgtacagctatgggatcatcgcacaggagatcatcctgcggaaagaaaccttctacactttgagctgtcgggaccggaatggtacatctaaacccattcatgtgtcccctctgggagtgagccaacctgctttctaggcttactgagaccctaatctgtctgtaaccacatcacaattccttcaaatgcaaaat

SEQ ID NO: 55920 - DNA, 1528 bp, Homo sapiens
atagcacgggccacagaacagggaagagaaacttacttttcatgtcagcataatttccaccaagtaaaactgtggttggcagggcacgggggtgcgcacctgaagttccagatactaggcccaggagttcgaggctacagtgaggtatgaccgcacagctgcattccagcctgggcaacagagcaagatctcatctctaaaaaaacaaaaacaaaaacaaaaacactgcagggaaggccaaattgcattgacaccattaagataaaatgtgtacatacagcaaaactccaccacaatgctatgagcagagtctcaaaattaaaatagttaaatatgaaggacacatttttgcaagtttaatgaaatgaaaatggtggctggaggtggggggrtgggaatgaattgccaattgtatcatatcaaatttgttttactagagcaaagggaataataatgagagcagattataatggatgtctctgtactgggatttttgggtgattttgtttcactacatgtcagtatttgttgcccaggctggtctcgaactcttgggctcaagtaatcttcctgcttcagcctccccagtagctgggactacagttatgcacaactgtgcctggatccaattttccaaaattatatgataaaaatatagtagttttctcatttaaaaattttaaatttaaaatagccacaggaaatttcatcttatgtaagcaaaatgtctgaaggtgtcctgatttcctgattgaacaaatccttttttttttttggctcagtcacccaatctggagtgcagtggtgcgatctctgctcactgcaacctccgcctcctgggttcaagcaattctcctgcctcaacctcctgagtagctgggactacaggtgtctgccatcatggctggctaatttttgtatttttagtagagacaggggctcaccatgttggccaggctggtctcaaactcctgacctcaagtgatccacccacctcggccttccaaagtgctgggattataggcatgagccactacggccagcctttttttttttttttttttttaggacagtcttgctctgtcacccaggctggagtgtagtggcatgatctgggctcgctacaacctccgcctcccgggttcaagagattcttgtgccacagcctctgaatagctgggattacaggcaaacaccaccatgcctagctatatatatatatattttttgagacagtttccctctgtctgttgcccaggctggagcacagtggagtgatcttggcttgctacaacatcctccttccggggttgaagcaattctcctgcctcagcctcctgagtagctgggattacaggcgggcaccaccacacctggctaattttgtatttttagtagaaagggggtttcaccttgttgtccaggctggtcttgaacacctcacctcaagtgatccacccgcctcggcctctcaaagcgctgggattacaagcatgagccacagtgcctggcctaatttttgtatttt

SEQ ID NO: 55921 - DNA, 994 bp, Homo sapiens
tgcatgctgtgtacccacatgaataaattatgcacacacactcctagtctaagcagagggtagatgggttctgatcaggaaaccagtctggcaacaggccaggctgtggccaggggtgagggctggctgacggggaagcaagcatattaaaatggtgccatatattgactgcctttctctactctttcattgcctggttttacactgtttccttcaatatcttttcttaactgtcataaaaaaattatcatactggccaggcttggtggctcatgtttctaatcccagcaatttgggaggtggaggctgaagaatcacttgagcccaggagttcaagaccagcctgggcaacatagtgaaaccctgtgtctacaaaaaacacaaaaatcagctgggtgtgtggtggtgtatgcctgtagtcccagctactggggaggctgaggtgagaggatctcttgaacccaggagttcaaggctgcagtgagctgtaaacatgccactgcacttttcagcctgggcaacagagcgagatcctgtctcaaaaaaaaaaaaattgccatgctgacaaatgaccttatctttaaaagtaaccatttttgcaggatatgctaagagaattagcaaataattagctttgcttgtgagtctctcatttcaactggcaaatgttctgcttagaaaatcactgtagaacagcatcttctgttcccaccataatagactatcttattaaccagataaacagtgtatggctttattataaattctcagcaattttttttttytgagatggagtttcgctcttgttgaccaggctggagtgcaatagcacgatctcagctcactgtaacctccgcctcccaagttcaagtgattctcctgcctcaacctcccgagtagctgggattacaggcatgggccaagatcgcaccactgcactccagcctgggttagagagcaagactccgtctcaaaaaaaaaaaaaaaagatgca

SEQ ID NO: 55922 - DNA, 585 bp, Homo sapiens
tttcactacaaaggacattatcaggataaatgggaacccatagctcattgctaaccccggctctgatggctgcattctagtcatgtagaagagggccccttgtttgcaagacatacaccctaacagtgatcaaagggtaatgggtatcaagctggtaacggttcagggaagaaagttcttcatactgtattcgcaacttctctaactttaagacgtttcaaaacacaatttctcaagagctccttaccttcttcatcatcgccccactctttctcatcrtcctcatctgctccgcgcttctctgggcctctgatctttttcttcttttttaacgctttcttctcagcccgagctcttttccgttgttcagccttttcttcttcttgctgcacaagggctgcttccttctctgcagcctagaaaagtgggaagatgatgcatcgctggatgtggcaattacattcactgtactgatttgtcatgaaaggggagaaggagtggaaattcattactaatgaaaagcagagatcaggagaaaaacgtggacaggctcacggctgttccacaccagggctcattcaggtt

SEQ ID NO: 55923 - DNA, 1412 bp, Homo sapiens
acatccataccaaactgagccaaaatagctaccagaggtgccaaagacttcaaacattgtcattaccttcattctctgctcattgacacgagctaatcgggtttcagttttctgaacagctatatcccaatcttctaaagaaccttgaaagaaagagaagcaaaactttcactctttaggattttgaaggatacaatcacataaatttttcttaatttctctgtacctccagaagagatctctcccatcaaacaataagaaaatgtaatccctgtaggcttgaagttcagaattcaaatagtccttctaagtgggtttaaaatgtccctctcctttcaggagagacttgaaaaccagaatatgatctattaagggctctaaatggcaagaatatgaaaacgaacgttctaatgcaaaagtacatttatattaagactgaagaattttaagagctactcaaatgttgaggcatttatttcttattttttggtggtctttgmaagccagttctgaggggtccatacccaaaatccagaccaatacccacagataagttcacattatttttctattggttctagctaacactgaaggctctgaaatttaacaagggatgcaaaggacacattgagccatttgcctctccaagctcctttgttggatagatgttgtactagagcacagtgactctcaaaggagggatcctgcccatcaagagacatttggcaatgttaagagacatttctggttgtcatgtttggttgtggtggtgaagctgctactggcatttcagggctagaagccagggatgcccctaaacattgtataacgcacagtcccccccacagagaattagaaccctgtgctacagtgacatcacagagtcctccttgtagctgcagaatttgagaagagctgcaggaggactcattttcaggacacttgtgacagtctaatcatagggcaccacctaaggtggcagcataaacacagtctgtccccagactgtaaccagatgctcctacttgagaccaaacagcaaatgggttaggctccaagccagaagagagctgggggtcccaccttctgtcctctccatggtgagtaacacttcgcagacgtgctctgggtagtcactggtgcactggacggcccggtgcagagccttccggcagtgctgggtgtcaccatgagctctaaggcagaaaacaaaaagttgctgccaccaggacacaaagtggaaggcactcgaagggagaggccgtcttctcccaggtagaaactcactcttcagtaactctagcttctgagaagaccttagctttcagatctatccatgatgctttctccttccagagtctctacagtcacctacgaagtatttccctgaagcactctctccctcagccatg

SEQ ID NO: 55924 - DNA, 1412 bp, Homo sapiens
acatccataccaaactgagccaaaatagctaccagaggtgccaaagacttcaaacattgtcattaccttcattctctgctcattgacacgagctaatcgggtttcagttttctgaacagctatatcccaatcttctaaagaaccttgaaagaaagagaagcaaaactttcactctttaggattttgaaggatacaatcacataaatttttcttaatttctctgtacctccagaagagatctctcccatcaaacaataagaaaatgtaatccctgtaggcttgaagttcagaattcaaatagtccttctaagtgggtttaaaatgtccctctcctttcaggagagacttgaaaaccagaatatgatctattaagggctctaaatggcaagaatatgaaaacgaacgttctaatgcaaaagtacatttatattaagactgaagaattttaagagctactcaaatgttgaggcatttatttcttattttttggtggtctttgcwagccagttctgaggggtccatacccaaaatccagaccaatacccacagataagttcacattatttttctattggttctagctaacactgaaggctctgaaatttaacaagggatgcaaaggacacattgagccatttgcctctccaagctcctttgttggatagatgttgtactagagcacagtgactctcaaaggagggatcctgcccatcaagagacatttggcaatgttaagagacatttctggttgtcatgtttggttgtggtggtgaagctgctactggcatttcagggctagaagccagggatgcccctaaacattgtataacgcacagtcccccccacagagaattagaaccctgtgctacagtgacatcacagagtcctccttgtagctgcagaatttgagaagagctgcaggaggactcattttcaggacacttgtgacagtctaatcatagggcaccacctaaggtggcagcataaacacagtctgtccccagactgtaaccagatgctcctacttgagaccaaacagcaaatgggttaggctccaagccagaagagagctgggggtcccaccttctgtcctctccatggtgagtaacacttcgcagacgtgctctgggtagtcactggtgcactggacggcccggtgcagagccttccggcagtgctgggtgtcaccatgagctctaaggcagaaaacaaaaagttgctgccaccaggacacaaagtggaaggcactcgaagggagaggccgtcttctcccaggtagaaactcactcttcagtaactctagcttctgagaagaccttagctttcagatctatccatgatgctttctccttccagagtctctacagtcacctacgaagtatttccctgaagcactctctccctcagccatg

SEQ ID NO: 55925 - DNA, 1412 bp, Homo sapiens
acatccataccaaactgagccaaaatagctaccagaggtgccaaagacttcaaacattgtcattaccttcattctctgctcattgacacgagctaatcgggtttcagttttctgaacagctatatcccaatcttctaaagaaccttgaaagaaagagaagcaaaactttcactctttaggattttgaaggatacaatcacataaatttttcttaatttctctgtacctccagaagagatctctcccatcaaacaataagaaaatgtaatccctgtaggcttgaagttcagaattcaaatagtccttctaagtgggtttaaaatgtccctctcctttcaggagagacttgaaaaccagaatatgatctattaagggctctaaatggcaagaatatgaaaacgaacgttctaatgcaaaagtacatttatattaagactgaagaattttaagagctactcaaatgttgaggcatttatttcttattttttggtggtctttgcawgccagttctgaggggtccatacccaaaatccagaccaatacccacagataagttcacattatttttctattggttctagctaacactgaaggctctgaaatttaacaagggatgcaaaggacacattgagccatttgcctctccaagctcctttgttggatagatgttgtactagagcacagtgactctcaaaggagggatcctgcccatcaagagacatttggcaatgttaagagacatttctggttgtcatgtttggttgtggtggtgaagctgctactggcatttcagggctagaagccagggatgcccctaaacattgtataacgcacagtcccccccacagagaattagaaccctgtgctacagtgacatcacagagtcctccttgtagctgcagaatttgagaagagctgcaggaggactcattttcaggacacttgtgacagtctaatcatagggcaccacctaaggtggcagcataaacacagtctgtccccagactgtaaccagatgctcctacttgagaccaaacagcaaatgggttaggctccaagccagaagagagctgggggtcccaccttctgtcctctccatggtgagtaacacttcgcagacgtgctctgggtagtcactggtgcactggacggcccggtgcagagccttccggcagtgctgggtgtcaccatgagctctaaggcagaaaacaaaaagttgctgccaccaggacacaaagtggaaggcactcgaagggagaggccgtcttctcccaggtagaaactcactcttcagtaactctagcttctgagaagaccttagctttcagatctatccatgatgctttctccttccagagtctctacagtcacctacgaagtatttccctgaagcactctctccctcagccatg

SEQ ID NO: 55926 - DNA, 733 bp, Homo sapiens
tctcaatgggcagctatctgcatcagtaaatgaatacgatgattagataaggtttgcctgaggtaaggacagaggtggaggaacagtcaaatacatgctccgaaaggctcagggaaagaaactttctcctcattatcattttggtgccataaattccattttacttctgcagaaattcaggttagaatggcatttattagatgcctatcatgtgggaagcacagttctacaagattttcaaacatctcatctcaaccttatataaaaagacacccaatggatgtgaaagaagtattgttacttacagagcagcattatktgcagaggaggaaataaataccataggagcttagtaatttacccaaagcccacagttatagccaagtttgtctgtcatttttttcctgccaatggccatttctggacatctaggcctggagagctctctctggagagtagatttaacaggaaagtttcatagctcctcgtgtgatcagcagtgggatgctggggtctaataataatggaccaggaaccctgagtttgacttcagctcctttgcctctgccgtttactcattttatcactttggaaaaattacttaatctcctgtttcctcatctgtaaaatgcaggtagtgactgctaccttgcagtgctaatgcaagaagaaaaggtaactgctgtaaagttcctagcacataataggcaatgaataattaataattataaat

SEQ ID NO: 55927 - DNA, 902 bp, Homo sapiens
ttctctttcaagaaaagaatataaaattaaataagtgtaagagattttagaactcatttatactgcataaattttaccaagacaatcatttttgaaagtttgaggctgcttagcaataatcaattcatattaatgtttattatgtcagtagaatgtggtttgttcttttaacagtagtattgatactgtgatggaataatctataattttatactgaattcaaaacatttagcagtgtcttagtggtaagctgctgtggctcatattgttcctgtgttgccaatgtgggaaataaaacaaccttttaaatattgtgtttgtgcctctgtactttttggagtcagagtcagtgcaagtacatacgcaggagtaaataataatagatatagatctatttatagtaacttgtaagatcttagaagtaaacttatggtacttaagaaatttgcctgggtatggtggctcacacctgtaatcccagcactttgggagcccaaggtgggaggatcgcttgagtccaggagttcaagaccagcctaagcaacatggtgaaaccctttctcttcaaaacrtacaaaaaaattagctgggcgtggtagtgtgcacctgtagtcccagctaatcgggaggctgaggcaggagaatccttgagtccaggaggctgaggctgctgtcaactatgatcacaccactgtactctagcctgtctcaaaaaaaaaaaaaaaaaaaaaattcattggtgctgcttcttgtttggtggaaaaaaaaaaatccaaatatgagcttagtacatctgtgcctacaatttgcaagaattttggctgcagtctaggccaataatatatcctctttatttagaaggagttgactttgctcaagcagttttagcattgtactattca

SEQ ID NO: 55928 - DNA, 537 bp, Homo sapiens
agtactattatcccatagagttattatgtgagaatgaaacaacttagcttatgtggagtaacttagaatgatgcttaggacataataagaactcattaaatgcttgtcatcgtttgctattattagatcgtttccacatcatgggttgtcatgtgtctggaccctttgtgaagaaatctggctttattaacaatatttaacttttcagttattctttcattcattcacccaattcagaaaataggtaccaaagattcactgtctttctaatcttcccaaccaccaattacagagagtcaaacatttttatggcaggattcctcgacaaacactcaaactggattaaagactgaatgtygttatttaaggtcaaagttatttaagaacccttctaactttatttttacaaattgaattgaactgaattgagtgtgctaactacactggtgcagcatctttgagttacctttggttctgctggtatttttgttctgttttggttttatctattcttgaattgatctaacggatcccatt

SEQ ID NO: 55929 - DNA, 563 bp, Homo sapiens
tactggaatttacagaatcagttttcagaaaatagcacaaccaagaaaggaacagcattttggaaagtggcttttttggccaggcaccgtggctcacgcctgtaatcccagcactttgggaggccaaagcgggcggagcacttgaggccaggagtttgagaccagcctggccaacatggcgaaaccccgtctctactaaagactcaaaagttagctgggcatgatggcggatgcctgtagtcccagctgagacaggagagctgagacaggagaattgcttgaaccctggaggcagaggttgcagtgagctgagatggtgccactgcactccagcctgagtgacagagggagactctgtctcaaagaaaagagagtgtttttttccccaaactaaacaagttttcctattactstgtcacatcagattttttgtttaatgtccgtaagttaatgcctagatttaatttagattttcatcacatagccactactcagaaaggctcagcttgtccatgatttcaacatttccttccatgaaggtctaaagagcaactcttaatact

SEQ ID NO: 55930 - DNA, 512 bp, Homo sapiens
taaaaaaggttctgacgttcccttcagaatattcacaaaagtcttcaccaatatgagagagaaataatagtcatagtttgttcatatttagatcagttgaaatgtttctttttaatttcctattttcccagtgataattcatcatgttgattttctagcatttttgttgcagatatacagaagtttaactcattatgggtccagtagactttgtgagctaggcttgatattgaatttgtactgtgactcattttaaagaacatgcattctgaattctaaacaactgacttaaaagacagctttgcaaacacaagcctttttaagctgagaaacaatctctgtgtgtatccattgagtggagaaatatttattaagtgtctgckatcttctgggcacattctttgagcaggagatataatgatgaacaagatagacaaggtcctagttttctagagcagatatttagtgggagaggattgatacaaaggaagtaaataaataaatggagaaga

SEQ ID NO: 55931 - DNA, 592 bp, Homo sapiens
tggtctggaagtgggtgtttacctctatgaaatattcaggcaaggtcctatatcgatttataatagacctttgtaattaaaaagataattttttattgataagtcaagccaggcatagatacatatctctttctaaatacaagtaaacagagaaaaatctactgrtgcctgtgataaactgatagattcccattcttcaccttaattctttagacttccttcatgtgtggctttggggttttccctataaaggcagggcatacttccctaccccatgcaacttgctttggccgaaacattgaggcaaaagtgagggtgtgtctaggcctcaagaggccttgtatgtttacgctggacctctttgggcttctgccattgccaggtaaaggacagtctgggctaattggtgggttaggaggggtatgagagatacctaaagcacagctgttgcagtccagcagccccaaacagaccccgctctgctgagtccactagtcacctgcagacatctgagagcttgccaagatcagccaatcaccagataacccacagacacataataataagtgactgtcattttaagctattgggt

SEQ ID NO: 55932 - DNA, 877 bp, Homo sapiens
taaggcctaactttcctggcttccactcctagagtttcttttttttttttttttttagacagagtttcactcttgttgcccaygctggagtgcaatgtcgcaatcttggctcactgcaacttccgcctcctgggttcaagtgattctcctgcctcagccttccgaatagctgggattacaggtgctcaccaccatacccggctaagtttttgtatttttagtagagacgaggtttcaccatgttggccaggctggtctcgaactcctgacctctagtgagccacccgcctcggcctcccaaagtgctgggattagaggcgtgagccaccacgcccagcccagtcctagaatttctactccatgctggatagtttcatatgtccaatatgcaacgtaacataacccaaatcatatgtattatcctttcttaacctctactcttcaaattaagttcatttaattacaaatcatttttctccaaagaattggtatatgaatttttgcttctatcaaataaaataacacataacatagtataacaaaatgtacacaaagtttgaagttaaaaggagaacttacaggttctcactgggcctctaactgtggtgacatgtgcaagtttctttacttctctgaggcatataccattacctaccctagctagtcaaaaattctatataaaatgcctaacacagggacacattttggaaagaaaatagcaagaggctaagggcatggggcatggattagaatttagctgttgagatctctcaccacgaacactagctgagtgatcttgggcaagtttaataacttgccccaaaaaaaaaaaaaaaaaaggaagtcatttatttacttatttacttatcagtaaatg

SEQ ID NO: 55933 - DNA, 1205 bp, Homo sapiens
tgcatgctatgtttttcctagatcattttttcttttttaaaagctgcagtctgacctatgaaatgagaacttcagtgcttgtgacaaaaatcagtgatgaagcaaacagaaaatagccagtagttggcaggtttgaagatctgggtgtgagtactagctgccacctacagcagtttgaccctggacaaatcctgtgacctccagagcctcccttcctcctctgtaagatggagatgatgctgggctggctttgtctcccttgcatggtggctgtgaggaccaaatgggatggaggatttgtaagaacagtatgcacttcaattttatggcgtcagtgccagacaagggtaaaggaatgattagacccaactctctaagagcttcccgatgaaggacaatgggaaaagattgggtaaccctaaaaatacatcatccagagcccgaatctgayggctgggatgcagtctcagcacccctgcccctcagcccaccggcctgctagtgcactgtattccgatggttgtgagggaaggccctgttcccaagtggccatgaaaaatctacctggagaaaaccaagacctcagtttaacaaagcaaactggctcagacaggaaagtcatttaaaagaagtgggaagaaggcaatggctacagtgataagtgccgtagagtgagagaagcccttcatctctgttttcaacaagatggaagcaaggcgcagcaaaaggagaacccttggtggggttggaagaggtgcccccaggcgggactgcagctggggtgccccatgggtggggttccaggaggcagcaccagcagggcctctgccatcccagcagggctagtgaggtcatcaagtccagaaggtgacagctgtcttggtgcttgggtcacctctacacattccttcccttctcaataggcccccaaacactattgtaacttaaggggggctaggcctacacccagggacctgggctctagtcccagttctgtttctaacttgctccttgcctttgggcctcagttcttctcacctataaaactggagtgactaccctccttactgggttgggtaaaaatgtggcctgattccaagacttactgctggcacagtagtttcggaccatttctgcatcgcccaaggctctgtgtattttgtgtgcctaggaataaccgtggctagtgtttatcatgtaccatg

SEQ ID NO: 55934 - DNA, 1486 bp, Homo sapiens
cttaactgggggatgaatgcggaagctgcagcaaaggagagtctacagactgtgtggtgtaggaggagcacactggggctgtaacattgtggaagtctggaggagaacctggagtgatgtgactgagtttagtgtggagcaagttggattggagaagcaggccaccttcttccaggggcagatatccagcaaatgcaattggaagggtgattctggagttcataggagagrctgaggcaagggatgtcaattttggaatcatctggaaagaagttgggccgacacaagaggtggagggagagggtagaaaaggtacagagaacagggctgaagacagaatctaggtctaccgagaaggagcccatgaaaggaacggaaactatcaggagaaaccataagggaaggtcaggactgtgcggggtgtcaggactcaggagaagagggaggttcaatgggggccggggcccgggctgcagggacaccacggaggagggcgcccaagaaaataggtttagatttagaaagaaggagatctctgggctagttcaagataactatttgagtggtggcttatataaaccaggttgccactccttggggcggggcatctgtatctcggatccaattggttgatggggagatacaaaggttcacctctttgcttccattacggagggccctgaagggccaccccagctccatagcttcccaagggatccgccgaggcctctgtggaaagcagcacagttaaagttcattctctgccgaatcctgtttccctcactctctcaaggtgttgttcccaagagcacgtcccaggagacctcccacataccatctccatctctgtgcagagtctgtttcctagaaatccaaccggaggtacagggacactgagaaagggcgcaggaaacaaaacttggcctctaacggagcagtttaaacagacagggatggttagaaagactcagagaaggtggtgtgaaggaaagagcctggggaatggggagcgaagaggaagcttattcgtagtagaagatggattttcaaaagccggatggaagagagaagagtggagtaggcccgaggaggggagaatgctggaagagggtaagggtgaggggaggtcagtattcaccaaagttaataacattaaaacagcaatgaggaaagagagggttggaaaacggcctggagtgactttctagcagtaggagagggtgagtgatgaatgaagctctgggctagggtagtccctctccagcagtatccccagtaacattaaacgtttacagtggagaaccaatggaaatataatatgtaattaaaaattttccgtgagccacgtttaaaaaaaaaaatcaatataaagaaacaggtgaaagtaattgtaatgatatattttatttaacacagtatatctaaaatatcatttcagcgtgtgtcaatatgaaaaatcaacgataagatattttacattttttcc

SEQ ID NO: 55935 - DNA, 1486 bp, Homo sapiens
cttaactgggggatgaatgcggaagctgcagcaaaggagagtctacagactgtgtggtgtaggaggagcacactggggctgtaacattgtggaagtctggaggagaacctggagtgatgtgactgagtttagtgtggagcaagttggattggagaagcaggccaccttcttccaggggcagatatccagcaaatgcaattggaagggtgattctggagttcataggagagactgaggcaagggatgtcaattttggaatcatctggaaagaagttgggccgacacaagaggtggagggagagggtagaaaaggtacagagaacagggctgaagacagaatctaggtctaccgagaaggagcccatgaaaggaacggaaactatcaggagaaaccataagggaaggtcaggactgtgcggggtgtcaggactcaggagaagagggaggttcaatgggggccggggcccgggctgcagggacaccacggaggagggcgcccaagaaaataggtttagatttagaaagaargagatctctgggctagttcaagataactatttgagtggtggcttatataaaccaggttgccactccttggggcggggcatctgtatctcggatccaattggttgatggggagatacaaaggttcacctctttgcttccattacggagggccctgaagggccaccccagctccatagcttcccaagggatccgccgaggcctctgtggaaagcagcacagttaaagttcattctctgccgaatcctgtttccctcactctctcaaggtgttgttcccaagagcacgtcccaggagacctcccacataccatctccatctctgtgcagagtctgtttcctagaaatccaaccggaggtacagggacactgagaaagggcgcaggaaacaaaacttggcctctaacggagcagtttaaacagacagggatggttagaaagactcagagaaggtggtgtgaaggaaagagcctggggaatggggagcgaagaggaagcttattcgtagtagaagatggattttcaaaagccggatggaagagagaagagtggagtaggcccgaggaggggagaatgctggaagagggtaagggtgaggggaggtcagtattcaccaaagttaataacattaaaacagcaatgaggaaagagagggttggaaaacggcctggagtgactttctagcagtaggagagggtgagtgatgaatgaagctctgggctagggtagtccctctccagcagtatccccagtaacattaaacgtttacagtggagaaccaatggaaatataatatgtaattaaaaattttccgtgagccacgtttaaaaaaaaaaatcaatataaagaaacaggtgaaagtaattgtaatgatatattttatttaacacagtatatctaaaatatcatttcagcgtgtgtcaatatgaaaaatcaacgataagatattttacattttttcc

SEQ ID NO: 55936 - DNA, 904 bp, Homo sapiens
cttcaatgagtctcacttttcaaggtcacttaggtgaaatgtaataattattggcttcaacacagcaaaactctactcactttaataatgttatctatgatatattttttgatttttaaaaaaatagctgtgcatttctcaataaaataaatactcatgatcaagtaaattgacactatatatatgttcatgtgtatatgataaaaatctgatgtgcatatatatgtgtaattttagtttcatacatgaaatrctttatatatgatatatatacatatatgataacattatatgtatgtatatgcacacacaatccacgtccaaacaagtattttccaaataatttttttttgctcacatacaactactaccatagattcaaaatgttgaataaatcagtagttttatcatttattttggacaatagaagatagacagttgaatgtaaggtatgaggaaggaacgtatagacaacactgactgcagtaggttttccccatattggactggcaggaaagctggtgaatttgcgtacgtgtggcaatcagtaggtcacaaccagcgaattgcgatatcttcagggtattaatgaatctggtacaacttatctaaacaatcaaatttgaggaaagatggcaatgaactagttggagaggaagggaggggaaaatggagaggaaataacaatgggggttttccaggaagttcctagtcatccatttgggggtggcgaatgtgtttatctgatcttaaagcaattacatcatagaaataaaggagacactccactaaacctccagtcattttatccaaaccagcaagttgtgtgatgcacactgcagtaataggattaaccctctgcaataacaggatggacccacacacagaatttgatttggatgtt

SEQ ID NO: 55937 - DNA, 960 bp, Homo sapiens
tgttctttatctgaataattcagggagctagaactctttacgaagaactgatatgtgtggagacaaatgccagatcaactgtcttcaagcagtcagttacatagtgaacctaggagtctgaggtaggagctgataacggagtattccgtagaactaaagatcaacattcatgagctgccagtcggaagtccttggacaaaaggaaaaagagcttcagaattcactttgaaggactgttcatcagggatcttaaatggagtgagcgtaggggggaacctattgtccaaagtccacagaaagtagagtcaattctctgtttcctggggagtgcaggctgggcttaccaaaggtgacgcagatctgacattcacccagaacttctcaagtttccaggattctgtctcaacagttttgattttagaaatgattcagctggggtacagtctagagtttttgtttgtttgctaaaagacttaaagacaacctgagatgtacacttggaagcaaaattactttaaaaagtgttttctactttttcaatatttctcaacgattttacagcttcttattttcttagcatatcatttttcaaatacctgtcactttttacaaattatagaaattccaactaaactttggagtttatatgtgtgataaaatccattagcgtacaccctatctttatatttttatgttatgraccaacactgtcatttactaaacaaaaacttgcacggattcctcactgcctttgtgtttctatattctgctattccttgcaagtatccaatatttctccttattattctgttcagtattatccaaatatgtcttgcatgtctgtgtctctaagttgtaaaggcccattaccctctaaattcttaaggttcagtgcaagtgttatattctccaccaaaagctctttagagtttcattcaagttggacgtagcctctcttta

SEQ ID NO: 55938 - DNA, 3340 bp, Homo sapiens
tcccaaagctttaggattacaggcatgagccaccacttccagctgtaattttatcatctttacacttattagttgaaattccactgtaaagaagagatttttccttttttctattcatttcttggtatgatttttttaatttacacatgccagtattgagtcattacttaattaggatttatattcataatagattcaataggttataaaccagtactatttgtatcttaatactcaaattgtcaaatgttaggcagtaatagcaacttcagctgggttctgtgtcctttgacatgtactcattattcttcgggtatttctttagtttttggcaccataagatgtaccaaatcatcttgtacttttcctgtgccagctgttatcagccaattctccagactctaggtcctttgagtggagaatagtgtctagaaaaccagatctggattcatctattgctattgaagtgttgtttctctccatactactcagtgagcaaaactaggaaaatatagttatattttaatattacatttgtatgtaagtatataaaaatatatctatacactcagatttatatctgtatttacttttaaatctatatgcatgggtgttatacacacacatacacacggttttgtatatatgtatgttctcatggatatatatagatatatatacaatcaacaacatatatagatatgttctcatggttttatatataaatatataaattaatataaattcatatgttctcttggttttatatataatatataattaaaatatattaaattttataatttataaatataataaaaataaattatatatatataaaaccatgagaacatatcaatatcaagttttatttatctttccatgtttgtaaatcttttctctagcagttagaaattgccttctcattaaatggaatatatttacttaggtaattagatcctctgcatgtaatccattgatgccattactcccttcacaatggatccaaccctaggcactggtacatacaggctattcactctatatcaaatgttctgtctgcccctaccacaatgtggttaacttcctcactccacccaggctctaacactatatgctattcagctcttaaatgcagatggccttctcactttgcttcaatggcttatctcattgcactatttcccctggtagttgctttcttcctcatattcaggccttctcacacagaggtacacatgtgcccacacacacacctagacactatccccaccatccttgggccctgatataccatgctggaccacaggccaaaataactagatcctgaggtccacaaccaccataaaagaaaattagcacaacaaatacatataccacccgaagttaccatattggaacacatggtataagaacttaaaataaggattaaagttaaactcaaaaagagaataaaatatgttagcaatataaaacaaaaatcagaaaacattttaaaaaatgagaggaaataataggtatggaaaataagataactgaaagaaatatagtaatagggtgggtagatagatacagccatagatagatgtaactgaagaataaattcaagagctagaagatcagattgaccttctagatccagagaggcgtagaaaaggataaatagagaaatacaaaagtacgagtaaaatatacagtcgattaaaatggagttctagaaacaatattagaagaaggaaaaaatgggagagagaaaatggtcaaaaaagtaataataatttttccagaaaaaaaggaaaaaaaaaccacacgtatatattttatagttaaattcaaaaagcacaaagagaaaaattctaaaagtttctacagtgaaaaagggttcgatrttaacaggtgctacactaggaggagacaatctctctaggttttaattccaccatccctggggatttggaggaggagacataccccagagtgcaggtttgttcaagactttttacaacagtgcctcactccagtagatatgggaaggcctgctaaacccaatttctgttccactatttaatctctcctttttcatagtttgttcataatcatacacgtttttacctaagtttaatcattacgtatatctctctgtattcttttcacttacagcatatccatgtttctaaatattctttttacatttttaacagccacacattttatcacaattctctaagtcatttccctgtttcacatgtttatgttgttttctgttattgctattacagattatactacagagagttgaattattcttgtaggataaatttctaagtacaggattgcttttgttattgctatgaagagtaatattgccttaccaacggattgttcaaattagcaatgccaacagcagcaggtgtgtctttagagcaagtttattcaagactttctgatatttattattaaaatttaaaatgtgatcatggtgctgactctagtgaaaataaacagactctatgcatatttattttcagatgtgagtatggaataatataaaacaatatgcatcaggatcagcacatgcatgaggatgtaaataaagagatgaaaagtagctttttgctatgtaaatatgtcattattttgacctagtctttgcctagtgatacataaggaagtccttctgtcagttggaaggatccaatgtaaatatagcattcttctcagagcaaaagattaggtttattttctttgacctctgtgcttcttttaaatagttctagacctcgagatgtagaaagcagaataaaataatttgaaatccttccatacaaatgtttaagatctctgaaggaaatttaaaagcagctctcaaaaaataaagtaaaatataaccaaatatacaaaagcaaaactgaagacagaatcaacaatcagagaagtaagcaaaagagttggtactctgtttgccgcatattcagaagttatgggtcttggtaaaattagagtgggactatagcatccacactgggacaaaagagatgatcatgttcccaaagaggcagggtgttgcagacccaaagagtgcgcagcagcaatatttattgtaaagagcaaaagaataaagcttccacagtgtggaaagtgacccaagcaggttgctgctcctggctggtgtggccagcttttattcccttatctgtccccacccacgtcctgctgattggtccattttactgagtgctgattggtccattttacagagtgctgactggtccattttgcagagtgctgattggtgggtttacagttctttagctagatacagagcgctgattggtgcatt

SEQ ID NO: 55939 - DNA, 3340 bp, Homo sapiens
tcccaaagctttaggattacaggcatgagccaccacttccagctgtaattttatcatctttacacttattagttgaaattccactgtaaagaagagatttttccttttttctattcatttcttggtatgatttttttaatttacacatgccagtattgagtcattacttaattaggatttatattcataatagattcaataggttataaaccagtactatttgtatcttaatactcaaattgtcaaatgttaggcagtaatagcaacttcagctgggttctgtgtcctttgacatgtactcattattcttcgggtatttctttagtttttggcaccataagatgtaccaaatcatcttgtacttttcctgtgccagctgttatcagccaattctccagactctaggtcctttgagtggagaatagtgtctagaaaaccagatctggattcatctattgctattgaagtgttgtttctctccatactactcagtgagcaaaactaggaaaatatagttatattttaatattacatttgtatgtaagtatataaaaatatatctatacactcagatttatatctgtatttacttttaaatctatatgcatgggtgttatacacacacatacacacggttttgtatatatgtatgttctcatggatatatatagatatatatacaatcaacaacatatatagatatgttctcatggttttatatataaatatataaattaatataaattcatatgttctcttggttttatatataatatataattaaaatatattaaattttataatttataaatataataaaaataaattatatatatataaaaccatgagaacatatcaatatcaagttttatttatctttccatgtttgtaaatcttttctctagcagttagaaattgccttctcattaaatggaatatatttacttaggtaattagatcctctgcatgtaatccattgatgccattactcccttcacaatggatccaaccctaggcactggtacatacaggctattcactctatatcaaatgttctgtctgcccctaccacaatgtggttaacttcctcactccacccaggctctaacactatatgctattcagctcttaaatgcagatggccttctcactttgcttcaatggcttatctcattgcactatttcccctggtagttgctttcttcctcatattcaggccttctcacacagaggtacacatgtgcccacacacacacctagacactatccccaccatccttgggccctgatataccatgctggaccacaggccaaaataactagatcctgaggtccacaaccaccataaaagaaaattagcacaacaaatacatataccacccgaagttaccatattggaacacatggtataagaacttaaaataaggattaaagttaaactcaaaaagagaataaaatatgttagcaatataaaacaaaaatcagaaaacattttaaaaaatgagaggaaataataggtatggaaaataagataactgaaagaaatatagtaatagggtgggtagatagatacagccatagatagatgtaactgaagaataaattcaagagctagaagatcagattgaccttctagatccagagaggcgtagaaaaggataaatagagaaatacaaaagtacgagtaaaatatacagtcgattaaaatggagttctagaaacaatattagaagaaggaaaaaatgggagagagaaaatggtcaaaaaagtaataataatttttccagaaaaaaaggaaaaaaaaaccacacgtatatattttatagttaaattcaaaaagcacaaagagaaaaattctaaaagtttctacagtgaaaaagggttcgatattaacaggtgctacactaggaggagacaatctctctaggttttaattccaccatccctggggatttggaggaggagacataccccagagtgcaggtttgttcaagactttttacaacagtgcctcactccagtagatatgggaaggcctgctaaacccaatttctgttccactatttaatctctcctttttcatagtttgttcataatcatacacgtttttacctaagtttaatcattacgtatatctctctgtattcttttcacttacagcatatccatgtttctaaatattctttttacatttttaacagccacacattttatcacaattctctaagtcatttccctgtttcacatgtttatgttgttttctgttattgctattacagattatactacagagagttgaattattcttgtaggataaatttctaagtacaggattgcttttgttattgctatgaagagtaatattgccttaccaacggattgttcaaattagcaatgccaacagcagcaggtgtgtctttagagcaagtttattcaagactttctgatatttattattaaaatttaaaatgtgatcatggtgctgactctagtgaaaataaacagactctatgcatatttattttcagatgtgagtatggaataatataaaacaatatgcatcaggatcagcacatgcatgaggatgtaaataaagagatgaaaagtagctttttgctatgtaaatatgtcattattttgacctagtctttgcctagtgatacataaggaagtccttctgtcagttggaaggatccaatgtaaatatagcattcttctcagagcaaaagattaggtttatttyctttgacctctgtgcttcttttaaatagttctagacctcgagatgtagaaagcagaataaaataatttgaaatccttccatacaaatgtttaagatctctgaaggaaatttaaaagcagctctcaaaaaataaagtaaaatataaccaaatatacaaaagcaaaactgaagacagaatcaacaatcagagaagtaagcaaaagagttggtactctgtttgccgcatattcagaagttatgggtcttggtaaaattagagtgggactatagcatccacactgggacaaaagagatgatcatgttcccaaagaggcagggtgttgcagacccaaagagtgcgcagcagcaatatttattgtaaagagcaaaagaataaagcttccacagtgtggaaagtgacccaagcaggttgctgctcctggctggtgtggccagcttttattcccttatctgtccccacccacgtcctgctgattggtccattttactgagtgctgattggtccattttacagagtgctgactggtccattttgcagagtgctgattggtgggtttacagttctttagctagatacagagcgctgattggtgcatt

SEQ ID NO: 55940 - DNA, 1117 bp, Homo sapiens
acagatgttactacttttctaaatctcttctaacactttcgaacctgactctgtattgactgcattaacacgtcatgggtgaatttcagactaaagtcaattcagaatgatgatatttagcatattaatttcccaaagaattatagaacttctttattttataattgaaagcctgtaactttgtttggaaaacacctgcatattttactttttagagctgttgaaaggggaaaaggccaaatgaattaaagtcctaaccagaaatcacttaatttacygtaccttcgttcctttgtcttctatttttgctccatcctgttatatcattttcatatttatgtgtttgttattccaactttaaccaaagacttctatctgctactggattttcataatatgcttttgcatatacatgtagttacaaatagtcactgtgcaaaaaatgtggaaaacaatgtgagatgaacagtccatgtgttgctctgggtttggatggcattactgcctcaatagagccattcaagggtttttgttgttgttgcttcattttatattgtttcactggtgacacaatttagacttattttttccaaacactctttttttggttacttgcaacttttttttccacaagaattgttgaccgaatatatagtagcagatcacagaaggtacagtgctaaaataaaaatagctgtcttctcactccgctcttgatgatttaattcagtactgaaacaaagcttaatttcttttctgcttcctgtaagatataacagtacaactgatgtggaaacattctgttaacttgtctttcatgacacatgacatagatttttttgggttttgtttatatatttttgttttgtttagtttttaatgagagaaattctgttttcttatttaccatgaattgcaattcttttctgggggtactccttaatttatcttcctttctgctggtggttttacttctagtcaacggaagcgaccataaagactaatgaactgatttaaaacccttctttacactgagttaccacttcgataaagattcacatttagaattgtgattctattggcaggtttatctatctcctgagtttacaaggttttg

SEQ ID NO: 55941 - DNA, 1148 bp, Homo sapiens
acactgtacacttaggttacactaaatttgttttaaaaattaagtaattgcactaatgtcacaatgagaacaatgccactagagtttttcagctccactataatctatggaaccaccctcatgtatgtgatytgttcttgagcaaaatgtcatcatgcagcacctgactgtatatatatgtagcaagtatgtgtgtgcctgtgtgcgcgtgtgtatatataaatgttacatttacatacacctgatatgtgcatgtgtaattatatatgtaacaagtatgtgtgtgcctgtgtgcgtgtgtgtacatatacatgttacatttacatacacctgatatgtgcatgtatacatatataggtaacaagtatgtgtgtgcctgtgtgcgtgtgtgtacatatacatgttacatttacatacacctgatatgtgcatgtatacatatataggtaacaagtatgtgtgtgcctgtgtgcgtgtgtgtgtatgtgtatatatacatgctacgtatgtatacacctgatatgtgtatgtgtaaatacatatccacacacatagcaggtgtatatataggtagcctgtgtgtgtgtgagtgcatgtgtgtgtatgtgtagcaggggttttgtgttagaaccaagagcttggaactggtacaatgaaaatattttgcctgaaagatatgcttagtaaaagtcccaagtttcacacatttttgaggctcaaagtgaagaactcaaagtgaattattaggtaatcatatctacttcttcctaaacccttcatctgattgtgtgctaaaatttaatactaactgatctttccatctccataaaattctttgagataacaaaatcctacattccggtttctgaaggatggtattctgcaaatgtgaaagtttcccttaacctccaaaaaataattgggttaatccagctaccacaagtgtgaaattgagaagctgcttgctaagattgaatttaatattgtcacatgtcatctgagagctgcttgtctgatcatgttgccactggacaaagtaagccttactacaaaggataaaagaatgattatttcaatatccagtcatagttcatcatcaaactctgagtaaaatggagaaaaaaagacgttttatcttatatgactct

SEQ ID NO: 55942 - DNA, 1148 bp, Homo sapiens
acactgtacacttaggttacactaaatttgttttaaaaattaagtaattgcactaatgtcacaatgagaacaatgccactagagtttttcagctccactataatctatggaaccaccctcatgtatgtgatttgttcttgagcaaaatgtcatcatgcagcacctgactgtatatatatgtagcaagtatgtgtgtgcctgtgtgygcgtgtgtatatataaatgttacatttacatacacctgatatgtgcatgtgtaattatatatgtaacaagtatgtgtgtgcctgtgtgcgtgtgtgtacatatacatgttacatttacatacacctgatatgtgcatgtatacatatataggtaacaagtatgtgtgtgcctgtgtgcgtgtgtgtacatatacatgttacatttacatacacctgatatgtgcatgtatacatatataggtaacaagtatgtgtgtgcctgtgtgcgtgtgtgtgtatgtgtatatatacatgctacgtatgtatacacctgatatgtgtatgtgtaaatacatatccacacacatagcaggtgtatatataggtagcctgtgtgtgtgtgagtgcatgtgtgtgtatgtgtagcaggggttttgtgttagaaccaagagcttggaactggtacaatgaaaatattttgcctgaaagatatgcttagtaaaagtcccaagtttcacacatttttgaggctcaaagtgaagaactcaaagtgaattattaggtaatcatatctacttcttcctaaacccttcatctgattgtgtgctaaaatttaatactaactgatctttccatctccataaaattctttgagataacaaaatcctacattccggtttctgaaggatggtattctgcaaatgtgaaagtttcccttaacctccaaaaaataattgggttaatccagctaccacaagtgtgaaattgagaagctgcttgctaagattgaatttaatattgtcacatgtcatctgagagctgcttgtctgatcatgttgccactggacaaagtaagccttactacaaaggataaaagaatgattatttcaatatccagtcatagttcatcatcaaactctgagtaaaatggagaaaaaaagacgttttatcttatatgactct

SEQ ID NO: 55943 - DNA, 1148 bp, Homo sapiens
acactgtacacttaggttacactaaatttgttttaaaaattaagtaattgcactaatgtcacaatgagaacaatgccactagagtttttcagctccactataatctatggaaccaccctcatgtatgtgatttgttcttgagcaaaatgtcatcatgcagcacctgactgtatatatatgtagcaagtatgtgtgtgcctgtgtgcgcgtgtgtatatataaatgttacatttacatacacctgatatgtgcatgtgtaattatatatgtaacaagtatgtgtgtgcctgtgtgcgtgtgtgtacatatacatgttacatttacatacacctgatatgtgcatgtatacatatataggtaacaagtatgtgtgtgcctgtgtgcgtgtgtgtacatatacatgttacatttacatacacctgatatgtgcatgtatacatatataggtaacaagtatgtgtgtgcctgtgtgcgtgtgtgtgtatgtgtatatatacatgctacgtatgtatacacctgatatgtgtatgtgtaaatacatatccacacacatagcaggtgtatatataggtagcctgtgtgtgtgtgagtgcatgtgtgtgtatgtgtagcaggggttttgtgttagaaccaagagcttggaactggtacaatgaaaatattttgcctgaaagatatgcttagtaaaagtcccaagtttcacacatttttgaggctcaaagtgaagaactcaaagtgaattattaggtaatcatatctacttcttcctaaacccttcatctgattgtgtgctaaaatttaatactaactgatctttccatctccataaaattctttgagataacaaaatcctacattccggtttctgaaggatggtattctgcaaatgtgaaagtttcccttaacctccaaaaaataattgggttaatccagctaccacaagtgtgaaattgagaagctgcttgctaagattgaatttaatattgtcacatgtcatctgagagctgcttgtctgatcatgttgccactggacaaagtaagccttactacaraggataaaagaatgattatttcaatatccagtcatagttcatcatcaaactctgagtaaaatggagaaaaaaagacgttttatcttatatgactct

SEQ ID NO: 55944 - DNA, 1179 bp, Homo sapiens
ttccttctttgaccagacttagcactatgctgtaaatgattggttgattctacttgtctgtgagctctctgagagaagggcaaggtcatattcacacctcttgcatttttaaattctactttgacacttttaaattcttcataaatatttttgaaatgaacaaaacgaatgaactcatgcttctggagttaccgcgcatgccagtttctggtttgagctttatttttttgtttgttttattttgtttggggatgtgtgtgtgtcctcagaatgctgaatgcgagaaggataagcagaggtttggtgtgagttacttccctcagagggcttcctgtgagatatttttcaccttccttttcttttttgctttgttttcactcttatttttgtgtctattccccagctctccctcctgtctgaactttattagacctttcacaatttcagagtctttttttattttttgaagctgtgcagtagaggtatacagaagtgarttgtcccttggaagtagattaaccatttgttttgtagatgtctaagagatgcttttatttggttgctacaaaatgtcagatcaatatggtgtggatattcatttagtcctttgaatgggtaccaggtggatatgccaacataaagccaaataacagcattaaagccttggtactaaaatagatagctcagtaaaggaatatcgtatattttttttctgttttccgcccactttattttactagtcaataggcattgtctaaaattccagagtcattcatatagttaaaaggaaaataatgacaaatttgagttattttgacaataataaagtaagaaatgtctactcaaatcacaaactttgatatatttatttttgccttatctttcattaagtttggtagagaagaataatttttaaggaactcattagacatcattgacattacttaagaaacattggctgccacaaagatttggttgtgcagaatttctaaactcgcacggcattagaactgaatcagcattagatgccacatcctatgagttcattaatatataaactttatgtatttgtttataaaacaaatatttataaagtgttaaacatgttcacagctttcttccaggtcttgggaatagtagtatgagaaaagagcctatagttttacaaaatacaggctc

SEQ ID NO: 55945 - DNA, 557 bp, Homo sapiens
tagcactttgggaggctgaggcaggctgattgcctaagttcagatgttcgaaaccaccctgggcaacatggtgaaaccctgtctctactaaaatgcaaaataattagctgggtatggtggtgcacatctgtaatcccagctattcaggaggctgaggcgggagaatcacttgagcccaggtggcagaggttgcagtgaaccaagatcgtgccrctgaactccagcttgggtgacagagtaagactctgtcttcaaaaaaaaaaaaaaaatgagtgggaagtagtacttatgtatctttgtatccagaaatgtagagcagaggctggcatataataagtgattcagcaaatgttttatttcaacttccaaagtattgaatttggcacttagtttatggacaatgtattaattgagatctaaaaattcaaaatcatttctcccaaaggtacaaagctgtcacagatgcctgttctcttcagccagatattgacttattaccatttggagatcaaactgaaattggagagagggtgagctatatatagtttcattaagca

SEQ ID NO: 55946 - DNA, 557 bp, Homo sapiens
tagcactttgggaggctgaggcaggctgattgcctaagttcagatgttcgaaaccaccctgggcaacatggtgaaaccctgtctctactaaaatgcaaaataattagctgggtatggtggtgcacatctgtaatcccagctattcaggaggctgaggcgggagaatcacttgagcccaggtggcagaggttgcagtgaaccaagatcgtgccactgaactccagcttgggtgacagagtaagactctgtcttcaaaaaawaaaaaaaaatgagtgggaagtagtacttatgtatctttgtatccagaaatgtagagcagaggctggcatataataagtgattcagcaaatgttttatttcaacttccaaagtattgaatttggcacttagtttatggacaatgtattaattgagatctaaaaattcaaaatcatttctcccaaaggtacaaagctgtcacagatgcctgttctcttcagccagatattgacttattaccatttggagatcaaactgaaattggagagagggtgagctatatatagtttcattaagca

SEQ ID NO: 55947 - DNA, 826 bp, Homo sapiens
ttccaagttggttaaactgatgtcagtcatccactattatgaattattaaatcagaacgagtttctttagcatctcactaagggagctgcacaaaagaaagggaattcaataggatctgaaagaaggtagagaacgttgaagaaaataggcaatgaggattctaggtgcctagcagtgtaagagaaagccctaggaggagaaaatatgcagaaagagaagggaaacgtgccaaaaacaaactttgcagatttttaagaattgctgtgaactttatcctgtagttaagaagggtagaatcatttcattttctccatgccctgcttccaacacaccagctcccctgacctcaggactgcagtagtagtatcagttcagttacattgtgggttaaatcaggttctaccggctattctggaaaaccaaccatttccccttttctgtggggaaatgtattctgaattctaaacaactaacccacacattttggaatctatggtaaattgggagcttcctgtatatgccaatacaaagaaaaaaaaacctacacagtttttctgttacatcaawaaaccaataaaccttttgtgattagtcgctaggtagtgaccttggttgattttttttggcctcatacaacatgtctgatttaggaaactttctattctagagggttgtactacttcagattcttggttaaaagagtgaaaacaaaaatgtctcctgaatcccatttttacagagagtttgaccccagttttaaattttgcataacgatatgaagaccaacatttataaatgaagctaaattaaactcaaaattaaaga

SEQ ID NO: 55948 - DNA, 1162 bp, Homo sapiens
agccataaaaagtaaaatgtctacagttcttaatgaaaagagcctttttttctgagtcatttaatcagtaaatatgtgtggcaaatacttaatgtgccaggcagttttttctgtaagtagatgtcccctaaaggcattttcccatagagcaaattgtgaacacacctttcagtacagaaatgaagttgaaagcctgaatttgaagaaaaactaatgttcatagagaaactgaagaatacaaaaaaatgattgttggtttagagaagcttattctctgaggaagataaaacagtaggcacaatgctgcccagctaaaaattagggttttgttaataaggagtaagaggaggcttcacagtaaggtgggcaacacacagtttctggcacaattataatgctggtaattatttcgaattaagtgaagaacaaaagattggaagtcaacaaccagagttctaattcagctctgctgttaactgtcacacctaatgcaacatagccgtgggcacgaatggacactgagaacatgaaagatcagtaccagaaatctataagtccggaaatttatgtcactaatctaccaggtaggatttttgtggctaggcgaggcctatactaggaggacaactgtgtgaatccaaggatatagaaggaggagatattgaaagtcgttgactattagaggatgacatactttgagtaagtagaaagcatagtcagcattgtggaaacagttgtatcaaaccacatctttctcacttgtttttaatagatgacaccttttctcatggttcttactctttcacatctttaaagtgctatgtagtgtatggtataataagctatatgactagtgtgacttaagaatatctgtcataaagttgataatctatcaccctttcactgcctacctctggcactattaagtagctagaaatagacataatactaaattgaaaaggcataaggaaatccaacaaaattttgatttttttctcatgatgttaatttttttatgtgaattgtcaaatttcrtcgcaaatatctgataccctttctttgctcattcccgaagaatttttttagttctagaagggtaatttcatatcttacattacttacactgaagctaacttaattctctcatctgtaatgtaaatgc

SEQ ID NO: 55949 - DNA, 1286 bp, Homo sapiens
gtgtcagctaaaatattaaccaaaagaaagccagtctagctatattaataagagttgcagtagactttaagacaaatattactagaaataaagagtcactatgtaataaaatatccaagctacaatggaagtataagggttcagattttatgcttcttataacttcgagaatgtaaactgtattagtctgttcttatgctgctatgaagaactgcctgaggctgggtaatttataaaggaaagaggtttaattgactcacagttcttcagagctggggaagcaaacaygtccttctttacatggcagcaggaaggagaagtgccaagcaaagtaggaaaagccccttataaaaccatcagatctcatgaggactccgtcactatcacgagaacagcatgaggataaccacccacatgattctattatctcctaccaggtccctcccacatgtggggattatgggaactacaattcaagatgagatttggatggagacccagccaaattatatcataaaccaacatggaaaaattctcaatcagttgttatggaaatgcaaaataaaatgacagtataataccgttgtacatgctaaactaaaaatacaacaccgaattttggctgtggagcaactgcatacagttgttgagaatagattgttggtgagaatataaaatggtatgagcactttagcaaagggtcttgcagtcttttataaagctaaaaatgctgtcttatggcctagcaattaaactgctagatgtttacccaggataaatgaaaacacatattgacaaaaagatgctagaatggccatagcagctttatttataatattctaaaactgaaaacacactaagtgtccatcagtaggagaatggataaataaagtgtgaaatacagtggaatactactcagcagtgaaaaggaacagacttttccttgctgagtaaacacagcaatgatggatgaatctcagaaaccttatgccaaatgaaagaattcttactcaagaatatacactgtatcaatctatttatatgacatttttaaaaagtcagaactaatctgtgatggaaaaaatgtcagaacagtagtagtccccacaagggtggcagtagggataggctgggaaaggatatgagggtattttttggtgtgataatgatgttctgtatcctaatgggactttctcagcaaatctacttaagatttgtagatttcttgaatacaacttttacctcaaaagaaaaaactaaacaaatattgaattctagttaattat

SEQ ID NO: 55950 - DNA, 632 bp, Homo sapiens
aaaaaaaaaagacttaaaatgactatgcacatgatttttaaattactctccatgtttatggagtaattgagaaacaaactaagtttcatagtttctgaggccctgataggaagccaagtaaggatttaatatgataaaaaacaaacccacaaaaaatcatacattaaaatactagtaagataaataattgctgtaagtgagcttctatattattaaaactttttggaatgtaattaaaattaattttagagaatttttaaaaatagttatgtaagaatcaatttctattttgaaaagtgtattatgactactaatgctccattggtttaaataaataacactggaattctatattttatcataatcatctttgttactaatatagctgattattatactttcattaatgccctttattcaacgtatatttttattctttgtacactcaacaagactttgtttagaagwttctgtagtcttaacctgcctacctcttctgaaatgtctccttattctctttttatctctaagctttctattaaaaagtatgtctaactcaatgctttcttaactacatttccaaaccttttactatgccaggacattcttcagattcctagaaccattggttg

SEQ ID NO: 55951 - DNA, 507 bp, Homo sapiens
ttaaatgagagaaatccatgaaccagttggtatagtatctagacactttcaatacaggttctgtatgtttgattatttcagggctgttccatgactcctccagtttgggttaactgcctgtctctatgctcccccaaaacgctctacataccactactacaacattaccttactgtattgcaatcatctactcatttaactattctgttttcatgagactgtgagcagctctgcaggaatcacgccttatgcttctttcatccctaatgctccaagacttctagctcacagctcgagctccttaaatgttgtaggagaaataaatacactcttccccagcactcaccatctttatttcactacagccttcttatcttttcttaaacaagccatctcaggatctttacattggctattccttctgccatcaaatcaatctaatcatctatctatctatctatctatctatctatcwatcgcaatcaatcaatcacaatttttctctat

SEQ ID NO: 55952 - DNA, 507 bp, Homo sapiens
ttaaatgagagaaatccatgaaccagttggtatagtatctagacactttcaatacaggttctgtatgtttgattatttcagggctgttccatgactcctccagtttgggttaactgcctgtctctatgctcccccaaaacgctctacataccactactacaacattaccttactgtattgcaatcatctactcatttaactattctgttttcatgagactgtgagcagctctgcaggaatcacgccttatgcttctttcatccctaatgctccaagacttctagctcacagctcgagctccttaaatgttgtaggagaaataaatacactcttccccagcactcaccatctttatttcactacagccttcttatcttttcttaaacaagccatctcaggatctttacattggctattccttctgccatcaaatcaatctaatcatctatctatctatctatctatctatctatctwtcgcaatcaatcaatcacaatttttctctat

SEQ ID NO: 55953 - DNA, 711 bp, Homo sapiens
ctactccaaactcactaatccaaatccggggtggaaaggattgtagaagtttgcaagaatctgcatttcaacagactgtccaggcggttcagacactcactgaagttcaggactccccatactgaaacatgaagccaggggctcaggccttgccagaagtgccatctgcgctcaccctgctgatctgcacctccaggyccgagacagccctgcccaggggtgcccacctgccagcaagcacgggcctcgggagccagcagcctgcaggggccctcatttgtttgtgtctgtgagcccagaagcagatattaccaagggcctgacctggtgatcatatttgccagtcactttaagagctggcgacaatgactgtcattgatctcattaaaagtaaaggtcgtgcaggagtcctctttcccgggctgggtggcgcctccccaagccacagaacaactattgattgctggacctttatcgaaggttaattggatttcagtgagtctgtgtttaagatcctgccgaggctgaggttcaatgtaatttgtgtgaaattagccaagaaagaggtgacagagacaggagtgtaggggcagcagggacagatgactggaggtctggtgggcagacactgctgtccgtgaagattgggggtagtcctgggatggggttttagaagggacaccagcctggctgtcccagagacgtgggatc

SEQ ID NO: 55954 - DNA, 711 bp, Homo sapiens
ctactccaaactcactaatccaaatccggggtggaaaggattgtagaagtttgcaagaatctgcatttcaacagactgtccaggcggttcagacactcactgaagttcaggactccccatactgaaacatgaagccaggggctcaggccttgccagaagtgccatctgcgctcaccctgctgatctgcacctccaggcccgagacagccctgcccaggggtgcccacctgccagcaagcacgggcctcgggagccagcagcctgcaggggccctcatttgtttgtgtctgtgagcccagaagcagatattaccaagggcctgacstggtgatcatatttgccagtcactttaagagctggcgacaatgactgtcattgatctcattaaaagtaaaggtcgtgcaggagtcctctttcccgggctgggtggcgcctccccaagccacagaacaactattgattgctggacctttatcgaaggttaattggatttcagtgagtctgtgtttaagatcctgccgaggctgaggttcaatgtaatttgtgtgaaattagccaagaaagaggtgacagagacaggagtgtaggggcagcagggacagatgactggaggtctggtgggcagacactgctgtccgtgaagattgggggtagtcctgggatggggttttagaagggacaccagcctggctgtcccagagacgtgggatc

SEQ ID NO: 55955 - DNA, 1823 bp, Homo sapiens
tagcatttccagattagctagccatttcaacttgattttcaaataagttgttctgtttcaccaggatatatgaaaccactgatagccaagtaagaatctaaaaatctaatagcaaccaagtatcgtaatgctgaaatgcatggatgagatttacattctatgtaagatgatgcctgtcaccctcattgtgcaatgtactgacagaccaaacaatatttataatgcctcaacagagacactcaactgctctattagatgatgccaatcactacttttttgccccaggtaagactccttgataatctttcatcttcctctgcctcccataaatwacactatcagagagaacaaaagcaacaaaaatcccttaataattgcaatatgactggccttcacacaccagcattcataaggaccagaggaaagctgacaaaaaagcaacaaaaagacctacatgtgggttttttggaatacataggacaagatatgatctagttgggtgttcctcttataaactctaataaagagtgtggggcaggcgcggtggctcacacctgtaatcccagcactttaggaggccgaggcaggtggatcacctgaagtcaggagttcaagaccagcctagcaaacatggtgaaaccctgtctgtactaaaaatacaaaaaattagctggatgtggtggcacgtgcctgtaatcctggctacttgggaggctgaggcaggagaatcgcttgaacccaggaggcgaaggctgcagtgagccaagatcgcaccactgcactccagcctgggaaacggagcgagattccatcccaaaaataaaaaaaataaaaattaattaattaatgtaaaggatcctgagtaattagaataggtgctgccaaggaagcttgttctttttatttttattttttattttttttgagatggagttttgctgttgttgcccaggctggagtgcaatggtgcgatcttggctcaccacaacctctgcctcccaggttcaagcaattctcccgcctcagcctccggagtagctgggattacaggcatgcgccaccacacctggctaattttgtatttttagtagagacagggttgctccatgttggtcaggctggtctcgaactcctggcctcaggtgatctgcccgccttggcctcccaaagtgctgggattacaggtgtgagccactgcgcccgaccggaagcttgttatttggcaacaagctagagatagaaagagctattccagatggttccttctccctcattgccttcaaatcaaccaaattttgtcttatacccgcaaaaatatatttaatctatatatcagatatatattaacattctcaaattaaaggtaagaaaacaggtgaagagaaagaaatcagcaaaggaagtgctactggagttttccctgaaggaaagttgtctcttcagggttatgtggtattatcggaggggaggaggaggaggaggagcccaaatatgaaaaccactttcatctctcttatcttttactttcccattattttccgtaattcctgaatttataaaatattagttttcttgtaaatatttaatagtttgatataggaatagacaaatggtacagttctctagtgaccacaaagcagtgatagataataagcaaaaagaaaatgatacatcttctgagggaaatatacatcttgagagcacataaccagaatttctatcacactgacattcataatcagaggttctaacatttaaatttatgttatagtgtgctataataaatttcagcacaatttaacaaatctaaacttaagatctat

SEQ ID NO: 55956 - DNA, 452 bp, Homo sapiens
cattttgccttcaatctcggtttctaagaaaaaaatgcgtcatttctattaacataatgggcttataattatttttaaatgaatctcaaaataccaaatttctcaggtttaatttataatgtggatagtaataaaagcattttacagtccttaataatctttaagaatgtaaagggactcaagaccaaaatgtttgagaattattattaccataggtataagcatggaggaattyagagcacacaggagggcctcttaaacttagttctaatggaatacttcccagaagaaatattgcttaagctgaatattgaacaaataggaattacccaggcaaggagggaaggaggagcagtgaagggcattccagactgagcatgtagaatatgcaaaggcagggttaaggtaaaagagagctcgagtgaggtacagaagattcaaagtctgttatt

SEQ ID NO: 55957 - DNA, 726 bp, Homo sapiens
ccaacagagcacagctgctctaccaaaagccaggggtcttgctatgttaccgaggctggtcttgaactcctggcctcaggaacacagctgagatcacaaatgagagccactgccccacaagattgacattttagtttccacatatgagtgagatcatgtgrgatttgtctgactaatatattcctaagcagggcttcttagactgtaataattacatccacatttacttggtgatgccaaatagtgagctgtatcacttaatgtagctgtaataacttcatcactctttatctagtgaaatgactattttatttgatatcccctattctgtattaaaccaatatgtgtcaattaattaatttaatttgtgatgatgtttttgtgccatgctgtatttggtgctgaagataaagtaagaaatgacatagacacagctctattcctcataaaagtcacaatctagtctgggagatactcaagcaatgtacatatattgagaaataggaaattttgttcattaagtgagtgttacatccctaccctcaggtttttgccctctcttgtaggtgagaactgttatcctctctccatctctctcttttaatatttttaaagatagggtcttgctatattgcccaggctgactcaaactcctgggttcaagggacacccccaccttatcctcctgagtagctgaactataggtgcacactaccatgccttgct

SEQ ID NO: 55958 - DNA, 787 bp, Homo sapiens
tttggcaatgtggtgttttgttttgttttgttttttgagacagtctcgttttgtcgcccaggatggagcacaatggcatgatctcagctcactgcaacctccgcctccygggttcaagtgattctcctgcctcagcctcccttaccagtagctgggattacaggtgcccgcgaccatgcccggctaattttttgtatttttagcagagacagggtttcaccatgttggctaggctggtctcgaactcctgacctcaagtgatctgcccacctcggcctcctaaattgctgggattacaggcatgagccactgtgcccggcctggcaatgtggttctacatgtattttctttcctttttttttcctttttttcttgccctttgtgaacaaagctagatgtatttttgtagagctgagctgacaggagaaaaagagagctagagtttgtggctttactcctgaactgggtcaggagagacgagtggtctggtggcttttctgggatggacatgggaggcctggactcatcctcagtgggcaagggatgtggcctctgtcccctgggactggctctcttgtcatactgtttttcactgatggcttggatgcctggtccatggagtagagtgacagcctgtgccctccacctgagggcaacgtgttctcagcctcgcagcccctccttctccaggtcacccatcttctccttcccctgggccctgcattctggacccatgccgaaagtgccccgcctctctccaacttcagggaaaccaagtccatggccc

SEQ ID NO: 55959 - DNA, 787 bp, Homo sapiens
tttggcaatgtggtgttttgttttgttttgttttttgagacagtctcgttttgtcgcccaggatggagcacaatggcatgatctcagctcactgcaacctccgcctcctgggttcaagtgattctcctgcctcagcctcccttaccagkagctgggattacaggtgcccgcgaccatgcccggctaattttttgtatttttagcagagacagggtttcaccatgttggctaggctggtctcgaactcctgacctcaagtgatctgcccacctcggcctcctaaattgctgggattacaggcatgagccactgtgcccggcctggcaatgtggttctacatgtattttctttcctttttttttcctttttttcttgccctttgtgaacaaagctagatgtatttttgtagagctgagctgacaggagaaaaagagagctagagtttgtggctttactcctgaactgggtcaggagagacgagtggtctggtggcttttctgggatggacatgggaggcctggactcatcctcagtgggcaagggatgtggcctctgtcccctgggactggctctcttgtcatactgtttttcactgatggcttggatgcctggtccatggagtagagtgacagcctgtgccctccacctgagggcaacgtgttctcagcctcgcagcccctccttctccaggtcacccatcttctccttcccctgggccctgcattctggacccatgccgaaagtgccccgcctctctccaacttcagggaaaccaagtccatggccc

SEQ ID NO: 55960 - DNA, 1483 bp, Homo sapiens
tgcggagactcagccccgccccactgcccttcggcatgaaggtctgcacaaggtcagggaggatcttgcattcctccctccgtccctgttccctggggcagctcacgtgaatgggcacccatcctccaacctgatagcgctcctcggcagccctcggttcatcccccatagggccgcgggtgagcgttgtcaggcacagccctgctcacccttttcgttcttttttttttttctttttcttttttgaggctctgcctcaaaaaagtggcgcgatctcggctcactgcaacctccccctccggggcttaggcgattctcgtgccttagccacctgagtagctgggactacaggcctgcgccaccacgcccggctaatttttgtatttttagcagagacggggtttcaccatttgttggccaggctggtcttgaacatctgacctcaggcgatccacccgcctccgccgcccaaagtgctgggaatacaggcatgagccaccgckcccagccctgctggtccctttcgaaggaaaccttcgctggctccctagtgccctggaataacactgaaaccccttagaacggtggagaaggcctatctccatctgccccaacatcattccccagtttcgcgttcttccctcaccttaaggaagtgcttagagatgtttaaagcagaggttcaggagtctaccagttcctagctatgtgactttaggccagttgctgcttattgctaaaccttgatttccacatccttaaaatgggggtggcagcacacattccgcaggacaggctgaggattaagtgagtcacttagcatagttcctggaacacactcaactcaccctaagtgcttgttattataattctcagcccacatttggctaccacctcctacttcctcaagcttgtcattgtctttccctacattgtgcctccatgcatacctggaaagcccttcctcttctcttccccaccctgtaggttcttacacaccctttaaagcccaaatcaaaggccattgcctgtgaagacttctacccttcctgccaacagggtaaagagttcttcgtcctctatctgctcatcatcacctagggaccacactcagcatcacacatggtggacagctggccttaagtgcctcctgccaacctcaaaggaagaggctggggcacgaaatataatttgaagagtttacttgagtcaaagtgaggacagctgctgagaagactcagaatcaagtaacctcagatatgagctccatttggcctttgttacatacaagcaggtgtttaaacatatatatgtgtgtgtatatgtatatttcctcccacctcagcctccctagtagctagggactacagacacgcaccaccatacccagctaattttaatttttaattattttttttttttttgtagagacaaagtctcattatgttgccccggctgttctcgaactcctgggctcaaggga

SEQ ID NO: 55961 - DNA, 1483 bp, Homo sapiens
tgcggagactcagccccgccccactgcccttcggcatgaaggtctgcacaaggtcagggaggatcttgcattcctccctccgtccctgttccctggggcagctcacgtgaatgggcacccatcctccaacctgatagcgctcctcggcagccctcggttcatcccccatagggccgcgggtgagcgttgtcaggcacagccctgctcacccttttcgttcttttttttttttctttttcttttttgaggctctgcctcaaaaaagtggcgcgatctcggctcactgcaacctccccctccggggcttaggcgattctcgtgccttagccacctgagtagctgggactacaggcctgcgccaccacgcccggctaatttttgtatttttagcagagacggggtttcaccatttgttggccaggctggtcttgaacatctgacctcaggcgatccacccgcctccgccgcccaaagtgctgggaatacaggcatgagccaccgctcccagccctgctggtccctttcgaaggaaaccttcgctggctccctagtgccctggaataacactgaaaccccttagaacggtggagaaggcctatctccatctgccccaacatcattccccagtttcgcgttcttccctcaccttaaggaagtgcttagagatgtttaaagcagaggttcaggagtctaccagttcctagctatgtgactttaggccagttgctgcttattgctaaaccttgatttccacatccttaaaatgggggtggcagcacacattccgcaggacaggctgaggattaagtgagtcacttagcatagttcctggaacacactcaactcaccctaagtgcttgttattataattctcagcccacatttggctaccacctcctacttcctcaagcttgtcattgtctttccctacattgtgcctccatgcatacctggaaagcccttcctcttctcttccccaccctgtaggttcttacacaccctttaaagcccaaatcaaaggccattgcctgtgaagacttctacccttcctgccaacagggtaaagagttcttcgtcctctatctgctcatcatcacctagggaccacactcagcatcacacatggtggacagctggccttaagtgcctcctgccaacctcaaaggaagaggctggggcacgaaatataatttgaagagtttacttgagtcaaagtgaggacagctgctgagaagactcagaatcaagtaacctcagatatgagctccatttggcctttgttacatacaagcaggtgtttaaacatatatatgtgtgtgtatatgtatatttcctcccacctcagcctccctagtagctagggactacagacacgcaccaccatacccagctaattttaatttttaattwttttttttttttttgtagagacaaagtctcattatgttgccccggctgttctcgaactcctgggctcaaggga

SEQ ID NO: 55962 - DNA, 748 bp, Homo sapiens
tgttactatctattttttcttaaaaaaagaaatgacactcatcagatgggcacaaataacaaagccaggcaaaatctattgttggcgtgaagcaataaaactcatttacagcacatgyttaccaggcgatatgggggaacatggtcatcttggcaattcttctgctagtgataactgagcaaaagcctgaaagctggtcattaggcgaattggtaaatcaactgcgtcatgattacgcagcagattattgctcgggaatgaccactaatgaactagagctacctgtatctcaaaaaccatgttgactgtgaaaagtaagctgcagaaagatgtaaatattaggatgctgttatatcaagtttaaacacatgcacaactcaaagctgtacagttttggagacctatcttttcatggtaagcatgcaacagtgtcaccaccttcagagaaggtggaaatccaatcaagtaggggtagccagggagagccaaccatatgtgtagtggttgatgtctctaaaagtacatcagaaggaatcaagcaaaagtccgggtttcacagtggtaggtggtgactaatgaatgcttcgtatattattggctaccctataatgtctgcttcaaatacttcaaaacaataaaacaagaaacgctaattcatcacctactggatgtcaggctatgttatatgtgtcactcacctttaattaaagtatcccgtgaaggaattatctgtatctctgttttacag

SEQ ID NO: 55963 - DNA, 748 bp, Homo sapiens
tgttactatctattttttcttaaaaaaagaaatgacactcatcagatgggcacaaataacaaagccaggcaaaatctattgttggcgtgaagcaataaaactcatttacagcacatgcttaccaggygatatgggggaacatggtcatcttggcaattcttctgctagtgataactgagcaaaagcctgaaagctggtcattaggcgaattggtaaatcaactgcgtcatgattacgcagcagattattgctcgggaatgaccactaatgaactagagctacctgtatctcaaaaaccatgttgactgtgaaaagtaagctgcagaaagatgtaaatattaggatgctgttatatcaagtttaaacacatgcacaactcaaagctgtacagttttggagacctatcttttcatggtaagcatgcaacagtgtcaccaccttcagagaaggtggaaatccaatcaagtaggggtagccagggagagccaaccatatgtgtagtggttgatgtctctaaaagtacatcagaaggaatcaagcaaaagtccgggtttcacagtggtaggtggtgactaatgaatgcttcgtatattattggctaccctataatgtctgcttcaaatacttcaaaacaataaaacaagaaacgctaattcatcacctactggatgtcaggctatgttatatgtgtcactcacctttaattaaagtatcccgtgaaggaattatctgtatctctgttttacag

SEQ ID NO: 55964 - DNA, 711 bp, Homo sapiens
caatgatttaaagaagacgtgcaaagatacatatatatgtatacacacatatttaacatatattattcttctcatctgcagttcaacccaacagttgttttccactgaaatatacaaacgattgaggacattgacaacatagtgcctttctagaaagatggccatgacatcgctgtgatcactgcttacattccacgctacctgatttgcatcatgtagatgtcgctgctgtgacattgatagcctgtgactccccagccttgtgaatcatgtcagcgcacataatgtgcatgaatgaaatggagtgtttttaggatggaatgccacyaaaatcatcctgggttaatcctgtcatctggcggtttccagtgtctggacatctggatgaatgatctgcttgagagccccccaaatagagtggaggcagggatcagctctctcacacctctgagctgctgtacgtgctcatccttctccctaaaatgcttgccctctgtgttctcctggctgccttctgtgctttattgaagctgtctcctcagcatggcagtccttgctctcccttccctcctttttcctcccaaagcacattagagcttccttttttgtcatctgaattacagcctgtggggggacactgcattcattcttaccctggactccgctagctccagtgtcgtgtgctcacatgggaactctagtccctgcata

SEQ ID NO: 55965 - DNA, 711 bp, Homo sapiens
caatgatttaaagaagacgtgcaaagatacatatatatgtatacacacatatttaacatatattattcttctcatctgcagttcaacccaacagttgttttccactgaaatatacaaacgattgaggacattgacaacatagtgcctttctagaaagatggccatgacatcgctgtgatcactgcttacattccacgctacctgatttgcatcatgtagatgtcgctgctgtgacattgatagcctgtgactccccagccttgtgaatcatgtcagcgcacataatgtgcatgaatgaaatggagtgtttttaggatggaatgccactaaaatcatcctgggttaatcctgtcatctggcggtttccagtgtctggacatctggatgaatgatctgcttgagagccccccaaatagagtggaggcagggatcagctctctcacacctctgagctgctgtacgtgctcatccttctccctaaaatgcttgccctctgtgttctcctggctgccttctgtgctttattgaagctgtctcctcagcatggcagtccttgctctcccttccctcctttttcctcccaaagcacattagagcttccttttttgtcatctgaattacagcctgtggggggacactgcattcattcttaccctggactccgctagctccagtgtygtgtgctcacatgggaactctagtccctgcata

SEQ ID NO: 55966 - DNA, 654 bp, Homo sapiens
aaaagcaagagccatctccacagtcagactgtggggttcaccaccttcagtctgaacacaggagagcatgctggcaacttatgtgtgtgagaaaacttgttggaaagctaaagccgtctttacaccttcatttccactgaggaaaaaacaagagctgtgggaacattcactggcacccactgaggcaacaaatacctgtggcagaacagggctgaaaaggtgagttaagtaagttctattaagaaaaaggtataagaaaatgaaaccttgaaactcaaaacggagaagtgkaggagactgggagaaaacaaaagtacccattgggttttaaatatttttttttaattagttttagggctgggcacagtggctcctgcctgtaatcccagcactttgggaggccgaggtgggtagatcgcttgagtccaggagtttgagaccagcctgggtaacatagtgagacactgtctctacaaaaaatacaaaaattagccaggcatggtgacacaagcctgtagtcccggctacttggaaggctgaggtaggaggatggattgagcccagaagattgaggttacattgagctgagattgcatcactgcacttcagcctgggcaacagagtgagactctgtctctaaaaaaacaaataaaa

SEQ ID NO: 55967 - DNA, 639 bp, Homo sapiens
aatacagtataaaaccccaatccagagccaggcatggtggcgcatgcctgtaatcccagcatttgggaggctgatgcaggtggattgcctgaggtcaggagttccagaccagcctgaccaacgtggcaaaacccgatctctactaaaatacaaaaatttgctgggcgtgatggcaggcacctgtaatcccactacttgggaggctgaggcaggagaatagcttgaaccctggagacagagggtagaggttgcagtgaactgagatcctgccactacactccagcctgagccacagagcaagacttcatctcaaaaaaaaaaaaaaaaaaaacccaatccgagattcaaataatcaaatcataagactgtgtttaaaatccatagctatgagctctttgttgaactgctctgcacagacagcagattatctttgggaaaagcccaacatccactcattcacgctctcgtcatttaccaaaggccaagtgtgtactgggcattggaaaatagcaaaggctaggagagcacaggggtagtacctgctgtgagctgaytagctgtgtggccttggaagataccctgtgctccaggacctgtttcctgaaaaaaacttattaggtggatatgccactgccttaa

SEQ ID NO: 55968 - DNA, 639 bp, Homo sapiens
aatacagtataaaaccccaatccagagccaggcatggtggcgcatgcctgtaatcccagcatttgggaggctgatgcaggtggattgcctgaggtcaggagttccagaccagcctgaccaacgtggcaaaacccgatctctactaaaatacaaaaatttgctgggcgtgatggcaggcacctgtaatcccactacttgggaggctgaggcaggagaatagcttgaaccctggagacagagggtagaggttgcagtgaactgagatcctgccactacactccagcctgagccacagagcaagacttcatctcaaaaaaaaaaaaaaaaaaaacccaatccgagattcaaataatcaaatcataagactgtgtttaaaatccatagctatgagctctttgttgaactgctctgcacagacagcagattatctttgggaaaagcccaacatccactcattcacgctctcgtcatttaccaaaggccaagtgtgtactgggcattggaaaatagcaaaggctaggagagcacaggggtagtacctgctgtgagctgactagytgtgtggccttggaagataccctgtgctccaggacctgtttcctgaaaaaaacttattaggtggatatgccactgccttaa

SEQ ID NO: 55969 - DNA, 882 bp, Homo sapiens
aaatagaagtagaatggtgtttgccagagctggggtgggaagtttaatggagatagaatttcactttgcaagtttaaaaagttatagagattagtttcacaacaatgtgaatacacttaacaacactgaactgtatacttaaaaatagttaagacagcaaattttatgttacatggtattttaccaagttaataataaataaaaattgaattttaaaaagtacgtctttatagttctgtaggcatcacagtacctgattaagctggtactaatattgaatgaataaatgaatgataatgtaacaaacctaatgacaaaacaagtaaagggtgaggtagttcaaggagttgaaattgtcacgaagtaaartagaatcaagtatcaagcactatgtacaagatttatggtaaagataaaacatactacatagtattatgtaaagcatgaaacctataaatataagttctagccttgattcatttatacttttatttataacatatagcaaatatttactaagcacctaccatttgctaggcactattcttgttcatcaatgaacaaaaatgccctgtcttcctgaggcttatttctagtagggtaggagaaggcagcaatatacaatttctagttctagctggatgtgtgacaccagactagtcccgcgagttttctggggcttagtttcctcatgtataaagcaatgtgcatgtggcagaggaacagaatggtacttttccttcttatattccacaagatttgaaaattatttttaaatatgggacaaggccataaaaagccactagggggcaaaatgagcatggaataaacattttactgatgtgaaattgtagagacgaaaaggagagtcatcctttatgc

SEQ ID NO: 55970 - DNA, 633 bp, Homo sapiens
gcacaaaggtcatataaacagacacaaaggttgctaaaaaatagttcaataaaaatagctcaatttgccttcccatctccatccctcatgttccctgacccctgcaccaaatacaaaaacctcacagggcccactctccctcaaatcaactgcttatcataatcagagggaaaattccaactcaaagtattgagaaataaataacaaaatttccaggtaattcaacactgataagtactgataccatttctcatgatcaatagtgaaaagtagacttcgaggctgctgrccagaccaaaagcaactgcttcacctgtctcctcccattataaatcttcaggagtcctgtggaggtgggaccttctgtacaccagcagttgaatgctggttgatccaaaaaaaactgctgcttctagaaaaatgtagtgaccaactggaactctgacaagaatataaagccatgtctgtctcagaaatgcagatgtctgaccaggcatttgctgtgggtgggctgtgtcatttctttgaatgactgatatagtttagatatttgtcccttccaattctcttgttgaaatttgaactccattgttggaggcagggcctggaggaaagtgttttggtcgtggggat

SEQ ID NO: 55971 - DNA, 589 bp, Homo sapiens
gtttgactttgagttgcaaagagttcaggtaacttacttgtgttcacatagcaaattagggccaaaactggcttgatctgagctcctgatcacaaactccaaagtcgttagcaataaggtataggtcttggctctctgaggttctcacttcatttgctcaaccaccagcctgaggaaccatgcaaatcacatctattaaaacacaaactgtctttccaattcaattcaataagtatttattgaatgtatgccgcattccaggtgtcatttacctgtgattctgcaatgtttatgccaactcagccttagagcattatacactttcttcagaagagaatgtgatctgagatcaaatatagaagtcattaatgtcaaggacattcttaaaattgctatcgatgcaaaagctttcaaaacatactrtatagatgttgataagaagataaaaaagataaacttgatttgaataaaggaaaatcagcagcagttgttttgtcagttcttctcagaaagcagttgtacttaacatggagcaatatgtcccagagatgtttgcatagagtggaaattaataccataaaagctactg

SEQ ID NO: 55972 - DNA, 741 bp, Homo sapiens
atcagaacaaaactgtaaacatctctaggtattccaaagcaggtggaagataatagagataattaggtgctatagatccattggtaagactgaataatctaagtttggggaaactgtcaatatctcatttttgctaccaaattttatttttattcagagagtcaagaaagtgcagaggccatgggaatgatcactacagtttgcagcctagaatccggtgatttcctaggaactattaataggttcctgcaggatttttttgcaaaatttgaatccatcraactgcatattgttgttacagtaacaaaaccatcacttctgtctgccctttacttttcaatctaatttatgtgacttccatagtagatgataagccaaacacctgccagcaaagtattgtgggaattgtagttcccaggtttccagtcatcatgacatggtgaacaaagtgtcgttttttgagttgctgacagacaacctcaaatagggagattttatatcttttaatacaggtgaaattgcaaacgaagacaatgaaatgttaaagctttgaacccttgtaagccaaaaaaaaaggggggaattccagttgtaattaacttaaggtttgatcctgggactcaagtaatgtgatgaggacctctcttggctctgtcttctgctagatggccttcattctgaggctttctgtagtggccccaatagctccaggtcacattatcctaaatagtctcagaatca

SEQ ID NO: 55973 - DNA, 741 bp, Homo sapiens
atcagaacaaaactgtaaacatctctaggtattccaaagcaggtggaagataatagagataattaggtgctatagatccattggtaagactgaataatctaagtttggggaaactgtcaatatctcatttttgctaccaaattttatttttattcagagagtcaagaaagtgcagaggccatgggaatgatcactacagtttgcagcctagaatccggtgatttcctaggaactattaataggttcctgcaggatttttttgcaaaatttgaatccatcgaactgcatattgttgttacagtaacaaaaccatcacttctgtctgccctttacttttcaatctaatttatgtgacttccatagtagatgataagccaaacacctgccagcaaagtattgtgggaattgtagttcccaggtttccagtcatcatgacatggtgaacaaagtgtcgttttttgagttgctgacagacaacctcaaatagggagattttatatcttttaatacaggtgaaattgcaaacgaagacaatgaaatgttaaagctttgaacccttgtaagccaaaaaaaaaggggggaattccagttgtaattaacttaaggtttgatcctgggactcaagtaatgtgatgaggacctctcttggctctgtcttctgctagatggycttcattctgaggctttctgtagtggccccaatagctccaggtcacattatcctaaatagtctcagaatca

SEQ ID NO: 55974 - DNA, 627 bp, Homo sapiens
aacagcctagaatagagttatttaatagccgcttggatatgtacgatgaaggaaagaagggctggttgccaccaggcaggttaggagatgtgtgttggcttgggggagaggagggctttctaggatggaacgggtgagatgagttctgcaggaagragtcctgaagaatgaggaatcacctcaaagaaggtggacaggggcctggagggtggggctggaaggaagagagggtgtgaaggtccctgaagcaagaaggtataggtgacagattcaaggtacaacaagaccaggtagcttgagggcagagagtcagggaggtggaactgaagaaggagccaggcacccaatcaagtggtacattttagaccctctgaaacgaagactctatttgttcttttcttaaaaccaaccaggaagccattggagggttttaatcaggaaagtcatcatatttgtattgtttaaagatctgtctggcttctctaaggagaatagattgtaagggagcaagagcagatttagtcagatccatgagggggctattaacagtacccagccaggtcacaatggtagctgggaccaagctggtggcagtgggatgaagaaaagttgacttgatcatgaact

SEQ ID NO: 55975 - DNA, 2188 bp, Homo sapiens
  misc_feature (1)...(2188): n = A,T,C or G
ttagtcatgttgaatgagctcctcattttatttttaggtttttgtataagtaactatatttaatcatttcagctcaaaatggtagtctaacattgtgaaattgtaaaatgattttgaatacgtgaacatatgttaaaactgcaaaatgtttttagtcttgccattwctttcaactaattctcttttattattatactcttgatgaccctgattctttgaataaaacctgtctttgtgaaataaaagattcaattagacttccaaaattatcccatttaggtttgcttttaaaaataattgcactacattattttacttagttattgacttgtaaactgatttaacttctgtgagtgccaagtaaaattttgttttcaagctaactataaccaaagtgcacacatattttagttttatgaaattttaacgtctttccccccttttgaattaaaaatcctcgatttcactgggctctatttccctatttttctctgagtagttaaaacaagtgtaaatgggaaatttcaaaagaacccggggaaaccaccttgggccattatttntctggctgatcaagaagcagaaaatgcaggaaatctaatgagaaagcttattattatgatttgcacagctcagcttttgcataatcaagcatgtcaatgcgctcacacatttgtgaatgcctcttagaaccacacatctgaatctttttaatgtttccccattaccattgcttttgctgccccactcaggaagccatcatccatgacctcaattttcaaaatgggccagctaaaacaaagactggatgtgtttcctaatcctatcaaaccttttttttttttcctgaacagaatgaaaacaggtggtgttctcaatttttaaagaagacaaattataaactgtattctgaatatggctgtgattacctaggtacaatagactcacacaaaagttggtagaattctagaagaagctgtgtaatattcagatggttttttcttagcatctgtggtgctttggtcctttaatattatgcaatactttagttaatgttagaggaacatatgtttctatttgtcaatatgatagagtaatacatatgcatgaaggagggtgtcatgccaaggaaaccgcatctacatcctccccaaagaattgatgtgaatagtaaatacctttcactctctttctcacccatccttcatccctgcacctaagactcaaattaatacgtggtgaaatggtgagggaatgtaagatttagtttatcgtgacagtccagcaatattttaaatcatagactagtggatacagataactatatggctattttatagctatttgttatgatttttgttgtaattattgttttattgtatttataattattgttaatgtttagaccagtgaatttcaatgagagagattaatttcaaataaatgtgaggttttttcatatgctattatgtataattggatgaaataattttaagcaaaataatgagtgctttcaaaaaattacgaataagaaaaaaatcatgacaggtatggtggcagaattcagtggatttgtagtttattgaaacatttcttataaaagttgctgtttcatggattcctgatgacccacctataaatacttcaggtggtgacatgacatgggagcaggcatctgtagttaatattcacagaaagaaattgaggccttcctcattgaatgtgcagaggacacaaaagacatgagagctaaccattattttacaaaagagagtcggaatataaaatgatgtcaatgacatgaaaagataagtaacaatgaggtggcatttcaaaatattaaatgaaaaggactaatcttggtctgattttttttccacaaatctaacagcatgggtgtcttagttctggctgctacaatatgcaccacagactgggtgacttaaataacagacatttatttatcatagttctgaaagcagggaagtctaagatcaaggtggtggcccacacatttcctggtgaggggctttttcctggtttacgggtggaggctttctggctacatactcctacagcagggagagaaatcgtctccttggctctttaaggatactaatccctgtcggaaaggtttttacccccattacctaattacttcccaatactcccaaatattggaaattag

SEQ ID NO: 55976 - DNA, 735 bp, Homo sapiens
gaatttttctctaagaaaattcttcccattctcaaccattcttgagtggaagggagagggtatctctttatctttttaccttatgaatgggaaaatccatgtagtaattcagagtagaataaatctgaatatgtggtggggagaaagcatcataaggtgttttcaggatcagccttcagtgtacatgcaaagaatgcaatttgtccttcctttcttatacgctatgctcttaattcacttaaaggctgtccaggactccgtatggaaaacttcattatccctccattctgcttccaggagtccctggtgtgattggagggaatctggagaagacacaatgtccccaactcctgaaatcttcactcctctcaatattggtggcactgaaaatcacttctttgggaagagttccttaattggcttaccttttgtcaaaatgtaagtccttagaggcttggggcattaagccattagcagtaaaaaaaaaaaaaaaaaaaaaaaaaaatkggaggggagggggagtggaaaaaaactagagctgacataaaaaaaaattataaatattggatcttgcctgagactttaggtactgattgctggcttcttgacctgtttcaccttccagatattttggctacatctatctccaacacagtctgactctcaaatttagtgaatcttacactttagggccactcacttgcaggggcgccttcccaagacctttggagaagc

SEQ ID NO: 55977 - DNA, 735 bp, Homo sapiens
gaatttttctctaagaaaattcttcccattctcaaccattcttgagtggaagggagagggtatctctttatctttttaccttatgaatgggaaaatccatgtagtaattcagagtagaataaatctgaatatgtggtggggagaaagcatcataaggtgttttcaggatcagccttcagtgtacatgcaaagaatgcaatttgtccttcctttcttatacgctatgctcttaattcacttaaaggctgtccaggactccgtatggaaaacttcattatccctccattctgcttccaggagtccctggtgtgattggagggaatctggagaagacacaatgtccccaactcctgaaatcttcactcctctcaatattggtggcactgaaaatcacttctttgggaagagttccttaattggcttaccttttgtcaaaatgtaagtccttagaggcttggggcattaagccattagcagtaaaaaaaaaaaaaaaaaaaaaaaaaaatgggaggggagggggagtggaaaaaaactagagctgacataaaaaaaaattataaatattggatcttgcctgagactttaggtactgattgctggcttcttgacctgwttcaccttccagatattttggctacatctatctccaacacagtctgactctcaaatttagtgaatcttacactttagggccactcacttgcaggggcgccttcccaagacctttggagaagc

SEQ ID NO: 55978 - DNA, 735 bp, Homo sapiens
gaatttttctctaagaaaattcttcccattctcaaccattcttgagtggaagggagagggtatctctttatctttttaccttatgaatgggaaaatccatgtagtaattcagagtagaataaatctgaatatgtggtggggagaaagcatcataaggtgttttcaggatcagccttcagtgtacatgcaaagaatgcaatttgtccttcctttcttatacgctatgctcttaattcacttaaaggctgtccaggactccgtatggaaaacttcattatccctccattctgcttccaggagtccctggtgtgattggagggaatctggagaagacacaatgtccccaactcctgaaatcttcactcctctcaatattggtggcactgaaaatcacttctttgggaagagttccttaattggcttaccttttgtcaaaatgtaagtccttagaggcttggggcattaagccattagcagtaaaaaaaaaaaaaaaaaaaaaaaaaaatgggaggggagggggagtggaaaaaaactagagctgacataaaaaaaaattataaatattggatcttgcctgagactttaggtactgattgctggcttcttgacctgtttcaccttccagatattttggctacatctatctccaacacagtctgactctcaaatttagtgaatcttacactttagggccactcacttgcaggggcgccttcccaagaccyttggagaagc

SEQ ID NO: 55979 - DNA, 735 bp, Homo sapiens
gaatttttctctaagaaaattcttcccattctcaaccattcttgagtggaagggagagggtatctctttatctttttaccttatgaatgggaaaatccatgtagtaattcagagtagaataaatctgaatatgtggtggggagaaagcatcataaggtgttttcaggatcagccttcagtgtacatgcaaagaatgcaatttgtccttcctttcttatacgctatgctcttaattcacttaaaggctgtccaggactccgtatggaaaacttcattatccctccattctgcttccaggagtccctggtgtgattggagggaatctggagaagacacaatgtccccaactcctgaaatcttcactcctctcaatattggtggcactgaaaatcacttctttgggaagagttccttaattggcttaccttttgtcaaaatgtaagtccttagaggcttggggcattaagccattagcagtaaaaaaaaaaaaaaaaaaaaaaaaaaatgggaggggagggggagtggaaaaaaactagagctgacataaaaaaaaattataaatattggatcttgcctgagactttaggtactgattgctggcttcttgacctgtttcaccttccagatattttggctacatctatctccaacacagtctgactctcaaatttagtgaatcttacactttagggccactcacttgcaggggcgccttcccaagaccttkggagaagc

SEQ ID NO: 55980 - DNA, 536 bp, Homo sapiens
caccgtgtggatgkagttgccctgagagtggacagagaaagaagaatgagagcagtgagtcagcgaagggcctcagaatggggatctcaggaccttcagagctggcagccatgtggctgcctcaggacacagtcatgcagcacgtggtgtctgaggggtagacagtgattacctcctaatctcccacagatggtgccctgggcaggggtggggatgaggacccacccaagcaggcacctagaagaatttgatcctggaactcttagcagggaggcagttctgtgtaggcaacttcatggcatcacctctgcagggccttgtgaccctacccagggttattagtcccacattcttcaagagcaatggctggagaatggcaagagttgaatgggagtggggacacagagacattgttaggactatagcaagacagatctaatgcatgagtcttacagtgaaaagaaaagaaagcccagtgagcagtgccaaatgccacagaatcaagtgcctcctgctgaagatgggacaagtgagga

SEQ ID NO: 55981 - DNA, 536 bp, Homo sapiens
caccgtgtggatgtakttgccctgagagtggacagagaaagaagaatgagagcagtgagtcagcgaagggcctcagaatggggatctcaggaccttcagagctggcagccatgtggctgcctcaggacacagtcatgcagcacgtggtgtctgaggggtagacagtgattacctcctaatctcccacagatggtgccctgggcaggggtggggatgaggacccacccaagcaggcacctagaagaatttgatcctggaactcttagcagggaggcagttctgtgtaggcaacttcatggcatcacctctgcagggccttgtgaccctacccagggttattagtcccacattcttcaagagcaatggctggagaatggcaagagttgaatgggagtggggacacagagacattgttaggactatagcaagacagatctaatgcatgagtcttacagtgaaaagaaaagaaagcccagtgagcagtgccaaatgccacagaatcaagtgcctcctgctgaagatgggacaagtgagga

SEQ ID NO: 55982 - DNA, 1806 bp, Homo sapiens
agccatttggacccaagtgatcctcccacctcggcctccgggtggctggggctacaggcaatacgtgcaggcaaggctataacttcatgcgtgactgggatttttattacatgttttttaaaatttccaatgtcacataaaatactatacaagaattttagtatttgaactttaaagaatgtaattttgcatttttttcttgtgaagatgaatacagattttcrtgggagtaaaaaagacaatttaaggtgaagagtatttggttttcatgaaataatttgatttctaaaataaaagtaaaccgtcaaaactttttaaatgcaatatgaaaatgttttcagttgaaatagtcatagtaaaatttgatgagtggtaactgaattttaattgaaatttcaattgagaatacatatgatacaatgtgtatcacaaatggtaaaaatcatgtgtattttaatgttaaaatttaaaatttagtgtaatttaattttgcttgtgtgacatcaaaacaaatggaagcattgtgtgtgtgtgtatatatatatatatatatatacaataacatagtgtcatgaaagtatagtatatatatataaaattttgcgtgtgaaaattttaggtggaggtttttaaaccatttgtttactttataaagggtaataaattcacatagtctgctccccaaacacagttgaatatgtactgtggtgttactgtatatatatatatccagagtttctttatgcatatacaaatttttactctttacttgaagagtagaaagtttacatgttgtttactatgcctttcttcattaacaatagatcttagtgataattcagtatcagtttttagtgaactttgacattcttttaaaattgcatattatttcatcatcggatgtatcatgatgtctttattcattcccctattgaaaaacatttcagttgtttcaaattttagtttattttattttacttttaatttttgagatggagtcttgctgtgtcacccaggctggagtgcagtggcaccattttggctcactgcaacctatgacttcttggttcaagcgattctcctgcctcaccctcccgagtagctgaaattacaggcccatgccaccacacccaggtaatttttgtatttttcgtagagacggggtttcaccttgttggccaggctggtctcgaactcctgacctcaagtgatctacccggcttggcctctcaaggtgtggtgattacaggcttgagccatagcgcctggcctcaattgtatttatgaagagtgccacagtgagtaaacatgtgagcatgagttcatacataggtaagtatatttgtataggagtatatcaattcctcaaaattgatttaccattccaaatgggatgtcatttatgcgttcaaagatgtccataaagttgccatccatataatgaatagcaggtgacactcccatcagcaatatcagaatgtcagatttcccacagccttgtcagtagatgagttttcagactttcgcatgatttccaaattcatggagaaaaaatattcaagagtagctttaatcttcattcagcatggtgttttttcattcagcacgtgcttgggaaccatttatttttccatttctgtgaatttcatgttcatatcctttgtctacctatttctagagcaatgtttttttttattattgattttctatttcatgtatcagaatagctctttgctctgctctatttgtctatctgtttgtcagtctatctatcgagaagtaaatacaggcatgtgtaggcacagt

SEQ ID NO: 55983 - DNA, 1806 bp, Homo sapiens
agccatttggacccaagtgatcctcccacctcggcctccgggtggctggggctacaggcaatacgtgcaggcaaggctataacttcatgcgtgactgggatttttattacatgttttttaaaatttccaatgtcacataaaatactatacaagaattttagtatttgaactttaaagaatgtaattttgcatttttttcttgtgaagatgaatacagattttcatgggagtaaaaaagacaatttaaggtgaagagtatttggttttcatgaaataatttgatttctaaaataaaagtaaaccgtcaaaactttttaaatgcaatatgaaaatgttttcagttgaaatagtcatagtaaaatttgatgagtggtaactgaattttaattgaaatttcaattgagaatacatatgatacaatgtgtatcacaaatggtaaaaatcatgtgtattttaatgttaaaatttaaaatttagtgtaatttaattttgcttgtgtgacatcaaaacaaatggaagcattgtgtgtgtgtgtrtatatatatatatatatatacaataacatagtgtcatgaaagtatagtatatatatataaaattttgcgtgtgaaaattttaggtggaggtttttaaaccatttgtttactttataaagggtaataaattcacatagtctgctccccaaacacagttgaatatgtactgtggtgttactgtatatatatatatccagagtttctttatgcatatacaaatttttactctttacttgaagagtagaaagtttacatgttgtttactatgcctttcttcattaacaatagatcttagtgataattcagtatcagtttttagtgaactttgacattcttttaaaattgcatattatttcatcatcggatgtatcatgatgtctttattcattcccctattgaaaaacatttcagttgtttcaaattttagtttattttattttacttttaatttttgagatggagtcttgctgtgtcacccaggctggagtgcagtggcaccattttggctcactgcaacctatgacttcttggttcaagcgattctcctgcctcaccctcccgagtagctgaaattacaggcccatgccaccacacccaggtaatttttgtatttttcgtagagacggggtttcaccttgttggccaggctggtctcgaactcctgacctcaagtgatctacccggcttggcctctcaaggtgtggtgattacaggcttgagccatagcgcctggcctcaattgtatttatgaagagtgccacagtgagtaaacatgtgagcatgagttcatacataggtaagtatatttgtataggagtatatcaattcctcaaaattgatttaccattccaaatgggatgtcatttatgcgttcaaagatgtccataaagttgccatccatataatgaatagcaggtgacactcccatcagcaatatcagaatgtcagatttcccacagccttgtcagtagatgagttttcagactttcgcatgatttccaaattcatggagaaaaaatattcaagagtagctttaatcttcattcagcatggtgttttttcattcagcacgtgcttgggaaccatttatttttccatttctgtgaatttcatgttcatatcctttgtctacctatttctagagcaatgtttttttttattattgattttctatttcatgtatcagaatagctctttgctctgctctatttgtctatctgtttgtcagtctatctatcgagaagtaaatacaggcatgtgtaggcacagt

SEQ ID NO: 55984 - DNA, 1806 bp, Homo sapiens
agccatttggacccaagtgatcctcccacctcggcctccgggtggctggggctacaggcaatacgtgcaggcaaggctataacttcatgcgtgactgggatttttattacatgttttttaaaatttccaatgtcacataaaatactatacaagaattttagtatttgaactttaaagaatgtaattttgcatttttttcttgtgaagatgaatacagattttcatgggagtaaaaaagacaatttaaggtgaagagtatttggttttcatgaaataatttgatttctaaaataaaagtaaaccgtcaaaactttttaaatgcaatatgaaaatgttttcagttgaaatagtcatagtaaaatttgatgagtggtaactgaattttaattgaaatttcaattgagaatacatatgatacaatgtgtatcacaaatggtaaaaatcatgtgtattttaatgttaaaatttaaaatttagtgtaatttaattttgcttgtgtgacatcaaaacaaatggaagcattgtgtgtgtgtgtatrtatatatatatatatatacaataacatagtgtcatgaaagtatagtatatatatataaaattttgcgtgtgaaaattttaggtggaggtttttaaaccatttgtttactttataaagggtaataaattcacatagtctgctccccaaacacagttgaatatgtactgtggtgttactgtatatatatatatccagagtttctttatgcatatacaaatttttactctttacttgaagagtagaaagtttacatgttgtttactatgcctttcttcattaacaatagatcttagtgataattcagtatcagtttttagtgaactttgacattcttttaaaattgcatattatttcatcatcggatgtatcatgatgtctttattcattcccctattgaaaaacatttcagttgtttcaaattttagtttattttattttacttttaatttttgagatggagtcttgctgtgtcacccaggctggagtgcagtggcaccattttggctcactgcaacctatgacttcttggttcaagcgattctcctgcctcaccctcccgagtagctgaaattacaggcccatgccaccacacccaggtaatttttgtatttttcgtagagacggggtttcaccttgttggccaggctggtctcgaactcctgacctcaagtgatctacccggcttggcctctcaaggtgtggtgattacaggcttgagccatagcgcctggcctcaattgtatttatgaagagtgccacagtgagtaaacatgtgagcatgagttcatacataggtaagtatatttgtataggagtatatcaattcctcaaaattgatttaccattccaaatgggatgtcatttatgcgttcaaagatgtccataaagttgccatccatataatgaatagcaggtgacactcccatcagcaatatcagaatgtcagatttcccacagccttgtcagtagatgagttttcagactttcgcatgatttccaaattcatggagaaaaaatattcaagagtagctttaatcttcattcagcatggtgttttttcattcagcacgtgcttgggaaccatttatttttccatttctgtgaatttcatgttcatatcctttgtctacctatttctagagcaatgtttttttttattattgattttctatttcatgtatcagaatagctctttgctctgctctatttgtctatctgtttgtcagtctatctatcgagaagtaaatacaggcatgtgtaggcacagt

SEQ ID NO: 55985 - DNA, 1806 bp, Homo sapiens
agccatttggacccaagtgatcctcccacctcggcctccgggtggctggggctacaggcaatacgtgcaggcaaggctataacttcatgcgtgactgggatttttattacatgttttttaaaatttccaatgtcacataaaatactatacaagaattttagtatttgaactttaaagaatgtaattttgcatttttttcttgtgaagatgaatacagattttcatgggagtaaaaaagacaatttaaggtgaagagtatttggttttcatgaaataatttgatttctaaaataaaagtaaaccgtcaaaactttttaaatgcaatatgaaaatgttttcagttgaaatagtcatagtaaaatttgatgagtggtaactgaattttaattgaaatttcaattgagaatacatatgatacaatgtgtatcacaaatggtaaaaatcatgtgtattttaatgttaaaatttaaaatttagtgtaatttaattttgcttgtgtgacatcaaaacaaatggaagcattgtgtgtgtgtgtatatrtatatatatatatatacaataacatagtgtcatgaaagtatagtatatatatataaaattttgcgtgtgaaaattttaggtggaggtttttaaaccatttgtttactttataaagggtaataaattcacatagtctgctccccaaacacagttgaatatgtactgtggtgttactgtatatatatatatccagagtttctttatgcatatacaaatttttactctttacttgaagagtagaaagtttacatgttgtttactatgcctttcttcattaacaatagatcttagtgataattcagtatcagtttttagtgaactttgacattcttttaaaattgcatattatttcatcatcggatgtatcatgatgtctttattcattcccctattgaaaaacatttcagttgtttcaaattttagtttattttattttacttttaatttttgagatggagtcttgctgtgtcacccaggctggagtgcagtggcaccattttggctcactgcaacctatgacttcttggttcaagcgattctcctgcctcaccctcccgagtagctgaaattacaggcccatgccaccacacccaggtaatttttgtatttttcgtagagacggggtttcaccttgttggccaggctggtctcgaactcctgacctcaagtgatctacccggcttggcctctcaaggtgtggtgattacaggcttgagccatagcgcctggcctcaattgtatttatgaagagtgccacagtgagtaaacatgtgagcatgagttcatacataggtaagtatatttgtataggagtatatcaattcctcaaaattgatttaccattccaaatgggatgtcatttatgcgttcaaagatgtccataaagttgccatccatataatgaatagcaggtgacactcccatcagcaatatcagaatgtcagatttcccacagccttgtcagtagatgagttttcagactttcgcatgatttccaaattcatggagaaaaaatattcaagagtagctttaatcttcattcagcatggtgttttttcattcagcacgtgcttgggaaccatttatttttccatttctgtgaatttcatgttcatatcctttgtctacctatttctagagcaatgtttttttttattattgattttctatttcatgtatcagaatagctctttgctctgctctatttgtctatctgtttgtcagtctatctatcgagaagtaaatacaggcatgtgtaggcacagt

SEQ ID NO: 55986 - DNA, 1806 bp, Homo sapiens
agccatttggacccaagtgatcctcccacctcggcctccgggtggctggggctacaggcaatacgtgcaggcaaggctataacttcatgcgtgactgggatttttattacatgttttttaaaatttccaatgtcacataaaatactatacaagaattttagtatttgaactttaaagaatgtaattttgcatttttttcttgtgaagatgaatacagattttcatgggagtaaaaaagacaatttaaggtgaagagtatttggttttcatgaaataatttgatttctaaaataaaagtaaaccgtcaaaactttttaaatgcaatatgaaaatgttttcagttgaaatagtcatagtaaaatttgatgagtggtaactgaattttaattgaaatttcaattgagaatacatatgatacaatgtgtatcacaaatggtaaaaatcatgtgtattttaatgttaaaatttaaaatttagtgtaatttaattttgcttgtgtgacatcaaaacaaatggaagcattgtgtgtgtgtgtatatatatatatatatatatacaataacatagtgtcatgaaagtatagtatatatatataaaattttgcgtgtgaaaattttaggtggaggtttttaaaccatttrtttactttataaagggtaataaattcacatagtctgctccccaaacacagttgaatatgtactgtggtgttactgtatatatatatatccagagtttctttatgcatatacaaatttttactctttacttgaagagtagaaagtttacatgttgtttactatgcctttcttcattaacaatagatcttagtgataattcagtatcagtttttagtgaactttgacattcttttaaaattgcatattatttcatcatcggatgtatcatgatgtctttattcattcccctattgaaaaacatttcagttgtttcaaattttagtttattttattttacttttaatttttgagatggagtcttgctgtgtcacccaggctggagtgcagtggcaccattttggctcactgcaacctatgacttcttggttcaagcgattctcctgcctcaccctcccgagtagctgaaattacaggcccatgccaccacacccaggtaatttttgtatttttcgtagagacggggtttcaccttgttggccaggctggtctcgaactcctgacctcaagtgatctacccggcttggcctctcaaggtgtggtgattacaggcttgagccatagcgcctggcctcaattgtatttatgaagagtgccacagtgagtaaacatgtgagcatgagttcatacataggtaagtatatttgtataggagtatatcaattcctcaaaattgatttaccattccaaatgggatgtcatttatgcgttcaaagatgtccataaagttgccatccatataatgaatagcaggtgacactcccatcagcaatatcagaatgtcagatttcccacagccttgtcagtagatgagttttcagactttcgcatgatttccaaattcatggagaaaaaatattcaagagtagctttaatcttcattcagcatggtgttttttcattcagcacgtgcttgggaaccatttatttttccatttctgtgaatttcatgttcatatcctttgtctacctatttctagagcaatgtttttttttattattgattttctatttcatgtatcagaatagctctttgctctgctctatttgtctatctgtttgtcagtctatctatcgagaagtaaatacaggcatgtgtaggcacagt

SEQ ID NO: 55987 - DNA, 1806 bp, Homo sapiens
agccatttggacccaagtgatcctcccacctcggcctccgggtggctggggctacaggcaatacgtgcaggcaaggctataacttcatgcgtgactgggatttttattacatgttttttaaaatttccaatgtcacataaaatactatacaagaattttagtatttgaactttaaagaatgtaattttgcatttttttcttgtgaagatgaatacagattttcatgggagtaaaaaagacaatttaaggtgaagagtatttggttttcatgaaataatttgatttctaaaataaaagtaaaccgtcaaaactttttaaatgcaatatgaaaatgttttcagttgaaatagtcatagtaaaatttgatgagtggtaactgaattttaattgaaatttcaattgagaatacatatgatacaatgtgtatcacaaatggtaaaaatcatgtgtattttaatgttaaaatttaaaatttagtgtaatttaattttgcttgtgtgacatcaaaacaaatggaagcattgtgtgtgtgtgtatatatatatatatatatatacaataacatagtgtcatgaaagtatagtatatatatataaaattttgcgtgtgaaaattttaggtggaggtttttaaaccatttgtttactttataaagggtaataaattcacatagtctgctccccaaacacagttgaatatgtactgtggtgttactgtatatatatatatccagagtttctttatgcatatacaaatttttactctttacttgaagagtagaaagtttacatgttgtttactatgcctttcttcattaacaatagatcttagtgataattcagtatcagtttttagtgaactttgacattcttttaaaattgcatattatttcatcatcggatgtatcatgatgtctttattcattcccctattgaaaaacatttcagttgtttcaaattttagtttattttattttacttttaatttttgagatggagtcttgctgtgtcacccaggctggagtgcagtggcaccattttggctcactgcaacctatgacttcttggttcaagcgattctcctgcctcaccctcccgagtagctgaaattacaggcccatgccaccacacccaggtaatttttgtatttttcgtagagacggggtttcaccttgttggccaggctggtctcgaactcctgacctcaagtgatctacccggcttggcctctcaaggtgtggtgattacaggcttgagccatagcgcctggcctcaattgtatttatraagagtgccacagtgagtaaacatgtgagcatgagttcatacataggtaagtatatttgtataggagtatatcaattcctcaaaattgatttaccattccaaatgggatgtcatttatgcgttcaaagatgtccataaagttgccatccatataatgaatagcaggtgacactcccatcagcaatatcagaatgtcagatttcccacagccttgtcagtagatgagttttcagactttcgcatgatttccaaattcatggagaaaaaatattcaagagtagctttaatcttcattcagcatggtgttttttcattcagcacgtgcttgggaaccatttatttttccatttctgtgaatttcatgttcatatcctttgtctacctatttctagagcaatgtttttttttattattgattttctatttcatgtatcagaatagctctttgctctgctctatttgtctatctgtttgtcagtctatctatcgagaagtaaatacaggcatgtgtaggcacagt

SEQ ID NO: 55988 - DNA, 537 bp, Homo sapiens
agcatggcagactggtcatgggctttagtaggcagctttaagtattcctgttcatttcattgtcccacagtcataaggtgacaagagggccctcagttacagagtagaggtggaaagagtcatcttaattatttggggaaaggatggtcaatatcatgtgtaacaggctgcaaataaagacctagaaaagcatttgaggtcttgttcccatccttgacggtctcagtgttacttctgacaggacgaccagagtgtagagtctggggcattctctaactcaattaaaagtagaaaacttagtataagatgtgtatgtgggcagaattaatagtaagaattggcagggctgggcgcggtggctcacgcctgtaatcccagcactttgggaggccggggccagcggatcatgaggtcaggaaatcgagaccatcctggctaacacggtgaaaccccgtctytactaaaaatacaaaaaattagccaggcgtggtggcgggcgcctgtaatcccagctactccggaggctgagaaaggaga

SEQ ID NO: 55989 - DNA, 2075 bp, Homo sapiens
ccatgcccagttaactttttgtatttttagtagagacggggtttcaccatgttggccaggctggtcccgaattcctgacctcaggtgatccaccctcctcagcctcccagagtgttgggattacaggcgtgagccactgagcctggccgcagaagcaacttttcaatgggatgatcaaggaaccccttagggagtaaggaggaagggatgtggggaacagcatccaggagtgggaacagcatgtgcaaaggccctgtggtgggagcagccctgggtagagagcagatgtctccaaatgtttgttcaggctgctataacaaatatrccgtaaactggggtagcttatgaacaacagttccggaagctgggaagtccaagatcaaggcaccagcagattcacttcctagtttgcagatgaccgtcttctcactgtgtcctcagtagacagcagagggagcaggggagctcttggggcctcttttataaggagcagagggatggaggagcccagccagcagtgagcctcatgcagctgcacgtcctccacgcccagttctgaggcctcttagaaaaaaaggaaataaagaaatgaggaagtgccagacccgaggctgcaggtggtgggggacaggcaggcctggggtctgggatagtgagttttggaggtgggtctgggggagccgggggccttggagtctgaggtctgtggggtcctgagatttggggactctgaggtctggggatccaggggtctgagagtcctggaatctaagggtcctgaggtctgggggtcctaaagtctgaggatccggaggtttgggggtcctgggatctaggggtcttgggatatgggggtttggtgggggggtataggggtctggggatccagatgtctgagagtcttggggtctgggggtccaggggtctggtggttctgaagtctggggatccagaggtctgggagtcttgggatctgggggtcctgcagtctgggggcccctggagtttggtagtcctggggtctgggatgtagggaaaagaaaaagcgatcagactgttactgtgtctatgtagaaaaggaagacataaaaaacttcattttgacccataccctgaacaattgctttgccctgagatgctgttaatctgtaactttagccccaacctcgagctcacagaaatatgtgttgtatggaatcaaggtttaagggatctagggctgtgcaggatgtgctttgctaataaaatgtttgcaggcagtgtgcttggtaaaagtcatcgccattctccattctcgagtaaccaggggcacaatgcactgcagaaagccgcagggacctctgctctggaaagtcaggtactgtccaagatttctccccatgggatagtctgaaacatggcctcgtgggatgggaaagatctgatcgtccccccagcccgacacccgtgaagggtctgtgctgaggaggattagtaaaagaggaaggcctcttgcagttgagctaagaggaaggcctctgtctcctgcctgcccctgggaactgaatgtctcggtataaaacccgattgtacatttgttcaattctgagataggagaaaaaccgccctatggcgggaggcgagacgtattggcagcaatgctgctctgttactctttactcggctgagatgtttgggtggagagaagtataaatctggcctacgtgcacatccaggcacagtacctgctcttgaacttgtgacacggattcctttgctcacatgttttcttgctgacctcctccccactatcaccctgctctcttgatgcattcctcttgctgagatagtgaaaatagtaatcaataaatactgagggaactcagagactggtgccagtgcaggtccttggtatgctgagcgccggtcccctgggcccactgttctttctctatactctgtctctgtgtcttatttcttttctcagtctctcattccacctgatgagatatcccacaggtgtggaggggcaggccaccccttcatgcaggtcttaggatgtgagggttctgaggtctgtgggttctggggtatgg

SEQ ID NO: 55990 - DNA, 561 bp, Homo sapiens
caggcttcacctggtgtcttcacacctctatccctaatgcctcaccagcgccctctattgagaaatcttagcattgtgctcactttttttttttttttgagacggagtctcgttctgtctcccaggctggagtgcactggcaccatctcggctcactgcaagctctgcctcccgggttcacgccattctcctgcctcagcctcctgagtagctgggactacaggcgcctgccaccacgcccagttaatattttgtatttttagtagagacggggtttcactatgctagccaggatggtctccatctcctgacctcgtgattcgcccacctcggcctcccaaagtgctgggattacaggcgtgagccaccgcgcctggccgagcattgtgctcactttaaacaagacataacgaaagaaattcctttgtttatcacatattgaaagggtccattyggagacaagaggcaatgcatggataattgacacacatatatttattatttttatttttttgagatggacggaatcttgctctgttgcccaggctgaagtgcagtggc

SEQ ID NO: 55991 - DNA, 627 bp, Homo sapiens
atgctccagaagcagcaggggaggctttggggatgtggaggttgcccagggtcacagggacccctgttgtgccctccgtcagtgcccctctggcctccccacaccctctgtggctccctgctgtggccagtcttccccatcatcgcccctggctctcttctctcctgcagtccagccactcagcccttgtacatgtccctcatctgttctcacaatgcccaccccagktgacaacatcctcccaagcccccttcaggagatggtggggctgacactaacaggggagggggtgtagggaaggtgagcaccctggcccctgagtgctgcacacaaactgtgtaaaaatagctgctccccctgccccctgtgaggaggcggctgtgacggtggtggctgcagtgacggggatgtgcccagagaagcatccggcagggccagttgccatggtgatgctgactcagcggcagaggcaggtagcagcatctggtacccggccggcacgcctctgcttggcctacgctcatagcaccctgtccagccccaactttccagcctccaccctgggggtgtcttctgaggctgcagaggggtgggtgagacctcgggaaggactggacaagttcctcc

SEQ ID NO: 55992 - DNA, 1189 bp, Homo sapiens
ttttttagtagagatgaggtttcagcatgttggccaggctggtctcaaactcctgacctcagatgatctgcctgccttggcctcccacgtgctgggattacaggcgtgagccacgcgcccagcaggatgtggtttcttgaggatcctttcagggctttggcctctcccagctcctatcccactactattagggtcacagaggaggaggtcaagactgggatttayccatgaagcctctttggatgaaatcagctggatattggctgggtcactttgttaaagaccagaacctggggtgggaagcctgtgcctgtttggatgtcagagcccacagccatgggcccctggcccagcttcctaaccagtttggccctatttgccttggaagcacttgggctgtggggtcaaatggtcccacgcgctgatcttggccttggcgcttgctggctgcatgaacatgagtacatcttgtcacctgtcccagtttcagtctctctattctgggcagaaggattttctcaccgacaaggactaagtaccctcctgtaggctcaggactagggcagagcttgtacacgatagaggagatgctcgatcgggttctctctccaagtcctgcttctcatggatttaaggggctgtggagggcctgactgctgtgctgagttaggcccggggcctgccagtggagttctaaggcctttaaagagtttgagttgtgttttaggaagaccacctggggcagtgtggaaatgtcatgattgagggagagagtttcttgaagcaactccgtctagtgcagagcttctcaagctagggtgcatctaagtatctggaggagctgttaaagcacgtgttgctagaacccactctgagagttttatttttgtttgtttgttttttgagacggagtcttgctcttgttgcttagtcaggagtgcaatggtgcgatctcggttcactgcgacctcagccttcctgggttcaagcaattctcctgcttcagcctccccagtagctgggattacaggtgcctgccaccatgtccggctaatttttattttttctttttgtatttttagtagagatggggtttcaccatgttggccaggctggtctcatactcctggcctcatgatctgcccacctcggcctcccaaagtgctgggattacaggtgtgagcccagc

SEQ ID NO: 55993 - DNA, 1189 bp, Homo sapiens
ttttttagtagagatgaggtttcagcatgttggccaggctggtctcaaactcctgacctcagatgatctgcctgccttggcctcccacgtgctgggattacaggcgtgagccacgcgcccagcaggatgtggtttcttgaggatcctttcagggctttggcctctcccagctcctatcccactactattagggtcacagaggaggaggtcaagactgggatttatccatgaagsctctttggatgaaatcagctggatattggctgggtcactttgttaaagaccagaacctggggtgggaagcctgtgcctgtttggatgtcagagcccacagccatgggcccctggcccagcttcctaaccagtttggccctatttgccttggaagcacttgggctgtggggtcaaatggtcccacgcgctgatcttggccttggcgcttgctggctgcatgaacatgagtacatcttgtcacctgtcccagtttcagtctctctattctgggcagaaggattttctcaccgacaaggactaagtaccctcctgtaggctcaggactagggcagagcttgtacacgatagaggagatgctcgatcgggttctctctccaagtcctgcttctcatggatttaaggggctgtggagggcctgactgctgtgctgagttaggcccggggcctgccagtggagttctaaggcctttaaagagtttgagttgtgttttaggaagaccacctggggcagtgtggaaatgtcatgattgagggagagagtttcttgaagcaactccgtctagtgcagagcttctcaagctagggtgcatctaagtatctggaggagctgttaaagcacgtgttgctagaacccactctgagagttttatttttgtttgtttgttttttgagacggagtcttgctcttgttgcttagtcaggagtgcaatggtgcgatctcggttcactgcgacctcagccttcctgggttcaagcaattctcctgcttcagcctccccagtagctgggattacaggtgcctgccaccatgtccggctaatttttattttttctttttgtatttttagtagagatggggtttcaccatgttggccaggctggtctcatactcctggcctcatgatctgcccacctcggcctcccaaagtgctgggattacaggtgtgagcccagc

SEQ ID NO: 55994 - DNA, 1189 bp, Homo sapiens
ttttttagtagagatgaggtttcagcatgttggccaggctggtctcaaactcctgacctcagatgatctgcctgccttggcctcccacgtgctgggattacaggcgtgagccacgcgcccagcaggatgtggtttcttgaggatcctttcagggctttggcctctcccagctcctatcccactactattagggtcacagaggaggaggtcaagactgggatttatccatgaagcctctttggatgaaatcagctggatattggctgggtcactttgttaaagaccagaacctggggtgggaagcctgtgcctgtttggatgtcagagcccacagccatgggcccctggcccagcttcctaaccagtttggccctrtttgccttggaagcacttgggctgtggggtcaaatggtcccacgcgctgatcttggccttggcgcttgctggctgcatgaacatgagtacatcttgtcacctgtcccagtttcagtctctctattctgggcagaaggattttctcaccgacaaggactaagtaccctcctgtaggctcaggactagggcagagcttgtacacgatagaggagatgctcgatcgggttctctctccaagtcctgcttctcatggatttaaggggctgtggagggcctgactgctgtgctgagttaggcccggggcctgccagtggagttctaaggcctttaaagagtttgagttgtgttttaggaagaccacctggggcagtgtggaaatgtcatgattgagggagagagtttcttgaagcaactccgtctagtgcagagcttctcaagctagggtgcatctaagtatctggaggagctgttaaagcacgtgttgctagaacccactctgagagttttatttttgtttgtttgttttttgagacggagtcttgctcttgttgcttagtcaggagtgcaatggtgcgatctcggttcactgcgacctcagccttcctgggttcaagcaattctcctgcttcagcctccccagtagctgggattacaggtgcctgccaccatgtccggctaatttttattttttctttttgtatttttagtagagatggggtttcaccatgttggccaggctggtctcatactcctggcctcatgatctgcccacctcggcctcccaaagtgctgggattacaggtgtgagcccagc

SEQ ID NO: 55995 - DNA, 655 bp, Homo sapiens
ctgcattcgaggtgtctgtgggatagctggggagacgttgaggatgcagttaattataggatctggagcttgtgagagatggggctggggggagccagtgagacatctggagtgtggagagtgctgactgcgcgcagagcagcagaggcaaagccggagtggaggcctggcatggaccttmttattaaaggcatggaccttctggactgcagcaggctgtcccagagagggaggagagcgaggagtgtgtgaattttgctaattgtactgtggttatgtacactgttggcattagggggatctgagggaagggtgtttggaaataatgtgtgttgtctttgcaacacttctgtaagtgtaagataatttcaaaccagaagtagattgtactgggtggagcagtgcctgctttactcctgtgttatgtttttaaatgccttttttgatttacatattgacatgcaataaattacacatgttgaaagtgtgtgataagcatacgatagtttgataagttttgacatacatattctctcatgaaacccatcactgcagtcagggtagtgaatacacctgtcacttacagacagttcctcatatctccttgtcattcctctctgtgcctgcacctctccctgcaatagacaactgctga

SEQ ID NO: 55996 - DNA, 1257 bp, Homo sapiens
gcatgagccaccgtgccaggctgtcatgatatttcaataaagtgatgtagaatcatgtaggccatgaccttccttaggtggagcagaaaatgtcacctccatgtaaaaaaaggaacagggaccaagtgcggtggctcacgcctgtaatcccaacactttgggaggccgaggagggcagatcacctgaggtcgggagttcgaaaccagcctgaccaacacggagaaaccctatctctactaaaactgcaaaaaattagccgggcgtggtggcgacatgcctgtaatcccagctactggggaggctaaggcaggagaatcacttgaaccagtgaggcagagtgtcgcagtgagccgagaccgtaccattgcactccagcctagacgacaagattgaaactccgtctcaaaaaaaaaaagaaaataaataaataaaataaaataaaataaggaacaggagcaggaagaaaatacaccagccaggaatgttaacagtcattgtctctgggtgatttttttataagtttggttttttttgagacagagtctcactctagcgctcaggctgaagtgcagtgcggtgatcttggctcattgcagactccacctcccaggttcaagcagttctcctgcctcagcctcccaaatagttgggattacaggtgcctaccaccaggcccagtgaatttttttgcaatggtttgagatgttaaatctgtttctgagtatttgtagggttttgaatgggaatttaaargagtcgggtcatggaatattgacagtacattttaaacagatccccaagaataattactttttaaattttatttttatttcaacagtttttgggtacaggtggttttcagttacatggatgtgttctgagattctagtgggtccgtcacctgagcagtgtacactgtacctaatatgtagtctttcatccctcatccccctcccatcctttcctctctgagtccccagcgtcaattatatcattcttaggcctttttatcggtgtagcttatctctaacttttaagtgagaacatatgatttttggtttttcattcccgaattacttcacttagaataatggcctccagctccctctaagttgctgcaaaaggcattattttgttcctttttatggctgagtggtattccgtggtgtatatataccacgttttctttgtctactcgttggttgatgggcacttaagttggttccacgtctttgcacttgtgaattgtgcaaaca

SEQ ID NO: 55997 - DNA, 1257 bp, Homo sapiens
gcatgagccaccgtgccaggctgtcatgatatttcaataaagtgatgtagaatcatgtaggccatgaccttccttaggtggagcagaaaatgtcacctccatgtaaaaaaaggaacagggaccaagtgcggtggctcacgcctgtaatcccaacactttgggaggccgaggagggcagatcacctgaggtcgggagttcgaaaccagcctgaccaacacggagaaaccctatctctactaaaactgcaaaaaattagccgggcgtggtggcgacatgcctgtaatcccagctactggggaggctaaggcaggagaatcacttgaaccagtgaggcagagtgtcgcagtgagccgagaccgtaccattgcactccagcctagacgacaagattgaaactccgtctcaaaaaaaaaaagaaaataaataaataaaataaaataaaataaggaacaggagcaggaagaaaatacaccagccaggaatgttaacagtcattgtctctgggtgatttttttataagtttggttttttttgagacagagtctcactctagcgctcaggctgaagtgcagtgcggtgatcttggctcattgcagactccacctcccaggttcaagcagttctcctgcctcagcctcccaaatagttgggattacaggtgcctaccaccaggcccagtgaatttttttgcaatggtttgagatgttaaatctgtttctgagtatttgtagggttttgaatgggaatttaaaggagtcgggtcatggaatattgacagtacattttaaacagatccccaagaataattactttttaaattttatttttatttcaacagtttttgggtacaggtggttttcagttacatggatgtgttctgagattctagtgggtccgtcacctgagcagtgtacactgtacctaatatgtagtctttcatccctcatccccctcccatcctttcctctctgagtccccagcgtcaattatatcattcttaggcctttttatcggtgtagcttatctctaacttttaagtgagaacatatgatttttggtttttcattcccgarttacttcacttagaataatggcctccagctccctctaagttgctgcaaaaggcattattttgttcctttttatggctgagtggtattccgtggtgtatatataccacgttttctttgtctactcgttggttgatgggcacttaagttggttccacgtctttgcacttgtgaattgtgcaaaca

SEQ ID NO: 55998 - DNA, 1548 bp, Homo sapiens
tggaacttattcagtctacatattcattctcttaacaatatgttttgatgagcagaagtaattaattttgatgaattccagcttgttaaattttcataattttatggatcacacttttggtatcatatctgtaaaatctttgccaaacccaaggtcacaaagattttctcctatttttttccaggaactatttttttaaaaagagaatagaagtttgtttgtctgcaggtgaagtagctcaatttgtaaatgttttaaaacaaaacatgtctgttttcttcctaaacatgtctaggaaagggctatgggttatcggttttaatatattagcttatattatactaaaaatcacagatactcagctatgtttgacctatagaaacagcagcttttaaaattgtaggcagtcaacctagtcacatatgtctttggctcagtacagaatctatctttttttttttttttttggtctggtaaagtcctatgaattagacaagccatctttaactcacgcctaattagggaaacatcttccccaggggacatacaacaggagtccacttaggggtatggactgtaaagctcaaaggtcacttggtgcgcggatctccaaagcagaggcctccacagacattttacttgaatttcatatttgaaataacattcaagtaagcmccataattaatgcagtgtgaatcttcagatacgttgcatgctaaatattaacattttggagatggctagcacagtttcctatacctctaactaggctgggtagatgcttgacactaaagtttctcctcctatctctgtgtgattaaagaggatcctgacattgtaaagcaagcttttaagtactgctagccttttaagtactgctattctttgcgacctgggattttcataatatttggaacaacaacaacaaaagatgagactaagttcagtactgaagttgagacatgactgcttctgtttctagtttcttatctagtttcttattctttttgacctgtaaagcaacgtcattattctcaatgaatgacctgataagtaagtgtggtagagtaagtatacagtgccattttccttttccagcagaggaagattacatttcccagactaccttgcatttgaatggaggcctgtgcctggatactgagggcgcctgggatgtggatggaagtggtgtatgttcttttggagaaattccagggctttattttccctaaagcctggctctatgctgggtttcctccatctccctagattaataagtttgggtaatgatttttggtcattttttccttcaaacggttgccagaagcaatactagaagagcaggtcattggatacatgaaataacattaacattcataggagaacttttcagccataggcaaatctccagcagcccggagaaacaagacattagaaagtccaaaaactcacagtagtggcaaaatcagtttagtgaaaaaaaaaacaaaaaacaaacaaacaaaaaaaacagtaataatactgacaaaaagagttgtcatttagaaa

SEQ ID NO: 55999 - DNA, 728 bp, Homo sapiens
tgatttgcatttctctaatgaccagtaatgatgagctttttttcatatgtttgttggctgcataaatgtcttcttttgagaagtgtctgttcatatccttcacccattttttgaagaaaacaaactcttaagagagmagtattcattcttttgagtgtgagggatggagaaagagaaagatggagagagtattataagcagctgtatcccctttgccatggtgatagcagaccattcacatgggagcttctggtctctttgtaataataataagagccacattaccagtacttagagtatgctagttattttaacacattgtatcattaaatcttcaaaacatccctatgagttagaaacctaaaaaaaaaaaaaaaaaaaaaacctctgaggaaataaagtgacaggttatgtcaaagctcaaagtcacataactagtaggtagtccactagagtttgaatctgtgggacttagttttacccttctttctccagtcttggtagcccagatgccaatttttcagagtagcataggcccttcccatgctcttaccaccccccacacaaagtctaggttttccccaacatggtccagccgaggtacaactagtgcaataacaggactcctttcttgcagctaagcgactggagaccccaaaggagctggactcagatggtgaagagtggacccaataccaatgcctgtccttctcggctagatgggccca

SEQ ID NO: 56000 - DNA, 689 bp, Homo sapiens
tatgttcaatttcatgttaacccagcacctttctcttcctggggccaaactagcctacaaaatgacacagaacatcaacctgttctgattttgttacctttactcccacatctttccacaaagcttattgtaaagaaaagttaattgcagatatgactaactacacaaagctgacacatttaatatataaaaagctttttattgccagataaatgctttctcagctgctgttttattgaacagcaaatggtgatacccaaagatggctaataacaggtctgatttccaggggattacacagaggttgtactctgctttctaccttctattaatgagaggtatgaatttgagtcaattaaaatttttttagatgacatacctattacatgtaaaaacttacattttatgactcataagggcaaatgattagtataaactgkgtttcttatttaaaatacattaaatgaaagatcatacttgcatttggcattcttataactttatataaagagatttctggtattttctcatttatttcccaccactttttgtgaataatacgttaccttatagattctcagcagagatttgaaactttcaagggaaaatgctatatagtaggaaagttcagattcttttaaaaaaatcaactttttattctattatattaatacttaaagcaacttttg

SEQ ID NO: 56001 - DNA, 1437 bp, Homo sapiens
gcatttaattttgtagctaagaaaatgatgccaagaccaatgtcatgtcttttttctgtagtttttctaaaagatttgttagtttttttatgtccaagcattttatttaaaatatattttaattcaaggaaataatccaacttttttatcagttttgatattcagttttcaacatcattttttgaagagattatttttctctgttttgtgctcatggcaacgttgtggaagatcatttgatcatatatagaagggttcatttctgaactctctattttgttctttcatctgttaatctttgtgtcaatatcacactgtttatgttctgtagcttttaactgtaggttggattgacatctttgaaaaatgacattttttgacacagagcaagaatatgttgaagagtgtgtttcatattcacatagttttgaatatgccagtttgacttttgcttttaattcctagtttcattcagtttttgttagaaaacacgcaatgtataattttagtcttcttaacgtaatttgttgttgttttgagacaacatcttgcatcccaggctgcggtgcagtggcataattttggctcactatagcctcagcctcctgggctcaagagatcctttcacttcagttttctgagtagttaggactacagacatgcactaccatgtctggataattgtttgcttgtttgtagttttaggatctcacaatgttgtccaggctagtctcaaacatttggcaccaatggatcctcttaccttggtatcacaaagtgttaggattataggcaagagccactkcacccagttagtatttttaaatttaataaaacttgctgtgtcctaacagaatgcatcaggtgcaaataggaatattgtgtattatcttggttttcactggagagttttgtatgtgtctgtgaagcctagttcattcataatattatttggatgtccatgttctccaaacctcaagctgcaatgtaaatcctcaatgttgattgtgggaactggtgggacatgtttttgtcacggggggcaaatttctcatgaatggcttcgtacaacctcttggtaaccaaaaagtttacactctattaattcaaatgaaaactggttcattaaaataatctggcaccttcacctcacacttgctctgtctcttatcatataatatgtccagttactctttaccttccaccatgattttaagcttcctgaaatcctcaccagaagcagatgctggcacacacttatacagtctgccaaactgtgagccaaataaaccttttttctttataaattatgcactctcaagtattcctctatatgcaaaatagttaatatagtctataatgtcttagttttctgtttcttatttttaccttaattttgtatttattactgcaaatggggtcttgatgtctacaatt

SEQ ID NO: 56002 - DNA, 1437 bp, Homo sapiens
gcatttaattttgtagctaagaaaatgatgccaagaccaatgtcatgtcttttttctgtagtttttctaaaagatttgttagtttttttatgtccaagcattttatttaaaatatattttaattcaaggaaataatccaacttttttatcagttttgatattcagttttcaacatcattttttgaagagattatttttctctgttttgtgctcatggcaacgttgtggaagatcatttgatcatatatagaagggttcatttctgaactctctattttgttctttcatctgttaatctttgtgtcaatatcacactgtttatgttctgtagcttttaactgtaggttggattgacatctttgaaaaatgacattttttgacacagagcaagaatatgttgaagagtgtgtttcatattcacatagttttgaatatgccagtttgacttttgcttttaattcctagtttcattcagtttttgttagaaaacacgcaatgtataattttagtcttcttaacgtaatttgttgttgttttgagacaacatcttgcatcccaggctgcggtgcagtggcataattttggctcactatagcctcagcctcctgggctcaagagatcctttcacttcagttttctgagtagttaggactacagacatgcactaccatgtctggataattgtttgcttgtttgtagttttaggatctcacaatgttgtccaggctagtctcaaacatttggcaccaatggatcctcttaccttggtatcacaaagtgttaggattataggcaagagccacttcacccagttagtatttttaaatttaataaaacttgctgtgtcctaacagaatgcatcaggtgcaaataggaatattgtgtattatcttggttttcactggagagttttgtatgtgtctgtgaagcctagttcrttcataatattatttggatgtccatgttctccaaacctcaagctgcaatgtaaatcctcaatgttgattgtgggaactggtgggacatgtttttgtcacggggggcaaatttctcatgaatggcttcgtacaacctcttggtaaccaaaaagtttacactctattaattcaaatgaaaactggttcattaaaataatctggcaccttcacctcacacttgctctgtctcttatcatataatatgtccagttactctttaccttccaccatgattttaagcttcctgaaatcctcaccagaagcagatgctggcacacacttatacagtctgccaaactgtgagccaaataaaccttttttctttataaattatgcactctcaagtattcctctatatgcaaaatagttaatatagtctataatgtcttagttttctgtttcttatttttaccttaattttgtatttattactgcaaatggggtcttgatgtctacaatt

SEQ ID NO: 56003 - DNA, 1437 bp, Homo sapiens
gcatttaattttgtagctaagaaaatgatgccaagaccaatgtcatgtcttttttctgtagtttttctaaaagatttgttagtttttttatgtccaagcattttatttaaaatatattttaattcaaggaaataatccaacttttttatcagttttgatattcagttttcaacatcattttttgaagagattatttttctctgttttgtgctcatggcaacgttgtggaagatcatttgatcatatatagaagggttcatttctgaactctctattttgttctttcatctgttaatctttgtgtcaatatcacactgtttatgttctgtagcttttaactgtaggttggattgacatctttgaaaaatgacattttttgacacagagcaagaatatgttgaagagtgtgtttcatattcacatagttttgaatatgccagtttgacttttgcttttaattcctagtttcattcagtttttgttagaaaacacgcaatgtataattttagtcttcttaacgtaatttgttgttgttttgagacaacatcttgcatcccaggctgcggtgcagtggcataattttggctcactatagcctcagcctcctgggctcaagagatcctttcacttcagttttctgagtagttaggactacagacatgcactaccatgtctggataattgtttgcttgtttgtagttttaggatctcacaatgttgtccaggctagtctcaaacatttggcaccaatggatcctcttaccttggtatcacaaagtgttaggattataggcaagagccacttcacccagttagtatttttaaatttaataaaacttgctgtgtcctaacagaatgcatcaggtgcaaataggaatattgtgtattatcttggttttcactggagagttttgtatgtgtctgtgaagcctagttcattcataatattatttggaygtccatgttctccaaacctcaagctgcaatgtaaatcctcaatgttgattgtgggaactggtgggacatgtttttgtcacggggggcaaatttctcatgaatggcttcgtacaacctcttggtaaccaaaaagtttacactctattaattcaaatgaaaactggttcattaaaataatctggcaccttcacctcacacttgctctgtctcttatcatataatatgtccagttactctttaccttccaccatgattttaagcttcctgaaatcctcaccagaagcagatgctggcacacacttatacagtctgccaaactgtgagccaaataaaccttttttctttataaattatgcactctcaagtattcctctatatgcaaaatagttaatatagtctataatgtcttagttttctgtttcttatttttaccttaattttgtatttattactgcaaatggggtcttgatgtctacaatt

SEQ ID NO: 56004 - DNA, 1437 bp, Homo sapiens
gcatttaattttgtagctaagaaaatgatgccaagaccaatgtcatgtcttttttctgtagtttttctaaaagatttgttagtttttttatgtccaagcattttatttaaaatatattttaattcaaggaaataatccaacttttttatcagttttgatattcagttttcaacatcattttttgaagagattatttttctctgttttgtgctcatggcaacgttgtggaagatcatttgatcatatatagaagggttcatttctgaactctctattttgttctttcatctgttaatctttgtgtcaatatcacactgtttatgttctgtagcttttaactgtaggttggattgacatctttgaaaaatgacattttttgacacagagcaagaatatgttgaagagtgtgtttcatattcacatagttttgaatatgccagtttgacttttgcttttaattcctagtttcattcagtttttgttagaaaacacgcaatgtataattttagtcttcttaacgtaatttgttgttgttttgagacaacatcttgcatcccaggctgcggtgcagtggcataattttggctcactatagcctcagcctcctgggctcaagagatcctttcacttcagttttctgagtagttaggactacagacatgcactaccatgtctggataattgtttgcttgtttgtagttttaggatctcacaatgttgtccaggctagtctcaaacatttggcaccaatggatcctcttaccttggtatcacaaagtgttaggattataggcaagagccacttcacccagttagtatttttaaatttaataaaacttgctgtgtcctaacagaatgcatcaggtgcaaataggaatattgtgtattatcttggttttcactggagagttttgtatgtgtctgtgaagcctagttcattcataatattatttggatgtccatgttctccaaacctcaagctgcaatgtaaatcctcaatgttgattgtgggamctggtgggacatgtttttgtcacggggggcaaatttctcatgaatggcttcgtacaacctcttggtaaccaaaaagtttacactctattaattcaaatgaaaactggttcattaaaataatctggcaccttcacctcacacttgctctgtctcttatcatataatatgtccagttactctttaccttccaccatgattttaagcttcctgaaatcctcaccagaagcagatgctggcacacacttatacagtctgccaaactgtgagccaaataaaccttttttctttataaattatgcactctcaagtattcctctatatgcaaaatagttaatatagtctataatgtcttagttttctgtttcttatttttaccttaattttgtatttattactgcaaatggggtcttgatgtctacaatt

SEQ ID NO: 56005 - DNA, 1437 bp, Homo sapiens
gcatttaattttgtagctaagaaaatgatgccaagaccaatgtcatgtcttttttctgtagtttttctaaaagatttgttagtttttttatgtccaagcattttatttaaaatatattttaattcaaggaaataatccaacttttttatcagttttgatattcagttttcaacatcattttttgaagagattatttttctctgttttgtgctcatggcaacgttgtggaagatcatttgatcatatatagaagggttcatttctgaactctctattttgttctttcatctgttaatctttgtgtcaatatcacactgtttatgttctgtagcttttaactgtaggttggattgacatctttgaaaaatgacattttttgacacagagcaagaatatgttgaagagtgtgtttcatattcacatagttttgaatatgccagtttgacttttgcttttaattcctagtttcattcagtttttgttagaaaacacgcaatgtataattttagtcttcttaacgtaatttgttgttgttttgagacaacatcttgcatcccaggctgcggtgcagtggcataattttggctcactatagcctcagcctcctgggctcaagagatcctttcacttcagttttctgagtagttaggactacagacatgcactaccatgtctggataattgtttgcttgtttgtagttttaggatctcacaatgttgtccaggctagtctcaaacatttggcaccaatggatcctcttaccttggtatcacaaagtgttaggattataggcaagagccacttcacccagttagtatttttaaatttaataaaacttgctgtgtcctaacagaatgcatcaggtgcaaataggaatattgtgtattatcttggttttcactggagagttttgtatgtgtctgtgaagcctagttcattcataatattatttggatgtccatgttctccaaacctcaagctgcaatgtaaatcctcaatgttgattgtgggaactggtgggacatgtttttgtcacggggggmaaatttctcatgaatggcttcgtacaacctcttggtaaccaaaaagtttacactctattaattcaaatgaaaactggttcattaaaataatctggcaccttcacctcacacttgctctgtctcttatcatataatatgtccagttactctttaccttccaccatgattttaagcttcctgaaatcctcaccagaagcagatgctggcacacacttatacagtctgccaaactgtgagccaaataaaccttttttctttataaattatgcactctcaagtattcctctatatgcaaaatagttaatatagtctataatgtcttagttttctgtttcttatttttaccttaattttgtatttattactgcaaatggggtcttgatgtctacaatt

SEQ ID NO: 56006 - DNA, 546 bp, Homo sapiens
caccatgttggaccaggctgttcttgaatcttcagacactcagggtgatccacccaccctcagcctctcaagagtgctgggcttacaggtgtgagccaccagcactccaactggaagttactccattatcgcacctattcacaacgattcatatcaatacaaagatggacacatctacatataaatatacataggaagacaaaaacccacatagagaattatataaatatttctatctaaatatttatgtatacaaaacatattccccaagagatatttttaaccttttagcatgctctaaagatgctaatgtagaatcaatttttccttctttagctaaataacatttcagaatggaacatatcaacaaagctctatcttcaagggcaagtccacagaaataagctgaaaataaagtcatgtaacacatctgtccaggacagtatttcagcgccctgcatttggtacatgttccgttcacatgcaccatttggcgcctgtcttgacaaagtcacagtcaccatttagataattgsatgattggat

SEQ ID NO: 56007 - DNA, 868 bp, Homo sapiens
gcatttttccagtcccccaatatgtaggaggatagaaggcaattcttggcaagaggaggtatcctgggaccatcttgattgcctctccatgaggagctgaaggacctgcaatatggattcatcagccctttgtggccttcactgacrctctgaaggtgttctgcatagcctctctttcccaccatgggattcctcatggtgtcacatgccagctaatgaaagtctgctttaggtaaactttctgtgcctgcctttgtcagaggttctagtatcagaccaactggattctaatccaggctccaacactttctggcttatttagcttttctgtgcctcagttttctcatctgcataatggaaacaaatgttacatctgaaagctaaatgaaaaaaatgtataattattatatatatgtcagatatctgccacattataattgcctaataaatattacctattataattaacattactaggtgttctatgctaccaggtcttcttaaactggaattcatgggcctctagagatccacgaaattgacaaaagaatgtctgtgggttccctgaaacaatgtgcaaattgcttcatgtttacacatgttgtttttctctgggcatagaacccccaactttaatcagatgctcagtgtgtggttcatgtctcctatattgtaaaggattgtggtgctaggggttttagtagccagactgtatcctcaacaagctggcaagccaggaacatgaggcagtttctttaaggctggtgtctcactgtaggtgtgatatgcagctctgggacctccatttttaattccacacgatgtgtgtttgtttacttttcttcttcttcataagaggaaatagcat

SEQ ID NO: 56008 - DNA, 868 bp, Homo sapiens
gcatttttccagtcccccaatatgtaggaggatagaaggcaattcttggcaagaggaggtatcctgggaccatcttgattgcctctccatgaggagctgaaggacctgcaatatggattcatcagccctttgtggccttcactgacgctctgaaggtgttctgcatagcctctctttcccaccatgggattcctcatggtgtcacatgccagctaatgaaagtctgctttaggtaaactttctgtgcctgcctttgtcagaggttctagtatcagaccaactggattctaatccaggctccaacactttctggcttatttagcttttctgtgcctcagttttctcatctgcataatggaaacaaatgttacatctsaaagctaaatgaaaaaaatgtataattattatatatatgtcagatatctgccacattataattgcctaataaatattacctattataattaacattactaggtgttctatgctaccaggtcttcttaaactggaattcatgggcctctagagatccacgaaattgacaaaagaatgtctgtgggttccctgaaacaatgtgcaaattgcttcatgtttacacatgttgtttttctctgggcatagaacccccaactttaatcagatgctcagtgtgtggttcatgtctcctatattgtaaaggattgtggtgctaggggttttagtagccagactgtatcctcaacaagctggcaagccaggaacatgaggcagtttctttaaggctggtgtctcactgtaggtgtgatatgcagctctgggacctccatttttaattccacacgatgtgtgtttgtttacttttcttcttcttcataagaggaaatagcat

SEQ ID NO: 56009 - DNA, 1275 bp, Homo sapiens
tgcattgatttataccctccctgaacaattgttcgaacatcattgccttgtatctgaaaaatctccactagcgtacagttaggaagagtactgggctaggagttaggagatcagggttctttattgtggctacctagctgctagcttcttgtcacaacaaacttcttacattctgtaggcctcagtcaacacatgccatccatcttattgtactatgacataacagcaccagtattttttaatatttatttatttattgagagacagagtctcactctgtcacccaggctggagtacagtggcacaatctcagctcactgcaacctccacctcccaggttcaagcaattcccctgcctcagcctcccaattagctgggattacaggcacatgccaccacgcctggmtaattttgtgtgtgtgtgtgtgtgtgtgtgtgtgtgtatttttagtagagacaggatttcaccatgttggccagactggtctcaaactcccgaccccaggcaattctcctgcctcagcctcccagagtgctgggattacaggtgtgagccactgtgcctggccagcatcagtactttaaagaaatgtgatgacattgtctcagtcacaagagggcccatattgccatggaagagactaatatttactaacatttctggagcactcacaaatgttttaggcagtatgtttagcacgtcatggtttgtaatttacgaaatccttccaacaataccatctagcagttactattattctccctattttacagatgagcaaaccgtcttgaagagatcacgggacttgacaaaggttatacagtaagtaatgcgcaaagccaagatatgaactcagagctctctaattaagcattgtatggctacatagagtcattgcaatgttggagatgcaaacagagaagagtaattttaactagggtagggcaggagggctgactggaaatggtagcagtgtcaagatgactagacagtctgcagcgagctctcttcttcagctttgaatgtctaaatattattctattctcatgacaagtatggagatcaacaattgggtcgagattccatgtgaggttgtgccctagcagaaattcacaacccgaattgcatcttcctcaccttctccaagcctggcttactttcttcgtcaaggtcagaatgaacctccaaatgtctctcttcaggccccgcagaggcaggtgctttcaaggtactcttctctgaaggctcacttaggacactctccggggaaaact

SEQ ID NO: 56010 - DNA, 950 bp, Homo sapiens
tgcatatgtccctcatggacttggacttgaatgctgagagtcaacctggtttatcattgtcagctgtttcttactggatgtgtatggatgttgaatgttgagagcattcaaccctagattatgcgagtctggtatattaaatattttgagttaaaggctcttgagaaacagcagctggaaggagagcactctgactttcctttgatttcttaaaagagatgaaattcccacatgaaaagtgtccttcctacaggagaaggagagtgtcattctcatcaagaatgggatgagaccaaggaaagtctttacgaacaaacatttgtaacacaaacccttacctttctagccacttctcacccagctagctaccctagcccaagctgcgtagctttaatcacattttcataatttaccatattttgtctaatgcagtataggaatgttcaactcaaaggatgtctttgggtgattttcttatgaaggctcccayaccaggtaaaagtggtgttaaataaatttgtaagttattcccctgttactttctgacgtcaatttaattttcagacccagttatgtgtgtgtgtagggtggggggtagtctttaagagagtagaggtaaaatttttcctctcctacgtgatacatatgacaagcacacagtaggtgctttaactgattcaaagacacagatactgagctcttacatttcaggaatcttgccagtgttgatgattggctgaaggttgtgggcttcccatgtaccctttaactcatttctgtagttctcagaacaactttgttcccccattccatctgtaccccttggggatgcaattttaaaaacagtaatattgttcaagaggtggaaatgtaaggtataagtgatcatagattttggtttcaaatatctcatacttaaatcttcattttctaagaatggcacaaaggga

SEQ ID NO: 56011 - DNA, 826 bp, Homo sapiens
tgcatatggtgaaggagttacaaatcatgtgctacaacccttcgaaggaggaagagattatgtccacttggaggtgtggggaaggcttgtagaaaaagtgttgtttattcttgtcataaaagatgcaaaggtttgcaagatggcagatgaggttgacaggaaattttgggaagaaggagtaacatgatttaacacttggaagaggaaactcagyggttggaaatagtaaagaatcaggtttggctatgattaggaagatttggaattaattctactacaccttagtgtctgtgccaccttaagataaagaacttgtctcttcctcaatagcaacagcttacatttgctagcactccctgtgtgcactgctacacgcatgatctcattctactcttacaacaaccctttgcaatatatactgctgctatgtccatttatagacaattaaactaaagttacacttgatcaaggtgacacaggtagaatgcggtagggctaggtttccaacccagctcaatatcactgcaaaacccataccttcatcccttttaatattcatcttctccctgaaatgtaagtagttgtcttgcagctatgtgtatgaggttgggagacaaagttaacacacaacaacccagaaaccaagagatagcattctagatgttttaaaaaagggaacataaggggaaatctcagggcgcagaatcagactacccaggtttgtagttcagctttgcttcactgctttgatttttgaggacagtcttacacagcctcttaagggcattggaaagtccaggtctttgggcacagtgtggtttacctc

SEQ ID NO: 56012 - DNA, 826 bp, Homo sapiens
tgcatatggtgaaggagttacaaatcatgtgctacaacccttcgaaggaggaagagattatgtccacttggaggtgtggggaaggcttgtagaaaaagtgttgtttattcttgtcataaaagatgcaaaggtttgcaagatggcagatgaggttgacaggaaattttgggaagaaggagtaacatgatttaacacttggaagaggaaactcagtggttggaaatagtmaagaatcaggtttggctatgattaggaagatttggaattaattctactacaccttagtgtctgtgccaccttaagataaagaacttgtctcttcctcaatagcaacagcttacatttgctagcactccctgtgtgcactgctacacgcatgatctcattctactcttacaacaaccctttgcaatatatactgctgctatgtccatttatagacaattaaactaaagttacacttgatcaaggtgacacaggtagaatgcggtagggctaggtttccaacccagctcaatatcactgcaaaacccataccttcatcccttttaatattcatcttctccctgaaatgtaagtagttgtcttgcagctatgtgtatgaggttgggagacaaagttaacacacaacaacccagaaaccaagagatagcattctagatgttttaaaaaagggaacataaggggaaatctcagggcgcagaatcagactacccaggtttgtagttcagctttgcttcactgctttgatttttgaggacagtcttacacagcctcttaagggcattggaaagtccaggtctttgggcacagtgtggtttacctc

SEQ ID NO: 56013 - DNA, 826 bp, Homo sapiens
tgcatatggtgaaggagttacaaatcatgtgctacaacccttcgaaggaggaagagattatgtccacttggaggtgtggggaaggcttgtagaaaaagtgttgtttattcttgtcataaaagatgcaaaggtttgcaagatggcagatgaggttgacaggaaattttgggaagaaggagtaacatgatttaacacttggaagaggaaactcagtggttggaaatagtaaagaatcaggtttggctatgattaggaagatttggaattaattctactacaccttaktgtctgtgccaccttaagataaagaacttgtctcttcctcaatagcaacagcttacatttgctagcactccctgtgtgcactgctacacgcatgatctcattctactcttacaacaaccctttgcaatatatactgctgctatgtccatttatagacaattaaactaaagttacacttgatcaaggtgacacaggtagaatgcggtagggctaggtttccaacccagctcaatatcactgcaaaacccataccttcatcccttttaatattcatcttctccctgaaatgtaagtagttgtcttgcagctatgtgtatgaggttgggagacaaagttaacacacaacaacccagaaaccaagagatagcattctagatgttttaaaaaagggaacataaggggaaatctcagggcgcagaatcagactacccaggtttgtagttcagctttgcttcactgctttgatttttgaggacagtcttacacagcctcttaagggcattggaaagtccaggtctttgggcacagtgtggtttacctc

SEQ ID NO: 56014 - DNA, 826 bp, Homo sapiens
tgcatatggtgaaggagttacaaatcatgtgctacaacccttcgaaggaggaagagattatgtccacttggaggtgtggggaaggcttgtagaaaaagtgttgtttattcttgtcataaaagatgcaaaggtttgcaagatggcagatgaggttgacaggaaattttgggaagaaggagtaacatgatttaacacttggaagaggaaactcagtggttggaaatagtaaagaatcaggtttggctatgattaggaagatttggaattaattctactacaccttagtgtctgtgccaccttaagataaagaacttgtctcttyctcaatagcaacagcttacatttgctagcactccctgtgtgcactgctacacgcatgatctcattctactcttacaacaaccctttgcaatatatactgctgctatgtccatttatagacaattaaactaaagttacacttgatcaaggtgacacaggtagaatgcggtagggctaggtttccaacccagctcaatatcactgcaaaacccataccttcatcccttttaatattcatcttctccctgaaatgtaagtagttgtcttgcagctatgtgtatgaggttgggagacaaagttaacacacaacaacccagaaaccaagagatagcattctagatgttttaaaaaagggaacataaggggaaatctcagggcgcagaatcagactacccaggtttgtagttcagctttgcttcactgctttgatttttgaggacagtcttacacagcctcttaagggcattggaaagtccaggtctttgggcacagtgtggtttacctc

SEQ ID NO: 56015 - DNA, 826 bp, Homo sapiens
tgcatatggtgaaggagttacaaatcatgtgctacaacccttcgaaggaggaagagattatgtccacttggaggtgtggggaaggcttgtagaaaaagtgttgtttattcttgtcataaaagatgcaaaggtttgcaagatggcagatgaggttgacaggaaattttgggaagaaggagtaacatgatttaacacttggaagaggaaactcagtggttggaaatagtaaagaatcaggtttggctatgattaggaagatttggaattaattctactacaccttagtgtctgtgccaccttaagataaagaacttgtctcttcctcaatagcaacagcttacatttgctagcactccctgtgtgcactgctacacgcatgatctcattctactcttacaacaaccctttgcaatatatactgctgctatgtccatttatagacaattaaactaaagttacacttgatcaaggtgacacargtagaatgcggtagggctaggtttccaacccagctcaatatcactgcaaaacccataccttcatcccttttaatattcatcttctccctgaaatgtaagtagttgtcttgcagctatgtgtatgaggttgggagacaaagttaacacacaacaacccagaaaccaagagatagcattctagatgttttaaaaaagggaacataaggggaaatctcagggcgcagaatcagactacccaggtttgtagttcagctttgcttcactgctttgatttttgaggacagtcttacacagcctcttaagggcattggaaagtccaggtctttgggcacagtgtggtttacctc

SEQ ID NO: 56016 - DNA, 1945 bp, Homo sapiens
gtaaacccaaccaatctagttataaaggtaattttgttatctgtttttagattatcaaacagcatgtatttgttttatactgtaaattaatgattagaatatctagaaacagaagcatgcatagtcacaaattatccaaactacataaggctttataaaaatctgtaagacacatttaataagtaacgtagaattcatctatttcccgactatgccctttggtttcaatgacacttttcagaatactgagtgacactgcacatggaatttcagaaatgttctgagttaatcaaaatgtactcaatttgtagcacaacaattttatttcccaggggtcatcaccaccactccatatctaagaacctgataaaaaatcctggagatttgtaaaatgagttctcaaggaactttggagtaagaaagatgtagctaaagatcaacacataaaaaggtctgcttcttgaagttggaatgaaacacaggaaatattcattatctaagaatgggtaaaagaataaaagctacttaaggtgaattcactcacaatagcaaccagaatttcatagtacgtgatgaaaacaaaggtttgatagaactaaaaaactacatttttgtataactttccaacaaaattgtagttcagcatataccatattttacttaatgcttgattttttgcaacatgaccacaaagaggatgacttagcctcacttttgaaagcctcagcatgtgcaattttgagcagttccattcacttccatcagacattacttctatgaaatcctgaatatttcacaagatttacatttttattttgcagatcaattgacattgtgttaacagtgcattgttgaatattccagaccacgaatcatactggaacctaaataaagacactgatatgattggtggtttttattttgcagatcaattgacattgtgttaacagtgcattgttgaatattccagaccacgaatcatactggaacctaaataaagacactgatatgattggtgggaatcaacacgaaatggagaatatttgaacagggaataatttcatgactgttcggtctattagataatatctttcaagtccctcatgtcaacgagcaacagcagcaaggctgtaagtaatgaactctggacttatcgaggacaccctatactttaggcttgagtcctaactccagcttgcactctggtcttgaacaagtcactttgtcctccaagcccaagaaaaccagatttttgtgggatccaaggggttctgtataaatgctttaatggacatgttctgaggacgtgtgctcatacatttccttcaattcaagagtccaaacctcgaatctaaggtctttcacatggttcctaaagttgctcccagcactcacattctctggtttctgattgaattctcagkggggaataaaagtagaagattagattaaatgcggggtgcagcggggggtgggcggtgcagggggaagtctttgaactgttacctgtcgtcagtgttgaaacgtaggtaggtaatccatctattctaacacacaatctactctccagaaactccttgaaacttattttacagaaatacagaggctgggtgcagtggctcccaaagtcccagcactttgggaggctgaggcaggtggatcacctgaggttgggagtttgagagcagcccgaccaacagggagaaatcctgtctctactaaaaatacaaaattagctgggtgtggcggcacatgcctgtaatcccagctacttgggaggctgaggcaggagaatcgcttgaacccgggaggtggaggttgctgtgagccgagatggcgccattgtactacagcctgggcaacaagagcaatactctgtatcaaaaagaaaaaaagaaaagaaaaaaatggaaaaggaaaaaatggaagaggaaaaaatggaaaa

SEQ ID NO: 56017 - DNA, 565 bp, Homo sapiens
gatccaaatgatgccgtttgactgaattcagcactctggagaaaggtctccggtggcatgccacagggctctgtcacgctcagtcctttatttctgatttcaatgaagacatcaaagagaattcatgctttcccttggcacgtcatctctgcagtgggctggggaggagtaatgaggtttctgtgttccaccctatgggcgctagctcacgyttcctgtggctggggcagggggtccacctgcagcgggtccacctgaaggaaatgggaaatcttggagtgaggacgcaggctgccataggtacgtggtctcccctgcatgagaagcccacgcccctgggttagcaggcaccaccctcctggccagggcctccttggcccctgcccctcatgcgccttgcctgcagaagttctgctttgctgggacccccacccctcatgcacctgcagaagctctgcttcactggggccatgctggggccccacttccacttttggcagagttgggaatggggcagtgggcaggggaccggttgtcaggtgcagcctgctcttcccagggacaa

SEQ ID NO: 56018 - DNA, 682 bp, Homo sapiens
agagctgcggctgggcggctgcagctgcgcctgggagtgcagggctcccgccctgccagctcagtaggagatgggggctcctgcctrttcctggctcctgttggccctgcagagtgcacaaacctggccgcgcttcctccactgcagcttacgtctttgcagcagccactcccgatgggctgccactgccatctgtgagaccattaatgtgtgcaatttgaggactcagtggccttgccattgtttccttggtttttattgagcattggctggggtcggcgaggggatgtgattatatttctatgtgaatcgtgagaatcttgaaccatggttgtcctgctggcctgttttactacataccaatgagtaaaatgtgatcatacagaaatcacaaagttgaaatctataaaatgaaaagatctctgtattataaggtgagagtgccaaggattgaacattcatctttgtcagactttgatgtagaatctcccaaaataatgatgagctaaagcgtctgggagacagcatcagcctgtccaggtgctctcaggtgcaggcatttccaccccattcattcgttattgacacgttcatgcattttcagtctttttcctacccatgtatattttacataattgaaattatattgtgtgctgggccgggcacggtggctcacgcctgt

SEQ ID NO: 56019 - DNA, 682 bp, Homo sapiens
agagctgcggctgggcggctgcagctgcgcctgggagtgcagggctcccgccctgccagctcagtaggagatgggggctcctgcctgttcctggctcctgttggccctgcagagtgcacaamcctggccgcgcttcctccactgcagcttacgtctttgcagcagccactcccgatgggctgccactgccatctgtgagaccattaatgtgtgcaatttgaggactcagtggccttgccattgtttccttggtttttattgagcattggctggggtcggcgaggggatgtgattatatttctatgtgaatcgtgagaatcttgaaccatggttgtcctgctggcctgttttactacataccaatgagtaaaatgtgatcatacagaaatcacaaagttgaaatctataaaatgaaaagatctctgtattataaggtgagagtgccaaggattgaacattcatctttgtcagactttgatgtagaatctcccaaaataatgatgagctaaagcgtctgggagacagcatcagcctgtccaggtgctctcaggtgcaggcatttccaccccattcattcgttattgacacgttcatgcattttcagtctttttcctacccatgtatattttacataattgaaattatattgtgtgctgggccgggcacggtggctcacgcctgt

SEQ ID NO: 56020 - DNA, 682 bp, Homo sapiens
agagctgcggctgggcggctgcagctgcgcctgggagtgcagggctcccgccctgccagctcagtaggagatgggggctcctgcctgttcctggctcctgttggccctgcagagtgcacaaacctggccgcgcttcctccactgcagcttacgtctttgcagcagccactcccratgggctgccactgccatctgtgagaccattaatgtgtgcaatttgaggactcagtggccttgccattgtttccttggtttttattgagcattggctggggtcggcgaggggatgtgattatatttctatgtgaatcgtgagaatcttgaaccatggttgtcctgctggcctgttttactacataccaatgagtaaaatgtgatcatacagaaatcacaaagttgaaatctataaaatgaaaagatctctgtattataaggtgagagtgccaaggattgaacattcatctttgtcagactttgatgtagaatctcccaaaataatgatgagctaaagcgtctgggagacagcatcagcctgtccaggtgctctcaggtgcaggcatttccaccccattcattcgttattgacacgttcatgcattttcagtctttttcctacccatgtatattttacataattgaaattatattgtgtgctgggccgggcacggtggctcacgcctgt

SEQ ID NO: 56021 - DNA, 682 bp, Homo sapiens
agagctgcggctgggcggctgcagctgcgcctgggagtgcagggctcccgccctgccagctcagtaggagatgggggctcctgcctgttcctggctcctgttggccctgcagagtgcacaaacctggccgcgcttcctccactgcagcttacgtctttgcagcagccactcccgatgggctgccactgccatctgtgagaccattaatgtgtgcaatttgaggactcagtggccttgccattgtttccttggtttttattgagcattggctggggtcggcgaggggatgtgattatatttctatgtgaatcgtgagaatcttgaaccatrgttgtcctgctggcctgttttactacataccaatgagtaaaatgtgatcatacagaaatcacaaagttgaaatctataaaatgaaaagatctctgtattataaggtgagagtgccaaggattgaacattcatctttgtcagactttgatgtagaatctcccaaaataatgatgagctaaagcgtctgggagacagcatcagcctgtccaggtgctctcaggtgcaggcatttccaccccattcattcgttattgacacgttcatgcattttcagtctttttcctacccatgtatattttacataattgaaattatattgtgtgctgggccgggcacggtggctcacgcctgt

SEQ ID NO: 56022 - DNA, 1077 bp, Homo sapiens
aaaaagaaagcttctcattgaaaactagttatagtcttttacttgagaaggagctccgtccaagcttttgtggccacttgctgggataacagctttcttcaccatgagatggccatacaggagggtgaggagatggctatattatctcgtcaggacttccttgtcatggctagaaagccacagactggctgtgcatggtggctcgcacctgtaatcccagcacttagggggctgaagcaggaggattgcttgaggccaagagttcaagaccagcctgggcaacatagagagacccttgtctgcacaaaaaaataaaaaaaaattaggcatggtggtatgtgcctgtagtcccagctattcaaggaggctgaggcaggaggatcccttgagcccaagaggttgaggctgcagtggctatgatcatgcctctgctctccagcctgagcaacagagtgagactctgtcacaataataaataagctgggcagtggcttgcatctgtagtcccagctacttgggaggctgaaatgacaggattgcttgaagccaagagttcgagaccagcctaggcaacataatgagacccaccccccccgtctctgcaaaaaaattaaaaaataagccaggaattgtggtgtgcccaggagttcaaggctgcagtgagctatgattgtgccactgcacaccagcctgggagacagagtgacatcctgtctcagaaaaaaaaaaaaragaaaagaaaagaaaggaaaagacatgaaagtttgctggctaacaggaagcgggctattttaagagcctcctgggctcctttagttttggagcacccattacataaaacgttaaatatacagaaatgcaccccattccacatccaatataatgcatatatataaataataaatgataacacaagggcttcaatttgagtttcatcaagtgtattcatcttgactttgcattttttttctctacagtttggcaccaataaattttttttcattcctggctgtttatgaccccatgggccttgggataactctcagttctgggtcttaattctggggaacttgatgc

SEQ ID NO: 56023 - DNA, 1077 bp, Homo sapiens
aaaaagaaagcttctcattgaaaactagttatagtcttttacttgagaaggagctccgtccaagcttttgtggccacttgctgggataacagctttcttcaccatgagatggccatacaggagggtgaggagatggctatattatctcgtcaggacttccttgtcatggctagaaagccacagactggctgtgcatggtggctcgcacctgtaatcccagcacttagggggctgaagcaggaggattgcttgaggccaagagttcaagaccagcctgggcaacatagagagacccttgtctgcacaaaaaaataaaaaaaaattaggcatggtggtatgtgcctgtagtcccagctattcaaggaggctgaggcaggaggatcccttgagcccaagaggttgaggctgcagtggctatgatcatgcctctgctctccagcctgagcaacagagtgagactctgtcacaataataaataagctgggcagtggcttgcatctgtagtcccagctacttgggaggctgaaatgacaggattgcttgaagccaagagttcgagaccagcctaggcaacataatgagacccaccccccccgtctctgcaaaaaaattaaaaaataagccaggaattgtggtgtgcccaggagttcaaggctgcagtgagctatgattgtgccactgcacaccagcctgggagacagagtgacatcctgtctcagaaaaaaaaaaaaaaraaaagaaaagaaaggaaaagacatgaaagtttgctggctaacaggaagcgggctattttaagagcctcctgggctcctttagttttggagcacccattacataaaacgttaaatatacagaaatgcaccccattccacatccaatataatgcatatatataaataataaatgataacacaagggcttcaatttgagtttcatcaagtgtattcatcttgactttgcattttttttctctacagtttggcaccaataaattttttttcattcctggctgtttatgaccccatgggccttgggataactctcagttctgggtcttaattctggggaacttgatgc

SEQ ID NO: 56024 - DNA, 1077 bp, Homo sapiens
aaaaagaaagcttctcattgaaaactagttatagtcttttacttgagaaggagctccgtccaagcttttgtggccacttgctgggataacagctttcttcaccatgagatggccatacaggagggtgaggagatggctatattatctcgtcaggacttccttgtcatggctagaaagccacagactggctgtgcatggtggctcgcacctgtaatcccagcacttagggggctgaagcaggaggattgcttgaggccaagagttcaagaccagcctgggcaacatagagagacccttgtctgcacaaaaaaataaaaaaaaattaggcatggtggtatgtgcctgtagtcccagctattcaaggaggctgaggcaggaggatcccttgagcccaagaggttgaggctgcagtggctatgatcatgcctctgctctccagcctgagcaacagagtgagactctgtcacaataataaataagctgggcagtggcttgcatctgtagtcccagctacttgggaggctgaaatgacaggattgcttgaagccaagagttcgagaccagcctaggcaacataatgagacccaccccccccgtctctgcaaaaaaattaaaaaataagccaggaattgtggtgtgcccaggagttcaaggctgcagtgagctatgattgtgccactgcacaccagcctgggagacagagtgacatcctgtctcagaaaaaaaaaaaaaagaaragaaaagaaaggaaaagacatgaaagtttgctggctaacaggaagcgggctattttaagagcctcctgggctcctttagttttggagcacccattacataaaacgttaaatatacagaaatgcaccccattccacatccaatataatgcatatatataaataataaatgataacacaagggcttcaatttgagtttcatcaagtgtattcatcttgactttgcattttttttctctacagtttggcaccaataaattttttttcattcctggctgtttatgaccccatgggccttgggataactctcagttctgggtcttaattctggggaacttgatgc

SEQ ID NO: 56025 - DNA, 1077 bp, Homo sapiens
aaaaagaaagcttctcattgaaaactagttatagtcttttacttgagaaggagctccgtccaagcttttgtggccacttgctgggataacagctttcttcaccatgagatggccatacaggagggtgaggagatggctatattatctcgtcaggacttccttgtcatggctagaaagccacagactggctgtgcatggtggctcgcacctgtaatcccagcacttagggggctgaagcaggaggattgcttgaggccaagagttcaagaccagcctgggcaacatagagagacccttgtctgcacaaaaaaataaaaaaaaattaggcatggtggtatgtgcctgtagtcccagctattcaaggaggctgaggcaggaggatcccttgagcccaagaggttgaggctgcagtggctatgatcatgcctctgctctccagcctgagcaacagagtgagactctgtcacaataataaataagctgggcagtggcttgcatctgtagtcccagctacttgggaggctgaaatgacaggattgcttgaagccaagagttcgagaccagcctaggcaacataatgagacccaccccccccgtctctgcaaaaaaattaaaaaataagccaggaattgtggtgtgcccaggagttcaaggctgcagtgagctatgattgtgccactgcacaccagcctgggagacagagtgacatcctgtctcagaaaaaaaaaaaaaagaaaaraaaagaaaggaaaagacatgaaagtttgctggctaacaggaagcgggctattttaagagcctcctgggctcctttagttttggagcacccattacataaaacgttaaatatacagaaatgcaccccattccacatccaatataatgcatatatataaataataaatgataacacaagggcttcaatttgagtttcatcaagtgtattcatcttgactttgcattttttttctctacagtttggcaccaataaattttttttcattcctggctgtttatgaccccatgggccttgggataactctcagttctgggtcttaattctggggaacttgatgc

SEQ ID NO: 56026 - DNA, 1689 bp, Homo sapiens
acaatgttgatccctgaacctacctagagtgtcttaattcacaagtcctagggaagcatggaagtgctgtgcatagtcatatctacaaagagatattagcttttttttttttttttaaacataaggctattctgtaaggtttgactgcttcacaaatacttacttgagaatctccctgctctctagcctatgtctgtgatgactcttctttgttcccaaatcaagtaggataagcaggatgctaactgctgggactggtttaaacagcacactttgaatagatccggggatatcttgggcattctagtctcaagtgagagaaaaggagtgtcttagggaaatgtctgtgcagatgctttgctttttgttctcctgtttttggagagctctctccaaaaccaggagtttcctgctgggtgtagaggtgcccactggatacatgaggctaccatgtcctctgcccttgcctggtgttgggaccttgctggtgcctccccgactgggcctggagcatgtgtaagggccctgatgccatgaaggcagttgttttcacataggactgcaggattcttcctccagccttgtcttcctgcagcctcactgcactgccccatcctcccctagcagaactggaaagagtggttcctagtgaccacctagccatgcagccaccactgaggtcacattttagggaaatgtgagaggcctgttccactgtttagatgcagtatttctgctctttgtagcttacccttggaattgccagtgagtcacagcctgcgaagtccttgtgatttagggtcctgcacttccaggaagagctttctcttgacatcttctttgacccttagtccctgatgttttcatggcatgaagggccagtcagaatttggggagataacacaaaagaacacaaaawtatggtttctaaggtataagtgtcatatcgctatgagttagtcacatgataatgtaggccaaagaaaataagaaatacagagatatgtttgtaaattgatgttgatttggtatctcttttggcctccttcccaaattagtattgggcatttgattttaatttaggtcaataataatgctcattactgcttgagaactctatgtgcatcaggcaatatgttatttgcttcacgtggttctcgttaaatcttaatagcaattctgtgacattgatgatgttattctcatcttacggaagtgcaaaattattcaggggtgttaaataacttgcacgtatacacaaccagaaggtggcataaatagactctgaaccagaccttggagagtttgtccatcaccttccactttttttgctaggtgcttggtagtttcaaggtagagtgttattgctacagagtatagaaataaaatcaagaagcttaccatgtagggagagtaagatagataaacaactgaagataatataaggacagctgtgatagataccaaaaagtgttaccaagaaaggtcaaccaaggtgcagtaggggctaaaggaagagattgagatcatacatacctaatagggatcaccaaagaaaagccttcttagaagtggtacacttgaatcttacttgggggagtggataaggaaagatttgtgggtggcaatgactgccaaatgcccacgtaaataaacaggctcctaaagaaactattagattgtataaat

SEQ ID NO: 56027 - DNA, 1689 bp, Homo sapiens
acaatgttgatccctgaacctacctagagtgtcttaattcacaagtcctagggaagcatggaagtgctgtgcatagtcatatctacaaagagatattagcttttttttttttttttaaacataaggctattctgtaaggtttgactgcttcacaaatacttacttgagaatctccctgctctctagcctatgtctgtgatgactcttctttgttcccaaatcaagtaggataagcaggatgctaactgctgggactggtttaaacagcacactttgaatagatccggggatatcttgggcattctagtctcaagtgagagaaaaggagtgtcttagggaaatgtctgtgcagatgctttgctttttgttctcctgtttttggagagctctctccaaaaccaggagtttcctgctgggtgtagaggtgcccactggatacatgaggctaccatgtcctctgcccttgcctggtgttgggaccttgctggtgcctccccgactgggcctggagcatgtgtaagggccctgatgccatgaaggcagttgttttcacataggactgcaggattcttcctccagccttgtcttcctgcagcctcactgcactgccccatcctcccctagcagaactggaaagagtggttcctagtgaccacctagccatgcagccaccactgaggtcacattttagggaaatgtgagaggcctgttccactgtttagatgcagtatttctgctctttgtagcttacccttggaattgccagtgagtcacagcctgcgaagtccttgtgatttagggtcctgcacttccaggaagagctttctcttgacatcttctttgacccttagtccctgatgttttcatggcatgaagggccagtcagaatttggggagataacacaaaagaacacaaaaatatggtttctaaggtataagtgtcatatcgctatgagttagtcacatgataatgtaggccaaagaaaataagaaatacagagatatgtttgtaaattgatgttgatttggtatctcttttggcctccttcccaaattagtattgggcatttgattttaatttaggtcaataataatgctcattactgcttgagaactctatgtgcatcaggcaatatgttatttgcttcacgtggttctcgttaaatcttaatagcaattctgtgacattgatgatgttattctcatcttacggaagtgcaraattattcaggggtgttaaataacttgcacgtatacacaaccagaaggtggcataaatagactctgaaccagaccttggagagtttgtccatcaccttccactttttttgctaggtgcttggtagtttcaaggtagagtgttattgctacagagtatagaaataaaatcaagaagcttaccatgtagggagagtaagatagataaacaactgaagataatataaggacagctgtgatagataccaaaaagtgttaccaagaaaggtcaaccaaggtgcagtaggggctaaaggaagagattgagatcatacatacctaatagggatcaccaaagaaaagccttcttagaagtggtacacttgaatcttacttgggggagtggataaggaaagatttgtgggtggcaatgactgccaaatgcccacgtaaataaacaggctcctaaagaaactattagattgtataaat

SEQ ID NO: 56028 - DNA, 649 bp, Homo sapiens
aagtgaaaagttcattgaaacagtgttcgtaagatgctggttcctgtctgatttattactgggtccctacacttttccacctagcactgagagacacgttgcaattttttccgtcagttggctactgtgctgatatgcctagattttcttaatgcttttttaatacttttattgtaaaacataaatatcaaaaagccacacaaaacaaatgtacacaacttagtgaattattacaaagcaaacacccatatatatcactagcatttaggtcaagaaatagaactttgccagagggaccaaaattttacatcccatcctgatcacatttccctctgttcctccaaaaataaatgccatcctgactttatagtaattacttccttgcatctctttatggttttattacccaaatgagcagcctgacccactgagttttagtcttacccattaaaaaaaaaaaaagatgtttaagtctcttttaatctacagacccctctaccagagtctccttcctttaaatttttttttttaatttgttgcaggacctgggctgtttaatttgtagagtttcccacagtgttgataacaagaaagattcacactcacggtacagtttaacttactgctttkccctctgtttcctgtatct

SEQ ID NO: 56029 - DNA, 793 bp, Homo sapiens
taacacggtgaaaccccatctctactaaaaatacaaaaaattagccacgcgtggtagtgcatgcctgtactcccagctactcgggaggctgaggcaggagaatcatttgaagccgggaggtggaggttgcagtgggtcgagatcatgccactgcactccagcctgggcggcagagcaagactccatctcaaaaaaaaaagaaagagttgggggtattacataggaagtgatcagcagataatgaatgaaactccactgtttattctggaagacactggcaggctgctgacctccccgtcacagtggaacgatgctagaaccagcagtcgtgtgtgtgtgtgttggaggaggcgccataggaggctcagggatggcaaacacagtgccctgagcaccgtgcctcgcaggggagttgggctcagtggtaactgctgccgtttccccacccacctgcctcctggacatctgttcctagatatccctctgccacccaaccccatcattttctccaaaaccctgtccttcctatgtgttagacatcagagaatgatgccaccttgtccctctagccactatgtccccgccacaaccttgggagtcatcctggactttccttctctcgtcacactcactcactctgccgccatgtctcctctgtctctctcaccctctgccatctctaccccaacagccctgtcctggctgtgactttgtcttcatccagattatgrctcacaccgcagttcctcaaaagcacagggtgactttgtcctttcactccttgtagctccca

SEQ ID NO: 56030 - DNA, 756 bp, Homo sapiens
taaaaaataataaggctgggcgccgtggttcatgcctgtaatcccagcattttgggaggctgaggtgggcgaatctcttgaggccaggagtttgagaccagcctggcaagtatggcaaaaccccgcctctacaaaaaatacaaaaattagctgagcatggtggcggcacctgtaatcctagctacttgggaggctgaggcacaagaatcctttgaatctgggaggcggaggttgcagtgagttaagatcaagccactgtactccagcatgggtgacagaacgagactccatctcaaaataatagcaataataataaaaagtggaagatgcccccacacttgatcaagctagccccttccactggaggacagaggactctggtctggggacacacacatgcccccacacaggagctcccccacatctggggatacaaaaaagaccccttggggacagatatgtcctttcttctggggacagattgataggcacccagcggaagagccaggacctctcctgggctggcgctgggtccggctggaggcacccagaggctgggtccggcctgccctgccccgccccgccccagcagctcggccgctccgcccctctggcctcagcgcccggccactgcccgccgcccgccacccgccacccgccggcccttccgcctcactcagcggcgccactgagagggacgggcgccrgccatggagcgcacagcaggcaaagagctggccctggtaaggggacaag

SEQ ID NO: 56031 - DNA, 794 bp, Homo sapiens
tttgtggggcaggtgccaagctaaccccaagttcaaagatgaggaaacagaggctagaggtgaaggaggtcactggcccaagaccctacagccagaaagtggcacaggggggatttgaacccaggaaacgaggctccacagcttacagtctgacttcttgtgagcccagagtccaggctgagggaacagcttacaggccgttctggaggtagtgagtggaagagggacacgggagggaaacatgaaaggggcctttattcaagggtggtgaggactctcagaaggctggtgttggggcgggatgtgtgtggccgatggggagcacctgagggctgatgtccccttagctggtcgcaccggtgacaaggaccacaacacccagcaacctggggcagtgccagaccctccacctggcctcatgagcccgggtggcaggtgacctgtgcttcagagtcctcgttgctacagtgcaggggatgaaagcaccttcttcccggagccatgctgaggatggaagtgccaggcatggtttgagcggctctggggcccacccagggcactgacggatgtgaacagcggggggagacattgagctggcccggaagccctggctgccagactgggctgctgggtctggcctgtgcacccccycaggcccactctgccatgacatgtcttccctggttatcccgccacctccaagatcccaggtaaggtctgctagccctggcaggagccggcacacatgcgcagagtggtggacaggcacctaggtttagggtgatggccctctg

SEQ ID NO: 56032 - DNA, 621 bp, Homo sapiens
agatttagtatgtctagaatagaacctggtatttatttgtttttttttktgtttttttgtttttttgttttttttttagacagagtctgtctctgtcactcaggctggagtgcagtggcctgaacacagcttactgcaccctacctcatcctcctgagcttaagcaatccttccacctagctgagaccacaagtgtgcaccaacacacctggctaattttttttttttttttttcagtagagatgaggtttctccatgttgcccaagttgttctagaactcctggcctcccaaagtgctgggattacaggcataagccactgcacccgaccctgatattttcatttctaacaaatttcacatgatactgattctgctgatctgggaccacactttgagaataactaccctagacttttgcaatgatgcctgaatttttctctgcttacacttttgcctacctccttacagcaaaaccatccttccttgaacccaagaggacttaaagatatctgctcaccttctgtaaggcaaactgaaacttctatttgagctggtgtttttgctaaaattgtgctctccaatcatatttaattggacaagtaactgtgatttgatttat

SEQ ID NO: 56033 - DNA, 621 bp, Homo sapiens
agatttagtatgtctagaatagaacctggtatttatttgtttttttttttgtttttttgtttttttgttttttttttagacagagtctgtctctgtcactcaggctggagtgcagtggcctgaacacagcttactgcaccctacstcatcctcctgagcttaagcaatccttccacctagctgagaccacaagtgtgcaccaacacacctggctaattttttttttttttttttcagtagagatgaggtttctccatgttgcccaagttgttctagaactcctggcctcccaaagtgctgggattacaggcataagccactgcacccgaccctgatattttcatttctaacaaatttcacatgatactgattctgctgatctgggaccacactttgagaataactaccctagacttttgcaatgatgcctgaatttttctctgcttacacttttgcctacctccttacagcaaaaccatccttccttgaacccaagaggacttaaagatatctgctcaccttctgtaaggcaaactgaaacttctatttgagctggtgtttttgctaaaattgtgctctccaatcatatttaattggacaagtaactgtgatttgatttat

SEQ ID NO: 56034 - DNA, 621 bp, Homo sapiens
agatttagtatgtctagaatagaacctggtatttatttgtttttttttttgtttttttgtttttttgttttttttttagacagagtctgtctctgtcactcaggctggagtgcagtggcctgaacacagcttactgcaccctacctcatcctcctgagcttaagcaatccttccacctagctgagaccacaagtgtgcaccaacacacctggctaattttttttttttttttttyagtagagatgaggtttctccatgttgcccaagttgttctagaactcctggcctcccaaagtgctgggattacaggcataagccactgcacccgaccctgatattttcatttctaacaaatttcacatgatactgattctgctgatctgggaccacactttgagaataactaccctagacttttgcaatgatgcctgaatttttctctgcttacacttttgcctacctccttacagcaaaaccatccttccttgaacccaagaggacttaaagatatctgctcaccttctgtaaggcaaactgaaacttctatttgagctggtgtttttgctaaaattgtgctctccaatcatatttaattggacaagtaactgtgatttgatttat

SEQ ID NO: 56035 - DNA, 621 bp, Homo sapiens
agatttagtatgtctagaatagaacctggtatttatttgtttttttttttgtttttttgtttttttgttttttttttagacagagtctgtctctgtcactcaggctggagtgcagtggcctgaacacagcttactgcaccctacctcatcctcctgagcttaagcaatccttccacctagctgagaccacaagtgtgcaccaacacacctggctaattttttttttttttttttcagtagagatgaggtttctccatgttgcccaagttgttctagaactcctggcctcccaaagtgctgggattacaggcataagccactgcacccgaccctgatattttcatttctaacaaatttcacatgatactgattctgctgatctgggaccacacyttgagaataactaccctagacttttgcaatgatgcctgaatttttctctgcttacacttttgcctacctccttacagcaaaaccatccttccttgaacccaagaggacttaaagatatctgctcaccttctgtaaggcaaactgaaacttctatttgagctggtgtttttgctaaaattgtgctctccaatcatatttaattggacaagtaactgtgatttgatttat

SEQ ID NO: 56036 - DNA, 621 bp, Homo sapiens
agatttagtatgtctagaatagaacctggtatttatttgtttttttttttgtttttttgtttttttgttttttttttagacagagtctgtctctgtcactcaggctggagtgcagtggcctgaacacagcttactgcaccctacctcatcctcctgagcttaagcaatccttccacctagctgagaccacaagtgtgcaccaacacacctggctaattttttttttttttttttcagtagagatgaggtttctccatgttgcccaagttgttctagaactcctggcctcccaaagtgctgggattacaggcataagccactgcacccgaccctgatattttcatttctaacaaatttcacatgatactgattctgctgatctgggaccacactttgagaataactaccctagacttttgcaatgatgcctgaatttttctctgcttacacttttgcctacctccttacagcaaaaccatccttccttgaacccaagaggacttaaagatatctgctcaccttctgtaaggcaaactgraacttctatttgagctggtgtttttgctaaaattgtgctctccaatcatatttaattggacaagtaactgtgatttgatttat

SEQ ID NO: 56037 - DNA, 616 bp, Homo sapiens
gaaaaaggcacctcttcaggtctcataagggactgagtctgaaagggagaatgtgaaaacaaattttaaaatatataaatataagcccttgactttatatacattaaagatagttttggtatttcgtggtattaaatatctgtgttcttttcttctctgttgttgaattatggagaaattgagaggggaaagaagacccttccttagaatagttgttactgtgacataatcaccactatatttatgccttcaacatctacgtcttttgataaaaagtcttacagtgctgggcacggtggctcatacctgtaatcccaacactttgggaggccgaggcgggcagatcacttggggtcgggagtttgaaaccagcctggccaacatggtgaaaccctgtctctactgaaaatacaaaaattagccgggcctggtggcagamacttatagtcccagctacttgggaagctgaggcaggagaattgcttgaacctgggaagcggaagttgcagtgatctgagatggcaccattgcactccagcctggacgacagagtgagactcttgtctcaaaaaaaggaaaaaaatagtcttataataacataacttctatggtatat

SEQ ID NO: 56038 - DNA, 1023 bp, Homo sapiens
ccttatgaaataagctctattattttctctaccacatagttaaagaaactgaggcatagaaaggttatatactttgtccaaagtcacagatctcatacataggtaggagaaatttgaatctaggctgagttcaaagctcatttgtgtatcagatagactctattcctgaagacagtggcatcctaaaagattgcaagaagagtaaactagcagcatgctcaagaaaccaagtagagtatgtcaagtagagtgtaatattaatttaaaaaaatgtttctttggtatgatgaactatcttcttatgggtattttcagtatattttttaggttaaaattaactttcagttcttgtggatgctaataagctgccctgtttacctttaagctgaactttacaaattgtattgtgcctttataaccttgacatttattagggtttgaaaagtgctgttcaccattcactcctttagaaaagagagtaaacgtactcctacttagagtgcaatgaaaaaaaaatttgtgctatatgtgctaagtgtttgastgtttctttatggcatatgaagcacttttgcattatgtcattttattcttacagctctccaagagagatgggatgggtattattgcccccattgtgctgaaaaagaaactgatgcttggtgagtgaaggatgaaccagaattagaaaatggaactctaatgatcttccctatatgctgcttctccttatacaactcagaagaaatacagattttagaaattttatagggaataatatatgaggagataaagtcagctctccattgagtaagctagaacatgacactgttctttgacttgcttaacattactaaatatgacttggctgatgatatcaccccaaactgaaattccccattatcacagctcataatggtgcatggtgttttgttggtccttaatttgtgtcagtggaagacggcacttcgcagacttcagttttcctctttaccttatactaaagccaccacgaagggagga

SEQ ID NO: 56039 - DNA, 1219 bp, Homo sapiens
tgcatattcaaagggtttagaattttttttgatattgcatgagactttcaataaagtatcaggtaaattcttataaaaacaatattctgtattttgaaatgtacccaagaccacataaatgagactttattctggtacacacatgcagaaatgactaccccagccctaaaagtgttgcccctgaagtcttcctatgacagtaaatgaagctccacccttctagtgggacaaccaaaagccaaagaattatctttgagtgttctctgtttctcatagtccacattcagttcatcagctgttgactccaccttcaaaatacatccagaatctgattacttctcactaattgtcctgctagttctttggactaagctaccaacacttctcatctggattattatagtagcctcttaaataatctttcctttttagcctttgcatcctatagcctgttttcaaattagattcagggagattcatttacaacaaagcaaatygcctggcttctttactcagaaccttccaagagcttcctggttcactctgtaaaatccccagcccacaccacagcccaccaagttctacatgttctagcctccttccctatagcctgtcattcccttcttaccaactgtgctccagattcattgcctctttgttgaaactcaaacataaaagactaatagtcactttggggacttggcctttcctttgatttctgcctggaaagttctccagagcagccacatggctgtctcccattcttctttagttctccactcacgtatcagggttcagtgaggcctttctgataacatttcttaaaattgtaagcacaaccactgtctggccttattcccctttgccttccttaattttattcataaaacttcaaaatgtaactctctaccctatgtctctttcttctgtttgtatataatgagatcttgtctacttagttcactgtcatattcccagcatgttagccatttataacttatgcttgtaatagatagtcaagaaaataaccaatatagccctaatagagttttacatttgtacaagttgaaagagactgcattaaacatataccacttacccactgattgagaactttttatgataattagactgtctacttcctagagatgttgagttgggtaaaattatatgagttaggggaaattacttatatttcatttcattataaaaatgtcaa

SEQ ID NO: 56040 - DNA, 1219 bp, Homo sapiens
tgcatattcaaagggtttagaattttttttgatattgcatgagactttcaataaagtatcaggtaaattcttataaaaacaatattctgtattttgaaatgtacccaagaccacataaatgagactttattctggtacacacatgcagaaatgactaccccagccctaaaagtgttgcccctgaagtcttcctatgacagtaaatgaagctccacccttctagtgggacaaccaaaagccaaagaattatctttgagtgttctctgtttctcatagtccacattcagttcatcagctgttgactccaccttcaaaatacatccagaatctgattacttctcactaattgtcctgctagttctttggactaagctaccaacacttctcatctggattattatagtagcctcttaaataatctttcctttttagcctttgcatcctatagcctgttttcaaattagattcagggagattcatttacaacaaagcaaatcgcctggcttctttactcagaaccttccaagagcttcctggttcactctgtaaaatccccagcccacaccacagcccaccaagttctacatgttctagcctccttccctatagcctgtcattcccttcttaccaactgtgctccagattcattgcctctttgttgaaactcaaacataaaagactaayagtcactttggggacttggcctttcctttgatttctgcctggaaagttctccagagcagccacatggctgtctcccattcttctttagttctccactcacgtatcagggttcagtgaggcctttctgataacatttcttaaaattgtaagcacaaccactgtctggccttattcccctttgccttccttaattttattcataaaacttcaaaatgtaactctctaccctatgtctctttcttctgtttgtatataatgagatcttgtctacttagttcactgtcatattcccagcatgttagccatttataacttatgcttgtaatagatagtcaagaaaataaccaatatagccctaatagagttttacatttgtacaagttgaaagagactgcattaaacatataccacttacccactgattgagaactttttatgataattagactgtctacttcctagagatgttgagttgggtaaaattatatgagttaggggaaattacttatatttcatttcattataaaaatgtcaa

SEQ ID NO: 56041 - DNA, 537 bp, Homo sapiens
tggcatgttacatggatcactacagtgtcacagccttgagrgtatactccagaaatgaagagtggtatcaaatgtttatgtcatctgtacagctaaagtcagcagagtgtgttggcaatatgttttaaaaggagaaataaaaagatttttatctgaatttttgcttggaatatgaatggaattttctaggagactaactcctttcaatattatttattcatatatctggtttgctcttctcttcaatgaaaactccagaaagagcattatatataccacttttaaagtgttgcaattatagcagctgtttttaagttcaaagatatgacatagtaagcagtcattgaataaacataacctactttgaggtgtgagagcacacggaaatgctttattgcggcttataatggcatcttaaaggaaaatttcaaaaccatgcacattaaaggccatgttccaactccccaaaattgttgagagcagtattcagaagccacatgtgaaaactgtttgaaatgttcacttctgaaggttcat

SEQ ID NO: 56042 - DNA, 1093 bp, Homo sapiens
atgtgcatgattcataactgctcgttgttgaagtgtccaatgtgaagcgaaatggcacaaggtcccaaataatatgatatgctatgtatgcaacacactaacagaaacaaagttgtaacaaataacrtttattttcttcttaaaagagcggcagtggtcacagctgtctgcaaacttagatccctaattcattggttgattctcacacatctgattagctaattaattatcattgaaatgtgcaagtgaataaacaactggcctgcatcatttgatttttgtctccaaactatttagctaactgaactcatctacagaacaattagctagtcttctgctgatgctattcttgcaaaactaaagagctggccatgagcacggcagatgtctattccagaggaagtgactttacatgccttctttggtcaactaggacggtgatcttgggttatactttacaccagatggttaatttaaccataaacttatttccaaattaatccagatttcctagttagcatcaggttctagtaaggtagttttctagaagactcaggacagaaggactcaggcagaagattttccctaacatgacgaatagattagacatcttccatataaatatttgtattttaaataactatgtgcatttataaaaataccaattggatagagtactgcaagatggcttattgattcaaattcatactgattttttttctggaaaaaaattactttataaccactaggccttgtggttataaaatatatatatttgataattttattttaataattttatctacatatatttaataatttttatgaatttcaattgaattttaggatcatagagaatttaaggaccaattttatcccagtgagaaatgatttaaggaggataggctctgacaatgttcaatatgccttttcctaactcttcaaaaagtaactccccctcactggttgacattcacttcccgtttaataaatatgcactgagtatcttctatcttcacatctcttgccaggagaagagaggtttataaggatacttaagccttcataaagaatatcattttaatattcattc

SEQ ID NO: 56043 - DNA, 1680 bp, Homo sapiens
gaacgttcctgtggtgcccctctgagtaacagccttccccacagcctgtgggacccgtggggtctggccttggtacctccccgacctcatctctcaccctctccccacgatcactccggcttccttgctattcccacaacataccaggctgaaacctgcctcaggggctttgcgccagcggatccctctgccaggaacacttttcccagagaccctccaacccctcacctcctgtaggtctctgctccaatgctgccttctcgtgaggccttccctgagcaccctgtggaaaccagctcccctgccaccctctctgttctcatcccatttgcacccagcaccatatgcgtctcgctcactgtctgcttcctccactacggcagaatctgcctggggacaggaatgtctgtctgctttcagtgatgtatgtcactgacgtgtatcccaagtctagaacgctgcctggcccacaagggaaattcaatatgccttttttaaaatgaatgaatacatgaagaatgaataaatgaaacccatgccacctcccagatcccatctcagggagagccacatcacctactcagcagccttgtcctaaatcctccctcttcctccccctgccctgaactgcccatcagtaactgagtccctctcaacagccctgccctgagccaggtacctcctctcccactagggttccagccccagcttcctccttggtctctgggctccagtatcacctcctcgcacccaccaccgcacagcacccagaggcgtcttcctaaagagctgttctgaccggtcccacccctgctcaaggctctccctggctccccagtgccctcaggacaaagtccaaactcatcctggtggcattcagggcctagcacagcctggcccctgctgacctgcccaggtcaattctctcctaaccaaccctccaacttgaagctccaagctctctcttgcttccaacatttgcacaaactgttctttctgcctgaaacatgttcccctcgccttttcaactggctattgtctactcaccactcaagcctcagagtccactcctccaggaagccctccctgatatccccaaggctgggtcaagagcctcctctggactcccacagacccctgaatttcctgattccagacttgtctgctctggggcatccctgaggacagggctgtctccctgactagacggtggaccctggagggggcaggcctgggtctgtctcagtcacagctatatccccagcaccactcagcactggggctggtaaagatcttggggaatatttgtgaacaratgaatgaatgaatgaataatggaatgaaagaagggatgtcaggctaaggcctttggcctttatcctgacagtgatggggagccatgaaaaggttttaaggaagggagaggtgagaaaaactcactgcggggaagagaggggatggggtctcccagggcggggctagggcacctggtagcgccggatgagggcctcattcttccgccgaagagcctcgatcctcttgtccaactcagcatccttctcctcctttgatttcaaatcgagtgtggctgcctgagaccgggaggcagttgagggatggaaggaaaaacctccatccataccagggactttcccccagggtctgagagtctgcccctat

SEQ ID NO: 56044 - DNA, 601 bp, Homo sapiens
ataggcacagagatcctctaattcaaagaatgccattctaaaggagggagaggaattataaacaagaaaacatagtgggctgcacagaagataagcaggtgatttgatagaaggttctagaggttgggaagagggaaagtgctaattttataaagaagagtaatcaggagtaatcacctctctgagaaggcrcaggtgacatttaggctgagatctgagatttagtaataattttgatgtagttattttaatcctaatttgttttgtaagtacggtgtttagatattaagagttaagccttcctatattaaaaagtaaaaaaataagagatgctggtaaggttgtggagaaaagaaaatgcttatattgtgggagtgtaaattagttcaaccactgtggaaagcagtacggcaattcctcaaacagctaaaaacagaactaccatttgatccagcaatcccattactgggtatacacccaaaagaatatatatcattctaccacaaaggcacatgcacacatatgttcactgcagcactattatcaatagcaaagtcacggaatcaatctaaatgcccatcaatgacaggttaaagaaaat

SEQ ID NO: 56045 - DNA, 568 bp, Homo sapiens
ctttgggaggccaaggcaggtggatcacttgaggccaggagtttgagaccagcctggccaacatgttgaaacctcgtctctcctaaaaatacaaaagattagccaggtgtggtggcacgtgcctgtaataccagctactcaggargctgaggcaggaaaattgcttgaacctgggaggcagaggttgtagtgagctgagatcctaccactgcactccagcatgggcaacagagtgagactctgtctccaaaacaacaacaacaacaaaaacccaccacaatcacaatccagcaggcagacagacattaatcaaatagtcccactaatcaatgtataattcctggctgagttaagcacttcataggaaaagtctctaaatatatttgcaaagaaatgaagaagtgaggtctagagagaggatacagggagtccatgaacttagagagtgggaacaaaaaacctttttattttcattaacttctaaatttattgtttccttcaaatatgaatgcaggcaacacaccacagtagtacttgtgactttgtcaccagcagaaatccatgtagc

SEQ ID NO: 56046 - DNA, 568 bp, Homo sapiens
ctttgggaggccaaggcaggtggatcacttgaggccaggagtttgagaccagcctggccaacatgttgaaacctcgtctctcctaaaaatacaaaagattagccaggtgtggtggcacgtgcctgtaataccagctactcaggaagctgaggcaggaaaattgcttgaacctgggaggcagaggttgyagtgagctgagatcctaccactgcactccagcatgggcaacagagtgagactctgtctccaaaacaacaacaacaacaaaaacccaccacaatcacaatccagcaggcagacagacattaatcaaatagtcccactaatcaatgtataattcctggctgagttaagcacttcataggaaaagtctctaaatatatttgcaaagaaatgaagaagtgaggtctagagagaggatacagggagtccatgaacttagagagtgggaacaaaaaacctttttattttcattaacttctaaatttattgtttccttcaaatatgaatgcaggcaacacaccacagtagtacttgtgactttgtcaccagcagaaatccatgtagc

SEQ ID NO: 56047 - DNA, 1342 bp, Homo sapiens
tgaaaaacagaacatatactgaaaaggagtcttcagagtgataggaggggaatccgaagggtcccaagcatggaaaccacatgttttaagaaatatatcgctagaatgaagtatgtcaaatggtcatggaagatgagcactaaagaaaaagtcatgaacgctggtgattggattagttgtggtcgtggtcctcggagtttccctrgtgtggtgagagcagaacgcagaaggcaaatgagaggcagctggtgtgaactctggtttgagagctggtttgattctgaagcggggaaagagaggaaagtgggaattaaggagttggaaggaccttggggctcattttagtattaatactagagaggtcactcactctttaaaaggaatcagtggggaaggaggaatccagagctagaagaggggaggatcagggtctcagaagtgatggcagtggcagaaggaaggggtcagggaagaagctccctggggatcctcccggtgaggagcacaggtgttgaagaagcacacatggcctcagctctctcaggaaaaacaaagaaatggtcacctgctatgagtgtgaatgttaggatgggaggctctggagaaagtgggaggactgggaggactgtgacagccagtcagcatgagccaaatggacaaatgcccaagtcactgtcaaggcctccctggggctgcatgacacaccaggaatgtgtggtcgccaaaacgggcagtccacagcttggcagcccagaatgagttgtataaaaacaggataatacagaaagaacataaagacaggtccaacaacatccctataggttgcaagggaaggagacaagtgaagccagaaccgaatggatgggctgggagaacggtgaggtggtaggcaagggaaaggtcaaaatcagtgggatggggaaaggtgtaaatggcaggcctaggtaattgtgttactgtggacctttacatctgtctgtcttgtttgtttataccagaaatttctgcctggataataaaaaaaggatatgcttttaaagttaaacgtactttggcacttctgaaaagactgatcggactgtttagtaaagaaagctgaattttgatcctccatcttctttaactttttacctatggctttggatgaagtctgctttaaaagaagaagaaaaagaagatgtcaaagagttgtaaattgcagaatgacatctaccatgtggttcttctgccactctcactaatattgcttagcattctgacttttaaaaataacgtggttattgagatttaaaactctgtggatgcagaatacatttttgaaaataagactttttactatgca

SEQ ID NO: 56048 - DNA, 1342 bp, Homo sapiens
tgaaaaacagaacatatactgaaaaggagtcttcagagtgataggaggggaatccgaagggtcccaagcatggaaaccacatgttttaagaaatatatcgctagaatgaagtatgtcaaatggtcatggaagatgagcactaaagaaaaagtcatgaacgctggtgattggattagttgtggtcgtggtcctcggagtttccctagtgtggtgagagcagaacgcagaaggcaaatgagaggcagctggtgtgaactctggtttgagagctggtttgattctgaagcggggaaagagaggaaagtgggaattaaggagttggaaggaccttggggctcattttagtattaatactagagaggtcactcactctttaaaaggaatcagtggggaaggaggaatccagagctagaagaggggaggatcagggtctcagaagtgatggcagtggcagaaggaaggggtcagggaagaagctccctggggatcctcccggtgaggagcacaggtgttgaagaagcacacatggcctcagctctctcaggaaaaacaaagaaatggtcacctgctatgagtgtgaatgttaggatgggaggctctggagaaagtgggaggactgggaggactgtgacagccagtcagcatgagccaaatggacaaatgcccaagtcactgtcaaggcctccctggggctgcatgacacaccaggaatgtgtggtcgccaaaacgggcagtccacagcttggcagcccagaatgagttgtataaaaacaggataatacagaaagaacataaagacaggtccaacaacatccctataggttgcaagggaaggagacaagtgaagccagaaccgaatggatgggctgggagaacggtgaggtggtaggcaagggaaaggtcaaaatcagtgggatggggaaaggtgtaaatggcaggcctaggtaattgtgttactgtggacctttacatctgtctgtcttgtttgtttataccagaaatttctgcctggataataaaaaaargatatgcttttaaagttaaacgtactttggcacttctgaaaagactgatcggactgtttagtaaagaaagctgaattttgatcctccatcttctttaactttttacctatggctttggatgaagtctgctttaaaagaagaagaaaaagaagatgtcaaagagttgtaaattgcagaatgacatctaccatgtggttcttctgccactctcactaatattgcttagcattctgacttttaaaaataacgtggttattgagatttaaaactctgtggatgcagaatacatttttgaaaataagactttttactatgca

SEQ ID NO: 56049 - DNA, 702 bp, Homo sapiens
tcctcccactgcagcctccagagtagctgggactactagcatagaccacgtccagcaaatttttaaatttttttttaaagacagagtcttgctatgttgcacatgctggtctcaaactcctgggctcaagagatcctcccacctcggcttcccaaagtaggttgggattacaggtgtgagccactgcaccaggtaaaataattatatttgaataataaatgtatgtggggggaagtctcctgtaatgtttagaggaaaataagaatgcaaaattacatatatagtatgaactcaactatacaaaaatgcttagaaataccagaaagacattaaaaagttaacagcagttatctgtgtaggaacaatatgggtactttaaatcttcctctttatattgtctgtgtgtgtgwatctatgtgtgcgtgcatccataactattttaaggaaagtttcaaatgaacatatgttaaagcttacagactgcttaaaagaaattcaaaactaatttccagaatgggtctgaaaaaaacagaacatagacaaacttaccatcacacgaaagagaaacataacttcctaagtcatcagacatgtgtcgcatcacatttctacccatcttaagaccaaggaaaatccaataatctattgctgctccaagaattccagccaataagtaagctagttcatgtttgaagacctaac

SEQ ID NO: 56050 - DNA, 664 bp, Homo sapiens
ggagcccaagtcaggcagatcacttgaggccagcaattcgagaccagcctggccaacatggtaaaagcccatctctactaaaaatgaaaaaatacaaaaattagctggacgtggaggcacatgcctgtaactctagctacttggaaggctaaggcataagaattgcttgagcctgggaggtagaggttacagtgagccaagatcaggccactgcactccagcctgggtgacagagcgagactcatgtctcaaaaaaagaaaagatcttcccagaagaataagggttatcaaatacagttatttgaatagcaaggggaaaacattttctgttagggagaaagaaggtgaaacagaatttctggagacactaacaactgaaagacagaggaaggtctaggcagtgacagcatgtgcagaagcataaaagagatgacatatttaggaaatattaagttctgttttaaaattcaaatttctagctgaaaaaaatataactgaagccctaaaatagatactatagttacaaatgtctacacttttggtgacaaaaactgatgataygcatattccataaattaattttcttcatttaaaaaacaatacacaaatttctattttgttaaaaataataatgatttggctttctagtgagtccatttcatgc

SEQ ID NO: 56051 - DNA, 1110 bp, Homo sapiens
tgttgacatcctggtgctgtccctcctctgaccactagatttcagattcttaccgaagaggatgagtgatctttcttcagagcagtgctcactagatctggttatccagtggacaggatggtgtcacgatgctacttaggatgaatcttaataccaatttcccttcattcccacctagcaacctggtggctgcctatgagaaagcaaagaaaaagcatcaaaacaaactgaagaagttagagtcgcagatgatggccatggtggagagacatgagacccaagtgaggatgctcaagcaaagaatagctctgctagaggaggagaactccaggccacacaccaatgaaacttcgctttaatcagcactcacgcaccggagttctgcccatgggaagtaaactgcagcaggccactggggacagaagggcccatgtacttgttgggaggaggaggaaagggaaggctggcaggtaggtcggcacttggacaatggagtgccccaactcaacccttggggygactggccatggtgacattgtggactgtatccagaggtgcccgctcttccctcctgggcccacaacagcgtgtaaacacatgttctgtgcctgctcagcagagcctcgtttctgctttcagcactcactctccccctcctcttctggtctggcggctgtgcatcagtgggatcccagacatttgtttctgtaagattttccattgtatcctctttttggtagatgctgggctcatcttctagaatctcgtttctcctctttcctcctgcttcatgggaaaacagacctgtgtgtgcctccagcatttaaaaggactgctgatttgtttactacagcaaggctttggtttccaagtcccgggtctcaactttaagatagaggcggccataagaggtgatctctgggagttataggtcatgggaagagcgtagacaggtgttacttacagtcccagatacactaaagttacaaacagaccaccaccaggactgtgcctgaacaattttgtattgagagaataaaaacttccttcaatcttcattttggaggcagggctgggaagggagcgctctcttgattctgggatttctcc

SEQ ID NO: 56052 - DNA, 722 bp, Homo sapiens
tccagaatcaaaagctcaagagtgacgtgaggtgggcaccggccccaagtgcagagtcaaggcagggagaggccggctggagccaggccccctcgcacgcagcccccaaatcatggacgcacctgtggggagcaccacatctccacctgcggcctcacatctccccactcccctttttgtacgtttaactgtttctttgtacgtggtttacgtaactttaaactgtaacagccttaatggaagaccaaatggttttttatatgtgtatgtacaaagttttctattaacgctgcccgtctcccttataacctggacgtgagctgtcagagcagaagccactaggccactgcgcgtctgaggctcagaccctgctgtggttggcttggggtggccaatgggctgggaccctccatgagagttttggacacttgggtcacctgacccgtgcctctctgacacatgtctccggggggcagccacctggccaatgtgcatttttgcacrtgctggaaccttccatgggggtctgggctattggctggagccaggacatgagtcaggggcaccatggacctcacgtgccagggagacttgaatgtggctgtcactcttccggacgccaagggctgcaggaggctgcttttggcactacccaccccgtgtgacagaataggagccagcgactcaggactgctcacgggtcaggagggcaacgcctgaag

SEQ ID NO: 56053 - DNA, 789 bp, Homo sapiens
ccaagcccagctaatttttgtgttttttgatagagaccgggtttcaccatgttggccaggctgctctccaaactcctgacctccagtgatccatccacctcaccctcccaaagtgctgggattacaggcgtgagccaccgcacctggccctccatggtattttctttttttttttttttttttgagacggagtcttgctttgttgcccaagctggagtgcagtggcacaatctcggctcactgcaacrtccacctcctgggttcaagcgattctcctgcctcagtctcccaagtagctgggattacaggcacccaccatcacgcccggctaatttttgtatttttagtagagacggggtttcaccatgttggccaggctggtctcaaactcctgacctcaggtgatccatctgcctcagcctccctaagtgctgggattacaggtgtgagccaccgcacctacccgtctatgatatttttcaaggacatcaggcccactggtgtaaccaaggtgcagatgacctaaggtgtgggaaaacatgaaggctgcatgccaggccctggttcctgtgaagcccccaccctcatcctgtcactccagaagagaggcactgcaaggcataggggtactcagcttccaggtactgaggtgggctgggaaggggttctccatgggggtctgggcgttaggggggacccagccccaccttgctcactctcaggcagagctgtctcatgtgccccttgaggcaggtactgtcacactgtccatttcccgggggaagaagc

SEQ ID NO: 56054 - DNA, 1093 bp, Homo sapiens
gaatgccccatcactataatactgttaattttaaaaaagcatagagaaaatgataatttatgatagtatctctcaaaatgaggtcatacttttaagggttctcaattcttcaataaaaatttgtatactgtgttttcattttgatattactctaacatgcaatctgagcatatattcaattatctagatgaccatatgtatcaaatactaccacttgatttcagagaccatattggtactagtactactttaattgctacaggctattaaaaacagaaataaagctaatctacaaatgatgcattacaatcaaatgacatacgacataatatagaaaggaatgtttcataacagagagcagagaaaggtggtgttagtacaggtacaccaaactcaaaacaccctcaaagaagtcggcattatattcattcacattgtgatgaaaagtctggtttaaaaaaaaaaatcacattaaattcattttattaatttgaattttacatgttctacaattctgtaatttaaaatttgtttcatagttgtagtacaaatgaaataggtcctcagagcccaagtcaagtcagccatatataacaacactgtaatttggccaggtgtggtggctcatacctgtaaycctagcactttgggaggccaaagcaggaggaatgcttgagcccaggagttcaagaccagcctgggcaacatagtaagaccctgtccctacaattttttttttaagacaagcgcaaagttaatctcaatataattagtgcatgccttcatttggggaggggaaaaaaaagatgaaagcttggatacaacattaaccattccatgaagctctatggttctataagggcctggtaagattctaaaaggtattaaaattctggctttacatgtttagtaaaatccctagcagaacttcagccaaggagcaaatgtgggatactcttgtctgtatccacgttgctgagtgcttactgaaggaaaaaaaatcaaagactatgcataatttacaaaagagaaaacagaggcatagacaagttccacaatttacccaaggatacatagctagtaagtggcagag

SEQ ID NO: 56055 - DNA, 361 bp, Homo sapiens
gtatctattattgtactctctacctccatragatcaacttttagctcccaaatatgagtgagaacctgtcatatttcaccatgtctcttggtactcttttgttatgtctagaatatttgatgatgtcaattatctcattcctaatatcaataatttgtgtcatttctattttttcctaatcagcctggaaagtttatcaacttgatttttattttattttgtatattttgtattttgtttctttttagtgtctaagagtttttgcttagtcttagagtatttctatttgaaatatgttatttttgttgaataaatatttcctttatctcttttaagattttgttggtattttttccttttg

SEQ ID NO: 56056 - DNA, 907 bp, Homo sapiens
tgctgggcttagtacctaggtgatgggttgataggcacagcmaaccaccgtggcacacgtttacctatgtagcaaacctgcatgtcctgcacttgtatcccagaacttaaaataaaattaaatttaaaagaaaaagaaaaaatgacccagcctctccatgctggtctacaggagtctacataatctgactcctaccaacagcatcttctacttctctcccccaactcatcccattccatcctcaccagcctctcttctgctcctaaaacatatcagggtcatcgctgcctcaggacctttgcactttctgttccctcagcccgcaacacctatccttgcatcctcagtggctgcctccttctccccattcaggcatcactgccatctcttgagagaccttctctacccaactgctcacccctccttagcccatctcataatgacccctgaaaacatctctcttcaaaataatctgaaatgatgtgcttacttttgggcttaatcatttattatctgtctttcctgtgaaaatgtaaattccggccaggtgtgttggctcacacctgtaatcccagcactttgggaggctgatgtgggcagattgcttgaactcagaagttcgagaccagtccgggcaacatggcgaaaccccatctctactaaaaatacaaaaattagccaggtgcgatggcacgtgcctgtagtcctagctatttggaagggtgaggcaggaggatggcttgaggctgggaggtcaaggctgcagtgagctgtgattgcaccactgcactccagcctgggtgacagagcgagaccctgtctcaaaagaaaaagaaaaagaaaaaaaaaagcaaatgtaaattccacattgatattatccaccaccagactccaggccttagcatgt

SEQ ID NO: 56057 - DNA, 770 bp, Homo sapiens
cctagcatcctatactttctgtcactggatagccttggaattatttttccttctttttgaaatactcttcttctttccaccctttgctgtcaagtctcagaataggcattatttcctccaaaaaccctctcctgaccctccaaatctggatgaggacacttcctttgcccagagagcacctgttttaatcctctcaggtggctataataaaataccttaaactgggtggcttatacacctcagaaatttattttccacagttctggaggctgggaagatcaaggcactgacagatttggtgtctgatgaggggccatttcttgtttcrtagaaggggtcttcctactgcatctttccatggtgaaaagagttgaggcagctctctgaaacctctttcatgagagcatgaatccctctgtcttcatgatctaatcacctcccaaaggccccacttcctaatatcttcacattggtgactaggtttcaacatatgaatttgagaaagacacagacattcagaccatagcagtgctcttccaccaggttttttatccccctgtattataattgaggtttaaattatctgctttccttcccttagattgtaagctccatgagagcagggccctacccatccagtcattgtcctatcccccatgactacaacttcctgggtacataattaatatttattatattatgtagcaaaggtatgctgccatactaagagacccaaaaggccaccggattaaaaccttaaagaaaaaaaa

SEQ ID NO: 56058 - DNA, 846 bp, Homo sapiens
gcctgcctcggcctcccaaagtgctgggattacaggcgtgagccactgtgcccagcctggacgttgtttgaacaggcattgctgactttcatttctttgaaattcttccttttctcatgttgtaggccagtggtcctgaacctacaacaatctttgtggtgtgcaaggataaaagtgtggcagtgtttacagtctgtgctattgatacaacagcctgtagtgggcagctctactcatgggagcatgctttgtatgtgaatgatagttatctgatatattaaggcagataaaccatcgtgtcaaagcagaaacccctgctctaggctgagctttccttgtctgtttcattcattaagtggtgatccttaggtcctgttatttatagatttggaacttgttcataccattgatgccttactaaacgtttattatgtcatctttcagccttcttatatacatacacatrtatcacttttttaagtttatttttgtgctgtatctctgtcctcttaactagttttctcccctttttagggggaaacattcttcctcctctctgttttgtctttctttaaagcacaatgatcagcattacatgtaataattatggttatacattgttctttgggggaactaggaatatttttggatctatgtctctagtattttgaggttgtagagtggtatctagtcacgttcacctcaagttcatccaaatatcggaaggacagaaaacttttcacatacttgttgaatgatagttcatgatttccttatatgttttttcatttgtgtctgttatatctgtttgtgccagataacatgattttgtttagacctgccata

SEQ ID NO: 56059 - DNA, 966 bp, Homo sapiens
attagccccaaactagtgaggtcagtaaggttttactggccttacttaatttaagtttaatttgaaaactaaaccaaatcatacttcacatacctcctttgaacttgacattgagacccaaatgactaacactgwataccaaaactttgtaactggcatttcttagcaaaaattttaactcattaaaagtatatcactaaagaaaatattacttcagctggtaatgatcaacactattaacagacaggattttcttctattaataccatttgcaaagcaaatacacaaagtgtccctgtgggttcggcatcaaatgctgacaacctttaaatcatatttttagctcttttttttttaagcatagaaaaaaatatgtataaacttaagcaataaaaattagcatttctagttttctgtatataatgtatcaacctcacattattcattacctggaaaattttcacataacacttctattggtgtagcccgttttgtatctccaattttctgatacctctcctttaatgtgtcagcctaaaacagaaaaaaaaaatcttgagaatgtggtaatttaaaaattatttagctgggactgcacacggtagcctgtaatcacagagctttggaaggccaaggcagaaggaatgcttgagcccaggagtttgagaccagcctgggcaacacagggagccctgatgcctacttacaaaataaaattttaaaatatgaaaactgtttagttggaagacaggaccttaatatcttaatattttatgaaattcaataaagaaacacaaaaacaattacctttaagccttgccaaggaagactgcctctcagaaaatacatgaacatatgacctaaagcttctaaatcgtctcttctactttgttctgaaatacaaaagaaatataaatttcacttttctctaacagttaagaatggaagaatggagagtttgttctt

SEQ ID NO: 56060 - DNA, 619 bp, Homo sapiens
tgagtggatggagtgcagctaaggcccccaccccctgctccgtcacaacttgccccctcaaccaaaaagctgctttgagtcaaaaagcacccataagatacctgcatctgccttgaaatcttgcagcatggagtgtcatatgtactcaggagagaggcagggctttgcgggcaggagaaggaagggaggaatgctctgagctgcaaagacccagtactcaagttctgacgtgggaggagatgcagygagacgtctcttgttgcctaaagcctgttcctgttggttttcttagagtgatttctcctagacatgtgcagtaggcccactggggctgctgtgcagtggtgagtaaaagggcagggaaggcatggacagcctggtccttctgcatggacagctcagtccatggcccatcccaggtatagagttcagttaatcccatttgagcctgcagcttaagagatggctcatcctaactgtgaagcaaaatcagccccagaggatgtattgatctgactcactgatgtcaaaattgcagtatttttttagcatttgagatttagcagctgccttcagtttggggttacccacatcccagcatcagatatgattaaggaaa

SEQ ID NO: 56061 - DNA, 619 bp, Homo sapiens
tgagtggatggagtgcagctaaggcccccaccccctgctccgtcacaacttgccccctcaaccaaaaagctgctttgagtcaaaaagcacccataagatacctgcatctgccttgaaatcttgcagcatggagtgtcatatgtactcaggagagaggcagggctttgcgggcaggagaaggaagggaggaatgctctgagctgcaaagacccagtactcaagttctgacgtgggaggagatgcagtgagacgtctcttgttgcctaaagcctgttcctgttggttttyttagagtgatttctcctagacatgtgcagtaggcccactggggctgctgtgcagtggtgagtaaaagggcagggaaggcatggacagcctggtccttctgcatggacagctcagtccatggcccatcccaggtatagagttcagttaatcccatttgagcctgcagcttaagagatggctcatcctaactgtgaagcaaaatcagccccagaggatgtattgatctgactcactgatgtcaaaattgcagtatttttttagcatttgagatttagcagctgccttcagtttggggttacccacatcccagcatcagatatgattaaggaaa

SEQ ID NO: 56062 - DNA, 619 bp, Homo sapiens
tgagtggatggagtgcagctaaggcccccaccccctgctccgtcacaacttgccccctcaaccaaaaagctgctttgagtcaaaaagcacccataagatacctgcatctgccttgaaatcttgcagcatggagtgtcatatgtactcaggagagaggcagggctttgcgggcaggagaaggaagggaggaatgctctgagctgcaaagacccagtactcaagttctgacgtgggaggagatgcagtgagacgtctcttgttgcctaaagcctgttcctgttggttttcttagagtgatttctcctagacatgtgcagtaggcccactggggctgctgtgcagtggtgagtaaaagggcagggaaggcatggacagcctggtccttctgcatggacagctcagtccatggcccatcccaggtatagagttcagttaatcccatttgagcctgcrgcttaagagatggctcatcctaactgtgaagcaaaatcagccccagaggatgtattgatctgactcactgatgtcaaaattgcagtatttttttagcatttgagatttagcagctgccttcagtttggggttacccacatcccagcatcagatatgattaaggaaa

SEQ ID NO: 56063 - DNA, 545 bp, Homo sapiens
gggtttgcataaacagcttaggaggtccaggatatctgtgcacttcctaggagaccttttacatcagactttctgtggcttcctaaggaaatggatattgatgttatgacctcagacagggagcagcaggtacagctggcacatggattcacaaatgcttgactggccctctgatttcagctgtgactatactggacaattctctgcaggcttccacttatttttagctgagattgtctcacttcaagtgcttcatctaatatctcaggtattagattaatttattaatctaaagaaaatataargaaattagatttttggtgctgtaaggaactttctaggccatggcacatgcccagaggtcaggggaataacccttgatctgtggggtctgggggtcaatggttaaatactcctctacctctcgtaagtcaggcaaagcctcattatgaaggttatgaatactgggcccagggttttatcccacggacagggttttatccacggcttgagcggaagagtgacggcagggagaatgttaatta

SEQ ID NO: 56064 - DNA, 706 bp, Homo sapiens
ttatgagaggagaactggggcctgaagagaagcactgaggcatgaatggggtggggggatggtttgaggagtcagtgaaagggaagactagggatggtarcagtagtcctcagcgtgggacagttttagggattggaatgggaggagaaccaacacttggagagagagaggtacatgctaggcctctccattgggtgaagtctttatcctgctgctttgtagcagcctcaactctgcagacacttttggacatttttaaaggaaatgttcattttaaccatttaggcaaggcatacttttgaaagcaacattgtatcccatagaattctcccagggcatactcaactctgccttagctgttttggctcactcacagagcagagagacatggcccggcccttaatgcttgggtacctggcaggcgtcgtatccttttatctatatccatctgactgtccatctcttcatccagctacccatccaagcagccatccatccaaacaaccaaccaactgacagacattcccaacacaaggcactatatgccaagcaccatgctaatgcctagggataccatggcaaacaagacagattttatccttgccctcattgaggttatatccttgcatgcttgtttaatgctgccttttaaatccagcattggtttaaatgattagctttgcctctctttaagtcctgaggtcct

SEQ ID NO: 56065 - DNA, 706 bp, Homo sapiens
ttatgagaggagaactggggcctgaagagaagcactgaggcatgaatggggtggggggatggtttgaggagtcagtgaaagggaagactagggatggtagcagtagtcctcagygtgggacagttttagggattggaatgggaggagaaccaacacttggagagagagaggtacatgctaggcctctccattgggtgaagtctttatcctgctgctttgtagcagcctcaactctgcagacacttttggacatttttaaaggaaatgttcattttaaccatttaggcaaggcatacttttgaaagcaacattgtatcccatagaattctcccagggcatactcaactctgccttagctgttttggctcactcacagagcagagagacatggcccggcccttaatgcttgggtacctggcaggcgtcgtatccttttatctatatccatctgactgtccatctcttcatccagctacccatccaagcagccatccatccaaacaaccaaccaactgacagacattcccaacacaaggcactatatgccaagcaccatgctaatgcctagggataccatggcaaacaagacagattttatccttgccctcattgaggttatatccttgcatgcttgtttaatgctgccttttaaatccagcattggtttaaatgattagctttgcctctctttaagtcctgaggtcct

SEQ ID NO: 56066 - DNA, 706 bp, Homo sapiens
ttatgagaggagaactggggcctgaagagaagcactgaggcatgaatggggtggggggatggtttgaggagtcagtgaaagggaagactagggatggtagcagtagtcctcagcgtgggacagttttagggattggaatgggaggagaaccaacacttggagagagagaggtacatgctaggcctctccattgggtgaagtctttatcctgctgctttgtagcagcctcaactctgcagacacttttggacatttttaaaggaaatgttcattttaaccatttaggcaaggcatacttttgaaagcaacattgtatcccatagaattctcccagggcatactcaactctgccttagctgttttggctcactcacagagcagagagacatggcccggcccttaatgcttgggtacctggcaggcgtcgtatccttttatctatatccayctgactgtccatctcttcatccagctacccatccaagcagccatccatccaaacaaccaaccaactgacagacattcccaacacaaggcactatatgccaagcaccatgctaatgcctagggataccatggcaaacaagacagattttatccttgccctcattgaggttatatccttgcatgcttgtttaatgctgccttttaaatccagcattggtttaaatgattagctttgcctctctttaagtcctgaggtcct

SEQ ID NO: 56067 - DNA, 869 bp, Homo sapiens
ggatccatcaggagggtggccagaggagcagggggtaaaactccacagggagaaggaaatctctagctgaactttgtaacaatttgaatggggtgagaagtcactggccagaactcaggggagggcgcaaatccagtgtgcacactccacaggtgggggaagaaccaagtgctttttttcccccgcagctgggaggcggtcagcctggggcaacttttcaagtccgtctcaccctctacctggaaacagactcggggctactggcgggggcagggcacagtgggagtgagaccggmccttcagttttttatgggagctgggtgaggcctgtgactgctggctttctcccacttccctgaaagtctgttgactcagcagaggcagccataatcctcctaggtacacaactccagtgacctgggaatcgcaccccaatcccccacagcagccgcagcaggacctgcccaaggaaagtcagagctcagacatgcatagccctgcctccacctgatggtccttacctacccatcctggtagcggaagaaaaagggcatataatcttgggagttctagggctccgcccactgccagtccctctccatactactacagctgatactctctggaaaatgccacctcctgtcaggaggacaaccggcacaaaactagagcattaaatcactaatgctaagaaccctcacagagtccattgcacccccccacaccacctccaccagaacaggtgctggtatccacggctgacagacccatagatggttcacatcacaggattctatgcagacaacccccagtaccagtctgaagctgggtagacacactgggtggctagacccagaagagagacaaca

SEQ ID NO: 56068 - DNA, 659 bp, Homo sapiens
tttcagcgacagaagctgatggctgtgactgaatatatccccccgacaccagccgtcaacccaacatgcctgccatctcctcctggccccccacaggaggcatcactggaagccctagaacttacccagagggagcaaggttgccaggagcagtgacggctgatgtacccttggttwttgctttccaatttcaggagacgggcctcatcaggcttctctgccgggagagagcagcagttttccaggacaaccgaatgatagctatctgccagagcgtggctctgagcgtagcagacaagcttcttatgcgacaccagctgcggaaacacaagatcctgatgaaggtcttccacaaccaggtcctgaagcccttcctggaggactccaagtaccaaaatctcctgcccctttttgtggggcacaacatgctgctggtcagtgaagagcccaaggtcaaggagatggtaaggatcttaaggactgtgccattcctgctgctgctaggtggctgcatcaatgacgtagatgccatcctcagcaggcagggctttatcaactactccagccttcccagcctgcccctggcatagggggagcttgtgggaggcctcaccctactcatggcccagacccactccctgctccagcaccagcccctg

SEQ ID NO: 56069 - DNA, 600 bp, Homo sapiens
ctggggccaaaagtttgagactagcctgggcaacatagtgagatcctaacattacaaataagcaaacaattagccagacatggtagtgcatgtctgcagttctagctactcagaaaactgaggtgaaaggataacttgagcccaggaggctgaggctacagtgagccaaaattatgccwctgcactccagcctcaatgtccataagatcttgtctcaaaacaacaacaaatcaattaaaaaacactaaaattacacactcttgtgttttctaacaaaaactgaatgaaactaggaattaaaagcacaagccaaacaggcaaattcaaaaatatgtgaatataagacacattcttcaacatattcttgctcaggggtcaaaaaactttatttttcaaagatgtcaatacaacctacagttaaaagctacagtaacataaacaatgtgatactgacacaaagataaacagatgaaagaacagaatagagagctccggaatgaacccttctgtatatgatcaaatgatcttccaaaaggttgccatgagtacaaaatagagaaaaatcatctcttcaaaaaatgatgttgaaaactgaatatc

SEQ ID NO: 56070 - DNA, 600 bp, Homo sapiens
ctggggccaaaagtttgagactagcctgggcaacatagtgagatcctaacattacaaataagcaaacaattagccagacatggtagtgcatgtctgcagttctagctactcagaaaactgaggtgaaaggataacttgagcccaggaggctgaggctacagtgagccaaaattatgccactgcactccagcctcaatgtccataagatcttgtctcaaaacaacaacaaatcaattaaaaaacactaaaattacacactcttgtgttttctaacaaaaactgaatgaaactaggaattaaaagcacaagccaaacaggcaaattcaaaaatatgtgaatataagacacattcttcaacatattcttgctcaggggtcaaaaaactttatttttcaaagatgtyaatacaacctacagttaaaagctacagtaacataaacaatgtgatactgacacaaagataaacagatgaaagaacagaatagagagctccggaatgaacccttctgtatatgatcaaatgatcttccaaaaggttgccatgagtacaaaatagagaaaaatcatctcttcaaaaaatgatgttgaaaactgaatatc

SEQ ID NO: 56071 - DNA, 1074 bp, Homo sapiens
taataagaacacatgaacacaaagaggagaacaagagacactgaggcctagttgagggtggagggtgggagaactaagaggatcagaaaacatacctgtttggtactatgggtaggacctcaatgacaaaataatctgcacaccaaacccccatgacataattttagctgtataaaaaacccacacatgtacaccgaatcacaaataaaacctaaaagaaaaaaatactccaaggtgggggagagtgcaatgtaggtgcatggactgcttttcactatagatagtagcccaggtggggctgtactctgatttatttctgtgtgaatgcaggtagatgaaattacaaacaggtggcccagacccyaggctggtggagaaaacaggttgctgctgcaaatttagtatctaggggtggggatatgccaggagacttgtagagatttttgggttcttggcaagaaacactaggatcaaaaatgccatggtgaagttcttgagggtggtgccgagtcctgggagaagtgtggatacctcaatttctagtgtgtgtgtttgtgagtgggtgggaatcctgtagtagcagctgcaagaaaaggggtctgtcataagagcttcttctgagttttcagtcctctgtcaccctgggagaagacctggaatcacaggacaatgggcaatgtgacagcctgtgtacaggagagcagagcctcccatttctaaacacccagagctttgttccagtccaggcctctgtgatatcttttttctggcaccaaatctgtagagtttgctgagcatcaaacaattctccaacaactaattgtctaacatttaaattctgacaccacccagagtcagcacagaccctgattcagggctcagttccacaacattgtcctcactgcagatgccagtcacaaaccccatgggcccatctacgcttctgagctactgtttgaaaactggggactcccaaaacctccctgaagttcaatgatttggtagagctactcacagaactcatcaaaacactgtagttatgtttaccggtttaatatataagatgcagcccag

SEQ ID NO: 56072 - DNA, 1074 bp, Homo sapiens
taataagaacacatgaacacaaagaggagaacaagagacactgaggcctagttgagggtggagggtgggagaactaagaggatcagaaaacatacctgtttggtactatgggtaggacctcaatgacaaaataatctgcacaccaaacccccatgacataattttagctgtataaaaaacccacacatgtacaccgaatcacaaataaaacctaaaagaaaaaaatactccaaggtgggggagagtgcaatgtaggtgcatggactgcttttcactatagatagtagcccaggtggggctgtactctgatttatttctgtgtgaatgcaggtagatgaaattacaaacaggtggcccagaccctaggctggtggagaaaacaggttgctgctgcaaatttagtatctaggggtggggatatgccaggagacttgtagagatttttgggttcttggcaagaaacactaggatcaaaaatgccatggtgaagttcttgagggtggtgccgagtcctgggagaagtgtggatacctcaatttctagtgtgtgtgtttgtgagtgggtgggaatcctgtagtagcagctgcaagaaaaggggtctgtcataagagcttcttctgagttttcagtcctctgtcaccctgggagaagacctggaatcacaggacaatgggcaatgtgacagcctgtgtacaggagagcagagcctcccatttctaaacacccagagctttgttccagtccaggcctctgtgatatcttttttctggcaccaaatctgtagagtttgctgagcatcaaacaattctccaacaactaattgtctaacatttaaattctgacaccacccagagtcagcacagaccctgattcwgggctcagttccacaacattgtcctcactgcagatgccagtcacaaaccccatgggcccatctacgcttctgagctactgtttgaaaactggggactcccaaaacctccctgaagttcaatgatttggtagagctactcacagaactcatcaaaacactgtagttatgtttaccggtttaatatataagatgcagcccag

SEQ ID NO: 56073 - DNA, 736 bp, Homo sapiens
tcttaccttggtctctcaaagtgttaggattataggcaagagccactgcacccagtcagtattttaaaatttaataaaacttgctatgtgtcctaacggaatacaccagatgcaaatagaaatattgcatattatcttggttttgactggagagttttgtgtgtgtctgtgaagcctagttggtctataatatggtttggatgtccatgttctccaaacctcatgctgcaaaataaatcctcaatgttggttgtgagacctggtgggacatgtttttgtatgagggcatatttctcatgaatggcttggtacatcctcttggtaaacaaaaagtttacactccattaattcaaatgagagctggtwcattaaaagaacctggcttcttcacctcacacttgctctgtctcttaccatataatatgtccagttactttttaccttctaccatgattttaagcttcttgatatcctcaccagaagcagatgctgacacacacttcttatacagtctgccaaactgtgagccaaataaacattttcctttataaattatgcactcccatgtgttcctctatatgcaaaataactaatatagtctataatgttgtctcagttttctgtttcttattttttatctgaattctctatttatttcttcaaatggggccttgatgtctgcaattattatgtcgctatgtatgtcttgcttcacttttgtcaatatttgctttat

SEQ ID NO: 56074 - DNA, 736 bp, Homo sapiens
tcttaccttggtctctcaaagtgttaggattataggcaagagccactgcacccagtcagtattttaaaatttaataaaacttgctatgtgtcctaacggaatacaccagatgcaaatagaaatattgcatattatcttggttttgactggagagttttgtgtgtgtctgtgaagcctagttggtctataatatggtttggatgtccatgttctccaaacctcatgctgcaaaataaatcctcaatgttggttgtgagacctggtgggacatgtttttgtatgagggcatatttctcatgaatggcttggtacatcctcttggtaaacaaaaagtttacactccattaattcaaatgagagctggttcattaaaagaacctggcttcttcacctcacacttgctctgtctcttaccatataatatgtccagttactttttaccttctaccatgattttaagcttcttgatatcctcaccagaagcagatgctgacacacacttcttatacagtctgccaaactgtgagccaaataaacattttcctttataaattatgcactcccatgtgttcctctatatgcaaaataactaatatagtctataatgttgkctcagttttctgtttcttattttttatctgaattctctatttatttcttcaaatggggccttgatgtctgcaattattatgtcgctatgtatgtcttgcttcacttttgtcaatatttgctttat

SEQ ID NO: 56075 - DNA, 610 bp, Homo sapiens
ctccactccactgccacccacagccagctccatgtgtcccagggacccttgaggagaaagtcctccaacctctttgggtctgcagtttgtgcacaaaggctaactacaagactatccaattccccccaggaaggggccctaggttcctaagtggaacctcagttagctcatctgtaaaatgggggtaaaaataacaacctctttgctttgttcagcagagggcagcttggttgttccagacacctcatgaatgtgagtgccttgtgcaagcctaaaaatgcacaaacataaaggtatagatgcacacatgcacattttaaccttgagtctygaagtacctctggggtgatttccttcctccattggtggagctggggcaaggctgtcctcctccccaaatccaaacctttgtgtgccttaaaggaaaaatgtgtctcttggagctcagtgtgccataaaattttgcagaacctttgagagttacagcatctcccacaattctgtttacatatttgattttcttgttgtattaggaatttgatcaggtttgtgatcatcgtacccaagtacctataagctacagcagcgacctgtgtctatgaatgagctg

SEQ ID NO: 56076 - DNA, 565 bp, Homo sapiens
cgttgaccactcactcacctgattcccccaaaagactgcactcttcaaggaagggcagaaaaggagtggtaccctgccttgtacacctgccctcagtgctggagtacttagcacaggcctcccctgtgaaaagtgcttggaaaatcttgagtgactgatggtacttataaatgccaagttattatcgatcatctttyttgtttaatctttttgtttgttttgagatagggtcttgctctgttgcccaggctggagtgcagtggcacgatctcagctcactgcagcctccgcctcccaggttcaagcaattctcccatcccagcctccccactagctgggattacaggggtgcaccaccacacccagctagtttttgcatttttagtagagatggggtttcagcatgttggccaggcttgtctcgaactcctgacctcaggtgatccacccgcctcagcctcccaaagtgctgggattacagatgtgagccactgtgcctggcctttttttttttttttttttgagatggagtctcgccctgttgcctaggctggagtgcaatggc

SEQ ID NO: 56077 - DNA, 737 bp, Homo sapiens
acagcagcgagctgttttcacaagacttcctgctaataaacacaacactttctcctccactcagatgggagcctcagatgccaaaacgcagatgtgccaactaactataggctcgttgctaagcagagaaacctatcaagtttgtccagcaaattcgattgtacagtgggatggcgtctgctctgcggccttggacagggagccactggtctgtgctgctgtcccctgaggcaggtcgaagctggtggcccttagagggcaggtaaaatggttctcatgggttagaacawaagggctttgagaaaaaatgcaaaaggtctcattgaaattggaggcctatgtgaatctgtttacatggaggcatactgagatctcgttctgtgcttaggtgaactgcaggtctcacgctggctgcatgacttggtgccccctggctggctgagccactgcctgccaccttctcataccattacgtgggggtctaaagaggacatcatccccaaccaaagaatagtgagagagaaaatcccaaacatttgagacagggttcaaaagcacccagacgccttctgtctctttcccagttcccatctggctagggactgtgaatcagaattcagaatctgtgctgccctgaggggacaggcacccaaatgcaataaataacaccaagctcaggacccagccactgaccttcctccaccactgctgcgggttattcctcgatgggaactgaa

SEQ ID NO: 56078 - DNA, 505 bp, Homo sapiens
tggaaccttatcccagtgctatattggcacgtaacatggctagtgatcatttcaaaaggagtcatgttatgttttgagtttgtttgtgataaacctaytgtctaaacagatttattctttaagaatatacacaagaggttttcctccattattttcacacatcagatatggtgtttggttttttgaaggagggagggggtactatctacaacaaatacttcattcatagccataaaccatttgtatcttgggcttgagcccctggttaaatcaggaatgctcttcagcgctgctgctgaatgatctgctccggatgtgatttctcagttgctctataagttcaggattttgttgctgtatctgctgagcaaactgctgtcccctgtagtaaagaggcaatgtggtttgaatagggaattgccagtcacatttacccacgcaaaaagaaatgcagaaaatgtaggagctacctaaagggggcttttttctataaaaacaagtttca

SEQ ID NO: 56079 - DNA, 618 bp, Homo sapiens
caagatttgtcatttcaatcatataaattaaaatttctgtaataacctatacacttactatttaatctatatgagggagcagttacatatatgtagccatttcccttcttgttatgtcatcatgagttagtctcaattattatttcccccgttttcctaatccacaaagctggagaattaaatgagttttaaggttggtttttattctaataataggataagagattttggacatgtgtgttagtagccagcagttaacacctattttcctgtcataggcactaccaagatatttgacaagccaaggaagcgaaaacgacagaggcatgctgcagccaagatgcagtgtaaaaaagtgaaaaatgatgactcgtcaaaagagattccaggctcagaggtattactcagttcctgatcttttcaccttctaaagagaagctacttttcacgccagaggccacatccctctttcccttgagttttcttaagaatactrttctactgaaatggctgatggccataaggaatcttggaggaaaagtagagccttatcctaataataaggcaaggcatgtattgcagctgtcaatatggtctttttaaaagatcatcacatcc

SEQ ID NO: 56080 - DNA, 1770 bp, Homo sapiens
aatttaatttaatttaaaaagtttcaaaccacatgtaattctatcagggtgtacatstttctcacagacagcaattttacaatgggctcatctttttcactattttgccctgaggaccctctaaatgctccaaagacacaaatacctgatagaatatggcaacctctggttctaactccacctgtgtgcatgcatcctcccaaaaaggtggacttgtcaggttcaggtcagcctacacatggggcacacactgctcctccctgttcccaactgcatgacaggcatggctaatggatcccagacttctcttccaattagcccagatacccaaataacaagcttttgaatacgtgctcttcttgatttgggttattacagatttcctaaatatttaatgctgaaatcaggttatggaatatccaacacattaaaaagatcttaattgttgattcatgcatgcaattagttttaggtatctcatatgtgctctacaaaacacctgttcagaaacaccgatttagttcaacctcctcccttttttactgatgagaaagctgagggacaaaaggtcatgatttgattagaataaaatatgtagaaaagcagaaccagcatgaaaatgcaggtccccttataactactcttcttttacagtatacctgcggatctcctgaaagtgtcttacaaagcagcatgggggtctgttaagaccctggtgtggaacacactgaagaaagagttaataatgtagcctgtaggtagagcagttggaaaattggaatctcaatctagataatgctttacaacaaatatgtttgaatttgtttataagcatagtatagtctatctttccagactactcctcagaaactgcagtatcattctgcatcctattttttcaggtatgcagtctaaattgaaaacaaattccaaaggaactctaaggggaagactgcagtaatttcagcctagatgagttgaaaaaaatcacctctgagatagaccataaatcccagctattttatagctttccctgttctagtgcttgttcaaagaaaaatctaatttctttagtgaaaaaaaaatttttttaagtatagaatgaaaaaatagacctcaaagtcagagctcctatcagaacaaccctactcatgggcagttaaaccccacatagatttccctcgggcttttaaatagtctgtctgcctgagagtacaccagattttcatgtagcacaaaactcaagcaaattatgaagccatttcttctttaaggatgagatagtgctggacaagggggtgatgccccagcccatgtgctttgctcatgtcatcatgtgaggtgtttcccagctcagccaagccagcagagtctttctgggggcaaggaaatgatttgacccagcttttcctccccaactttgaggtacaaataaatacaaggaaggtcatccaactagacagtaattgagagactatagaaatctaatcaaaagataataaaggtatacatttcgtattcactctctgtgtgtaaacaaactgaacattttaaacattagagtgcaggtcttgcatttatatgaaacaccgagcttaacttcattttgcttttcttctagctgcagagattttttgttcagtgacgtgtctgaatctccctgcctgattccccatccagatattacacgcactccacaacattatagcattttcttaaaaggctggtgagtcaagccttagcagactacagagttttcattcaggtggc

SEQ ID NO: 56081 - DNA, 1981 bp, Homo sapiens
gcatgcgttctgaagtcagactgcctggacttaaattcacctctatcacttgttcatctacttaacttctcttagtatcgcttcctcagcataatgaattgtacctgtctcatatagtgattgtgagggtcattgggataattcaagaagtgctttgaacatttcttggcatatggagatgctcaaaatatatgaactgttttcattattttggcttcccaaggtagcttgatacctatataaaaaacactccagccaaatgtggtcaataatgctaattggaaagcaacactgacctagaaccttggagggtgactagataggtgtggattacattatcatagacaaaaagagacagaaattcagagaaccagtcaggtgagaccaaaatacatgtacttttgaaccccagaacaaaaggcagaacagaaatcgaggtagtcaaaattcaatcaacacagggtaggtaaagcaagcctataaagagcttgcttttcaaggtaatgagccatgcttatttgggtcatgattatgcagataggaaagctagactcaagcaacgtcaaactgaatgctaaaatggtaatttaattctgaaatcagtgttgtcccccactgaggggatccattttatagttctgtactgggtagaagttaatattgtgagacctaagcgggtagtgggtaaatgacttccatggctaagaagagcatgagacttgtggtaacagacagaggaaaacacacagaaagtacaacttttgaaattcatcttctttattcttttttaaaattagctcattctcatcttaaaactcaagatgcagtagaaatttgaatagagaaaaaaataactaaaacaatattacccattctctgaaagcatattaacttggttggctctttaaagaaaatagaatatgaaaggggcccatattcagagatattacgcatagtgccatggtgtcacttttaaaaccatcatatagaacattcaatacttaagacatttaagaataatggaaaattggtttttctcttaatgaacacggagccagaaaggaccctttgtcatcatgcaggtttttttttggcctgtggactgattggcagtgttatctcagaatgcccagtggcacatcagcatctatgtgcagagcccgttcagtgttgaaagggcatgcatggtcagtgacaggaaaagagtggagggctttttgcagcagatcaattgcaatgacagacttcactgtttgccagatcccagcaagtgcctcctgcatcagaatctccctatttccaagcttctgctgggaggttggttagtagcagacaatagataagaatagaaaggaygctgactacagcccagaggtgagtgctatcagagataattattaatcctgaggttagaataagatctggaacttcaataccattggagttgtacaaagtagaccattgaattctctaagcggtataccagcctttctccctgttttcaattctccctcatttactccctacattcatcccctccttcattctctctcctgtgtttccaggagcccctggagaatcaggcactggagagatcccaaaatgacttagagtcatttcctaccactgagaagcactggacagggagttagaacagcagcttctaaggatctagatgacttagcaaggctctttacttcttgagcccctagctttatctcaacaaaaacctaggaactggagatggttttatggtcttacagctctgaaagtttactaggttttagatgttatcacctatcataagcaaggcattcacctcagaatgtcattttattctcatgaaagtgaaacagataagtacaattttctctcttattttacatatgagggtatcaatacttgaggctgaataaactgcagaagggtgctcagacaactagtaaatggaagaattagaatttgactccaggcaatctga

SEQ ID NO: 56082 - DNA, 1981 bp, Homo sapiens
gcatgcgttctgaagtcagactgcctggacttaaattcacctctatcacttgttcatctacttaacttctcttagtatcgcttcctcagcataatgaattgtacctgtctcatatagtgattgtgagggtcattgggataattcaagaagtgctttgaacatttcttggcatatggagatgctcaaaatatatgaactgttttcattattttggcttcccaaggtagcttgatacctatataaaaaacactccagccaaatgtggtcaataatgctaattggaaagcaacactgacctagaaccttggagggtgactagataggtgtggattacattatcatagacaaaaagagacagaaattcagagaaccagtcaggtgagaccaaaatacatgtacttttgaaccccagaacaaaaggcagaacagaaatcgaggtagtcaaaattcaatcaacacagggtaggtaaagcaagcctataaagagcttgcttttcaaggtaatgagccatgcttatttgggtcatgattatgcagataggaaagctagactcaagcaacgtcaaactgaatgctaaaatggtaatttaattctgaaatcagtgttgtcccccactgaggggatccattttatagttctgtactgggtagaagttaatattgtgagacctaagcgggtagtgggtaaatgacttccatggctaagaagagcatgagacttgtggtaacagacagaggaaaacacacagaaagtacaacttttgaaattcatcttctttattcttttttaaaattagctcattctcatcttaaaactcaagatgcagtagaaatttgaatagagaaaaaaataactaaaacaatattacccattctctgaaagcatattaacttggttggctctttaaagaaaatagaatatgaaaggggcccatattcagagatattacgcatagtgccatggtgtcacttttaaaaccatcatatagaacattcaatacttaagacatttaagaataatggaaaattggtttttctcttaatgaacacggagccagaaaggaccctttgtcatcatgcaggtttttttttggcctgtggactgattggcagtgttatctcagaatgcccagtggcacatcagcatctatgtgcagagcccgttcagtgttgaaagggcatgcatggtcagtgacaggaaaagagtggagggctttttgcagcagatcaattgcaatgacagacttcactgtttgccagatcccagcaagtgcctcctgcatcagaatctccctatttccaagcttctgctgggaggttggttagtagcagacaatagataagaatagaaaggacgctgactacagcccagaggtgagtgctatcagagataattattaatcctgaggttagaataagatctggaacttcaataccattggagttgtacaaagtagaccattgaattctctaagcggtataccagcctttctccctgttttcaattctccctcmtttactccctacattcatcccctccttcattctctctcctgtgtttccaggagcccctggagaatcaggcactggagagatcccaaaatgacttagagtcatttcctaccactgagaagcactggacagggagttagaacagcagcttctaaggatctagatgacttagcaaggctctttacttcttgagcccctagctttatctcaacaaaaacctaggaactggagatggttttatggtcttacagctctgaaagtttactaggttttagatgttatcacctatcataagcaaggcattcacctcagaatgtcattttattctcatgaaagtgaaacagataagtacaattttctctcttattttacatatgagggtatcaatacttgaggctgaataaactgcagaagggtgctcagacaactagtaaatggaagaattagaatttgactccaggcaatctga

SEQ ID NO: 56083 - DNA, 630 bp, Homo sapiens
gcttaatacaaactatctcataggctgttgccaagctttgaaaagtccacaaggaggtaaggaaagaaagaaattattaaattgtaaaaatactgattaaaggaagaagaccctttctttagaaaaaataatattcttctgattagtcacagaatttcttgagggyttcatgctaacatcatgccttcagcaaaaggtcaagttttccttctcatctggttcttgatcagcctgagctaaagacagaccctccctggaaatgagccatcaaggatgaaagagacagaagctgaatttagcaggagggagaatgaagatgaaaagtgaaagcaaacaggggtaggacgcagccccagtgaccacatgtcctggcttgctgggacaattcaatttacacccactgttccagcattaattattaacagtgtcccttttccttaccagaataatcctgattgggacaataagtaacatgggccactctagaaacagtgggaacaagagtccagaggcaggaattggcagtgtgtgtgctcaggggtgagaggtgctatgaagactccagctcaagtggagagttgagcacatgtggggacagggaagagggcactgtggaggaggcgcaggact

SEQ ID NO: 56084 - DNA, 630 bp, Homo sapiens
gcttaatacaaactatctcataggctgttgccaagctttgaaaagtccacaaggaggtaaggaaagaaagaaattattaaattgtaaaaatactgattaaaggaagaagaccctttctttagaaaaaataatattcttctgattagtcacagaatttcttgagggcttcatgctaacatcatgccttcagcaaaaggtcaagttttccttctcatctggttcttgatcagcctgagctaaagacagaccctccctggaaatgagccatcaaggatgaaagagacagaagctgaatttagcaggagggagaatgaagatgaaaagtgaaagcaaacaggggtaggacgcagccccagtgaccacatgtcctggcttgctgggacaattcaatttacacccactgttccagcattaattattaacagtgtcccttttccttaccagaataatcctgattgggacaataagtaacatgggccmctctagaaacagtgggaacaagagtccagaggcaggaattggcagtgtgtgtgctcaggggtgagaggtgctatgaagactccagctcaagtggagagttgagcacatgtggggacagggaagagggcactgtggaggaggcgcaggact

SEQ ID NO: 56085 - DNA, 2083 bp, Homo sapiens
gcttgttccaggggcttctcaaatccagctcgcatcagaaccaagcccagggcctcaccacagaacaactgaatccaaatctcagtgcaagaggtctgggtatcaatatgtgattttgtggtacagccagggttgaaaaccaccactctaggataagacccgtggcctaaaaggacagagatatggatactgatcctctaatgaagaagattctaacaggtcaggctgctcttggagtcatcaacatggcaaaagagtgagctcctgtagctggaaggggtcttgcagggaataactagagcagaggagattcttgaactatttggctaaagtagcttccaaatcttagataagagaattataaatcaaaggcttcatgatgatttttctgggaagggtgcagtttccatttcctaactcaggacctgaggtctggacaatgcctcctgcctgatttatgtttgagaggtggcctgagagattcacgttgggtaaaaagcctgaggctttctggactatttccgtggtttatgggagcaatgaaacagaatgctcgaaatacgactgtcctcagaaatgtaagatgtggcacagtggtaagggtaattggctggctcatgtgccagggttcgcacactggagatcagaattacctgggggaatctggtttcaaaatacacatccccaggcccttcctccaaatctactaaagcagaatattaggggtacggtttgggaatcgtatttttaaatattttcccccaagtgtttctggcacaaagtcaggtctgaaaatgtttggtgtatagttttcccttatccacaggcgggaaagtttaggtgattggcccacacagcaataccctaaaagctctggcttcttgatacaagtacccagaattgtacccagggccccaaaaggaagtccagattcccgtagggttgaccaggcaatcccatgcattatacagaccaacaaagacactccagcctgacatttacaaagacctggagaatcatttaaagcaaaacataatgacatgtctattatacaatacagaggaagacaagaaggatagagttaagcgggctctggacagccagggaaggttccttagagccttacagaacaagtaggatcttcattcatggagaggagacctgagtgaagtagccaaagactagggggccatactgagcaccctggaagctgacctatctgaaggtgaggacgcttgtgaggcaagtgggctccctgcagtgagggcacatggtagagtggaggccttgcactctgggctgctggagctactccaaatacatggttcccagctccagctctccaggaccacctgggaaaaggcagggtctgacagtgtggagtcaggtgggcagtctacactgtccaggtgacctgcttaggatgcaggttgtctctgctgattyggatccttccaaagtttgcacagtcctggtttgctcagcacgactcttccctcctagagatgaaaagcccagggaaagccatttacaatggagatgctgacctgtcactccacagaagcctgaaggatggcacatcgatcggctcccaggccctgcaactcccagataacccccaggtgaggccaacaccaccaatccccactagagtgtctaagcgagcaagtgctgagaggtttggccattgagtaacagataaaatattgtagctctccaaaccccacgagtgtcattctgaggggaaaataacattataggtttgtttgaggtcattggctaattaggtgaaatgaataagtagattttaaaagccacactgccagcaactcttcagattgaggcactgacccttcctctcttacctgagctctggagacttggggaaaaagtcatggcaccaggtggccccagggagggcctagcctctgctgcttagctgaagctctgaaccaaactgggaggaagcggcagggagatcaggggtgtaaagactgctgtactccaggcagcccccattcaagcctcccatggctccttgctgcccacagatacccaggcccaggcccactgcctcacttgc

SEQ ID NO: 56086 - DNA, 609 bp, Homo sapiens
ttcatgaaatacttagaactgctaaggagaataattttgcctctggcttttgctatacattttctccaggttgggagaaactagagaagtgtactagattgttcagagaaagtaagtctacaagtgctgattttgttaacattagacaatgcccacatgtggatcaacagggactgtgggttggcagacttttgctctaagatggctgctttccccaacatgyggcaatcacctgatacggcataattgcttttaaacatgaaagagttgtgctgtagaaatagatctccaacttgttaaagtttatatctagactgttttcagttgggagtgatgtaccaaagtgggagaaaggcaccaacaaggatgtttttcaaggcaggaaacaggagatatcaaccaggacccaccatgtttgacaaggaaaatatatttatcatttcaacaaacaaatgtgcccattagaatcagaatctggaggaaagtagtatacattgtggtttcaataaaccacggtaaagagttgtaataaagccagttcatgatgaaattttgtacacttactttttgaacaaacctcacagtttcatctagattgtgccccagaac

SEQ ID NO: 56087 - DNA, 869 bp, Homo sapiens
aaactcctcagggtgataggataacaggcgattttcattttcttcttaatagtttttgcattttccaaattgtgtaacaaaaatatgtattgcttttctgattagaaaagagtaactgttgtttttttgaagtcaaatcattaaaaatcatagagcaccatgctaaaagactataaatggcagatgttaacagcaatcttggggaaaaattacattttgaattcccttaaccaaaatagtggacgaggttattgatgccttttcattcacagtgtttttttcccccattatttaataaaaatacatkattgaaatctaaatgagatggaacagtctttttttttttttttttttgagacggagtctcgctctgtcgcccaggctggagtgcagtggcgggatctcggctcactgcaagctccgcctcccgggttcatgccattctcctgcgtcagcctcccaagtagctgggactacaggcgcccgccactacgcccggctaattttttgtatttttagtagagacggggtttcaccgttttagccgggatggtctcgatctcctgacctcgtgatccgcccgcctcggcctcccaaagtgctgggattacaggcgtgagccaccgcgcccggcctggaacagtcttactaaattgctttttttgcctacaaagtattgtatcttcacctcaattctaaatgaataatagcctcaaccttatagtaaaccattttgctcactgttcgagtagtaaatacttctgataatatgaagcaaataaataaaattattctctttcagacctttgattttgtggagaatgagttaatcttaaattgtaattaatactagtgcattaaactaagtg

SEQ ID NO: 56088 - DNA, 869 bp, Homo sapiens
aaactcctcagggtgataggataacaggcgattttcattttcttcttaatagtttttgcattttccaaattgtgtaacaaaaatatgtattgcttttctgattagaaaagagtaactgttgtttttttgaagtcaaatcattaaaaatcatagagcaccatgctaaaagactataaatggcagatgttaacagcaatcttggggaaaaattacattttgaattcccttaaccaaaatagtggacgaggttattgatgccttttcattcacagtgtttttttcccccattatttaataaaaatacattattgaaatctaaatgagatggaacagtctttttttttttttttttttgagacggagtctcgctctgtcgcccaggctggagtgcagtggcgggatctcggctcactgcaagctccgcctcccgggttcatgccattctcctgcgtcagcctcccaagtagctgggactacaggcgcccgccactacgcccggctaattttttgtatttttagtagagacrgggtttcaccgttttagccgggatggtctcgatctcctgacctcgtgatccgcccgcctcggcctcccaaagtgctgggattacaggcgtgagccaccgcgcccggcctggaacagtcttactaaattgctttttttgcctacaaagtattgtatcttcacctcaattctaaatgaataatagcctcaaccttatagtaaaccattttgctcactgttcgagtagtaaatacttctgataatatgaagcaaataaataaaattattctctttcagacctttgattttgtggagaatgagttaatcttaaattgtaattaatactagtgcattaaactaagtg

SEQ ID NO: 56089 - DNA, 869 bp, Homo sapiens
aaactcctcagggtgataggataacaggcgattttcattttcttcttaatagtttttgcattttccaaattgtgtaacaaaaatatgtattgcttttctgattagaaaagagtaactgttgtttttttgaagtcaaatcattaaaaatcatagagcaccatgctaaaagactataaatggcagatgttaacagcaatcttggggaaaaattacattttgaattcccttaaccaaaatagtggacgaggttattgatgccttttcattcacagtgtttttttcccccattatttaataaaaatacattattgaaatctaaatgagatggaacagtctttttttttttttttttttgagacggagtctcgctctgtcgcccaggctggagtgcagtggcgggatctcggctcactgcaagctccgcctcccgggttcatgccattctcctgcgtcagcctcccaagtagctgggactacaggcgcccgccactacgcccggctaattttttgtatttttagtagagacggggtttcaccgttttagccgggatggtctcgatctcctgacctcgtgatccgcccgcctcggcctcccaaagtgctgggattacaggcrtgagccaccgcgcccggcctggaacagtcttactaaattgctttttttgcctacaaagtattgtatcttcacctcaattctaaatgaataatagcctcaaccttatagtaaaccattttgctcactgttcgagtagtaaatacttctgataatatgaagcaaataaataaaattattctctttcagacctttgattttgtggagaatgagttaatcttaaattgtaattaatactagtgcattaaactaagtg

SEQ ID NO: 56090 - DNA, 869 bp, Homo sapiens
aaactcctcagggtgataggataacaggcgattttcattttcttcttaatagtttttgcattttccaaattgtgtaacaaaaatatgtattgcttttctgattagaaaagagtaactgttgtttttttgaagtcaaatcattaaaaatcatagagcaccatgctaaaagactataaatggcagatgttaacagcaatcttggggaaaaattacattttgaattcccttaaccaaaatagtggacgaggttattgatgccttttcattcacagtgtttttttcccccattatttaataaaaatacattattgaaatctaaatgagatggaacagtctttttttttttttttttttgagacggagtctcgctctgtcgcccaggctggagtgcagtggcgggatctcggctcactgcaagctccgcctcccgggttcatgccattctcctgcgtcagcctcccaagtagctgggactacaggcgcccgccactacgcccggctaattttttgtatttttagtagagacggggtttcaccgttttagccgggatggtctcgatctcctgacctcgtgatccgcccgcctcggcctcccaaagtgctgggattacaggcgtgagccaccgcgcccggcctggaacagtcttactaaattgctttttttgcctacaaagtattgtatcttcacctcaattctaaatgaataatagcctcaaccttatagtaaaccattttgctcactgttcragtagtaaatacttctgataatatgaagcaaataaataaaattattctctttcagacctttgattttgtggagaatgagttaatcttaaattgtaattaatactagtgcattaaactaagtg

SEQ ID NO: 56091 - DNA, 858 bp, Homo sapiens
ggatcccagcactttaggaggccgaggcaagtggatgacttgagcctaggagttccagaccagtaacaaggcaaaaccctgtctctaccaaaaattatctgggtaaggtggtgcatgactgtagtctcagctccttgggaggctgagatggggaggatctctcaagcctgggaagckgtggctgcagtgagctgtgatcgtgccactgcacttcagccaggccacagaacgtgtccctgtctcaaaaagagagagagagacagaaaaaaagtttgaggcttggcagtagagccctgaatgaggcagtggccagtccagcagtgaatacacactaagaacgggctgtgaccatgtggaagggctcttgttctcaaccccttgtgctggcctcagaaaggagagtcttttttttttttttttttttttttttttgagacagagtctcgctctgttgcccaggctggagtgcagtggcaccatctcagctaactgcaacctctgcctccaggttcaagcaattctccggcctcagcctcctgagtagctgggattataggcacccgccaccatgcccggctaatgtttgtatttttagtagagtcggggtttcaccatgttggccaggctggtctcaaactcttgacctcaagtgatccacctgccttggcttcccaaagttctgggattacaggcatgagccactgcacccagccaggaaggagattaaattctgccttcccaggaaatactctgtctgtgtatttgttcattcagacaacaaatattccttgagctcctgctatgtactgagcactgcactgggtgctagtcaaggtccctgctttccgggaacaaata

SEQ ID NO: 56092 - DNA, 705 bp, Homo sapiens
aaatgtaaagatgtaggtctgtcctccattgaaagccaaggatgatgagaaggatttttttttttttgcagggtatgcaggggccattgatcaggtgaacccagagtttatgggtggcaagtggtttgggaatggcactatcatcaggccaggtgtgccaaactgtgcctcaatgggatgccatgactttggctttacttatgccagggaccgcagctggcttttgccactgctgctgcctctgtccctgcttgtgatggtgggccatcctggcaaagcatagctgtgtgccacttccctttccccctttcccttctccctcagctttagcataaagcccagggcaaactatgcctgccacttcttgagtaaggaccaagaccaggtgacgtggctgcaggccaggccttaaaaggacggagaacactgttttccgtgcctgcatgctgtagtttgtacttgctcttgctctctgratgcccctgtgaagcctgagaaactatctcacacctttctcccagcctcacctaggtctctcctcagtcctctcaatctccccatccctctcccactgcccacctcagctccatgttcttgtcctctctttctctctctcattctctctccctgttttgtggaaaaatatatagaggcaataactgggtcagctgtgcagtccatgtggaattattgagggaagatgaa

SEQ ID NO: 56093 - DNA, 2137 bp, Homo sapiens
cgagggagcatgaatggttctttgtgctggttcccatgttcccatgtccgtgcctctgttatgctgcaccgtgttgagtatgtttagttggttatgcacgcatatcttctgcatcaagactgtgaggcacttgaaagcaaaaatcatgagatattcaactgtgtacccttactatcttgcccttgggtagaagctctatcatttaaatttcttcactttttgcaaaatacaagaaacatttacagaacagctgctctctgctagacactgttctaattgctcatgattgcaccagaaacattgaacaaaaaaggccaaattcttgcctcgtggagattacattttaatgaaggtaggcagaaaaaggaatgaaataaataaagttttaacattgtgttaaaagacatatattaaaaaatatatatccataggaggaaaaattaagcagccaaagaatatagacgtattagggcagaagatgcagttttaaataaaatgatcaatgaaggcttcactgagaaggtgatatttagtacaagaccttaagaaatgaaggagcaagccatgtggccacctcgcgaaagagtaatttaggcacagggaagaggaaatgtaaggccctataaaaagaacatacttggactatttaaagactgacaaggatcccaatatggctggagtgaaaagagaaagctaatgagtaggagaaaggaagggaagtgaataactcaggtaggatctttgccacattgtaaagaaatttttaaatgaagtgtttgtttcaaatgagatgggaaatggcagaaggaattaatctgaattgaattttatttaaatagaattactctatctactcagcatttctgtaaaaagtcaagcataaattccctcaagcacttgagtcatgatagaaagtttgggatttgggacagaatagtgatgatgtagattgtgtcctcagcatgtcacaggggaattctctgctgggagttagacacacttggctggagctcccatgtagcctctaccaattttggtatcttaggcatgataccaatcagcctcctgagcctcagtttcttcacctgtcatatgcagaaaacaatacctccctaattcacttcaatcgcattgcagttatgagattacaaggagatgatactgggaaagagtcccaaaagaaaaattctatgcagatgaaagagattcttgatctttaagaacaggtgtacctgctggctgaagacatgggtcttattggagggtaggggaagaaggcaatgaaggggaggaagaggaaacacacattgtaaagcagttgggaaatcttcaaaatctctatagatcgttggagatctttgtcagcgacccgttaggaatttaccaaatcttgtattgatatggcactttcccaaccctcaacatgaaaaagtgatttcaaaatgtacaatagacaggtgaagataaaggcaggaaagttctggtagagtatgtttctcacatataagtagtgtattaattaatatagttgtagtaaatatgttatctaggcacaaatcagtgagtcaacattggaaaagagattttgcagccacatttgatggggagaagcagtttgtgtgccagatactgaatataatagacattctaagtaatttagttaagtgggatgtgatatttgaaattgacacaatccctagaaaatgcagagtgtgagttgtctgaatttattgtagaaagtaacatgcatttttcaacatttagtaggaattcactcttggtttatctacctgtattattaaaattmtttgtgctgcatgcacacctcttctggctaagtaaaaacaggaagacagacaaacaaaacatttattaaacatacatttgagttactttcagagtttatgtgtttgggaaggacaaaacccaagatagcttttgagaactcagtagaagcacatagaaactttattctagattagagcactgctttaactggcatcttgctctataataagatttcagtcttgtcttactgtccacagtaaacaattctgggagattactgtatttctagctctgctatgtcacattttacttctggtaagtgggcaagaaccatagccatggctgcaga

SEQ ID NO: 56094 - DNA, 563 bp, Homo sapiens
cactttgggaggccaaggcaggtggatcacgaggtcagatagagaccatcctggctaacacggtgaaagcccgtctctactataaatacaagaaattagccaggcttggtggcacacgcctgtaatcccagctactcgggagactgaggcaggagaatcgcttgaacctgggaggcagaggttgcagtgagccgagatcgtgccactgcactccagcctgggtgacagggcgagacgccgtctcgaaaaaaaaaaaaaaaaatgtcgtagytctgggctgatgtcaaaatgaggaaaagaagtcaaaaggcacagatggccaggcacagaggcacacacctgtaatcccaacactttgggaggccgaggcgggtggaccacttgaggtcaagagttcgagaccagcctggtcaacatggtgaaaccccgtctctttattaataaaaagaaaatacaaaacctagccaggtgtggtagcacacgcctgtaatcccagctactcaggaggctaaggcaggacaattgctacaggctgggagccggaggttgcagtgagccgagac

SEQ ID NO: 56095 - DNA, 750 bp, Homo sapiens
atttgccagttgcttttacacttgaataaaaatttggctgtaaataatattgcacaattacaccttctttctctcaacacctgcaaacactactctactattttcaaacaatagatattgttttttagaagtgtaagaccagcttaacatttagcacctataaattactggcttctttccctagagtgggtgaagaatttagtttactttatcttcaaagatcaaacatgtaactaagtataattaatttctataagttgtcctctttcagtttttttctaaaaaaagtgtatcattttcacttgtagttgtagttcttcattctatgaatattttatggcattaaatcttgaataattgtctggtttatttgttaacctgtttactttagaaacactaattattgttattttgcatcgcttggcctttcttttttaaatctcttatattatcattaattatatctttgtctcttcctttcacatttaccttaaatctatatactaattattaaatcttaagctttatctatttcyttatggttctaatttatttatttattctgttacaaccttgtttagtatctctatttttcctccgtaaattcttcatttttatttctttgcattcacttgtcttacttttcttattgaacctagtcattaaagttctatagcattaagaattctcatgtaattgttctcttccttcagtttttaatttcaactggaatttgcgctttgtttcatt

SEQ ID NO: 56096 - DNA, 639 bp, Homo sapiens
ccagtgcctcttcatacagaaatttaaaagccactgctccagacatttatttttaatattatgagcaaataatagggagcaaaatatttgaagctaaactgaatttcttttttttttaattttattattattatactttaagttttagggtacatgtgcacaacgtgcaggtttgttacatatgtatacatgtgccatgttggtgtgctgcacccattaactcgtcatttagcattaggtacatctcctaatgctatccctcccccatccccccaccccacaagagtccccagtgtgtgatgttccccttcctgtgtccatgtgttcttattgttcaattcccacctatgagtgagaacatgcggtgtttggttttttatccttgtgatagtttgmtgagaatgatggtttccagcttcaaccatgtccctacaaagcatatgaactcttcgttttttatggctgcatagtattccatggtgtatacgtgccacattttcttaatccagtctatcattgttggacatttgggttggttccaagtctttgctattgtgaataatgctgcaataaacatacgtgtgcatgtgtctttatagcagcatgatttatactcctttgggtatatacccagtaatg

SEQ ID NO: 56097 - DNA, 1277 bp, Homo sapiens
cttggagctcaaacatctgggggcaggcagtgaccatggcatcccgagctcagcagaggccctggagaagcatctccctgaccttggagggctgcctggccctgccttgtggtacccccggagcacgggggccggcgggggagaagaagcggcctccaaagctgggcccaggcttccgaggagcagctgctgtgtggttgctcctgacactctaggtgttcagagagggcctcaggtcccggctgctgacgcttgggggccagtcggctgctgcgtgtttttctaagggcaggatgagacgagtgcggaagtgtgaaagtaaaatctgcagcatggagccaacttccaggatgaagaaacattgctgggacgattttgacaggaaaaaacaggaagtcatgaggattggtttctttccgctcctgctggctgacagcctccttctagtgtcctcctggcggagactgatgggccccgacagcaaatcagccctagcaacacaattcagatgacaggagtgtgggctgcaggctgaggcaactgcttaaaagcgggtgcaggtccctcctgtggccattcagtgtccacacagcatttcactcacagctgaacttccactaaacagcagggacattttgcttttcctaagaatgtgtccgcgtccacacacgctgccctttggcagccgtggcaccgcctgtgggcactgtcatccctcatgtacagtcacggtcttgactgaacggtgggcactgtcatccctcatgtacagtcacgatcttgactgaacggtagcctccaccaccaggggtatgtaaagcaataagaggagggggagaggacaaattagcttccacacagggacacacgcacacacaccccaacatggcaattgatcatgaagacatcattggtatttagaaccttcttcttcactttggattccctatgtcctttgcccccrtctttccagggtcttgcttctgaactgacactgtaaaagagttggtatcgtaatgagaacacctgcttccgggcgatggactaacacaggacctgtcagctccacagacataagcccatcactgcccttcttctgctagaaaacaagttccttgatcagaagagatgctgtgcagaacactctggggtatctgaggcattctgcacatagatggcggtgctgtcagatgtgcgtgggcagggaaggcaaattcaaatctagaaaaggtgtctatcgcagtgaggtcaaattgctatgccgttcatgacaaaag

SEQ ID NO: 56098 - DNA, 1254 bp, Homo sapiens
gttgttccaggccaggctgcgcgctggtttcagctcggtgcatttctccacgcattgaaggcgtccacctggcgattgagatcagcagacgccggaggctgtagtaacggtctgggtatttccttctgtttactcgccgtcgggtaactttgcttggcggtttcaaagcgtttcaggctgctccgcgctatgcctagactcatccacgcagcagcaaagtctggctgcatttgaacagccaaagacagcagctcctcagcttcctgtagctcattcctttcttttaagacatttgcaagattattcacggcatgaacatacttgggatttaagcttacagcttcccggtggtatctgatggcgcccgtctggttgcctttagcagccaggtttctgccgatgttgcagcgaacctcagcactgaggggacacacagacacagcgcctctgaaaaccgcccctcgctccgccactcgccgccgcgcaccgcgcatctcagcctctcagcatcttgctgagtaggattcccagcaccacggcagcgatgagcttctttttctcggtgtgtttgcgcaggctccgaatccaaaaagcagcatcacacagcaccccacgctcgggaccacgaagcccgctcggaagaacaggttacttgcggggagaaacgggataacgagcaatcccaggcgcagagtaaggatccttctctggtggccgtctgcagagcacagggcttggcgtatkaggccaactgggcggaaccagagcgctgcaaatgcagttaccctccagtcgctgagggacttcatgagggggctgcagcccactgaccaatcaaaacacagccaccagggacgcagcagcagcagccaggcattcaatgaataggagtaattgtcgtttatggccctcgccagcacgcggtcagcaaaggaggcccagttgtcctcctcggtgaaggccggcgggcccgggcctatgatcctccagcgcacggagagcatcccagcccctccggaggcgagcagggtcattctgaagaggagtcccggttcctgagcatgccaagattctctcatgacttgtccttatgtggtaccttctggacaatttccagaacattgaatttgcctctcaccaagatgtcaaacaccacgttccaacccagcacggtgatccctttctctttgcacagcatggccactgctcccagaaagatgctcagcagcacccagaaggtggaagaacgtgctg

SEQ ID NO: 56099 - DNA, 1254 bp, Homo sapiens
gttgttccaggccaggctgcgcgctggtttcagctcggtgcatttctccacgcattgaaggcgtccacctggcgattgagatcagcagacgccggaggctgtagtaacggtctgggtatttccttctgtttactcgccgtcgggtaactttgcttggcggtttcaaagcgtttcaggctgctccgcgctatgcctagactcatccacgcagcagcaaagtctggctgcatttgaacagccaaagacagcagctcctcagcttcctgtagctcattcctttcttttaagacatttgcaagattattcacggcatgaacatacttgggatttaagcttacagcttcccggtggtatctgatggcgcccgtctggttgcctttagcagccaggtttctgccgatgttgcagcgaacctcagcactgaggggacacacagacacagcgcctctgaaaaccgcccctcgctccgccactcgccgccgcgcaccgcgcatctcagcctctcagcatcttgctgagtaggattcccagcaccacggcagcgatgagcttctttttctcggtgtgtttgcgcaggctccgaatccaaaaagcagcatcacacagcaccccacgctcgggaccacgaagcccgctcggaagaacaggttacttgcggggagaaacgggataacgagcaatcccaggcgcagagtaaggatccttctctggtggccgtctgcagagcacagggcttggcgtatgaggccaaytgggcggaaccagagcgctgcaaatgcagttaccctccagtcgctgagggacttcatgagggggctgcagcccactgaccaatcaaaacacagccaccagggacgcagcagcagcagccaggcattcaatgaataggagtaattgtcgtttatggccctcgccagcacgcggtcagcaaaggaggcccagttgtcctcctcggtgaaggccggcgggcccgggcctatgatcctccagcgcacggagagcatcccagcccctccggaggcgagcagggtcattctgaagaggagtcccggttcctgagcatgccaagattctctcatgacttgtccttatgtggtaccttctggacaatttccagaacattgaatttgcctctcaccaagatgtcaaacaccacgttccaacccagcacggtgatccctttctctttgcacagcatggccactgctcccagaaagatgctcagcagcacccagaaggtggaagaacgtgctg

SEQ ID NO: 56100 - DNA, 1254 bp, Homo sapiens
gttgttccaggccaggctgcgcgctggtttcagctcggtgcatttctccacgcattgaaggcgtccacctggcgattgagatcagcagacgccggaggctgtagtaacggtctgggtatttccttctgtttactcgccgtcgggtaactttgcttggcggtttcaaagcgtttcaggctgctccgcgctatgcctagactcatccacgcagcagcaaagtctggctgcatttgaacagccaaagacagcagctcctcagcttcctgtagctcattcctttcttttaagacatttgcaagattattcacggcatgaacatacttgggatttaagcttacagcttcccggtggtatctgatggcgcccgtctggttgcctttagcagccaggtttctgccgatgttgcagcgaacctcagcactgaggggacacacagacacagcgcctctgaaaaccgcccctcgctccgccactcgccgccgcgcaccgcgcatctcagcctctcagcatcttgctgagtaggattcccagcaccacggcagcgatgagcttctttttctcggtgtgtttgcgcaggctccgaatccaaaaagcagcatcacacagcaccccacgctcgggaccacgaagcccgctcggaagaacaggttacttgcggggagaaacgggataacgagcaatcccaggcgcagagtaaggatccttctctggtggccgtctgcagagcacagggcttggcgtatgaggccaactgggcggaaccagagcgctgcaaatgcagttaccctccmgtcgctgagggacttcatgagggggctgcagcccactgaccaatcaaaacacagccaccagggacgcagcagcagcagccaggcattcaatgaataggagtaattgtcgtttatggccctcgccagcacgcggtcagcaaaggaggcccagttgtcctcctcggtgaaggccggcgggcccgggcctatgatcctccagcgcacggagagcatcccagcccctccggaggcgagcagggtcattctgaagaggagtcccggttcctgagcatgccaagattctctcatgacttgtccttatgtggtaccttctggacaatttccagaacattgaatttgcctctcaccaagatgtcaaacaccacgttccaacccagcacggtgatccctttctctttgcacagcatggccactgctcccagaaagatgctcagcagcacccagaaggtggaagaacgtgctg

SEQ ID NO: 56101 - DNA, 623 bp, Homo sapiens
ttaagcaacaacttcccaggagaggctcttgaaactccacaaagtaaacagaacaccccaaaaggggtgagcggtgcctttgctctgcatcctttaaaggggttcaagtcatgagaagccttctttagattttttggtactgcagaaggcaaagggggtaggaggtatagggtgaagaaaagtaaattaaagaacatttattttatttctgtttatttctattttttattttttattttttttgagatggagtctcactctgtcacccaggctggagtgcagtagcacgatctcagctcactgcaacctccgcctccctggttcaagygattctcctgcctcagcctcctgagtagctgggattacaggtgcgcatcaccacgcctggccaatttttgtacttttagtagagacgtagtttcatcatgttggtcaagctggtctcgaactcctgaccttgtgatccgcccacctcagcctcccaaagtgctgggattacaggcgtgagccactgcacccagccaagaacatttatttttttaagacggaaagcaaacacagaaaccaagctcatttgtgttttgttttgttttgttttgtttttgctttgctttttcctcttt

SEQ ID NO: 56102 - DNA, 666 bp, Homo sapiens
aaaaactttagattttgggagatcagggattctctggaggaggtactctcagacctcagcaagttgtcctattggtttgagccataaagttggctcatgctggtcccaagcaccgataggagatctgtcaaaggtcaggggcatctccactcagaatcccmctgtggttaccaaaacgtgaaccccaaatatctgagacaatcttggttaatttagaaagtttattttgccaagattcaggacgtgcacccgtgatacagcctcaggaggtcctgagaagtggccaaggtggtcagggcacagtttgattttatgcattttagaagacatgagacgtcaatcagcatatgtaaaaaatgaacattggcttggtctggagaggcagggcaactcaaagcaaaggcaggacaactcgaagtggggagggggcttccagctcatgggtaaataagagaaaaatggttgcatttttttgagttcctgatgagcctctccaaaggaggcactcagaagatgcatcagagggctgactttgaatagaatgggaggcaggtttgccctaagcagttcctagcttgacttttccgtttagcttagtgatcttagggccccaggatttattttcctttcacacaggaatgcagaggatattcttggtgttctaca

SEQ ID NO: 56103 - DNA, 821 bp, Homo sapiens
gtgcatgcccacctcccaagcccctaaccgcacccactctgctgcctccccaaattctctgttagtggccgtttgggaggttaacaatgaattatgattccttactccacctgacagtgttgaaatcctcattcctttcccatctctagcctgttctgtgacatttcaggctttcatgcttgctcaaagattgtagtggtaatgtcagaagcttcctcctacagcagctgtgaggcctcaggtaatttacaacctctatgaggctcagtcttcatatgtgtaaatgggaataataataagtcataccgccttgagtgttgcaagggttcaaatgagataatacggccgggcgcagtggctcacgcctgttatcccaccactttgggagktgatgcgggcagatcacttgaggtcaggagttccagacgagcctggccaacatggcaaaaccctgtctctgctgaaaatgcaaaaattagctgggtgtggtggcacatgcctgtaatcccagctactcaggaggctgaggcagaagaattgcttgaatccaggaggcagaggttgcgaagagccgagatctcaccactgcactccagcctgggtgacagagtgagactccacctcaaaaaaaaaaaagttatttatttgtgctttaaaattttttgttctttctctcttcttttgtttctaacaaaaatgcccttcagaagaaagtcaaatactactgctgcgattgctgttattgttattattactgaagaacaagctggattcagtggcatgcacctgtagtcccaggtatttgggaggctaaagcagga

SEQ ID NO: 56104 - DNA, 747 bp, Homo sapiens
caaagtactgggattatagatgtgagccactgccactgyccggcctaattttatttatttattttttttttatttttattttttgagatggagtctcactctgtcgcccaggctggagtgcagtggctcgatcttggctcactgcaagctccaccttccgggttcacaccattctcctgcctcagcctcccgagtagctgggactacaggcgcccaccaccacacctggctaattttttgtatttttagtagagacggggtttcaccgtgttagccaggatggtctcaatctcctgactttgtgatctgcctgcctcggcctcccaaagtgctgggattacaggcgtgagccaccgcgcccggccccctaattttttaatttttagtagagacaaggtttcaccatgttggccagtctggtctcaaacttctgacctcaagtgatccgccctcctcggcctcccaaagtgctggaattacaggcatgagccactatggccaggaaagcttttcctgacacacattccccaccgcagtcatcacaaattttagttcatcatttgagtaaatttactatctgcctccatcaccaggctggggcttctcaggggcaaggcttaaagcctgtctcagtcactgctatgtccccagcattgcccagcatggaagaggggttgaatatttgaataactgtccagcttaaaaacaacttccatttgtggcacttattttctgtgccaggcacca

SEQ ID NO: 56105 - DNA, 747 bp, Homo sapiens
caaagtactgggattatagatgtgagccactgccactgtccggcctaattttwtttatttattttttttttatttttattttttgagatggagtctcactctgtcgcccaggctggagtgcagtggctcgatcttggctcactgcaagctccaccttccgggttcacaccattctcctgcctcagcctcccgagtagctgggactacaggcgcccaccaccacacctggctaattttttgtatttttagtagagacggggtttcaccgtgttagccaggatggtctcaatctcctgactttgtgatctgcctgcctcggcctcccaaagtgctgggattacaggcgtgagccaccgcgcccggccccctaattttttaatttttagtagagacaaggtttcaccatgttggccagtctggtctcaaacttctgacctcaagtgatccgccctcctcggcctcccaaagtgctggaattacaggcatgagccactatggccaggaaagcttttcctgacacacattccccaccgcagtcatcacaaattttagttcatcatttgagtaaatttactatctgcctccatcaccaggctggggcttctcaggggcaaggcttaaagcctgtctcagtcactgctatgtccccagcattgcccagcatggaagaggggttgaatatttgaataactgtccagcttaaaaacaacttccatttgtggcacttattttctgtgccaggcacca

SEQ ID NO: 56106 - DNA, 747 bp, Homo sapiens
caaagtactgggattatagatgtgagccactgccactgtccggcctaattttatttatttwttttttttttatttttattttttgagatggagtctcactctgtcgcccaggctggagtgcagtggctcgatcttggctcactgcaagctccaccttccgggttcacaccattctcctgcctcagcctcccgagtagctgggactacaggcgcccaccaccacacctggctaattttttgtatttttagtagagacggggtttcaccgtgttagccaggatggtctcaatctcctgactttgtgatctgcctgcctcggcctcccaaagtgctgggattacaggcgtgagccaccgcgcccggccccctaattttttaatttttagtagagacaaggtttcaccatgttggccagtctggtctcaaacttctgacctcaagtgatccgccctcctcggcctcccaaagtgctggaattacaggcatgagccactatggccaggaaagcttttcctgacacacattccccaccgcagtcatcacaaattttagttcatcatttgagtaaatttactatctgcctccatcaccaggctggggcttctcaggggcaaggcttaaagcctgtctcagtcactgctatgtccccagcattgcccagcatggaagaggggttgaatatttgaataactgtccagcttaaaaacaacttccatttgtggcacttattttctgtgccaggcacca

SEQ ID NO: 56107 - DNA, 617 bp, Homo sapiens
aggcaggacagagcatggtgtgtgctgtgctccaggacagagagccctgctgtggctgggtctttggggagtgtgagaaagtgagcgcagccctcactgccactgctgtggccctgagaaggagtacaacaaggagcctgctcagagcaggcagcccgtacctgagggaaggctcaggtgtttgtccccaggtggtggaggctgtttatgctgcagaaaatcaatcacttgagcagttygctcatttttttccctttctgctgcccagctgtgagcccttggcctgtgggtggcagctcatgctgggagaaggatgaggctgggagaggagactgggaaacagaaagcagaagagagggagcaagaggcagaagaggacccagggtctgggtgctgaatccacagacctaggggtactgctccatggcctgtgattctgggcgaattacttagcttgggcacctcatctgaaaggagggaccccaaggcttccctcagaggctgctgtcaagaataaatgagagaatatatgggcctggcatattgagcttctccccaaaatgggggctgctattataaagagaggggtgaagggacagggacatattttaggcgga

SEQ ID NO: 56108 - DNA, 530 bp, Homo sapiens
tccctggtccagccagtaagctaagggattcttgttgccaggaatggactattctgatcgaccagccctgcttatgtgttcatcactggagctagggattggagaagggaakaggtggttccagtaaggaaaatccagacattattctcagagaaagatgaaatagatggatggacagcagaaaattatagtggatgttcactttcatcaggatactctgttgctccagtgggaggacgtataataagatgacaagaatgatgtaagctaaagctcgagttttggaattcatagccgtgaattctattcccagattggtcaagtgctgctgtgtatgactttggcaattcaattaccctctctgaccctcagtctcttcatctataggatggaggttggactcggaggttggactcaaaggttggaggaggagaaaaagggcaatgtctggtacttattaacacgtagtaaagggcaactaattaagatataatacttttgctattctttaaattacaatattctattct

SEQ ID NO: 56109 - DNA, 530 bp, Homo sapiens
tccctggtccagccagtaagctaagggattcttgttgccaggaatggactattctgatcgaccagccctgcttatgtgttcatcactggagctagggattggagaagggaagaggtggttccagtaaggaaaatccagacattattctcagagaaagatgaaatagatggatggacagcagaaaattatagtggatgttcactttcatcaggatactctgttgctccagtgggaggacgtataataagatgacaagaatgatgtaagctaaagctcgagttttggaattcatagccgtgaattctattcccagattggtcaagtgctgctgtgtatgactttggcaattcaattaccctctctgaccctcagtctcttcatctataggatggaggttggactcggaggttggactcaaaggttggargaggagaaaaagggcaatgtctggtacttattaacacgtagtaaagggcaactaattaagatataatacttttgctattctttaaattacaatattctattct

SEQ ID NO: 56110 - DNA, 728 bp, Homo sapiens
tatgaaccacttcaactatttttgcatctacccctgaataatattccacttaactggaacatatctcagtgtgtttgtgcccatttaacactccctgtcttcccaacccagcatctgtaacttacagcctgtagtcattccaaaatgcttccacgtggctaacctgggttgccaagccccatctggctcaattagcactggagattctggagagccccaaattatcattcttttctggttgtactaccaaagaccttcccatcctatctcttcctcaaactccctaagttccatagttgtatttgttccaattttgaatcccaatagtccccagctgttttagatgccccgcctccccacccccatctgggctctcctggctgggcttcccatgacagtattctccaattaggcaaatcacccttcaatccccaaattttctttaaagctgtagcaagtacacccacagtygtgacaatactgaataaaatggaataggtctgattcactttcccaaagctgacttttgctgctgattgactcatatctgtttaccagaggtcatttgatttcctccttttgactcatgctcaacttcaaaactgatataacttgagtgtgccactcgaatgtgaccttcctttttgcctgcagaacctccagctccactcagctcctggggctcagccagcagagctgtgcagtggaaaggaatccaccttggaaca

SEQ ID NO: 56111 - DNA, 728 bp, Homo sapiens
tatgaaccacttcaactatttttgcatctacccctgaataatattccacttaactggaacatatctcagtgtgtttgtgcccatttaacactccctgtcttcccaacccagcatctgtaacttacagcctgtagtcattccaaaatgcttccacgtggctaacctgggttgccaagccccatctggctcaattagcactggagattctggagagccccaaattatcattcttttctggttgtactaccaaagaccttcccatcctatctcttcctcaaactccctaagttccatagttgtatttgttccaattttgaatcccaatagtccccagctgttttagatgccccgcctccccacccccatctgggctctcctggctgggcttcccatgacagtattctccaattaggcaaatcacccttcaatccccaaattttctttaaagctgtagcaagtacacccacagtcgtgacaatactgaataaaatggaataggtctgattcactttcccaaagctgacttttgctgctgattgactcatatctgtttaccagaggtcatttgatttcctccttttgactcatgctcaacttcaaaactgatataacttgagtgtgccactcgaatgtgaccttcctttttgcctgcagaamctccagctccactcagctcctggggctcagccagcagagctgtgcagtggaaaggaatccaccttggaaca

SEQ ID NO: 56112 - DNA, 1442 bp, Homo sapiens
  misc_feature (1)...(1442): n = A,T,C or G
tggagtctccttttaatagaacttccttttagacactttaaattccctaaacctcagttttcccatttaaagaatggattttttaaagtagagtctgggcgcagtggctcccatctgtaatgccagcattttgggaggctgaagtgggcagatcatttgaggtcaggagttcgctgaggcaggagaattgcttggacccaggaggcagaggttgcagtgagccgagattgcaccattgcactccagcctgggcgaccagagcaaaactccgtctcaaaataaataaacaaacaaaatgtatttaaatatgatgtgattatatatctcattctatgtcctcttttttttttctgagccctattttttccttaagattaaatttactcaaatcttcaccgtacaattttggcaaataaatgtaccctataacctacatgctatcatgatatatcatgatacgaacattttgatatctccagaaagtttnnnnnnnnnnnnnnnnnnnnnnnnnnnnnnnnnnnnnnnnnnnnnnnnnnnnnnnnnnnnnnnnnnnnnnnnnnnnnnnnnnnnnnnnnnnnnnnnnnnnccttagtttttgcctgttctagaatttgtacgtaaagtggaataatatagtatatgttcttttgtgtctggcttctttggctcagtaccatatctctgagataaatccatgttgttgggctaatcagtagtttgctgaattgtatttcactgtacagatatactaccgtttgtttatcccattcacctattgatagacttttgggttgttccccgttttttgtttgtcttggttgtttatttctatggtccattaaagctcctgtgaacctttttgtacacatcattttgtggaccaatgttttcatttccttgtataactacctaggagaaggatcactggatccaaaggtaaatctatatgtaactttataagaaactcccaagtctttatcccaagtgactgtattattgtacattttaagcagcmatttatgagagttcccgttgctccgtagctccatatctttgtcaacgttttggcgttatctgtcttttttttttttttttttttttttttgagacagagtcttgctctgttgcccaagctagagtgcaatagcacagtcttggctcactgcaacctcagcctcccgggttcaagcaattctcatgcctcagcctccctgtcttttaaatttgaaccactctaatggctatgttttgatatctcattgtagttttactttgtatttccctgatgtttactggttatttatctttctttgtcaagtatattcaagttttcatcccctccctttttttccccctctgagacagagcctcactctgtcacccaggttggaatgcagtggcaccatcatagctcactgcaacctcaaattcctgagctcaag

SEQ ID NO: 56113 - DNA, 1071 bp, Homo sapiens
gtttttggaacaaaaagagaaacatactaaatataaacatattaaatttatgataaatccaatgcaatcaaaaataagaaaaagatgaatagttgctatgtggagttgcrataattcagaccagttggcaagatgggtttgaatatccctatgctatttttcaaagattacaactcctttataagtctttataatgtaaaagagtttgtaattctctatttaaataatccaacaaaaggtattcactaaaatgtcacatgaaaggatgattaaggcaaattttttcctgttaacgccactccaaaaaaggactgatattataagaggggaaaattgattaaaaaaaatgtttatttgcaaaagtctgtactgttgtccaagagcgtgacttttaattctctgccactgacttatctggtgatttactgatttgatacgtacattagcagaaactgaattttcatattctagcacccaaaccacatctacttttcccaagccaaaaggacagcatcacagatttcgtaaatcaaacagatggaatgctacccaggagaacatagccacatgagcacataagcacaaggagtttggcaataacatatgacaaagcaaagttaaaaaaaaaaaaagagagagaaagagagagaaatcatccagcacacattcactatttgtctaaaacaagttttctatatccttttagtacagaatcaatacagagtcatatgaaatctctagcagcaaatatcatgctgggtttcaagcaaatactgcatcatgagatctgaactgataatgtcagactcatccttcctggggaaaaaaaaaatgaaaagttcccaaaagttgtatccatcagctgagttaagaattggcctttgccttctttcttcttcattcctccgcctcaattcattccttttaggaatatgtgggtcataaaatttgtgttaataacttcaagctgaaagaaactgatctgtgattcagacctatattataattacggtagtttaaggcataaataaatcccaatctacatgatgaaagtgcatatattcattcttt

SEQ ID NO: 56114 - DNA, 1071 bp, Homo sapiens
gtttttggaacaaaaagagaaacatactaaatataaacatattaaatttatgataaatccaatgcaatcaaaaataagaaaaagatgaatagttgctatgtggagttgcgataattcagaccagttggcaagatgggtttgaatatccctatgctatttttcaaagattacaactcctttataagtctttataatgtaaaagagtttgtaattctctatttaaataatccaacaaaaggtattcactaaaatgtcacatgaaaggatgattaaggcaaattttttcctgttaacgccactccaaaaaaggactgatattataagaggggaaaattgattaaaaaaaatgtttatttgcaaaagtctgtactgttgtccaagagcgtgacttttaattctctgccactracttatctggtgatttactgatttgatacgtacattagcagaaactgaattttcatattctagcacccaaaccacatctacttttcccaagccaaaaggacagcatcacagatttcgtaaatcaaacagatggaatgctacccaggagaacatagccacatgagcacataagcacaaggagtttggcaataacatatgacaaagcaaagttaaaaaaaaaaaaagagagagaaagagagagaaatcatccagcacacattcactatttgtctaaaacaagttttctatatccttttagtacagaatcaatacagagtcatatgaaatctctagcagcaaatatcatgctgggtttcaagcaaatactgcatcatgagatctgaactgataatgtcagactcatccttcctggggaaaaaaaaaatgaaaagttcccaaaagttgtatccatcagctgagttaagaattggcctttgccttctttcttcttcattcctccgcctcaattcattccttttaggaatatgtgggtcataaaatttgtgttaataacttcaagctgaaagaaactgatctgtgattcagacctatattataattacggtagtttaaggcataaataaatcccaatctacatgatgaaagtgcatatattcattcttt

SEQ ID NO: 56115 - DNA, 650 bp, Homo sapiens
catcttcgcacacccctcctgcatccaagaatttgctaatagcagtcagctgatctgtggcctggcaatatgttctagaggagtggaatctttcacacacttacactgacaacaccccggacaccgcgtgcatccctgcaagctagagtactttctacacaattacctttttttttkttgttgttagtgtgtgtgtgtgtgtgtgtgtgtgtgtgtgtgtgtgtgtgtgtgtgtgtgatggagtgttgctctgttacccaggctggaatgcagtggtgtgatcttggctcagtgcaacctccacctcctgggttcaagcagttcttctgcctcagcctccaagtagctgggactacaggcatgagcttccacgcttggctaattttcgcattttcagtagagacggggtatcaccatattggccatgctggtcttgaactcttgaccttaggcaatccacctgccttggcctcccaaagtgctgggattacaggcgtgagccaccatgcccagccataaccttctcatatagtggagttgtcttattgataggggaggagattctaaagtccctgtcattatggtgatgagagattaaatataatcaaaattacttatgaaaatcccttgagccatccatgaagtatgtg

SEQ ID NO: 56116 - DNA, 650 bp, Homo sapiens
catcttcgcacacccctcctgcatccaagaatttgctaatagcagtcagctgatctgtggcctggcaatatgttctagaggagtggaatctttcacacacttacactgacaacaccccggacaccgcgtgcatccctgcaagctagagtactttctacacaattacctttttttttgttgttgttagtgtgtgtgtgtgtgtgtgtgtgtgtgtgtgtgtgtgtgtgtgtgtgtgtgatggagtgttgctctgttacccaggctggaatgcagtggtgtgatcttggctcagtgcaacctccacctcctgggttcaagcagttcttctgcctcagcctccaagtagctgggactacaggcatgagcttccacgcttggctaattttygcattttcagtagagacggggtatcaccatattggccatgctggtcttgaactcttgaccttaggcaatccacctgccttggcctcccaaagtgctgggattacaggcgtgagccaccatgcccagccataaccttctcatatagtggagttgtcttattgataggggaggagattctaaagtccctgtcattatggtgatgagagattaaatataatcaaaattacttatgaaaatcccttgagccatccatgaagtatgtg

SEQ ID NO: 56117 - DNA, 927 bp, Homo sapiens
  misc_feature (1)...(927): n = A,T,C or G
ctgaggggcccatcttcaagcagaatgtaaatgccaagtatgaggaccgaaatcaatgagtatcaccttcctacagcttttttttttttttttttttttttttttttgcagagaactgcatttgtttctatctgtgcagccatagctacatcattcatatgtaatgtttgtcttttatattattttgtataattttgatgattttcgtggaaaacgtgatgaaaacatttccccaaaaaaagtgttgctgaatttaaatgtgtttaaaaacttaatccccatgagcatagatgatnnnnnnnnnnnnnnnnnnnnnnnnnnnnnnnnnnnnnnnnnnnnnnnnnnnnnnnnnnnnnnnnnnnnnnnnnnnnnnnnnnnnnnnnnnnnnnnnnnnntcgggtaagttaattttgctaaatctcagttttgttgtctgtaaaatggttccagcaacagccatttggtgagttgttgcaaggttagaaattagaggcaatgataagtccctgtcatttaagaagcattcccattactatgaactatttyattattgggtaggtgttagctatatactagctattatataatagctttacatggattagctattaagttctcacaatattttacagatggggagagcagggtttagagagtaaaagaatttgacccatgttccacaattaggaaacaaatttcagggtgggaatttggacttaggactaaccccaaagcccagctcctaattatgatacatccgagagcactgtgatagctatgggaattaacagtttcatcaatgtaaaccaagaaagtcaaggatatacttgtggaggacatgtaacctgtcctggtctctgataaaagattggagttaaatatgttgatatgaaagagaaaaggccgttctaaacagaacgaataatg

SEQ ID NO: 56118 - DNA, 927 bp, Homo sapiens
  misc_feature (1)...(927): n = A,T,C or G
ctgaggggcccatcttcaagcagaatgtaaatgccaagtatgaggaccgaaatcaatgagtatcaccttcctacagcttttttttttttttttttttttttttttttgcagagaactgcatttgtttctatctgtgcagccatagctacatcattcatatgtaatgtttgtcttttatattattttgtataattttgatgattttcgtggaaaacgtgatgaaaacatttccccaaaaaaagtgttgctgaatttaaatgtgtttaaaaacttaatccccatgagcatagatgatnnnnnnnnnnnnnnnnnnnnnnnnnnnnnnnnnnnnnnnnnnnnnnnnnnnnnnnnnnnnnnnnnnnnnnnnnnnnnnnnnnnnnnnnnnnnnnnnnnnntcgggtaagttaattttgctaaatctcagttttgttgtctgtaaaatggttccagcaacagccatttggtgagttgttgcaaggttagaaattagaggcaatgataagtccctgtcatttaagaagcattcccattactatgaactatttcattattgggtaggtgttagctatatactagctattatataatagctttacatggattagctattaagttctcacaatattttacagatggggagagcagggtttagagagtaaaagaatttgacccatgttccacaattaggaaacaaatttcagggtgggaatttggacttaggactaaccccaaagcccagctcctaattatgatacatccsagagcactgtgatagctatgggaattaacagtttcatcaatgtaaaccaagaaagtcaaggatatacttgtggaggacatgtaacctgtcctggtctctgataaaagattggagttaaatatgttgatatgaaagagaaaaggccgttctaaacagaacgaataatg

SEQ ID NO: 56119 - DNA, 927 bp, Homo sapiens
  misc_feature (1)...(927): n = A,T,C or G
ctgaggggcccatcttcaagcagaatgtaaatgccaagtatgaggaccgaaatcaatgagtatcaccttcctacagcttttttttttttttttttttttttttttttgcagagaactgcatttgtttctatctgtgcagccatagctacatcattcatatgtaatgtttgtcttttatattattttgtataattttgatgattttcgtggaaaacgtgatgaaaacatttccccaaaaaaagtgttgctgaatttaaatgtgtttaaaaacttaatccccatgagcatagatgatnnnnnnnnnnnnnnnnnnnnnnnnnnnnnnnnnnnnnnnnnnnnnnnnnnnnnnnnnnnnnnnnnnnnnnnnnnnnnnnnnnnnnnnnnnnnnnnnnnnntcgggtaagttaattttgctaaatctcagttttgttgtctgtaaaatggttccagcaacagccatttggtgagttgttgcaaggttagaaattagaggcaatgataagtccctgtcatttaagaagcattcccattactatgaactatttcattattgggtaggtgttagctatatactagctattatataatagctttacatggattagctattaagttctcacaatattttacagatggggagagcagggtttagagagtaaaagaatttgacccatgttccacaattaggaaacaaatttcagggtgggaatttggacttaggactaaccccaaagcccagctcctaattatgatacatccgagagcactgtgatagctatgggaattaacagtttcatcaatgtaaaccaagaaagtcaaggatatacttgyggaggacatgtaacctgtcctggtctctgataaaagattggagttaaatatgttgatatgaaagagaaaaggccgttctaaacagaacgaataatg

SEQ ID NO: 56120 - DNA, 633 bp, Homo sapiens
ctgtaccaccacctttgaagaggctgtcagaatagcttattgaattaggtcaagcttatagatctaactaccagtttacaagaactaaagggggacagacagaggaacagtttaaaggataccacagagatgcaagcagcaaaatgcagactgcagggactcctataagataaatagcccagtttcttcaacaaacaaatcgaaggggaaaaaaaaaaaggagggcagaagcttatgtataaaagagacttaggagacgcatgagctgtatgcagtacgtggaccttgttttgatcctgtattaaacaaaccaactatagaaagacgtaacatcagggaaatttgcaaaccaactagatrtttgatgatattaaggaacaatgttaattcttctgggtgttataatggtatgaaagacgcacaaggggcagggccttccacccctaagcttaccgtggggctggtggagactagagcccagggagagagaggaggggctgagccattgaagcccagtttattcttccaaactcatggataaatcatttctcctccattggagaggaatgtgtaatatgaaaaaacaaactcactgttttttcctctctgttcacacatgcaacacagaatact

SEQ ID NO: 56121 - DNA, 1149 bp, Homo sapiens
caactattcagaacctgaatggaagccactccttggtggttcccttagaaacctcagccccatccagagcccttgtatcagatttggatggaaagggcatgtgtttagcccgttcaagggtgacttttagacagtcctctctctctctgtctctctctctgtgtgtgtgtgtgtgtgtgtgtgtgtgtgtaggttcagccttttctcactaagacagttattttcacccataggcaggcaccctgatgggagaggcaggatgaatggatctctttgatactcaaagttttttaagccattgatgtgttatgtgtctaaaataatattcttttttgaaaaattattgtttcatgatatgattaataaattattttctttgttaaatatcgattaaaaattatattaataattatgttaataattaagaattatagataaggataaaattccttttgactgttacagcagtccactcccaagagaataaactgttaccttccagaccttttcaaaattgacaggatctatttaaagtcctgtattttatttgaccagaaaattctatttttcagatgttacatttaagaaaacttcttgaatgtacatgacaaagaatgaacaagcatatttattgcaacattgtttataatagcaataaaggtaagcaacttaataggggactaaataaattgtggtatatttttacaatgacagagtatacagtagtaaaaacagtgaggtggagccctaagtgctaacttggaaaaagcttcaggaaatatcactgagtgaaaaaggagattgcagaatgataaatgtaatrtgatgcattttatcagggctatttaggaaaattatggcctaatagaaatgacctgggctgagtgagaggagcagaaatggggagagtgattattgcccctcgcttgctttgcctcctttagccatttcttcctgttctctcaatcattctttcccctctttcactccacattctttcctttcttcatcacttcttttcatagttaaaattgaagccaagtctaccctctaggaattgtatgtgtttgtgctcattaacaaccagttgaactctgttgattagcaatatggtcaatccaaactggttgttaaagtgtcaaaataaat

SEQ ID NO: 56122 - DNA, 975 bp, Homo sapiens
agagagacaagggaaggcaaaatatggaatgttactagagagtagttcaagattattgctcgaatgcaagtgcagtggaaattccaaggcagaaaatgtctaggaggaaattagtttttaattagatcttgaatgaagttcaagacttgagctgtatcaaggaaaggggaggcaggaaaaaaggagctcactgaacaactaaaatatgttcagccaaaaagaatgcttctccctaaacaataacatcaattaaaactgtataaattattcttactttagggttcttaattcaggagggatcctggaaggtagttacaaggatttgggaactgttttgaaagttaacatacgtcaattataagtctgaagaggttatcggaagggtttgtttgccctcgccgtggcttggaattctatcagytccttccctctggttgacagggaaagaagcctttgatttgcaactaatgtgtaacacagcagtgaattggatagacaggatcttttaaagaggtctgtgagaggaatctcaaaggaaatcttggtgctgaaaggattataaattgcatatctagtatgagttacctcatgggatttgaggtcagacagatttggacttgaaatagaacattagctgtgtgatcttgggttaataatttgatttttattggcttagttttctcactgctcagataaacaagaatacaatcatcatatttttccatgagtttctgtatacaaagcactgtgcctgagctatagttcttaccatagtaagagctcagcctgtgtcttcgttcgtttgcgcagctataacaaaataccacagactgggtaatttataaacagcagagatttatttctcacagttctggagtctgggaagttcataatcaagtactgtcaggttccatcatctggtgagggctggtctcagcctccaagatggccccttgatgctgcattctccagagg

SEQ ID NO: 56123 - DNA, 966 bp, Homo sapiens
tggctatacctccctgggtgccctattctttttattacccctgagaataccattcttttttttaagtgctcatcaatctaaatctcctcgaatatttatcttctgcacagacaattcacggtgtggatgcataacatttttcacaaatggcatttccttgctaattgttcagagagggcatgcacagagggcaggtgaagatgctgaacagcatagtctatatgaccagataaaggcagatgcaatttmtttgtcatgttactctgaaaagaaaagaaaataattacttccttattctttcctttgttccttggagaaactaaaatgtaatgacaagatctcaggtcaaagaaaatgtgaagaggagagacaacattctatgtctgagatattataagaaaatgattctgcacactctgagcatttgggccaggcctggaggttcagagtagacaatcatgaccacacatttgtctgtaaggggctcagggaccacgggcaaggcaggcaattatggtggcacaataatatcctgagacagtagctggagctgccttctgtctcatgctcctccaccttctcgtactcattaactttcactatccagggaacacggccctatcgctcaggaggagaccatctacagccgagaaaaattattggtagacaattccaaaacaagctcttgagacccataatggagtaaatttctttaaaactaacgtttataatttcaagagtctggaaattcgagacataaaatgccacctcctcctcctcctcctccttcttcttcttaaaacatttgactccataaaaagccactctaatggtttgtttcataaacgtagactgggaaaaaacatgccttccaccccagacttggcaaacatcctgtaggggaggtgaggcagggaagtaggaggggaatgaagagagtgaggcatacatgagtgtttctaagag

SEQ ID NO: 56124 - DNA, 966 bp, Homo sapiens
tggctatacctccctgggtgccctattctttttattacccctgagaataccattcttttttttaagtgctcatcaatctaaatctcctcgaatatttatcttctgcacagacaattcacggtgtggatgcataacatttttcacaaatggcatttccttgctaattgttcagagagggcatgcacagagggcaggtgaagatgctgaacagcatagtctatatgaccagataaaggcagatgcaatttctttgtcatgttactctgaaaagaaaagaaaataattacttccttattctttcytttgttccttggagaaactaaaatgtaatgacaagatctcaggtcaaagaaaatgtgaagaggagagacaacattctatgtctgagatattataagaaaatgattctgcacactctgagcatttgggccaggcctggaggttcagagtagacaatcatgaccacacatttgtctgtaaggggctcagggaccacgggcaaggcaggcaattatggtggcacaataatatcctgagacagtagctggagctgccttctgtctcatgctcctccaccttctcgtactcattaactttcactatccagggaacacggccctatcgctcaggaggagaccatctacagccgagaaaaattattggtagacaattccaaaacaagctcttgagacccataatggagtaaatttctttaaaactaacgtttataatttcaagagtctggaaattcgagacataaaatgccacctcctcctcctcctcctccttcttcttcttaaaacatttgactccataaaaagccactctaatggtttgtttcataaacgtagactgggaaaaaacatgccttccaccccagacttggcaaacatcctgtaggggaggtgaggcagggaagtaggaggggaatgaagagagtgaggcatacatgagtgtttctaagag

SEQ ID NO: 56125 - DNA, 966 bp, Homo sapiens
tggctatacctccctgggtgccctattctttttattacccctgagaataccattcttttttttaagtgctcatcaatctaaatctcctcgaatatttatcttctgcacagacaattcacggtgtggatgcataacatttttcacaaatggcatttccttgctaattgttcagagagggcatgcacagagggcaggtgaagatgctgaacagcatagtctatatgaccagataaaggcagatgcaatttctttgtcatgttactctgaaaagaaaagaaaataattacttccttattctttcctttgttccttggagaaactaaaatgtaatgacaagatctcaggtcaaagaaaatgtgaagaggagagacaacattctatgtctgagataytataagaaaatgattctgcacactctgagcatttgggccaggcctggaggttcagagtagacaatcatgaccacacatttgtctgtaaggggctcagggaccacgggcaaggcaggcaattatggtggcacaataatatcctgagacagtagctggagctgccttctgtctcatgctcctccaccttctcgtactcattaactttcactatccagggaacacggccctatcgctcaggaggagaccatctacagccgagaaaaattattggtagacaattccaaaacaagctcttgagacccataatggagtaaatttctttaaaactaacgtttataatttcaagagtctggaaattcgagacataaaatgccacctcctcctcctcctcctccttcttcttcttaaaacatttgactccataaaaagccactctaatggtttgtttcataaacgtagactgggaaaaaacatgccttccaccccagacttggcaaacatcctgtaggggaggtgaggcagggaagtaggaggggaatgaagagagtgaggcatacatgagtgtttctaagag

SEQ ID NO: 56126 - DNA, 966 bp, Homo sapiens
tggctatacctccctgggtgccctattctttttattacccctgagaataccattcttttttttaagtgctcatcaatctaaatctcctcgaatatttatcttctgcacagacaattcacggtgtggatgcataacatttttcacaaatggcatttccttgctaattgttcagagagggcatgcacagagggcaggtgaagatgctgaacagcatagtctatatgaccagataaaggcagatgcaatttctttgtcatgttactctgaaaagaaaagaaaataattacttccttattctttcctttgttccttggagaaactaaaatgtaatgacaagatctcaggtcaaagaaaatgtgaagaggagagacaacattctatgtctgagatattataagaaaatgattctgcacactctgagcatttgggccaggcctggaggttcagagtagacaatcatgaccacacatttgtctgtaaggggctcagggaccacgggcaakgcaggcaattatggtggcacaataatatcctgagacagtagctggagctgccttctgtctcatgctcctccaccttctcgtactcattaactttcactatccagggaacacggccctatcgctcaggaggagaccatctacagccgagaaaaattattggtagacaattccaaaacaagctcttgagacccataatggagtaaatttctttaaaactaacgtttataatttcaagagtctggaaattcgagacataaaatgccacctcctcctcctcctcctccttcttcttcttaaaacatttgactccataaaaagccactctaatggtttgtttcataaacgtagactgggaaaaaacatgccttccaccccagacttggcaaacatcctgtaggggaggtgaggcagggaagtaggaggggaatgaagagagtgaggcatacatgagtgtttctaagag

SEQ ID NO: 56127 - DNA, 966 bp, Homo sapiens
tggctatacctccctgggtgccctattctttttattacccctgagaataccattcttttttttaagtgctcatcaatctaaatctcctcgaatatttatcttctgcacagacaattcacggtgtggatgcataacatttttcacaaatggcatttccttgctaattgttcagagagggcatgcacagagggcaggtgaagatgctgaacagcatagtctatatgaccagataaaggcagatgcaatttctttgtcatgttactctgaaaagaaaagaaaataattacttccttattctttcctttgttccttggagaaactaaaatgtaatgacaagatctcaggtcaaagaaaatgtgaagaggagagacaacattctatgtctgagatattataagaaaatgattctgcacactctgagcatttgggccaggcctggaggttcagagtagacaatcatgaccacacatttgtctgtaaggggctcagggaccacgggcaaggcaggcaattatggtggcacaataatatcctgagacagtagctggagctgccttctgtctcatgctcctccaccttctcgtactcattaactttcactatccagggaacayggccctatcgctcaggaggagaccatctacagccgagaaaaattattggtagacaattccaaaacaagctcttgagacccataatggagtaaatttctttaaaactaacgtttataatttcaagagtctggaaattcgagacataaaatgccacctcctcctcctcctcctccttcttcttcttaaaacatttgactccataaaaagccactctaatggtttgtttcataaacgtagactgggaaaaaacatgccttccaccccagacttggcaaacatcctgtaggggaggtgaggcagggaagtaggaggggaatgaagagagtgaggcatacatgagtgtttctaagag

SEQ ID NO: 56128 - DNA, 543 bp, Homo sapiens
agggaccactggttcattgaaggaaaccattgtgccaatcttgggggttaatatagcatagctggtaagagcataaatgccatggcttcaaatctcagctccactacttactagctatgagatatcaggcaagttacttgtcctctttgggctttagtgcttcttacctgtaaaagagggattttaactagcacctgctgttgtttgtgagagtaatggattattacttataagtctcctaaaacaccacctggcatgtaattaatgctcactagaaaccaactgctgttgttattaatattatttttcaatcagaattcttttagtggcaaccaatacaaataggctttagcaaaagaaaaaawaaagaggattctactgcctcacacaactgaaagctctagagtacagctggcatcatatctcgcaaacaccaccagaattcttctccagagttcagtcctgttctcctctgtggtgggggtacttctatgcagctgtcccaagtggtggcaaagatggaaaccagcagctccaagcttc

SEQ ID NO: 56129 - DNA, 1489 bp, Homo sapiens
gcctgaaaatcacagaagagcctgttcagcttgcccaatgaccctcaggggactggtatgaccacaagtggaaaacaccctgtaaatggtrgctctggggcatcttgggtggccagcaagaccaggtgacagtgttgggggccatttccacctgagtcggagcttctgcataaagtcagggacagtggggatggcaacgagataagagaagaaatgaggttctagtctggctcagccacttatcagctgcataattataagaaattctccccaagactcagttatcttaactggaaagtggaaaaagtaatattagtttttccgtctggatgtgaagtttaagggagaagatatatttgaagtcatctggcaaggatctgccaggaccaaatgacccatgtctgtgggtttcctttttagttgttcctttggacactgagctctgcctgggcttcagcaatcattttcatggatgaattttgggaaaagtccataaaagcaacattcagatgccaggaactcggtgaccctgcctgtgtcagtgaactatccgtaatcctgggaactgactgggaggggtgcttccatatacgtgcccagggaaagtttgttctatttacggttctcactcttcatgattacatggctttttttttttttttttcccccatgactgggcgtatgaacctcttactcctgagtttgccactccttctgatcatgtctttttcagaggcttaacctctggaattccagcagagaaagcactgcaaggtattatcccagtctcaggaggaagcctcgagtctaatgctataatgttcacatttgtgctccactcgtagaacagaatttgcattccccaaatgcctcattacatggtgaagtccagcacaaactgacagccattatttgatttgccccctggttgcctggtgagccagttagtgggaggggaagcaatttcaaagaggcacctgcaaagtggtaagcacgcaggctttggaagcacataccaaggtttcgatcttgtctctgccaccgataaacagtggggcctgggacaagttccttaacttttcctactttgtttcattatctgtgaaatggggatggtatcattgggttgggctgcagagtggttaggcttaagtgagatactttatgttaagtgcttttatgaaactatctggtttatagaaggcactcaataagtgttaattttattcgttcaccttcattcaggttaaaataacttgcttcttgggtctctcttccctccaatggttggcttctctgtaatagtaagtctctttctgtactttgctaagggtattttgttccttttgatggtaacaaatatgaaagaaatggattggagacagagatgtgcatatctctagccttgtcttttgcaaatggaaacctgaacactgagtttgagcctcaatggggacctttaagatctcagtcgggcagcacctgaatg

SEQ ID NO: 56130 - DNA, 1489 bp, Homo sapiens
gcctgaaaatcacagaagagcctgttcagcttgcccaatgaccctcaggggactggtatgaccacaagtggaaaacaccctgtaaatggtggctctggggcatcttgggtggccagcaagaccaggtgacagtgttgggggccatttccacctgagtcggagcttctgcataaagtcagggacagtggggatggcaacgagataagagaagaaatgaggttctagtctggctcagccacttatcagctgcataattataagaaattctccccaagactcagttatctyaactggaaagtggaaaaagtaatattagtttttccgtctggatgtgaagtttaagggagaagatatatttgaagtcatctggcaaggatctgccaggaccaaatgacccatgtctgtgggtttcctttttagttgttcctttggacactgagctctgcctgggcttcagcaatcattttcatggatgaattttgggaaaagtccataaaagcaacattcagatgccaggaactcggtgaccctgcctgtgtcagtgaactatccgtaatcctgggaactgactgggaggggtgcttccatatacgtgcccagggaaagtttgttctatttacggttctcactcttcatgattacatggctttttttttttttttttcccccatgactgggcgtatgaacctcttactcctgagtttgccactccttctgatcatgtctttttcagaggcttaacctctggaattccagcagagaaagcactgcaaggtattatcccagtctcaggaggaagcctcgagtctaatgctataatgttcacatttgtgctccactcgtagaacagaatttgcattccccaaatgcctcattacatggtgaagtccagcacaaactgacagccattatttgatttgccccctggttgcctggtgagccagttagtgggaggggaagcaatttcaaagaggcacctgcaaagtggtaagcacgcaggctttggaagcacataccaaggtttcgatcttgtctctgccaccgataaacagtggggcctgggacaagttccttaacttttcctactttgtttcattatctgtgaaatggggatggtatcattgggttgggctgcagagtggttaggcttaagtgagatactttatgttaagtgcttttatgaaactatctggtttatagaaggcactcaataagtgttaattttattcgttcaccttcattcaggttaaaataacttgcttcttgggtctctcttccctccaatggttggcttctctgtaatagtaagtctctttctgtactttgctaagggtattttgttccttttgatggtaacaaatatgaaagaaatggattggagacagagatgtgcatatctctagccttgtcttttgcaaatggaaacctgaacactgagtttgagcctcaatggggacctttaagatctcagtcgggcagcacctgaatg

SEQ ID NO: 56131 - DNA, 1489 bp, Homo sapiens
gcctgaaaatcacagaagagcctgttcagcttgcccaatgaccctcaggggactggtatgaccacaagtggaaaacaccctgtaaatggtggctctggggcatcttgggtggccagcaagaccaggtgacagtgttgggggccatttccacctgagtcggagcttctgcataaagtcagggacagtggggatggcaacgagataagagaagaaatgaggttctagtctggctcagccacttatcagctgcataattataagaaattctccccaagactcagttatcttaactggaaagtggaaaaagtaatattagtttttccgtctggatgtgaagtttaagggagaagatatatttgaagtcatctggcaaggatctgccaggaccaaatgacccatgtctgtgggtttcctttttagttgttcctttggacactgagctctgcctgggcttcagcaatcattttcatggatgaattttgggaaaagtccataaaagcaacattcagatgccaggaactcggtgaccctgcctgtgtcagtgaactatccgtaatcctgggaactgactgggaggggtgcttccatatacgtgcccagggaaagtttgttctatttacggttctcactcttcatgattacatggctttttttttttttttttcccccatgactgggcgtatgaacctcttactcctgagtttgccactccttctgatcatgtctttttcagaggcttaacctctggaattccagcagagaaagcactgcaaggtattatcccagtctcaggaggaagcctcgagtctaatgctataatgttcacatttgtgctccactcgtagaacagaatttgcattccccaaatgcctcattacatggtgaagtccagcacaaactgacagccattatttgatttgccccctggttgcctggtgagccagttagtgggaggggaagcaatttcaaagaggcacctgcaaagtggtaagcacgcaggctttggaagcacataccaaggtttcgatcttgtctctgccaccgataaacagtggggcctgggacaagttccttaacttttcctactttgtttcattatctgtgaaatggggatggtatcattgggttgggctgcagagtggttaggcttaagtragatactttatgttaagtgcttttatgaaactatctggtttatagaaggcactcaataagtgttaattttattcgttcaccttcattcaggttaaaataacttgcttcttgggtctctcttccctccaatggttggcttctctgtaatagtaagtctctttctgtactttgctaagggtattttgttccttttgatggtaacaaatatgaaagaaatggattggagacagagatgtgcatatctctagccttgtcttttgcaaatggaaacctgaacactgagtttgagcctcaatggggacctttaagatctcagtcgggcagcacctgaatg

SEQ ID NO: 56132 - DNA, 1489 bp, Homo sapiens
gcctgaaaatcacagaagagcctgttcagcttgcccaatgaccctcaggggactggtatgaccacaagtggaaaacaccctgtaaatggtggctctggggcatcttgggtggccagcaagaccaggtgacagtgttgggggccatttccacctgagtcggagcttctgcataaagtcagggacagtggggatggcaacgagataagagaagaaatgaggttctagtctggctcagccacttatcagctgcataattataagaaattctccccaagactcagttatcttaactggaaagtggaaaaagtaatattagtttttccgtctggatgtgaagtttaagggagaagatatatttgaagtcatctggcaaggatctgccaggaccaaatgacccatgtctgtgggtttcctttttagttgttcctttggacactgagctctgcctgggcttcagcaatcattttcatggatgaattttgggaaaagtccataaaagcaacattcagatgccaggaactcggtgaccctgcctgtgtcagtgaactatccgtaatcctgggaactgactgggaggggtgcttccatatacgtgcccagggaaagtttgttctatttacggttctcactcttcatgattacatggctttttttttttttttttcccccatgactgggcgtatgaacctcttactcctgagtttgccactccttctgatcatgtctttttcagaggcttaacctctggaattccagcagagaaagcactgcaaggtattatcccagtctcaggaggaagcctcgagtctaatgctataatgttcacatttgtgctccactcgtagaacagaatttgcattccccaaatgcctcattacatggtgaagtccagcacaaactgacagccattatttgatttgccccctggttgcctggtgagccagttagtgggaggggaagcaatttcaaagaggcacctgcaaagtggtaagcacgcaggctttggaagcacataccaaggtttcgatcttgtctctgccaccgataaacagtggggcctgggacaagttccttaacttttcctactttgtttcattatctgtgaaatggggatggtatcattgggttgggctgcagagtggttaggcttaagtgagatactttatgttaagtgcttttatgaaactatctggtttatagaaggcactcaataagtgttaattttattcgttcaccttcattcaggttaaaataacttgcttcttgggtctctcttccctccaatggttggcttctctgtaatagtaagtctctttctgtactttgctaagggtattttgttccttttgatggtaacaaatatgaaagaaakggattggagacagagatgtgcatatctctagccttgtcttttgcaaatggaaacctgaacactgagtttgagcctcaatggggacctttaagatctcagtcgggcagcacctgaatg

SEQ ID NO: 56133 - DNA, 1489 bp, Homo sapiens
gcctgaaaatcacagaagagcctgttcagcttgcccaatgaccctcaggggactggtatgaccacaagtggaaaacaccctgtaaatggtggctctggggcatcttgggtggccagcaagaccaggtgacagtgttgggggccatttccacctgagtcggagcttctgcataaagtcagggacagtggggatggcaacgagataagagaagaaatgaggttctagtctggctcagccacttatcagctgcataattataagaaattctccccaagactcagttatcttaactggaaagtggaaaaagtaatattagtttttccgtctggatgtgaagtttaagggagaagatatatttgaagtcatctggcaaggatctgccaggaccaaatgacccatgtctgtgggtttcctttttagttgttcctttggacactgagctctgcctgggcttcagcaatcattttcatggatgaattttgggaaaagtccataaaagcaacattcagatgccaggaactcggtgaccctgcctgtgtcagtgaactatccgtaatcctgggaactgactgggaggggtgcttccatatacgtgcccagggaaagtttgttctatttacggttctcactcttcatgattacatggctttttttttttttttttcccccatgactgggcgtatgaacctcttactcctgagtttgccactccttctgatcatgtctttttcagaggcttaacctctggaattccagcagagaaagcactgcaaggtattatcccagtctcaggaggaagcctcgagtctaatgctataatgttcacatttgtgctccactcgtagaacagaatttgcattccccaaatgcctcattacatggtgaagtccagcacaaactgacagccattatttgatttgccccctggttgcctggtgagccagttagtgggaggggaagcaatttcaaagaggcacctgcaaagtggtaagcacgcaggctttggaagcacataccaaggtttcgatcttgtctctgccaccgataaacagtggggcctgggacaagttccttaacttttcctactttgtttcattatctgtgaaatggggatggtatcattgggttgggctgcagagtggttaggcttaagtgagatactttatgttaagtgcttttatgaaactatctggtttatagaaggcactcaataagtgttaattttattcgttcaccttcattcaggttaaaataacttgcttcttgggtctctcttccctccaatggttggcttctctgtaatagtaagtctctttctgtactttgctaagggtattttgttccttttgatggtaacaaatatgaaagaaatgkattggagacagagatgtgcatatctctagccttgtcttttgcaaatggaaacctgaacactgagtttgagcctcaatggggacctttaagatctcagtcgggcagcacctgaatg

SEQ ID NO: 56134 - DNA, 699 bp, Homo sapiens
aaatcctcaacacaacttttattccatctccatccattgggtattaattattttcaaaacaaatgtattacattcttgacctttcctcctgaaaatttgtcttataacttcaaaatgtaaactttttggatatttatttgttcccctcaatgtctgcttctttatggacactttacatcccttgggcacatctttatggcacagcagagtttctgttgacccagagaaaccaccagtagtaaacaytctcctttacccagtgcttattatgtgccaggcatataataatatttcccaaacactataaggtagatgctgatatgattttgtcccaattttttaaaaagaagaagatgaagctcaaagaggctaatgaactccctggggtcctcacagttggtaagtcatagagctggagttgattcctatctccgtttgattccacagctgtgttctggccactgtgttcattactgtgaccattagttaagtatgcaagcattgtggttcacgagagagccgaagggaacaggcactcatggtaaagtgtcaagtgctaggcaaatgtctgtctcaggtaatgcccgatagcattatcttcgtttcacaaacaaggaaactgatccttgattcagatacaagtcccgtctcctcctaggtgtgccccttgtaccttgtgcatagaaattccaacacttt

SEQ ID NO: 56135 - DNA, 699 bp, Homo sapiens
aaatcctcaacacaacttttattccatctccatccattgggtattaattattttcaaaacaaatgtattacattcttgacctttcctcctgaaaatttgtcttataacttcaaaatgtaaactttttggatatttatttgttcccctcaatgtctgcttctttatggacactttacatcccttgggcacatctttatggcacagcagagtttctgttgacccagagaaaccaccagtagtaaacactctcctttacccagtgcttattatgtgccaggcatataataatatttcccaaacactataaggtagatgctgatatgattttgtcccaattttttaaaaagaagaagatgaagctcaaagaggctaatgaactccctggggtcctcacagttggtaagtcatagagctggagttgattcctatctccgtttgattccacagctgtgttctggccactgtgttcattactgtgaccattagttaagtatgcaagcattgtggttcacgagagagccgaagggaacaggcactcatggtaaagtgtcaagtgctaggcaaatgtctgtctcaggtaatgcccgatagcattatcttcgtttyacaaacaaggaaactgatccttgattcagatacaagtcccgtctcctcctaggtgtgccccttgtaccttgtgcatagaaattccaacacttt

SEQ ID NO: 56136 - DNA, 838 bp, Homo sapiens
gaaatgcttagcatagttttgtacttgggaaacagtcagcacatgttagctgctataatcatagaacagaatgggcaactcatttggagtaagaaaaaaatatggattccactcttgggtttgacattgactctctgtgtgagctgggaccattgacttcaactttctggaaattagaggcctcgtcagcagaatgaggttggtgacaagcccaggtgacctatatggacgcttgctatgtgcagggcactacaccacattctctacatctatcatctttgcaatttttgccacaaaacatgtggagtagattctaacatgatccttatattaaaagtkggaaactgaggcttagaacagtaattggcccaacgtcatatatctagtaagggctgtttaaatccaggttgcctgactccacagtttgtgccccaaaccagcaagctgtaaggcccatttcattcatcagcaataagtgttaaatgacatggtacagcagaaacattttataaactgtaaagcagtggcaaacaatgggtattccttgaatattgaaaacatacttggagtctttatttcatgccaggtggtgggcacccagggggagacatggcaggccccatcccaggcctggtgggcctacctttgaggaaaggggatagactacctacagcaaatagcagaatcgagtgatccacagcagtgcaaactggaaaggagttggaattcttgttgcccaaatgttgcaaatgaaaagctaacaggattcacatctctggctggcacaagggaccaagatctaaaacatcactgtctgctgtgtgttctcagggagcta

SEQ ID NO: 56137 - DNA, 1097 bp, Homo sapiens
cgtttttgtttttggaacaaaaagagaaacatactaaatataaacatattaaatttatgataaatccaatgcaatcaaaaataagaaaaagatgaatagttgctatgtggagttgcrataattcagaccagttggcaagatgggtttgaatatccctatgctatttttcaaagattacaactcctttataagtctttataatgtaaaagagtttgtaattctctatttaaataatccaacaaaaggtattcactaaaatgtcacatgaaaggatgattaaggcaaattttttcctgttaacgccactccaaaaaaggactgatattataagaggggaaaattgattaaaaaaaatgtttatttgcaaaagtctgtactgttgtccaagagcgtgacttttaattctctgccactgacttatctggtgatttactgatttgatacgtacattagcagaaactgaattttcatattctagcacccaaaccacatctacttttcccaagccaaaaggacagcatcacagatttcgtaaatcaaacagatggaatgctacccaggagaacatagccacatgagcacataagcacaaggagtttggcaataacatatgacaaagcaaagttaaaaaaaaaaaaagagagagaaagagagagaaatcatccagcacacattcactatttgtctaaaacaagttttctatatccttttagtacagaatcaatacagagtcatatgaaatctctagcagcaaatatcatgctgggtttcaagcaaatactgcatcatgagatctgaactgataatgtcagactcatccttcctggggaaaaaaaaaatgaaaagttcccaaaagttgtatccatcagctgagttaagaattggcctttgccttctttcttcttcattcctccgcctcaattcattccttttaggaatatgtgggtcataaaatttgtgttaataacttcaagctgaaagaaactgatctgtgattcagacctatattataattacggtagtttaaggcataaataaatcccaatctacatgatgaaagtgcatatattcattctttctagagctaaggaatagga

SEQ ID NO: 56138 - DNA, 1097 bp, Homo sapiens
cgtttttgtttttggaacaaaaagagaaacatactaaatataaacatattaaatttatgataaatccaatgcaatcaaaaataagaaaaagatgaatagttgctatgtggagttgcgataattcagaccagttggcaagatgggtttgaatatccctatgctatttttcaaagattacaaytcctttataagtctttataatgtaaaagagtttgtaattctctatttaaataatccaacaaaaggtattcactaaaatgtcacatgaaaggatgattaaggcaaattttttcctgttaacgccactccaaaaaaggactgatattataagaggggaaaattgattaaaaaaaatgtttatttgcaaaagtctgtactgttgtccaagagcgtgacttttaattctctgccactgacttatctggtgatttactgatttgatacgtacattagcagaaactgaattttcatattctagcacccaaaccacatctacttttcccaagccaaaaggacagcatcacagatttcgtaaatcaaacagatggaatgctacccaggagaacatagccacatgagcacataagcacaaggagtttggcaataacatatgacaaagcaaagttaaaaaaaaaaaaagagagagaaagagagagaaatcatccagcacacattcactatttgtctaaaacaagttttctatatccttttagtacagaatcaatacagagtcatatgaaatctctagcagcaaatatcatgctgggtttcaagcaaatactgcatcatgagatctgaactgataatgtcagactcatccttcctggggaaaaaaaaaatgaaaagttcccaaaagttgtatccatcagctgagttaagaattggcctttgccttctttcttcttcattcctccgcctcaattcattccttttaggaatatgtgggtcataaaatttgtgttaataacttcaagctgaaagaaactgatctgtgattcagacctatattataattacggtagtttaaggcataaataaatcccaatctacatgatgaaagtgcatatattcattctttctagagctaaggaatagga

SEQ ID NO: 56139 - DNA, 1097 bp, Homo sapiens
cgtttttgtttttggaacaaaaagagaaacatactaaatataaacatattaaatttatgataaatccaatgcaatcaaaaataagaaaaagatgaatagttgctatgtggagttgcgataattcagaccagttggcaagatgggtttgaatatccctatgctatttttcaaagattacaactcctttataagtctttataatgtaaaagagtttgtaattctctatttaaataatccaacaaaaggtattcactaaaatgtcacatgaaaggatgattaaggcaaattttttcctgttaaygccactccaaaaaaggactgatattataagaggggaaaattgattaaaaaaaatgtttatttgcaaaagtctgtactgttgtccaagagcgtgacttttaattctctgccactgacttatctggtgatttactgatttgatacgtacattagcagaaactgaattttcatattctagcacccaaaccacatctacttttcccaagccaaaaggacagcatcacagatttcgtaaatcaaacagatggaatgctacccaggagaacatagccacatgagcacataagcacaaggagtttggcaataacatatgacaaagcaaagttaaaaaaaaaaaaagagagagaaagagagagaaatcatccagcacacattcactatttgtctaaaacaagttttctatatccttttagtacagaatcaatacagagtcatatgaaatctctagcagcaaatatcatgctgggtttcaagcaaatactgcatcatgagatctgaactgataatgtcagactcatccttcctggggaaaaaaaaaatgaaaagttcccaaaagttgtatccatcagctgagttaagaattggcctttgccttctttcttcttcattcctccgcctcaattcattccttttaggaatatgtgggtcataaaatttgtgttaataacttcaagctgaaagaaactgatctgtgattcagacctatattataattacggtagtttaaggcataaataaatcccaatctacatgatgaaagtgcatatattcattctttctagagctaaggaatagga

SEQ ID NO: 56140 - DNA, 1097 bp, Homo sapiens
cgtttttgtttttggaacaaaaagagaaacatactaaatataaacatattaaatttatgataaatccaatgcaatcaaaaataagaaaaagatgaatagttgctatgtggagttgcgataattcagaccagttggcaagatgggtttgaatatccctatgctatttttcaaagattacaactcctttataagtctttataatgtaaaagagtttgtaattctctatttaaataatccaacaaaaggtattcactaaaatgtcacatgaaaggatgattaaggcaaattttttcctgttaacgccactccaaaaaaggactgatattataagaggggaaaattgattaaaaaaaatgtttatttgcaaaagtctgtactgttgtccaagagcgtgacttttaattctctgccactracttatctggtgatttactgatttgatacgtacattagcagaaactgaattttcatattctagcacccaaaccacatctacttttcccaagccaaaaggacagcatcacagatttcgtaaatcaaacagatggaatgctacccaggagaacatagccacatgagcacataagcacaaggagtttggcaataacatatgacaaagcaaagttaaaaaaaaaaaaagagagagaaagagagagaaatcatccagcacacattcactatttgtctaaaacaagttttctatatccttttagtacagaatcaatacagagtcatatgaaatctctagcagcaaatatcatgctgggtttcaagcaaatactgcatcatgagatctgaactgataatgtcagactcatccttcctggggaaaaaaaaaatgaaaagttcccaaaagttgtatccatcagctgagttaagaattggcctttgccttctttcttcttcattcctccgcctcaattcattccttttaggaatatgtgggtcataaaatttgtgttaataacttcaagctgaaagaaactgatctgtgattcagacctatattataattacggtagtttaaggcataaataaatcccaatctacatgatgaaagtgcatatattcattctttctagagctaaggaatagga

SEQ ID NO: 56141 - DNA, 1097 bp, Homo sapiens
cgtttttgtttttggaacaaaaagagaaacatactaaatataaacatattaaatttatgataaatccaatgcaatcaaaaataagaaaaagatgaatagttgctatgtggagttgcgataattcagaccagttggcaagatgggtttgaatatccctatgctatttttcaaagattacaactcctttataagtctttataatgtaaaagagtttgtaattctctatttaaataatccaacaaaaggtattcactaaaatgtcacatgaaaggatgattaaggcaaattttttcctgttaacgccactccaaaaaaggactgatattataagaggggaaaattgattaaaaaaaatgtttatttgcaaaagtctgtactgttgtccaagagcgtgacttttaattctctgccactgacttatctggtgatttactgatttgatacgtacattagcagaaactgaattttcatattctagcacccaaaccacatctacttttcccaagccaaaaggacagcatcacagatttcgtaaatcaaacagatggaatgctacccaggagaacatagccacatgagcacataagcacaaggagtttggcaataacatatgacaaagcaaagttaaaaaaaaaaaaagagagagaaagagagagaaatcatccagcacacattcactatttgtctaaaacaagttttctatatccttttagtacagaatcaatacagagtcatatgaaatctctagcagcaaatatcatgctgggtttcaagcaaatmctgcatcatgagatctgaactgataatgtcagactcatccttcctggggaaaaaaaaaatgaaaagttcccaaaagttgtatccatcagctgagttaagaattggcctttgccttctttcttcttcattcctccgcctcaattcattccttttaggaatatgtgggtcataaaatttgtgttaataacttcaagctgaaagaaactgatctgtgattcagacctatattataattacggtagtttaaggcataaataaatcccaatctacatgatgaaagtgcatatattcattctttctagagctaaggaatagga

SEQ ID NO: 56142 - DNA, 545 bp, Homo sapiens
tgggagaaattacgccttcytctcattttgtgcacaatgaacgtgaataaaacgtgaataaaatgatgaggttaacattctttattactataaatgccaataaacataaaaaacatgctcaacctagtcagtaatgagggaaatcacgggcagtgattcatactcgaatttgtgcaggacgtactgcaacctctgtcgtgttctttcctgctggatttgaacctgggaggatataggctgacattggtgccgccatcttgccaccaggaggggacagcttgtctgagaatggagccacactagagaaagaagaggtaagaggtggagagagagaccatggcctgacggtgtcattggagcccccgaatcaagctgtaccagtggccagtactcccctggacctttcagttatgtgagctaagtttgaatcagatgcagatcactgacaagagttctagccaatacaaatgcactgatggaggagcaaacgctcatgcatctgtcacttactgagtgtttactccacactgttctaagcactttat

SEQ ID NO: 56143 - DNA, 747 bp, Homo sapiens
ctttagacatccctggaaatgcctgtactttctcacctcagggtccctgcatttactgttccctttacctggttacctcttccttcagtcatctgcacaccttgcttccttacttccttcaaatctctgcttaaaagtcaccttatcagagagatttttcttaagtatgctaaataacagtacaccagttctccctaggcaaccttgtctcccttactgtgctctgtttttcttcacatcacctgttatatcaggtgtactgtgcatgtgtgtttgctgtctgcctctcttcctagaatgtgtgttcttgagttcagggactttgcttgctgttccgtcctagcacatggaacagtgctaggcacagagctggcamaactaaattcatgttgaataaactgttgaataaataatattcctttcttcctgccaggacccttatgaattgagagtggtccatcattaggctgtatgtaggcggtggaattggtgagaaagatcttgggattttattgtcatcttctaacttattaatatttttgcaaaagcccatctttttgaatcagagatcacttgtgccattacttctcttgtttgcgtggttcaggggatgtcagttgatggatacaattttttgaattacaagtttttgtattacaagttttaaatttacaaagaggtgttattttaatttacagtattctaggacccatgtggtacaactaggggcatggtggggtgggaggt

SEQ ID NO: 56144 - DNA, 1738 bp, Homo sapiens
ccctgcatgcttcactgtcctgaaggacttcatttacaaaacacaggttcaacgataaaattttctatatggatggagctggccctgcgtgagagggaggtttatttttcacttattccttctgtgcctttttaaatttaaaaaagtaatgtggaccagctttatgaatgtcctaggctttgagttctgtttgcaaaatgctgcttttttattcttcctgccttgttctcagacctaatctgccgactcatatctcaagaacttgtagtcaaggatcataaaggatttggcaaatgttctcttgactaagtagagcacacgattaaaaatcatttaaaggcattggattggtttttggttaaagatcaaagtggtaataaggcagatgtcttccgtctgtctctataaactgagccaggcttcatgcttttggtcctgaatggagcagtgccaaccattaacaccatgaggaaacactattcaaagtatatgcctcaacttcccctggacagttgagtatttgaggaatttatatgcttgaccctgtcaggatattcactgcagtatggttacatggaagcaaatattcactgcagtgtggttatatggaagcagaaggctagaaatgtatggacattcccaggctaaatgtccacacatcatgatggatccatactatggaactacgggatgccatgcagttctttgggcactgccataaaacaacaaaacacaaaacagtaaggcacacaaggatgtgtagagtatgctacctttcatgtaaaaggagaaaaaggcatgaatgtctacactggtgaatgcataaatcacttccgaaggaaacataagactctggttatcattggggaggaggagaacaaggcctgggaccagagggagaacgtgtacatttttccatgtttgagagtttgtatcatatgaaaagcaaaaggaaagttcagtgcaaactgggcagttgataatatcacagtgaaaatattagaccaatttgtcctctaaggaagattgaaaagggcagatttttttttttttagggatatataagaaagctgaagataagtagaatgcacttgctctaaatctgttgttcccaacctgtgagcttcagaggttgagggtggagggatggtaactgactcatggtaagcacttaatgaaagtttagtttttgaatggcttaatgaatgcttcttcttgtcttggttgggggtggatgggagaagtgattccagttgcattggtacttcctgctgcccggcacaggaagccttctctgctaagggcacctgtggacagtgactcagcacaaaaccatctgtttattggtgcaatgtatatttactcttcagaaatactgagaaaatgagggactctggagaatgatacacaaaggggtgtggaatgagtatgcttagaatcctactgaaatacccctggagaaaagcccaaagcttctgctttccctcttagttatccaaactcctgataattgatagctgaagtttaggaaaagggcagtacatattagtgaataataaaggcctrtcttctttcaatgtacccagcatagaaagactgggaaataaataatactgctatgaaaaacaaaacaaaacaacaatgctgttcattgttgttgaatggaagaaccctctagtacatattgatatgtcatgtgattattttaaagtaacattcactctttttttctggttat

SEQ ID NO: 56145 - DNA, 1380 bp, Homo sapiens
ggagcaggtgaaatcagattccgcagtaatccctggtgccttccattggaggataatcctcttgggcctggtagcagagctctgaaaggtttgaaaagcgaggaggggaggaggaaactaatctgattgagcacatctgccagttctaagagattgctggctgccagcagtgctgtgcaagggtcttagtgccaccccagtacagtgcaccttcacctcgccacctcctgctctggggagggaaagagctcgtttctgctgagtgcatgcaaccaaggctggctcagcacaagattcaggggagccggggcaactttggaaaaaataaataaataaaattcttccttttaaaaactgcacaaagaatacatgatcattggagaaaaaactggggaatacaagatcatcagagaaaaattcaaatggcctaaaatatctgtttcctgagaggactattcattcatttaacaaatatttattgggtacctactatgtgccaggcatgtgctgggaactggtggcacagcagcgaatgggttggactcagttcctattcttacaaggcttagagtcagatgccagccattcatattaatacttgatgttaagcaagtaatctaagtgtaggaagtccgtttaatatctggaggtctctaaactgagctctggaggacaccgataaggggggtgaggggaagagcattcccagcccggggaggggttggagtcccacgtggctggatcctgtgcttgaagagggagtgttggggggagtatggggggagctgccaaagccaatagagccagtcggccagagcctcaaccctgggatttccagccatgcaggaggctcttcctctytgggcagctttgacctcgcgttggcctgcctgagttgttcttgtgtgcaagacaagaaagtgtgtacttcggacacagcaccattgcaggctgagtgactgggctccggaaagggatggaatgtgtgcttgctgtaaactgcatggtgcggggctggtagtgcctctgcccttcactgtcttgtacatttccaatcactagactcctctgcatcaaagaccagagctctgtgtcaggtcgtcgttacccaccgagtgggctgctgcaaggcttgccgagaagggagcaaccctggcttgctgagacgtggttgattcattctgcagtgacgtcttttgagccgtcctcaggaatgtgttgtatctactgtggagcagcctgtggtggttacttccttatctcccctaagcagcatgagagatgggaactgggtcagaggcacttgcagctgggagcaggtgcgtgcatgtgttgtttgcccttcccttcgtgagcactgatgtgtgctttgaggtcagc

SEQ ID NO: 56146 - DNA, 812 bp, Homo sapiens
tattatgcctcctgatttatttttctcctagcatttatcattatttaacgtaccatatgttttgctaagctacttattaatttgtctgttttcctacactaaaacgtaattttcagggcaggaatttcatctattttgtttacttaaaaataaccccagcatctcaaacagggtctgacatctaagagatgctcaataaatattcattacatgaactatatacaccgactatatacaagatacagaccaccctcttttgcataatgattactagaaaatttatttcagcttcctatgtggtgtatcatggcttgttgagatgttaaatggaacaatagtagttttccagttgatttattttttgtttatgaaattttaaaatgctcctttaacatgataaattgcctcttgcagacatccatcatcattaatatgttgagtgtgtgtgtgtgtgtgtgtgtgtgtgagagagaggctcatgtcctgattcataaaaatctgtttctgtgtttttaacaaaagctattagtacctaccagtataatatgtttstattattaacatgaaggtgttggccacaaaccacttttctttgggaatcttggaatgaattcaatgaacagaaaaagcaggactaacctgatcttcattcttactggcagcatctgggatgaaaatatagaaaccaaagttaaggaaatgtaaaatatttaataaacaaaacaaataatccatttaatgcagcatcttgattgctttaatgacaatatgttgtaaaaccgcaaatggtttttgaacacattaagatttat

SEQ ID NO: 56147 - DNA, 744 bp, Homo sapiens
tgagagacattaaaatctgaataagtaaagaagtattccatgttttggggtcaaaaaaattaaatattcaatatatcaattctctcaaaacttatctataagtacaatatactcccaatcaaaaaggttgacactttttgcatgtggaaattgacatgtgattccaaagtttatgtagaaatagacaggaagatgttaaagaagaggaagawatacaagattccagcgtgttctagaaagctacagtaattaagacagtatggattcagtgcaaaggtagaaaaacatatcaacggaaaagaatagtgaaaccagaaacagctcacacataaacagtcacttggtttaggtaaaagcaccagttctcttcagtggcaaccgtatggtcttttcaataaagactgaaatagttagatatacatatgagaaaaaaaggtgaactttgactctgaacttacagcataacccaaaatttatgtgaggtggctcataccccaaatgtgaaagccaaagtcagtaagcttccagaagaaaatatgattaaataccttcatgaccttggggtaggaaaaaaatctttatagaacataaaaaagacaaatcacaaaagaaaaaatcaacaaagcaaaagtaaaaatttctgtttgtcaaaaaatattctgaaagtaaatagataagccacagcctggataaaaaacctgcaatacataaattctgacatagctaacatatttaacatattat

SEQ ID NO: 56148 - DNA, 644 bp, Homo sapiens
tgtggccgaggctccacagcatctttggtcgctgttcctgtctccaccgtgaagatggagccacgtccctcgcggcccctggctgggccccacctcccggagactcaggaagggcttggaatcggtgccagtttcgccggctgtgggccccacggcgatgatgaataacttgtttatctgctggagcttctcccacygctctctcggtgcctggcaggcagaggtctggaaggggcgggcagggacagggaggactggctcaccaggcagccgccgcccctcctccctcctccctctgccccactccccaattcagcatcaacctccacctaaacatgcttcctgcacttttctactcctcatctttccccaaatcctgttttagaagcagcaggttgaagtgtttgaaaacacagactctgaaatcagactggattcgagtcccagctttgtcacttgtcagccatgtgactttggacacgacttaaactctcagagccatcactccccctgtaaagtaaagttttttttttttttccggagacagagtctcactctgtcccccaggctggagtgcagtggcataatcacagctcactgcaacctccgcctcccgggttcaagcgatctttctgccttagcct

SEQ ID NO: 56149 - DNA, 891 bp, Homo sapiens
gtgaccagaatatgagtacaaacttatttccaaatcattaaaacacttgtatggtggagggctatgatagctcaggggttcttttcaggcaatagaaatgtttaaaaatggattgtggtgatggctacacaacatcatgaatatactaaaagacaccgaattataagtaaattatatctcaataaactgttaaaaaagaaaggatggggccaggcgtggtggctcatgcctgtaatcccagcactttgggaggctgaggcaggcagatcacgaggtcaagagatcgagaccaacctggccaacatggtgaaaccctgtctctactaaaaatacaaaaattagctgggcatggtggcacgcacctgtagtcccagctacagctacttgggaggctgaagcaggagaatcgcttgaacccgggaggcagaggttgcagtgagctgagatcatgccactgcactctagcctgggaagagggcaagactccgtctccaaaaaaaaaaaaaaaaagaaaaaaaaaagaaaagaaaaaaatgacaccagaaggagtaaatttggaagggaaaaccaagtctcctccattcatgttgaatttgaggtggatgcaaatagaacctcgctcgcaactccagccggctcccactatgaacatctataacacacagccgggccctgcatgccactccagccccactctttcctctggcttcaagtcacagtgtgccagcatccacatgggtaactcagggatgatgragctggtccctgacagggcctcacacctctcgctggtgggcactgacctatccctgactcagtgtgtctccactgcttccatttcccctctggctctggcatcctcaatcttgtcactctgatctgtgtgaacta

SEQ ID NO: 56150 - DNA, 552 bp, Homo sapiens
tgaagtactgtggtttatatctaggataaaggagaagtacaactatttataaagtgttaggccatttcaaaatgatactaaaatctaagaaaaatgacgaatatgttataaatatatgtggctcctcaatttaacaagctatgatccttggcagaatggtgacaagggcactggttatcttctagccaccaactttctatgttcaactgatactatcctaagatcctagaggacataacagccccttgataaatacttgctgaatgaatacattgttaacatatcggtaaataaaagaattttgggccgggcgtggtggctcacgcttgtaatcccagcactctggaaggccgaggtgggtggatcacgaggtcaggagatcaagaacatcctggctaacatggtgaaaccccatctctaccaaaaatacaaaaaattagccgggcatggtggtgggcgcctgtagtcccagctactcgggaggctgaggcaggagaatkgcatgaacccgggaggcggagcttgcagtgagcggagatagtgccactgcac

SEQ ID NO: 56151 - DNA, 689 bp, Homo sapiens
atcctttcgcctcagcctcccaagtagctgagactacaggcatgcactaccacacctggctatttttcaaaagtttttgtaaagacagggtctcactatgttacccaggctgatctcaaactccaggcctcaagcgatcctcctgccttgacctccctaaattctgggattacaggcatgagccaccrtgcctggccatagagtcctttcctagtgatgagactgaggcatctctgtctaggcatctagtgactctatgctgtttctcaacattggttcaatgggcaagtcctataggtatcccaggccaaattgagtggagactcaactgggatcttgcctcaactatatttttttgaaaccaactaggctaaggtcttgtggttccagagcagttctctgaagtctcatgtgaaagtttgtcccttactttagtgtttgagctcagtggttgggttgggtaactttggcccagtgaaatcctttttggatttttttttttttgacagagtctcactctgttgccaggctggagtgcagtggcacaatctcagctcactgcaacctctgcctcttgggttcaagtgattctcatgcctcagcctcccaagtagctgggactacaggcatgcaccaccatgcccggctaatttttgtatttttagcagagatggggtttcaccatgttg

SEQ ID NO: 56152 - DNA, 614 bp, Homo sapiens
ttccccagcccagcctccagatgagaycccagccctggctgctgccttgactgcagcagatgaagatcctggacagaggacccagagaagctgtgcctggactcctgacccacaggagctgtgagaaaatgaacatgtgttgttgtaagctgctaagtatgtgatcatctgtcatgctgcactggataactgacatgaggggcatggtgtgtgaacgcatgtgtggatgtaaaggaggggttggctggagagggtgtgggaggaggacagttgcctgcagagctgtgtggggtctacacagccatgtacctcctttggagggtatcgagtacaagtaatttggttgccagtaagagaaacaaacccaaagaggaacgtttgtgccaaaaacaagcactttattgtgagcatacaaaggcaagaaatgcagaatggcttcaggcacacaaaccgggagctgggagggttttaaaaaccaagccctgcactctctccctcttatcttttgtccctgcctctccgcacatctgctgacttctccctctgcaggcaggttttctctactccacagaatccacggtggtggcagggcacccacagctccgtgccgggag

SEQ ID NO: 56153 - DNA, 3286 bp, Homo sapiens
agattcaacataaactaactatattctctatttcaggctcttttccttgtctgtgtgcttcccatgagaattataaattacaaacgtagtttttgagacaattttggcagagctcaccgataaacctaggaaaatctcctgaaatgtaatcagagactcccattctgaaatataaccgatagaagctgaaaacgatctgattgttttatgtaaatgcaaattgtgtgacactggcactttgttatgattggtaaagaattctggacatgcttgtattcattcccaggatactgagagcctattctgtgcctggctatgcaaagcatggtattacaaacatgtatgatatagatcaagcccccacctcatggagcttagtctggtgagggaaatgaacattaagcaaataatcacaaagtaaatacacaatttcaaattgtaaaaaatgctacaaaagaaaaaaattacttaacagaggaaatcataatgtcagaaaggcaaaggatcatggaacctttgaaactgatgggggtcattgtgattggaggatgtggacccaggagaagagaggaaagagatgcaaaaggagaactcggtagccaacgtcctgtcaaaacgagggttcaatagatatggaaacagcattaggtgcaaggccatggcacccccagccactgaccctgagattgattgggtacttcttcctgagagaaactcaaaggagatacaagaatgaaaacaaatttagggaaggaacactttagtaattaacaagacacagtcagggaactattttgctcagggaaattaaattctgctgacttagaacttaagcagatgaaaaagactctctgtgtatgtttacccttaaaggacaagtttttaattttgcagattttgccaatgcaataaaagaaaaaaaaatacagtaaaaccagagagaagaaaacagaaatggagtagagaacattaatctactttgaggaggatgacatccaagcgtgggaagggttctaatctgcttctttaaaaatcagccttcttcctttatccccatatgtttctgtgaactcaatctgcaagcagccaggaaagaagagatcaaatgtatgagcggggcaagggaagtacctgttttcatgtgtattaccccatttgtatgatttgctccacagttttgagaacgtcttaaaatatctgaaaaatgcattgaatagtaattgtgagaagacacagtaggtgaattggacaattattctcatgattagcaacaaatactaagaaggaggaaaacaattatctagacatgaagctgtcccctgtagaataatttacaatgtccttctgcacattttgtcacttctgtttgtttgagtctataatgtgcttatgaaagtgttgtctgtcttggcacacacatcagaggagtccaggtagaacctagaaatgtagttacccaaattaggtgatggtcagcttaaaaatcactttaaatggcatgcttatacagtgactaagttgatgtttgtgtgtggccttattcatctgttaccatatttacccagtgtgattttgggggaaaaatgaatgccctcctagtcagtcatactcctcttcatcaatattagttctgattacttcaactgaatttcttaatgatttgatgtttaatgtttaaagcctaattgtttatcagctattgaaaataatacatggctactaattaagatgctttaaaatataccagtgatttttatttctttaaaacaataacttaaaacaatagctattaaactctagataactaaaattggaaattattacccaacagaaactccacacctgatctccaactgacaggagtagggctttatcagaatatctgagagggagagacagagattctgctccctccatctcgttagcccctgctgagccagaacatgtgatctgaagcagaaatggaaggaaaagcagtttttgcaatgctatagagacagagtgccctatccctaccagcctgtaagttggaagttccatggtgtcacaaaaactaattaatactaaagttagtacttactcttcctttcttattttcccaggaggattactgtgaataggcttgcctcctaggccactcagaatttgtatgttgacaaaatatgtctcctttggacatgtaaggagatataaaatgtatgcaaagtcacatcatattatttgactgggcattccattttgtcagtttatattttatactttattattttaggggcaaacatctataaaaacagggttctgtattgtcactcgggtttggttcatgctcagagttttcttaacagcattcctgttgttgtataactttaaaattagatgagaacaaaaatttcactctgaagccggaacaacatggaacctggattttgggttaaattgcttaaaagaataatccccactttctttcttttttctgatgactatgttttggggctactcctaagtcttgtcctctgaggccaccaagccatgcatatctaatccaataaaattagaacgtgagattctccaaagattccaagtgtcttaaggcactgaaaatacagacatgatgttttcatataattctacacagttattattacaaagtgatttattttaactttagattagggaaaagaaaatttgtatgtaatttagttttaaaataatatatgttaaaaataatttaaatartaaattaaattgaatccttaaaagaataattgcagatttggaagaaaaaagctttatccaagactgtggatactttaaggagtctgttagcttactttccctttactttcaatttgcaattgttggaaactatactggatatccaccactaaaacacaatcagctcttgcttagattaaaaatttctaaggcctttagctttgatttcagttttgcaatatgctgtaactgccaggacagtgacccctggtgaagacaaaggtttgagtatcagatcgcttgatatgattaagcacattcctgtttcattccacagataccaatattaagtcagacgtgaaactcccttttgatgcctatcactatgctctgactcgctgcacaacttaacctcttggtgactccagttccttgtttgcaagtggagatgaacaggtctgctgtgaggattgaatagaataatacatgtaaaagatgcgttatttgcttgatacccagcctggtacacatgaaggattactaaatagtttacatgaacattattactacc

SEQ ID NO: 56154 - DNA, 816 bp, Homo sapiens
ctggagcccaggagactgaggctccagtgagctgtgtttgtgccactgtactcctgcctgggtgagagtgagactctgtctcaaaaaaaaaaaaacataaataaataaaaagctcatgctctcgtcctaatacaattattgttgcatcatgggatctaccaatcaaaatggagatttagcatgggagcaggtttctggaggacctcagttacgccagttgatacccttttaaatgccggattgttgggatattatttatttctgtgtacataatattataaagtatgtgcaatattacaaatgtataataaatatgtctacataagaaactatccctaaacccagaggcttaaaacaataaccatctagttagctcataaatctgagaatcagaaatttatgctaggttcagctggttctcctgatcttagctgggcttactcctatatctttggtcagctgccagttcagtctggtctgaggcagcctcagttgggatggttcatctctgttccacttggtttctcatkccccagcagggtatcatgggcttgttcttacgattgtggagtgtgttttctagagagagcacaaggcttgtttaggattaggcttattatttgaataactaattttatatgcattctattcaccaagttatgtctcaaggtcagaccatattcaggggctgaacaaagacactctgcctcttgatagaaaaaaaaacacaagtcatattgcaaagggatgtggagatagagaaggaagtgatgtgatcatttttgcaaactgtaatggggaggttggtgaggggag

SEQ ID NO: 56155 - DNA, 956 bp, Homo sapiens
tcaagaatttagatgaaaacgatgcttcgtgaataacaattgtgcctttagaaaggttaaatgggaccttctcctgggttagaggtagaaggccaaatggtatgggtgagtttttgtttaactctctacttctcattaaagrcatggtgttgtgtcaaattaagacatgatgatttgacctcttgaattcctgagaacatgttcagctggggagaaaccccttgggtctcagtcagcccttgagtcactgtgcatctgtttgccctgggatctcccctaagttgctgctcttattggcagccattcctctggctttggaaaaactctgtcctttctgtgatggtgcatcactttcccaggacttgtgcctattcagcagacacagggaagtccctggaagaacagttgaagggccagactcacaagtcttcctcagcccccacccaagggtcatggggaaaaaaaaagattgatgtgcttatagtcagcaaattttaatgagaccattcaataggagatatttctgtttgtataacataagatcagtagcattcatgatatcagaaaagcaggctaatctaatttcttatatttcaggtggaatgatatgaaagataatttctctcaaatgtttactctgtaagattgcatttctagaaagatcgtgtcttggggaggaaaacagaggagactgttccccttataaaaaggatgttggatccctttactttctccctcaaacctctgataattgacaagtgacagacaggcattactttgaagagcaggaatgtgtaacttctttgacttgtcacttgctgtaagtagcatcattttctagcaatgttctctgggctttattgaattttgtcattgaacaaataaaattaatattatttgttctacatggatcaaattatagaatgtatatgaaaataacaaaccctaatctctat

SEQ ID NO: 56156 - DNA, 543 bp, Homo sapiens
ttggtgagaaggagtcagatgttcagtaaatccctcagtaaatgaggacactgaattagagaaattaaatgccctgttcaaggttacctagctattgaatggcagactctgtgtttagatgagacaagctggatcttatctactagtctctgtcgttgcttacactacaaacttcagaaaacagcaaggcttcgggagagctcctgctcatagctaaccatttagtttgacacttggttctcagaaaaatatggttaatatctacatggccagattttttaactactgaataagatatatgtagcatctgtcacctagwcagagagggttccttaataaaatgtaggtacctagcgatcaactactttgtgtagctataacctaagttttaataaatatatattaaaataacttattatatagaagtttcatttcagctttcttttgctggaagcataactgagaatattaaggaatatataccagtttctgcctgagaaatattttaagagaaagaaaagagggactggggaatgataaaaa

SEQ ID NO: 56157 - DNA, 530 bp, Homo sapiens
attcatttatttatttttttgagacggagtctcactctgtcgcccaggctggagtgcagtggcgcaatctgggctcactgcaagctctgcctcccgggttcatgccattctcctgcctcagcctcccaagtagctgggactacaggcacccaccaccacgcccggctaaatttgtatgtgtgtgtgtgtgtgtgtgtgtgtgtgtgtgtgtgtgtctttagtagagayggggtttcactgtgttaggcaagatgatcttgatctcctgaccttgtgatatgcctgccttggcctcccaaagtgctgggattacaggcgtgagccaccgcgcccggcctaaatcaaaagacattttattgaacatcagggcatggtgaggttagtaaaaataaacaataatcaatctccattttctggaagcccgaaatttaggtgaaagcaaggtagataaacgaggtatctgggagaatttcataagctttattttaaaaataaaggcacaaagtgcttttgggaggcagttaagttga

SEQ ID NO: 56158 - DNA, 992 bp, Homo sapiens
tgcatgaaaatttacatactttggagggcctggctccctggaactttgccatttttaagatccctcctacagtggcatttatccacccaggcagctctctaccctgacaccaacctacacacacctaaatacctctggctctaagtgacaacttttggaataggcatgaatcatccaagcccttaagggatcatttactaatccatatttttccccaacttcagaattacctgggcctttgggtttgtgcctggccattccaaaggcttctcagaggcatgttactgatggaaaattacagaacctaatggtctattaacagttaagaagggaactgccatcgttgtgaatcagaggtctggaagtaaaagagaaaaagcactctctcttaatttttccccagctatttgttttcaaaacagaaatagctaccscttttctcattatggaaaataaacctttttgttagaaaaattaagaaaaaaaacagggaaaaatccataataacttttttttggtacacataacctttcagtatgtatagctctttaaaatttttttatgcagttaaattgtgtatatataaataaaaatttttaatggcaacagactgctatttccattttatggtcttcaaaaaatttgatggcattttatgagcctttttacatgtcagtaaaaatagattgcaatagtttgaattgcaacatttaaactactttgcaggaatatgccatcatttattgaagaagtctcttattgattgttggcatttagttggtttttttggaacgaatgtcccgaaacattcatcttttgaattgtctatttccttaggatatattcctagaagtggaccacctggttaaaatatgctattttaggggattttgacatgttaccaaattgtcctcagaaagggatataccaatttatcccccatcaatggtgaatgcacgtgggaggcttcctttttaattcagctttcatca

SEQ ID NO: 56159 - DNA, 768 bp, Homo sapiens
gcattcaatatttgaaatgctttaaacaaactgcttcatgtttggatatattgagttatttttgtttctgccattaaatgttttactctccggttattcttcagggaggattgtgctcatcagtgttctcgtgacttttgtttgcctctctctgcattaaacacccaaacrtcagtgagatcctttagaatctggcaaaacttcagagaactctgaggaaatgaaactgcctgtccactcagtttcattgatttttctgagtaaccttaaaggcatatcttactacttaagaagtagagattcagtaaaatgttgtttctgctccaaggataaaaattgagaacatttaacttgtattatatacttggaatcataaagacaaattgaaatagttgatgtctgcccagatagaatgtgctagctttctctggcttaaccatctctgaaaacacattgacataaatttccatctttctcaccacgcaagttgttagtacacctgttcttttgaaaccacaattctgtttgttcctgtgtgttgatggtattttcacttttctcctgctgcccttgaacttgccagactctccagcacttgtgtggtacttttctcattcattacttctctagtggcattactgaaggataaacagctgtctagtcaaaattatctggccacgttcagtgggttttaggtctgaaaggggagccaaataatgtgtgagtaaactgtaacactccctaagagtgccaaaaaaattagtttgc

SEQ ID NO: 56160 - DNA, 654 bp, Homo sapiens
tgatttgttcaaggtcagcttggtaattataaagcagacttcctggatcacagatgattactctttccatcccactctgctgcctccaccaaactggattaaaaaggcttgttttaggaacagaatactcactgtggttgtttatgaagaaaatccttagactctgagcaagtgtatatctagcgaaagaatttgcaatcttgaataatattccttactttcttgtgaatttagcgacagagaaatctcatttgggtttgcactataaataactttaatttttctctcttcatcttttcccagttgtctaacttgatttaatacagctcaaatggccgggcgcrgtggcttaagcctgtaatcccagcactttgggaggctgaggcagggggatcacctgaggtcacgagttccaagaccagcctggccaacacggctctctaccaaaaatacaaaaattagctgggcatggtggtgggtgcctgtaatcccaggtgcttgggaggctgagacaggagaatcacttgaacctgggaggtggaggttgcagtgagccaagattgtgccattgcagtccagactgggtgacaagagcaaaactccctctaaaaaataaattaataataatacagctcaaagaccctgtgtctttgg

SEQ ID NO: 56161 - DNA, 654 bp, Homo sapiens
tgatttgttcaaggtcagcttggtaattataaagcagacttcctggatcacagatgattactctttccatcccactctgctgcctccaccaaactggattaaaaaggcttgttttaggaacagaatactcactgtggttgtttatgaagaaaatccttagactctgagcaagtgtatatctagcgaaagaatttgcaatcttgaataatattccttactttcttgtgaatttagcgacagagaaatctcatttgggtttgcactataaataactttaatttttctctcttcatcttttcccagttgtctaacttgatttaatacagctcaaatggccgggcgcggtggcttaagcctgtaatcccagcactttgggaggctgaggcagggggatcacctgaggtcacgagttccaagaccagcctggccaacacggctctctaccaaaaatacaaaaattagctrggcatggtggtgggtgcctgtaatcccaggtgcttgggaggctgagacaggagaatcacttgaacctgggaggtggaggttgcagtgagccaagattgtgccattgcagtccagactgggtgacaagagcaaaactccctctaaaaaataaattaataataatacagctcaaagaccctgtgtctttgg

SEQ ID NO: 56162 - DNA, 496 bp, Homo sapiens
gctccgtcatgccctggctcggctctgacatcactggtgttggccatatcgcggattttctgtttccccctctgtaaactggggatgccaatgccagcccccactcccggatgaggtacctggtgtacagatggctcggccactctgctgaccgtgcccccgacatcattgttccccggggttttccctctaagctccaagaggttagttaattctctgccagtgtgcagagactcccacagctgcccccaaaccttgaggtctccccccatatcctcctgccttataggcaaggcctgtttcctgagccaagggaaggcgggtgtctttcctgggaaccccctccgcacgatcacagactagagagtccaaaccacagatcatgttttctttccaaaaawaggagccccactgaggcagaaacttcattcttttaataagatgatggtatgtttaaggaaaataaatatttcttttaaaaaagaaaaggcgattt

SEQ ID NO: 56163 - DNA, 1171 bp, Homo sapiens
tacctactaatgtaaatttgagggtgatcttgctgtgtgacccacattctgcagattactcacatcagtatatttaatgacagtggttttgcctcatgctctgtggaaaaacatagatacagtcagtgtagaatgactttattttctcaccagcacatcttccaaccttaytgtatttgtgcctatatgatctgtcatcattccattgtaattatcaaaggcccaccactccacttgtactctagaccccatccccttgtgccttctcaggaacgttgttctgaaattgtcctctcatttttatataatctgtttcttcttttctctcggtccttcttgctggcatgcaaacataccctgataacatccatttaaaaagcttctctccaaatgctctgccatttctctgctcccactgcactacaaactccatttcttgatgaaccatccagtcatatttctgtccccatgaatccactgaaactgcttttgtaaaggttatcagtgacctccatgttgtcaaatccagtcatcacttctctgttgtcatttattgtgcttctcatcattcagcacaggtgaccacagtcttcctaaatacactgctctctcatcttccacaccaccatgctatcatgcttgtccttgtctccatgtcctctcctttttaatctttgcttgctcctttcctttgctctccagatcaacaatcatctgtgtttgtggagctgttgccagcttaacatagaccttgtatttattcttctttcttcatggcttacttctgtttttccctcactcttgattgcgtgggatcctatccactcaataaagatttagccagtaagctttggcctcaggctctgttttccaggtaacccaaattatcctggatttctttctttttttcactcataccaagtccaagttgagccaactgtacattttcagtgtgttgtaaatcttttttcctctttctgttttcacttctatccttatctagggttatctcatacctaaattactttggttgtctcatatctagccttcctgtgtacatttttgtacccttactgtctattcttctgggtctgactgatcttttaaaaatgtaaatcaataattcatgtctcactgttgtataaaaactctgtggattcttcatcacaca

SEQ ID NO: 56164 - DNA, 404 bp, Homo sapiens
tttctctataaaagatatgatcacagagttctattagtagtgagccaccctaatgtgtggtaacacctagaagaagaataaatcgatgagaatgaagataagacaaaaactcaatttctgttctttttattttaattttttgatacattatgtgatcctggatgttagaagctttgcctaatgrctaggatatgagttaacatggttaccttttttaaaagtctattatcaggtaacaatattaaaaattaaaataactcccatgctaatctgattcccacagttgagatgataaaacagtcacatagtatgctaaacacatgttttccagcaagtaagcagcacagaatgagagaaaaattggagggaaattttagggaacaggctggtgcatcagaaaaaaa

SEQ ID NO: 56165 - DNA, 970 bp, Homo sapiens
gaaacagtccccatttccattcaaactytccagtcaggagatcaaaacttcagaggtggagatgaaggcttaaatataaaattgccaagagcatcctgccttagggatggctcagaatactccagtcattactgtcagcccttgatgtcagatgagccctcatgggtccttgtggattaatgagatttaccactgccttctgtaaatctagcattgagaacagatcctgtggagtctggaataagaggaaagtgcacataaaaaagtgccccccagggtaggccatctcaggacacacactcagatcactaagttcttcccagcattccacagccagctctggccccactcaggaccccaaagattcttctaccattcctagtcctttgtaatttagtcctttctctaaacccaaagggagggattcagtaaatgtttgcaatcaatatggaccatggaacaacagactttactgagatgcagtttggtaaaggttctgtgtatgatggttttgctcaatctagacaatagaatctcttttactaaagtaacctttcattttctgattacaagagtaatacatgttcattatggtttcttaaatgatacagaaaaatatataaggaagaaaatacccattgctatggactgaattgtgtcccatcaaaattcgtatgttgaagccctaacctccaatgtgactgtatttggagatggggcctttaaagagctaattaaggttaaatgaaatcataagcatgggaccctaatccaataggactggtgtccttgcaagcagaaagcccagatatctctctctccatgcacatacagaggaaagcccatgtgaggacacagtgagaaggcagcttctagcctctagaactgcaagaaaataaattaatagatttccgttgtttaaaccactcagtttgtgatatttccttatggcagtctgagcagactaatg

SEQ ID NO: 56166 - DNA, 739 bp, Homo sapiens
tttccaaattccaggatgttttttggcattatgcagctaaaatgcctacctagatgtttttgtagagaacccgtcatcctattgtttgaagtcaggtaggtatggtctatgtcaactatgaaaataagcactggaggggccagaactttgtccaaagctcataagtgatcattgtgtgctcaaaggaatcaggcgatgtgcttaacggaaatcagatgccatgccttagagacatgaattagactctcttcatctccaaaacatgggagtttatgtttggagaaagcacaaactactgttacccaaaatagtagtgttttcttgaattagattccattaaaaggcaaatatatgatgacatgtattamctttttctagcacagccttcccctctttctgtctctccatcatcagatttcactatttttgcttcgttcagtcttccagatttggacaactaaacatggtctgtttcttcaaggcccaactctagaccctttcaaagaacgttaagtggattatcttatccatattattatattacctcttcagttaaggtggctgtagttttactgatgatcctttctatgtcagcttccagggaggttaagttgtagaactcaaaaaatacaaaatttatagtcaaaatatttgggtagatttctgatttttctacctcaccctaggattcaaccttttatttagtgttctcatctataaagcagaaacacttataatt

SEQ ID NO: 56167 - DNA, 739 bp, Homo sapiens
tttccaaattccaggatgttttttggcattatgcagctaaaatgcctacctagatgtttttgtagagaacccgtcatcctattgtttgaagtcaggtaggtatggtctatgtcaactatgaaaataagcactggaggggccagaactttgtccaaagctcataagtgatcattgtgtgctcaaaggaatcaggcgatgtgcttaacggaaatcagatgccatgccttagagacatgaattagactctcttcatctccaaaacatgggagtttatgtttggagaaagcacaaactactgttacccaaaatagtagtgttttcttgaattagattccattaaaaggcaaatatatgatgacatgtattacctttttctagcacagccttcccctctttctgtctctccatcatcagatttcactatttttgcttcgttcagtcttccagatttggacaactaaacatggtctgtttcytcaaggcccaactctagaccctttcaaagaacgttaagtggattatcttatccatattattatattacctcttcagttaaggtggctgtagttttactgatgatcctttctatgtcagcttccagggaggttaagttgtagaactcaaaaaatacaaaatttatagtcaaaatatttgggtagatttctgatttttctacctcaccctaggattcaaccttttatttagtgttctcatctataaagcagaaacacttataatt

SEQ ID NO: 56168 - DNA, 1331 bp, Homo sapiens
agtcaatccaactagtgctgtgcagctggaagtgcccttcaagaaaggagaccctgctttgagcagccattggacacaagctgtctgagaagggggtataaacttgagtgaggcagctttctttggctgagttcaattctgaaagaagggcacagctctcagccattcacagccaacattccctatagttagaagaataagttgttcttgaggtggagatctggttggtccatcacagcatccactacaaaacctaactcttgccccctgttawccagtatgtcccaatatgagggctgcataactactcttagcccagcctgtcttaaggcatgaaaattattgtgcaactgttgacaaaaaatgctcacaataatttttgtgtgcaagtttttgagtacttgacctgtctgtcagtaactagagtctcttactgtttcaggtagagattctgctccagccctagttcccaggcaccctacccctctccgatcaaaaggaaaagcaagaactctacaataggtgtgccgcaccaagagttgtttccacacccatagctttcacgtagaggcacatgtccatagatcttagtcaaaaagagtggagatattcaacactgccctccctataattagagaaaatgtatcactacttcttggtggatcccatgtcttattaaagtgaaaatctttgaccctttatgtaatcttaaaccacatttgcaagatgatcaaaattttattgcatcatcttataagttgtatatgaaaagcctcagctcaaattatttccctctcttccaactgtcacaataataatcagtcaatgaaaacatgtaagacaataggcttctaaggctggtgttaatggtgattttgattttaggacctgagatataaacacataatgaatgactactatattaactactttccatgtattctttttcttttaatccaggcatcatctctatcagttgacacaatgataccccaatttcacacatgatgatactgagatgtagagatgaggtggtttgcccaaatgcatgcagctggtaagtggcagagctgtggctggaaaccaggtagaacttaccttctacagtaccctgatgaccaccaaccaatccctattttgcgtggtgctaaaaagcagtacatgagtaaatatcctgagatctagaaaatagaatgttattaaacttaaaaataaggaaataaactaaagttttttgttaaagtgtgtagcattagtattcaaagatcatttagacatcagccactgcatttccagcagaatttgctatcatgggtaactgttttcaatgc

SEQ ID NO: 56169 - DNA, 779 bp, Homo sapiens
tttccatgtcacatgctagtgtttcaccattgcctctttctcagctcacagctatggtctctggggctttcttttcagtggccaatggaagaggcaagagcctgaggtgggttcatgaatcagtcatgttggtatgtgggtataagctaataacgcactgccgctctactacagtcacatagaaagtgacagtggtgagagataactcttcaaatgggcagctcttcagtgagtgatctgttttagttcctttgttggaatgggacgtggactaggattaagatatctctagacccgtaggcaatggtgaatggcttagctggttgaatatacataaactcatggacagtggtaaatggtttagttggttggtgaggagcttggaaggaaccagactggaaggtcaacaataaggatgtctgaggaagaggcatggggtttgacctatagaagtaagcrcaaagtatgagtaacttagtgtaacaaaatgtaagtaactttgtacagaagaggtgctaaaaaaaaaatgaaaagtgggcaagatagagatcagtttgcctctgttctcagccatctcagggattgtgcaatgggcttttgaatggagtggacctagtggcagagagtgaggctgaggttctctctctctcatgaaggctgatcaaattacttctgttactaatatccagcctattgccaccaagaccaatggcgattccctactaagacatcatttctcaaggaggccaagcaactacttgggggcaagtttttacttt

SEQ ID NO: 56170 - DNA, 640 bp, Homo sapiens
tcccctttcctccagcacagtcagattcccatgactcatagtacgaggctactgaaaaaccacttcaactctaccccaagacagggcaggatttggggagacgtattgagatctaaaatagtctttcagttgaatctctatgaattaaatgggccacagatagaatgttgagaattgttttgactaccaaggtttgggtaatggtctccctcctatcagtatttcattatgaaaaaaattagaagtttcaaacatacagcaaagctgaaagaattttacagtgaacatccaccatctagattatattacttttaatggcaaaaactgaaattacttttgcaccaaaccatagcattatcatttactgaacatgctttttcatatatgtgcatatatctgcccatccattcctcaagcttatgattttttaaataacatcctacattcatccaatcattaatttatttacttagcaaacatacttaccatgtgctaggcaccaagactatgaacgcaatrcaacaggttccctgttctcaaaggtttagtaggattggcaacatacaaataattttgacaatatgagcagtactgttccaggcgtggcaagaagtgaccatgagtgcacagaggagcaggt

SEQ ID NO: 56171 - DNA, 1150 bp, Homo sapiens
catggggtgggggttattctttcttactctatgtcttgatgtttatttcatccagagttcaaacttggtggccagtgtcacttggttagcagcagtgatttgtgagcccacagtattccctgtaacctccatcaaccatgagaaactggctccctcattccacttattagcaaaaaagcatgaactacccactgctgtcataacatgagccctcatcaacacctgaatagtttagattttaccaaaaattcaagacctttatatatcttcaacaagaaaatgaagaaaagttataacttgcatcatgttataccctaaagtggaatctaggctaacagaaataatggctgaacccctcaataaaactgtcatgtaatgaagacactcaatagccccgtggggaagcccacatggagagaggcccacatggagaggaaggaacttaccagctcttgccagccccaccttgccggccatgtgagtaagccactttggcagcagatcctacagcttcagtcaagccttcagatgagacctcagatattgtggagcaaagacaagcaacccaaatgtcccttctctgaattcctgacccacagacactataagataataagtgatcattgttgtcttaagcaactaaggtttaaagtaatttgttaacatcataattaccacatacatattaccacatacatctatgtgaaaacaactcttttttaagaaaaaaatgatgagattccagatagtggttacctccatcgaggaggcaaaaggataagatgacacaagtaattattaagtaattggaaaagatctatttttggtatgttcactaagatagatagacagacagacagacagatagactgaccaacctttcatgttccactgatgatagtgtgtctagagccaagggttgtatttaatgtaattggattgtgttaatccaattctaagcacatgacgtcaaataaatagggagttagttattacctggtaaaatttgaacatgtccccactctttacccagcatatctactcytaagtgtaaaccttagagaagttcttgcaccagaagacaggtacactattacagaagtattttgttggagtaaaaaactggaaatacaccaaatatccagcaatt

SEQ ID NO: 56172 - DNA, 1525 bp, Homo sapiens
ggtcaggccccctctctcctgggtccctctgagcctcaaagaccttccttccaccttctggataaggagttgtgtcctcaccactttgtccctcatagacaactttgtgccatctccctctcaggcccacaggttggggacttaggatgacttagaatgaaagtcagcttagactccctgcctggccaggctgaggaggggacaaccagctacaagtagaaaaatgaccctttgattaaaatatagttaacctgtactgttttaagacaaatctggcattttacgaaaagactttgtccactcttgccagcttaaccaatgtaatgttttggattatgtaattttgagttcagctattacagggaggacttggagccctcaccattgttcctattaaaactcagttgactttacaaaatagtcactatctcagtcctttgttcctgggatgacattactattttttttccccataatcgagggcagcaaagtctttgcggtgaactgtttgttcccagagttgtgccccggtacaaggtttcatttctttaagtaacactatttatacaaagaacacatcaaagttaaaatattttaaatagaataacaccaaaacatttggttgcactctgaaggatagcttaaatgcatttgagcactttggatttccaaaaactttatattttagatggacatgttttccaagatatatcctccaagcaggtctgggaaatgagcaaagatatgacctattatttttttaatgatgctcctcttttgtggtttgcaagtatttcactattaaagttaataaatgagggtcatttgcatatctgacattctgccaagccttttaaaggatgaagacagagatgcgccagtaagtcttaatttagggaacgaatccaaacccagacccctcttcttttccctcagctcagtgaattcctggaaaatggaggcagctgtgggcatttcagctcatcaccaggagtttcttgtctgggctgggtgagaggcctctgcagaagaattaaggacaggctcagtgaggctgcccagcatcctctgcagaggagtatggckcctaatgcccccaggtgcctcgcatcgataaattgaggctggctctaagaatgaactcatttagtcggaacatgcaggcctatttgccctgtggtttgaaaaatacaatgttgccctttcctggcttccagaattcatatccatgtaaatttttcagcaaaaattttgttgtttcttctatttttcatgactatgaaggaaaaaaaagccttcagcttaataagagttgcctatggcctgaacttggggtttaaataatatttccacattagcaacaaaatgtgaaggagatttcccatcaaaggaaggaattttcaaaagccacatgccaggaagactttaaaaaataataataataatagactttattttttagagcagttttaggttcacagcaaaattgaaaggaaggcagagagttcccatatactccctaccc

SEQ ID NO: 56173 - DNA, 1261 bp, Homo sapiens
tgcattattattttggacaaactgccaacttttgttttagttttttagtcactaaagcacaatgattttttagaataatttttaatgtcttctgtttagtctttacatttacaaagcaattctatacctttctaatttaatactgataaaaaccaagcaaagtaaatattagccctattttaaaatagcaaatatttggtatacatttactgtgttccaggtactgtactaaatgctctgtgaggcatgtcccatttaattcttctgacgaacctgcaaagtacgtactatttcatcatctgaggctagaaaagaaaagttaaataactctcttaagatgacccagaagtaaagagcaaagccaggacttgaatccacatgagtctgacttcaaagcccactcctaactcttaaccactgtattctgctattgaaggataatgagataatgctctttcccagtatggcaatgtatttggtttgaactcagcctaattaattacagtcatgtaaacaactgttgtgaaattatacagaaacattaaactttttgatctctatttctatattatgttcctagaattgctagagacagatgcacatcttaatgtacattttcctctctaaggttatgagaatctggacaagaccaataattgttgaataaagtttccaaatacctaaagtacttggtaatagactaagaatctgtttcttgtttatctgtaatcagtttaatagttgcaggtaagaaaatttaagcacaattttagtgaagcctagccaccaaacttttgaccagttcaataatgcaaggacaaacctgttcataaaaatgaatttttaatttcatgagcataaaaaaaaaacccaaacctgtcccatacccctcccactcatgcaaacagctctcaaatgagattcttcaaattttacgttttttccattctggctcattctttgcttcctcatcatcagattcaacttgggcaaacatggttttgggctgagtcctaaaagaaaagttaaagaagagaaggaaaaatttagtcagaaagtatttgttacattagattttgcttccttcatcaagtgggagcaaacgtggggaataaattacaactcaattattaaatataartcattaaacttctggcaaagaaaaagataatggaaatttaattacgttcaggaaaagagcaaaagattcttttaaagatttaccctctgtggcagactgtacatacacactgttctttcc

SEQ ID NO: 56174 - DNA, 1261 bp, Homo sapiens
tgcattattattttggacaaactgccaacttttgttttagttttttagtcactaaagcacaatgattttttagaataatttttaatgtcttctgtttagtctttacatttacaaagcaattctatacctttctaatttaatactgataaaaaccaagcaaagtaaatattagccctattttaaaatagcaaatatttggtatacatttactgtgttccaggtactgtactaaatgctctgtgaggcatgtcccatttaattcttctgacgaacctgcaaagtacgtactatttcatcatctgaggctagaaaagaaaagttaaataactctcttaagatgacccagaagtaaagagcaaagccaggacttgaatccacatgagtctgacttcaaagcccactcctaactcttaaccactgtattctgctattgaaggataatgagataatgctctttcccagtatggcaatgtatttggtttgaactcagcctaattaattacagtcatgtaaacaactgttgtgaaattatacagaaacattaaactttttgatctctatttctatattatgttcctagaattgctagagacagatgcacatcttaatgtacattttcctctctaaggttatgagaatctggacaagaccaataattgttgaataaagtttccaaatacctaaagtacttggtaatagactaagaatctgtttcttgtttatctgtaatcagtttaatagttgcaggtaagaaaatttaagcacaattttagtgaagcctagccaccaaacttttgaccagttcaataatgcaaggacaaacctgttcataaaaatgaatttttaatttcatgagcataaaaaaaaaacccaaacctgtcccatacccctcccactcatgcaaacagctctcaaatgagattcttcaaattttacgttttttccattctggctcattctttgcttcctcatcatcagattcaacttgggcaaacatggttttgggctgagtcctaaaagaaaagttaaagaagagaaggaaaaatttagtcagaaagtatttgttacattagattttgcttccttcatcaagtgggagcaaacgtggggaataaattacaactcaattattaaatataagtcattaaacttctggcaaagaaaaagataatggaaatttaattaygttcaggaaaagagcaaaagattcttttaaagatttaccctctgtggcagactgtacatacacactgttctttcc

SEQ ID NO: 56175 - DNA, 1428 bp, Homo sapiens
cctcaataataaagatccaagtatggtcatggaatttaccagaaagggtaacacgtttgatcaagcttttcaaccaaatggttgaaacaggaaaggtttctctttcaagtatcaattaccagtgaaaaccccacactctagtaggagctcagttctgcaaggttaaattgttcattggcttcaggaggcctgagggactgcctaatcacaagtttctctctggaagtcacatcagaaagttcccacttgttatgtctcctacagtctggagggacagaatacacaccccaaaaggagaccctttatggcattaaaaatgaagtgccagcctcaatcatgagccccagttcatggacttaatagaatcccttacagtactctgccaccagaggaaacatcctcttcaattttcttataggttttcaagggctaaaaatcacacatttaaacagtgtattgtgtgtgtgtgtgtgtgtgtgtgtgtgtgtgtatgtgtatgcagacacacacagcaaaagtgggtatgaggattataagccatgacccacacctggctctgcctgtcaggtcaaggatactcccaacttgcccaagtcagttcatctwtgccagggaaaaaaactaacaacaagaatgaaacccagccaacttacaagtatcagtaccaatcatcaagaagatgcaaataaatcaaatggcacgtctctacaacgtttctttttatctgactttaaaatgaataatataggttgacatgggctcagattttttttgttcttccctctcacagttaatcaatttttagcattttggggggtgggggggtaaattacaattactatataattgcatttcataagcatagatcaactgatgatagctgaattatacgtgataagaaaaagaagccattctcaggtgaaaaacatgttggataaaaagagtggataatgatagataattgggagttggcttctgtctccatattgcatgtgtgaatgtatatatacatataaacatgtttatgtagtaaaggaactccaatattatgtgtgtgtgtctaggtataacattcacgtgttaatatgagagtggtctgtaatatctatgtacaaggaggttatgttagtctgtttgtgttgctacataaatatctgaagctgggtaattcataaaggaaagtagtttatttggctcacagttctgcaggctgtacaagcatggcactcctatctgcttggcttctggtaaggcctcaggaagctcacaatcatagaaacagcagaaggggaagccagcatatcacatggcgggagagggaggaaaagagagagggaggaggtgtcaggctcttctaaacaaccagatctcatgtgaactcagagagctcactcattaccttgaggacagcaccaagccattcatggg

SEQ ID NO: 56176 - DNA, 705 bp, Homo sapiens
cccttccttacaccttatacaaaaattaattcaagatggattaaagacttaaacgttagacctaaaaccacaaaaatcctagaagaaaacctaggcattaccattcaggacataggcatgggcaaggamttcttgtctaaaacaccaaaagcaatggcaacaaaagccaaaattgacaaatgggatctaattaaactaaagagctcctgcacagcaaaagaaactcatcagagtgaacaggcaacctacaaaatgggagaaaattttctcaacccactcatctgacaaaagactaatatccagaatctacaatgaactcaaacaaatttacaagaaaaaaacaaacaaccccatcaaaaagtaggtgaaggacatgaacagacacttctcaaaagaagacatttatgcagccaaaacacacatgaaaaaatgctcaccatcactggccatcagagaaatgcaaatcaaaagcacaatgagataccatctcccaccagttagaatggcaatcgttaaaaagtcaggaaacaacaggtgctggagaggatgtggagaaataggaaaataatttttcaaacacttgcgtgttagatattatattttcatttaagatataaataaatagaacacaaatacccagtattcactttctttatattcactttcacagaaaggtgagatattaggatataagagatgattcta

SEQ ID NO: 56177 - DNA, 705 bp, Homo sapiens
cccttccttacaccttatacaaaaattaattcaagatggattaaagacttaaacgttagacctaaaaccacaaaaatcctagaagaaaacctaggcattaccattcaggacataggcatgggcaaggacttcwtgtctaaaacaccaaaagcaatggcaacaaaagccaaaattgacaaatgggatctaattaaactaaagagctcctgcacagcaaaagaaactcatcagagtgaacaggcaacctacaaaatgggagaaaattttctcaacccactcatctgacaaaagactaatatccagaatctacaatgaactcaaacaaatttacaagaaaaaaacaaacaaccccatcaaaaagtaggtgaaggacatgaacagacacttctcaaaagaagacatttatgcagccaaaacacacatgaaaaaatgctcaccatcactggccatcagagaaatgcaaatcaaaagcacaatgagataccatctcccaccagttagaatggcaatcgttaaaaagtcaggaaacaacaggtgctggagaggatgtggagaaataggaaaataatttttcaaacacttgcgtgttagatattatattttcatttaagatataaataaatagaacacaaatacccagtattcactttctttatattcactttcacagaaaggtgagatattaggatataagagatgattcta

SEQ ID NO: 56178 - DNA, 705 bp, Homo sapiens
cccttccttacaccttatacaaaaattaattcaagatggattaaagacttaaacgttagacctaaaaccacaaaaatcctagaagaaaacctaggcattaccattcaggacataggcatgggcaaggacttcttgtctaaaacaccaaaagcaatggcaacaaaagccaaaattgacaaatgggatctaattaaactaaagagctcctgcacagcaaaagaaactcatcagagtgaacaggcaacctacaaaatgggagaaaattttctcaacccactcatctgacaaargactaatatccagaatctacaatgaactcaaacaaatttacaagaaaaaaacaaacaaccccatcaaaaagtaggtgaaggacatgaacagacacttctcaaaagaagacatttatgcagccaaaacacacatgaaaaaatgctcaccatcactggccatcagagaaatgcaaatcaaaagcacaatgagataccatctcccaccagttagaatggcaatcgttaaaaagtcaggaaacaacaggtgctggagaggatgtggagaaataggaaaataatttttcaaacacttgcgtgttagatattatattttcatttaagatataaataaatagaacacaaatacccagtattcactttctttatattcactttcacagaaaggtgagatattaggatataagagatgattcta

SEQ ID NO: 56179 - DNA, 1054 bp, Homo sapiens
aggcttttctgcccttctctgtgcttgtctagggaaggtcaaggaagccagacttgttataaatggaacagaatcccccagggatttgggggttagaaaagggaraaattgagcaagaaggagcaaggaaatggattgatggttctgcctgtcttcaaagcccaacaaatatgtaaatcatggaacatatttggcatccaatctcactctactctgggaaggcaaaggtatccatggccatgagtaaaattcttagttgccaagagagccaaatgctctttcttcctaccttcccaaattcccatcactacttgggtctaacttttttagacaatgtatcttgcagagatttcatgaatagcctgaacaggtattcatgaaacttctctgaaaagcaaagcttctagacttacaagaaacgtctctgaaaagcaaagcttctagacttataagaaatccctcatttatacttgcaagaggttgcttacctgtccaaaaaaaaaaaaaaaaattgtaagtgcaccctcttggcacagctagcactcttcagattctttttcatgcagaagaaagtgtggaaacctttcagctagctgaaactatttaacagctacatatatatttttttctcctacgtttgcctattttcattggatcacaagagccacagctacacacccacactgcccacttcttgtcagtttattctgtccgcagcatagaatgacattttccatgtaactcatcaaaatgaaaaacagaaagcaaattcacaaaataaccaaaactctatttgaaaaagaatgaaaaaaaaaaaaaaaagattggctctgatagaatttcacactttaataagaaaataaggaaattgctctcccagggactaaaccatttttatgttgtagaaaaacaccctgggttcagaggttttctcctctaggcaatctctgccccccacagtttcaaacatcatgccttgctaagtttcagcaatatcttggccaagttctcctttgtattggaagaaaaagtttgtttttttgtgaaatgcatt

SEQ ID NO: 56180 - DNA, 1054 bp, Homo sapiens
aggcttttctgcccttctctgtgcttgtctagggaaggtcaaggaagccagacttgttataaatggaacagaatcccccagggatttgggggttagaaaagggaaaaattgagcaagaaggarcaaggaaatggattgatggttctgcctgtcttcaaagcccaacaaatatgtaaatcatggaacatatttggcatccaatctcactctactctgggaaggcaaaggtatccatggccatgagtaaaattcttagttgccaagagagccaaatgctctttcttcctaccttcccaaattcccatcactacttgggtctaacttttttagacaatgtatcttgcagagatttcatgaatagcctgaacaggtattcatgaaacttctctgaaaagcaaagcttctagacttacaagaaacgtctctgaaaagcaaagcttctagacttataagaaatccctcatttatacttgcaagaggttgcttacctgtccaaaaaaaaaaaaaaaaattgtaagtgcaccctcttggcacagctagcactcttcagattctttttcatgcagaagaaagtgtggaaacctttcagctagctgaaactatttaacagctacatatatatttttttctcctacgtttgcctattttcattggatcacaagagccacagctacacacccacactgcccacttcttgtcagtttattctgtccgcagcatagaatgacattttccatgtaactcatcaaaatgaaaaacagaaagcaaattcacaaaataaccaaaactctatttgaaaaagaatgaaaaaaaaaaaaaaaagattggctctgatagaatttcacactttaataagaaaataaggaaattgctctcccagggactaaaccatttttatgttgtagaaaaacaccctgggttcagaggttttctcctctaggcaatctctgccccccacagtttcaaacatcatgccttgctaagtttcagcaatatcttggccaagttctcctttgtattggaagaaaaagtttgtttttttgtgaaatgcatt

SEQ ID NO: 56181 - DNA, 702 bp, Homo sapiens
gtctggaattaggaatccttccaacacttcggtttctcttgctttgctacatcccattcccctcccagaatccggagtgctccatgtgaacatgaatcagatcacattatcttcccacttaaaatcgtcaaatgatgctaaaagaaaacccaagcttctcacgatagtgcttcatgactgtattagttattgatggctgcacaacaaatatttccccaaatatagggacttaagagaacaataaacctttattatctcatgcagtttctttattctgtttttttttccttctttttgagacagggtcttgctctgttgcycaggctgtagtgcggtggtgtgatcatagctcactgcagcctcgatctcctgggctcaagagctccttctgtttcagtcgcccaagtagttgaaacttcaggcatgtgtcaccccacctggctagttttttaaatgttttgtagagacagtgtcttgctatgttgtccaagcttgtcttgaactcctagcctcaagtgatcctcctccttcagcctcctaaagttctgggattacagatgtgagccactgtgctcggactaatgcagcttttcttggtcgggcatttgggaagtgactcaactgggtgtcctggcttatggtctttcagaggttgccattatacacagttgggattgcaagtcgtccgaaagctttgttggg

SEQ ID NO: 56182 - DNA, 702 bp, Homo sapiens
gtctggaattaggaatccttccaacacttcggtttctcttgctttgctacatcccattcccctcccagaatccggagtgctccatgtgaacatgaatcagatcacattatcttcccacttaaaatcgtcaaatgatgctaaaagaaaacccaagcttctcacgatagtgcttcatgactgtattagttattgatggctgcacaacaaatatttccccaaatatagggacttaagagaacaataaacctttattatctcatgcagtttctttattctgtttttttttccttctttttgagacagggtcttgctctgttgcccaggctgtagtgcggtggtgtgatcatagctcactgcagcctcgatctcctgggctcaagagctccttctgtttcagtckcccaagtagttgaaacttcaggcatgtgtcaccccacctggctagttttttaaatgttttgtagagacagtgtcttgctatgttgtccaagcttgtcttgaactcctagcctcaagtgatcctcctccttcagcctcctaaagttctgggattacagatgtgagccactgtgctcggactaatgcagcttttcttggtcgggcatttgggaagtgactcaactgggtgtcctggcttatggtctttcagaggttgccattatacacagttgggattgcaagtcgtccgaaagctttgttggg

SEQ ID NO: 56183 - DNA, 2047 bp, Homo sapiens
cccggcctttctttatcaggatgacacagtgacgataagcctggccaatatggcgagaccccatctccaccaaaaaataaaaaacaaaattagccaggcgtgctggcccgtgcctgtagtcccagctactcgggaagctgaaacaggaggatcagttgagcccaggaggcagaggctgcagtgagccaagatggcaccactgtgctccagcctgggcaacagagcaagaccctgtctcaaaaaacaaaaagaaaaagcaacagtaacaatggccatggccttcgggaaattgatcattctctcctgctgggggcgcagccatgaaggctcagccctggagtccccgctcaagcaagcctcagtttctccatctgtaaaaggtaccgccacccaccagaggctgtgatgactcccccatgacctgagcacaacagtccccagcatgggcctgcacaggggtggctgcgagccgggatcccacgcctgctggagggagtgggcctccctgctgggtgatcacgggctcctacctggtgaagggcgccgtggggctccgcagcctctgtctcagtttcagcagcatccacagggacctgcagcaccagagcccgagggaggatgccccggcggggagcaggagggttagctccacaacgctggccccggacatacagtctgggacaggtgctgcatctcggataaacggcctgccctctccctgcccccacagtcccacaccctcctggctgtgcctcatgctcccggggactcatctctaacacggccccgtcccacccgggacatcgtcctgcacttctgacgtggccatccagggcctggcccagcctctgcaaaccactggcaagtgctcaaaggaacatcaagccccgtgaggtgttcacagcctggcagggagtcctacacagaaaaggatgccaagaggcccgcagttggacaggcgtggggacgccgtttcccctccgggcctcagctgccttgtctgctctgtgtggaaaggtccaaatcagtgccatgccagcaccccctgcacacacaccccggacattggctggacctgtctggatgatcccctgggcccccagggctggcatctgcaggctgaggaaggggctacccagtgggcagcctctgtgctcccagcaggctctgcagccgtgcatggcacccacccgggccagtccaccaggcacctgcactctccagcctcggccgtggggtgtgccgggttgtgactgtgacagaatgggcagggcctggtcacaactcctctggccactgggtacccagggtgcaggatgcaggatagcgccagtggcacagcaggtgggagcctcctggggggctagggaaaaacactgattcctgggctccccagacccacagaatcagaagctctgggccaagcgcgatggctcacacctgtaatcccgggactttgggaggccaaggccggtggatcacctgaggtcaggagttcaagactagcctggccaacatggtgaacccctgtctctactaaaaatacaaaaattagctgggggtggtggtgggcgcctgtaatcccagstactcgggaggctgaggcaggagaatcacttgaccccgggaggtggaggttgcagtaagccaagatcgcaccactgcactccagcctgggcgacagaggaagactgtgtctcaagaaaagaatcagaagccctgggcgccggacccaggcatctccatttagcaacctcctggctgatgctccggcagccctgggccttagggcagatgtctggtcatgatgagcacacatggaatgctctccacccactccccctgctcactgcaaatccagagaaatgatgaaaaaccacatgcccgaaacaagaatgccgcagcaggcggggcacacaggacttcgatggccgtgaaacaattccatttgattctgcaaggggggacacgtgtcagtgtccaaacccataggatgcccaaaacctagcgtgaaccctaacgtgagctactcacttggggtgatgat

SEQ ID NO: 56184 - DNA, 2047 bp, Homo sapiens
cccggcctttctttatcaggatgacacagtgacgataagcctggccaatatggcgagaccccatctccaccaaaaaataaaaaacaaaattagccaggcgtgctggcccgtgcctgtagtcccagctactcgggaagctgaaacaggaggatcagttgagcccaggaggcagaggctgcagtgagccaagatggcaccactgtgctccagcctgggcaacagagcaagaccctgtctcaaaaaacaaaaagaaaaagcaacagtaacaatggccatggccttcgggaaattgatcattctctcctgctgggggcgcagccatgaaggctcagccctggagtccccgctcaagcaagcctcagtttctccatctgtaaaaggtaccgccacccaccagaggctgtgatgactcccccatgacctgagcacaacagtccccagcatgggcctgcacaggggtggctgcgagccgggatcccacgcctgctggagggagtgggcctccctgctgggtgatcacgggctcctacctggtgaagggcgccgtggggctccgcagcctctgtctcagtttcagcagcatccacagggacctgcagcaccagagcccgagggaggatgccccggcggggagcaggagggttagctccacaacgctggccccggacatacagtctgggacaggtgctgcatctcggataaacggcctgccctctccctgcccccacagtcccacaccctcctggctgtgcctcatgctcccggggactcatctctaacacggccccgtcccacccgggacatcgtcctgcacttctgacgtggccatccagggcctggcccagcctctgcaaaccactggcaagtgctcaaaggaacatcaagccccgtgaggtgttcacagcctggcagggagtcctacacagaaaaggatgccaagaggcccgcagttggacaggcgtggggacgccgtttcccctccgggcctcagctgccttgtctgctctgtgtggaaaggtccaaatcagtgccatgccagcaccccctgcacacacaccccggacattggctggacctgtctggatgatcccctgggcccccagggctggcatctgcaggctgaggaaggggctacccagtgggcagcctctgtgctcccagcaggctctgcagccgtgcatggcacccacccgggccagtccaccaggcacctgcactctccagcctcggccgtggggtgtgccgggttgtgactgtgacagaatgggcagggcctggtcacaactcctctggccactgggtacccagggtgcaggatgcaggatagcgccagtggcacagcaggtgggagcctcctggggggctagggaaaaacactgattcctgggctccccagacccacagaatcagaagctctgggccaagcgcgatggctcacacctgtaatcccgggactttgggaggccaaggccggtggatcacctgaggtcaggagttcaagactagcctggccaacatggtgaacccctgtctctactaaaaatacaaaaattagctgggggtggtggtgggcgcctgtaatcccaggtactcgggaggctgaggcaggagaatcacttgaccccgggaggtggaggttgcagtaagccaagatcgcaccaytgcactccagcctgggcgacagaggaagactgtgtctcaagaaaagaatcagaagccctgggcgccggacccaggcatctccatttagcaacctcctggctgatgctccggcagccctgggccttagggcagatgtctggtcatgatgagcacacatggaatgctctccacccactccccctgctcactgcaaatccagagaaatgatgaaaaaccacatgcccgaaacaagaatgccgcagcaggcggggcacacaggacttcgatggccgtgaaacaattccatttgattctgcaaggggggacacgtgtcagtgtccaaacccataggatgcccaaaacctagcgtgaaccctaacgtgagctactcacttggggtgatgat

SEQ ID NO: 56185 - DNA, 2047 bp, Homo sapiens
cccggcctttctttatcaggatgacacagtgacgataagcctggccaatatggcgagaccccatctccaccaaaaaataaaaaacaaaattagccaggcgtgctggcccgtgcctgtagtcccagctactcgggaagctgaaacaggaggatcagttgagcccaggaggcagaggctgcagtgagccaagatggcaccactgtgctccagcctgggcaacagagcaagaccctgtctcaaaaaacaaaaagaaaaagcaacagtaacaatggccatggccttcgggaaattgatcattctctcctgctgggggcgcagccatgaaggctcagccctggagtccccgctcaagcaagcctcagtttctccatctgtaaaaggtaccgccacccaccagaggctgtgatgactcccccatgacctgagcacaacagtccccagcatgggcctgcacaggggtggctgcgagccgggatcccacgcctgctggagggagtgggcctccctgctgggtgatcacgggctcctacctggtgaagggcgccgtggggctccgcagcctctgtctcagtttcagcagcatccacagggacctgcagcaccagagcccgagggaggatgccccggcggggagcaggagggttagctccacaacgctggccccggacatacagtctgggacaggtgctgcatctcggataaacggcctgccctctccctgcccccacagtcccacaccctcctggctgtgcctcatgctcccggggactcatctctaacacggccccgtcccacccgggacatcgtcctgcacttctgacgtggccatccagggcctggcccagcctctgcaaaccactggcaagtgctcaaaggaacatcaagccccgtgaggtgttcacagcctggcagggagtcctacacagaaaaggatgccaagaggcccgcagttggacaggcgtggggacgccgtttcccctccgggcctcagctgccttgtctgctctgtgtggaaaggtccaaatcagtgccatgccagcaccccctgcacacacaccccggacattggctggacctgtctggatgatcccctgggcccccagggctggcatctgcaggctgaggaaggggctacccagtgggcagcctctgtgctcccagcaggctctgcagccgtgcatggcacccacccgggccagtccaccaggcacctgcactctccagcctcggccgtggggtgtgccgggttgtgactgtgacagaatgggcagggcctggtcacaactcctctggccactgggtacccagggtgcaggatgcaggatagcgccagtggcacagcaggtgggagcctcctggggggctagggaaaaacactgattcctgggctccccagacccacagaatcagaagctctgggccaagcgcgatggctcacacctgtaatcccgggactttgggaggccaaggccggtggatcacctgaggtcaggagttcaagactagcctggccaacatggtgaacccctgtctctactaaaaatacaaaaattagctgggggtggtggtgggcgcctgtaatcccaggtactcgggaggctgaggcaggagaatcacttgaccccgggaggtggaggttgcagtaagccaagatcgcaccactgcactccagcctgggcgacagaggaagactgtgtctcaagaaaagaatcagaagccctgggcgccggacccaggcatctccatttagcaacctcctggctgatgctccggcagccctgggccttagggcagatgtctggtcrtgatgagcacacatggaatgctctccacccactccccctgctcactgcaaatccagagaaatgatgaaaaaccacatgcccgaaacaagaatgccgcagcaggcggggcacacaggacttcgatggccgtgaaacaattccatttgattctgcaaggggggacacgtgtcagtgtccaaacccataggatgcccaaaacctagcgtgaaccctaacgtgagctactcacttggggtgatgat

SEQ ID NO: 56186 - DNA, 2047 bp, Homo sapiens
cccggcctttctttatcaggatgacacagtgacgataagcctggccaatatggcgagaccccatctccaccaaaaaataaaaaacaaaattagccaggcgtgctggcccgtgcctgtagtcccagctactcgggaagctgaaacaggaggatcagttgagcccaggaggcagaggctgcagtgagccaagatggcaccactgtgctccagcctgggcaacagagcaagaccctgtctcaaaaaacaaaaagaaaaagcaacagtaacaatggccatggccttcgggaaattgatcattctctcctgctgggggcgcagccatgaaggctcagccctggagtccccgctcaagcaagcctcagtttctccatctgtaaaaggtaccgccacccaccagaggctgtgatgactcccccatgacctgagcacaacagtccccagcatgggcctgcacaggggtggctgcgagccgggatcccacgcctgctggagggagtgggcctccctgctgggtgatcacgggctcctacctggtgaagggcgccgtggggctccgcagcctctgtctcagtttcagcagcatccacagggacctgcagcaccagagcccgagggaggatgccccggcggggagcaggagggttagctccacaacgctggccccggacatacagtctgggacaggtgctgcatctcggataaacggcctgccctctccctgcccccacagtcccacaccctcctggctgtgcctcatgctcccggggactcatctctaacacggccccgtcccacccgggacatcgtcctgcacttctgacgtggccatccagggcctggcccagcctctgcaaaccactggcaagtgctcaaaggaacatcaagccccgtgaggtgttcacagcctggcagggagtcctacacagaaaaggatgccaagaggcccgcagttggacaggcgtggggacgccgtttcccctccgggcctcagctgccttgtctgctctgtgtggaaaggtccaaatcagtgccatgccagcaccccctgcacacacaccccggacattggctggacctgtctggatgatcccctgggcccccagggctggcatctgcaggctgaggaaggggctacccagtgggcagcctctgtgctcccagcaggctctgcagccgtgcatggcacccacccgggccagtccaccaggcacctgcactctccagcctcggccgtggggtgtgccgggttgtgactgtgacagaatgggcagggcctggtcacaactcctctggccactgggtacccagggtgcaggatgcaggatagcgccagtggcacagcaggtgggagcctcctggggggctagggaaaaacactgattcctgggctccccagacccacagaatcagaagctctgggccaagcgcgatggctcacacctgtaatcccgggactttgggaggccaaggccggtggatcacctgaggtcaggagttcaagactagcctggccaacatggtgaacccctgtctctactaaaaatacaaaaattagctgggggtggtggtgggcgcctgtaatcccaggtactcgggaggctgaggcaggagaatcacttgaccccgggaggtggaggttgcagtaagccaagatcgcaccactgcactccagcctgggcgacagaggaagactgtgtctcaagaaaagaatcagaagccctgggcgccggacccaggcatctccatttagcaacctcctggctgatgctccggcagccctgggccttagggcagatgtctggtcatgatgagcacacatggaatgctctccacccactccccctgctcactgcaaatccagagaaatgatgaaaaaccacatgcccgaaacaagaatgccgcagcaggcggggcacacrggacttcgatggccgtgaaacaattccatttgattctgcaaggggggacacgtgtcagtgtccaaacccataggatgcccaaaacctagcgtgaaccctaacgtgagctactcacttggggtgatgat

SEQ ID NO: 56187 - DNA, 915 bp, Homo sapiens
tagttactgtttaaacagtagctagagatccaagaattgctaatgtgcttgtgaatattcttaaactacacatgacgtttaaaatttttaaatcttggtgtaatgaaatgttcttggccttgctgaaccaggtcattgcagtgttcttataccatattgccctgcagagagaacagaattaactgacagtggtggtgtcattaaccaacattaaagtacatttcatgcttaggtcagttgatgttgccagactgaattactgtgattatatgaaaaaaagatcacctttaccatatatggagcattttgcttttgtaacgttcaaagaggaacactctagatattgaagaaagatgtaatttaaaagtaccctagtgcttcaagagagaaaggatatcaattcatttctcctaaaatctgtcctttcactcatttttatttcccacatagaaaggtgcccaaatgtcacaatatgacttaatttctrttttccaggcctttaatgtgatgctattttgtttttgattttctcaattttaactatgttttcttaagttgttatgctagttttgtttgcttttctaagccttatgtttgctaagccctgctgcaattcttgtttcctctaagatcgactttctagaatctatggtaaacagtgggaaaataaagcttccctgaattaaatccaggggaaatttcaaaacctcattttatcaacgatgacaagctcctttctctaaggctttttggtgagaacatgatcacactgggatttgagtggtgttaggtggaagtctctgtgggaacttttgttccagaaatctggggaagaagaattaacactggtcagatcaatcagatgagaacagatactgggtcatctatggcagaaaagggtcctggcaggtaagg

SEQ ID NO: 56188 - DNA, 1163 bp, Homo sapiens
tagcagaggaaagctggaaataatttctctatagttctggctgtaaaagcatcacaggacccatgggctgaaagattccagtaaatctaatctgcaagcatctgccctggcacccagtgtgcttacaaatggcactgccctacctgtaaagagacgggaatcattaggctggcgaattcagtgattggaaatgtctcaatatattataatacaccaacccagatagaaatccctgtgggaacaacaacaaaaaagtgttgctctcaccaaatgccccacgatgtagtgcactaaaagacaagagacatctggaaaaggtggcagaaatattaaaaattaccaaattccagaatccctacgtcaaatgaaaaaaaattttaaatcgaaaaataaatctattcacgtagcactgaaactaggaaatagtctcatttcatacgaacaaccttaagaaatgtcattcagaagcacaaagggactccagcaactacgctcctcagaggagcggtggtgaatggacagactcctcaagctctggctatactcccaatgtggaggaatgggggagctgggatgtgggagccattcttcstctctgtcagtaagagccacctcagcccaaatgtggagggttttgaaaattcgccactatactccccactggtagaagtaaaagctgaagggaatgaaggaacaaagtgcctgaggccgattacttcacacacaattaaatgctggcctaagctgagaacaaagcccaggcaaaaaaatacttagaaattccatttggagagccccactctgaagagtccattctctcttccattgtgataaatagaatctttctgggcacatgaagaaatgctggaatttgcaacttttattttctgctgtccatacaagagaaaaaactcaagcaaatgcccaaagatgtgtgtgcaacaatgttgcctgtggcattgtttgtaacatctaagtctcatctacagggacaccaataggacaatagatcatggcacatacgtactgtggatatgctgcagaatgtgccatgcaggactgccactgccatcttcttcactctggcacccagcataaagcgtggcatactctatccaccaacaatcacagagttcatcaccagtaggtgctggaggatgcat

SEQ ID NO: 56189 - DNA, 602 bp, Homo sapiens
tcctgaattcctaaatttctccaggggtcagagagaagtatagagtagatattttaaatagccagctggtgttctgaatctggcctacagttatatttygtttggcctgcatggtgttttttaaaagtatggattaatggcaagtatttaatagttgatagttttcacacaaaaattcagatttccaacctctggaaaattgaaatatctgaccatagtgaaccttctttcccacgtagcaacaattagctgaattgagtgatggtgctctttgggcaatactctagtttgcaatagctctcatctctccctcttctccctggtcactgacatgtagtgttaattaccatttatcattgtacatgcactatgacttttttcttgtatttgctcagcagtcatgaatttgcatctgctactgtagagggaaagctctccctggaaagccttttcctgtaaccctcttctcagggccagtgttaggccctctcttcctaatgcccccacagcatctagtccatacctcccttcaaaacttatcattttaaataagtgttcactttgtaatcttatttcctagacatgaatattttgaggtaaag

SEQ ID NO: 56190 - DNA, 566 bp, Homo sapiens
ctgggcatggtggtgcctgactgtagccctggctagcagggaggctgaggtgggaggtttacctgagcctgggaagttgaggctccagtgagccrtgatcctgccacttcactgcagcctgggtgacacagtgagaccctgtctcaaaaaataaaaataaaactaaagatagatctgggagccaaacagagtaagaaacacattgtttaccatgtaaacagggtctatatagaagtagggccaggagctgtggcccacatctgtaatcccagcactttgggaggctgaggcaggaagattgcttaaagctatgagcttgagaccagcctgggcaacaaagcgagacccaatctctataaaaaataaaaaggctgggcatggtgcctcccgcctataatcccagcactttgggaggccaaggtgggaggattgtttgagcccaggagttttgagaccagcccgggcaacatagagagacccgtctctattaaaaataaagaaaggaaattagcctggtgtgctggtacacacctgtggtcccagctgcacaggaaggtgaggtggga

SEQ ID NO: 56191 - DNA, 801 bp, Homo sapiens
ttccacaagggcagaatggaatcgcttaccacagcgacccacacattgcttgagacactggcacatcgatacctcacgaagcattttcttcaaaagaaaagaaccagatatttcaggaaggtcattgaagatgctttgaccacagacatgctgaccttactgatagagatttgtagcctttgtggcgtgtggacttagtctctatagatgccttcattgtgctataacttttatacaggatgtattgtttgaactgccaaccctaattctaattcccttggggactcaggaaattctaactaaataaaataaaaccccattgtatttttccttgtttgagatgcaaatatgcaaataacatttttaacaagaatatgaataaacacatagcacatgacacacagttggaactttcaatgggactytaaaactgaaataatttcaacagcaaagtaaaaatgagggaagaaaaatgaaaattgaaccaaaaccatgttaaaacatctctcatcagaaccagagactctgccaccactgtgctgggtgttcccagcaggtctgtttgctcatcagccctgagaacaccactaaccaatcctgcacgggcaaccctctttactggggtcaaatgcagacacttagggagaatcatgtcttttttaaccctagatttaaagaaacaaacagaaaactttatttttttaaattttactttaatttctgggatacatgtgcagaatgtgcaggtttgttacatagatatacatgtgccatggtggtttattgcacctattgaccctt

SEQ ID NO: 56192 - DNA, 570 bp, Homo sapiens
cctccttcaagtgtttgctcaaacatcttcttagtatgamctgctctgaatactctgtttaaaattgcaagcccccacctatcagcattatgaattctcttgatccccccttaccaaactctacctttcttatccatagaatacttaccaccttctaagtgatagtgctattaatctattatatcaatatcttattgtctgttcctgtccccattaaaaagaaactacatgaagttagggcttcatttattatgtatttcaagcatctggaacagtgtccagggcacagtcagtgctcaaaaaatatttactactttagtaatcctacagtttaagtgactcagataacctgttgttctctaagaagcatgagccctttgttcccagtgttggtgattcaaccattctcataatttagccacagctcatggctgaataggtgtgatcagttatcattgatttgaaacatctctaggggatatgcttctcaagacaaaccaacggtttcctatgtgtgtgcttaaatggtgtttcctaaggtatagatccatgcaccaatcaactgtggcc

SEQ ID NO: 56193 - DNA, 570 bp, Homo sapiens
cctccttcaagtgtttgctcaaacatcttcttagtatgacctgctctgaatactctgtttaaaattgcaagcccccacctatcagcattatgaattctcttgatccccmcttaccaaactctacctttcttatccatagaatacttaccaccttctaagtgatagtgctattaatctattatatcaatatcttattgtctgttcctgtccccattaaaaagaaactacatgaagttagggcttcatttattatgtatttcaagcatctggaacagtgtccagggcacagtcagtgctcaaaaaatatttactactttagtaatcctacagtttaagtgactcagataacctgttgttctctaagaagcatgagccctttgttcccagtgttggtgattcaaccattctcataatttagccacagctcatggctgaataggtgtgatcagttatcattgatttgaaacatctctaggggatatgcttctcaagacaaaccaacggtttcctatgtgtgtgcttaaatggtgtttcctaaggtatagatccatgcaccaatcaactgtggcc

SEQ ID NO: 56194 - DNA, 570 bp, Homo sapiens
cctccttcaagtgtttgctcaaacatcttcttagtatgacctgctctgaatactctgtttaaaattgcaagcccccacctatcagcattatgaattctcttgatccccccttaccaaactctacctttcttatccatagaatacttaccaccttctaagtgatagtgctattaatctattatatcaatatcttattgtctgttcctgtccccattaaaaagaaactacatgaagttagggcttcatttattatgtatttcaagcatctggaacagtgtccagsgcacagtcagtgctcaaaaaatatttactactttagtaatcctacagtttaagtgactcagataacctgttgttctctaagaagcatgagccctttgttcccagtgttggtgattcaaccattctcataatttagccacagctcatggctgaataggtgtgatcagttatcattgatttgaaacatctctaggggatatgcttctcaagacaaaccaacggtttcctatgtgtgtgcttaaatggtgtttcctaaggtatagatccatgcaccaatcaactgtggcc

SEQ ID NO: 56195 - DNA, 631 bp, Homo sapiens
aaaatagctagaagagaagaagtcaactgattccagcaaaaagaaaaggcaaatatttaaggtgatggatattccaagtacactgatttaatctttgcaaactatatgaatgcattaaattatcacatgtacccccaaattatgtatatttattatgcatcaataaacatttttcaatttaaaaaattaatagagctgactatgatttgtctttttatgtatatatgttacacatcaataacatttttttaaaataacaaaatctcatggcgttcaatgttaagttagtcctgggttgaaaggatcatcctgttgctctggataactgtacatgaagtaggaataaagacacctcagaggtggaaggccatgttgaatagagtttaggattttgctgtgcccattcagagttctgctactgctgcttctacctcatcaatcacaggccatggtcctcctccatctccccacctcatcactagagctgtcagagctctggctctcattcaagctgtgaaatggcacacaatttgaaacttatttactgggtctgagccaaggccatatcccattcctgctcatgcatctcagttggctcagcacaaacttycattcccttcactttcagtca

SEQ ID NO: 56196 - DNA, 741 bp, Homo sapiens
gaatattctgtaatttggggtcttataatttaattttatattcatgagcctgagtttctatacttctggaatcaggaaatatagtaagatatgtacgtgcatgtacaggtgtgtgtgtgtagagaaggatagcctgtggattaaggaagagcgtctaggcacatatccagtgcccagtaggcattagaaactgttagctgtgttaagcatatcagctcctttaatcttctatcattcactatagcctttaaaggtaagtgttcttaatgccatttaaaggaagcataaaactttgagagcgttgtataattaagctccaaatccatgtcagtgtgattccacaaaatcattctgcttgctgtacttcaaaatccatcataagaaaataatttatcttacaatatgggaaaaatataatggaawgggttggagtgaggtagggaatgcattagcttattaaagtctcctaagaaacttacaggaggtaggccacaacacttgacctctccctcacaaaaacaaagacaaacagaaccaccacaacaattacccaaaacacttcgattacacatagacataactcagaagcgggaggtgaagttcctggtctacgtgcctggagcataaatttgcattctgaaatgaacattttaaaagagatgtacaaatggttacactatttagcgcccgcagccaacctgaattaattattcaagaactgtatgaactgttggtgcatct

SEQ ID NO: 56197 - DNA, 741 bp, Homo sapiens
gaatattctgtaatttggggtcttataatttaattttatattcatgagcctgagtttctatacttctggaatcaggaaatatagtaagatatgtacgtgcatgtacaggtgtgtgtgtgtagagaaggatagcctgtggattaaggaagagcgtctaggcacatatccagtgcccagtaggcattagaaactgttagctgtgttaagcatatcagctcctttaatcttctatcattcactatagcctttaaaggtaagtgttcttaatgccatttaaaggaagcataaaactttgagagcgttgtataattaagctccaaatccatgtcagtgtgattccacaaaatcattctgcttgctgtacttcaaaatccatcataagaaaataatttatcttacaatatgggaaaaatataatggaatgggttggagtgaggtagggaatgcattagcttattaaagtctcctaagaaacttacaggaggtaggccacaacacttgacctctccctcacaaaaacaaagacaaacagaaccaccacaacaattacccaaaacacttcgattacacatagacataactcagaagcgggaggtgaagttcctggtctacgtgcctggagcataaatttgcattctgaaatgaacattttaaaagagatgtacaaatggttacactatttagcgcccrcagccaacctgaattaattattcaagaactgtatgaactgttggtgcatct

SEQ ID NO: 56198 - DNA, 630 bp, Homo sapiens
tttagaaagaggaagattggtttccggaagaagtctgttctttaatacccaaatgtttccccaccgcgcctagaatcagaccactgagaaaacaggaagtattctgtccctttaatagctttgttttaggggtaactcccctcgccttgtggggaggcttaggacgggcgggtgcaatcctcgaaggggagtctcagcgaccatgggggacaccatccactgtaagacagagaacaacggcagggggcgtcagtataggatggaaggggcggggggtgtgcagggggcgtgggctgcgccgcgctgggccctaccgtcggaagtctgcgagcggggaaccagaatgtacyaggtcgagaagcactgggctgaaccacaagaagccaataggaggggggaatcgggacgtccagattcagcagtaggctgaactacttgaaggtcttcatgggggggggggggtgtggactgtaccatgttgcgaagccgggggtgtgtgagattcctgggctaaaccacagggaggcagaggtggagggaaggggttgtaccttgtagattctcagtaagggggaagggagcatcagattgtggaacagcgtaaggtagtacgacttggaaagggagaga

SEQ ID NO: 56199 - DNA, 620 bp, Homo sapiens
tgctggccgtggcgctgtgcagcaccggcagggtgattctgaagatgggggccagggtgctgtgcatctgggccgggatgaaggcgggccgcccgttcatcttggccagggcgtacagcgtggcgtactcgcccatctggttccccaggcggcccttggagttgatagtgaacaggtcctcccggggcaggtgtctgggggccaggaccacacgggctgagtatgcccagggcgcaggcaccagagccaggtgctggtggcagtgaaagatggtggacaccacaaaaatggcaaagacgaagtagaaggtggagaaggaagggcgggtggcccagaatcccttgacggctgtggggaggagagaggacatggtcaggaggcagggctggggggacaggagtctyttcacccaccccctgccaaagtcattcattcactcactcaatccatccaagcctctgtcctgagcaccacagtgcatgggagaggcctcagagcacagaccctggggtctttccacctgaggctgagttcctgctggaagtcccagcctcaccagcaccttgtgacttcagtcaagttactgcacctcgctgagcacagcggcttgtgcctgtaat

SEQ ID NO: 56200 - DNA, 966 bp, Homo sapiens
cagtgtctgcaacaggaggcactgcataactttctactatacttaacaatagaattaatgtttttttggtttggtttggtttttcaagacaggttcttgttccgtagcccaggtgggagagcagcggcgccatcatagctcgctgaagccttgatcccccggactcaagtgatcctcccacctcagcctccctgagtaactgggaccacaggcacatgccaccacacccagctaatcttttaattttttgtagagacagggtcttgctatgttgcccaggctagtctcgagctcctrgacttaagtgatctgcctgcatcagcctcccaagtgctaggactacaggcgtgagccaccgagcctggcctaatattgttaataattaataccgtaattgattgggcctctgtggttctaggtgcagggacagagtggtaaccaggaaaagcaggctcctgctctcgtggagtgtgcaccgaaatgggccagacataaacacgaaaataaataaacaagtaatttcagagagtcctaagtggtacagagagaggtgcaggggtcccaggaaggaagatctgccctcccaaaaagctccgggggcttccgtcccccacacagtgccacattcccaagtgaggcgggtcatttgtttggcacagctgaattccctctgggatccaatccaacaggtctgattttcttccacacattgttaaaccagatctgagcattaagtattcaagaaagccccaatctgcaaatatttacctttcattcagcagcatctgaccctccccttgggaggcccgattaagacgaaggaggggacgacaggcagggtgacgctgggagggtttaattccagatgtttctcaggggtggggcaggaattggggggtgcaggccctccaatccagcaaacccaacacatgtgcatactggtccttccacatgaccatgtgcaca

SEQ ID NO: 56201 - DNA, 966 bp, Homo sapiens
cagtgtctgcaacaggaggcactgcataactttctactatacttaacaatagaattaatgtttttttggtttggtttggtttttcaagacaggttcttgttccgtagcccaggtgggagagcagcggcgccatcatagctcgctgaagccttgatcccccggactcaagtgatcctcccacctcagcctccctgagtaactgggaccacaggcacatgccaccacacccagctaatcttttaattttttgtagagacagggtcttgctatgttgcccaggctagtctcgagctcctagacttaagtgatctgcctgcatcagcctcccaagtgctaggactacaggcgtgagccaccgagcctggcctaatattgttaataattaataccgtaattgattgggcctctgtggttctaggtgcagggacagagtggtaaccaggaaaagcaggctcctgctctcgtggagtgtgcaccgaaatgggccagacataaacacgaaaataaataaacaagtaatttcagagagtcctaagtggtacagagagaggtgcaggggtcccaggaaggaagatctgccctcccaaaaagctccgggggcttccgtcccccacacagtgccacattcccaagtgaggcgggtcatttgtttggcacagctgaattccctctgggatccaatccaacaggtctgattttcttccacacattgttaaaccagatctgagcattaagtattcaagaaagccccaatctgcaaatatttacctttcattcagcagcatctgaccctccccttgggaggcccgattaagacgaaggaggggacgacaggcagggtgacgctgggagggtttaattccagatgtttctcaggggtggggcaggaattggggggtgcaggccctccaatccagcaaacccaamacatgtgcatactggtccttccacatgaccatgtgcaca

SEQ ID NO: 56202 - DNA, 2921 bp, Homo sapiens
cagtttatttgtccatttgagtcttaaagaggcgttgatgagaactccacaggaaatcatgagacagcagaggtgctttgcagcagagaaggcagggcggggcagaacaaccttccccagcacgcaggtcattagttccatttgcaagggccactccccgccaacactactaccctccagctcatttaattcaaaataaatgtacagggcaggaaagtcattgaggtgcaagaaaggagggaaggctttaaaagcgagctatgggccaggcgtggtgrctcacgcctgtaatcccagcacttcaggaggccaaggtgggaggatcacctgaggtcaggagttcgagaccagcctggccaacatggcaaaaccccatctctacaaaaattagccaggcatgatggcaggtgcctgtaatctcagctatttgggaggttaaggtaggagaatcgcttgaacctgggaggcggaggttgcagtgagtctagattgcgccattgcactccagcctgggtgacagagtgagactctgtctcaaaaaataaataaataaaataaaataaaaacaaaagtgagctatgaatttcatttccaaggaaaggagaatacggaagagagagtggagaagttgaagagacccagaggagcatggcaccatgggagagctgtggctccagcgtgcagcggccctgggttcaaattctggctctgtcatttcgcggttgtgcgagggtgtcacatgcttagcctctctgaacctcagtttacccatctgaaaaatgaggaccaaagtggcacctatttcctggggctgttgggaggatccaatgagaccatgagctgatctatgcataacacctggctcagagcaggctctggaatgtagctcacatattttctgggcacctactggatgccaagcaccatgtggggatttggcattgaacaagacaggcaaggcagtgcccttgtggagttcaaggtcttgtgaagagaacaagacagaaaacatgtgaacgcataaaacgagatcatttcggggatttgcaggagggacaaagcaaggtgacttgagaaggtgtttattttagacagcacggtccagggaggtttctccaaggcgaggacattgaggtgagactcggatggagcccattatggggagcagcgtcaaaaacagtgagcaggggagcccctaatcccatcagcaaacagctcccacctgccctggaatggctgctgagagaggtccctgtgggtccccaggcctctgagagctgccacagcccggccagccttcctgagctagtcccatcctgatgggggaatggggggcttcagagtcaacaatgagggctctgcttgcgtttttatttctgatgccaagtggtgtctatgatgcagggtctgacttggggctcttgacaccttgcattttggggatattaagtcaaaatcttaaatgaccacttagcgttaggctctcggctatacgctagagacagacgtgaagaagtcctgcctctcaggccatgctgaggctctccccaagatctgggcagggctgcttcacagccatgccacccctctgcctcaaggcagctgtgaatcagtttttggagttcaaatcagatcgtgccacctgtgattccattgtcttgcaagtggcttccaagaggtagcccaagttcctcaaggtgacatttcaggtgtgttgcaacccagccctgctaagccctcccgcctggcccctcctgctccctggtcctcagtgtgccagcaacagccattagctgctgtagacagaaccggacacaagcatccatcctcctccttgaaattgcatgtgctgttcctcccatctagaatgccttttcctaccttcactgctcagcctgcaggatgcatcacagatgatgctgcctggtgaacccttgcctagcaacccgatccgtatctcaagtgaggtcaggtccagctctgggatctacaggacaactacaccaaaatctaagaccccttcatcccaggacccagggaatcacccccacccttcaggaccctgccagaccttcacccagcctgcctttcagggcactaagcctttccatgcccaggtcaatcacagtcgcacaaggaaagaacaaggaagtggtcagactcacagcatccttatcggcagaccatcctgcccactttacaaggaaggggactgaggctttcactttataaggtcactgggtgctatagtttggtttatgtgaccccctccagatctcaggttgaaatttgatctctgctgttagagatggagcctaatggaaggtgtttgggtcatgggggaggactcctcatgaatagatcaatgccctcccttgtgtgggacgagggtggaagtgagttctcactctattcgtttctgcaggagctggttgttgaaaagagcccggcacctccctccgtctcttgcctcctctcttgcatgtgacctctgcacacagcagctctcctttgctttcctccatgagtggaagcagcctgaggccctcaccagaagcagatgcaggcttctcgtacagcctgcagaaccatgagccaaataagcctctattcattgcaaattacccagacacaggtattcctttacagcaacacaaacagacgtagatgcccaacttgcaaatcagagcctggatttgaaccagatctttggttcctctggctcaaagtcatcctctttctactacattggtacaaaagtaattgcagtgtttgccactgaaagcaatgacaaaactgcaattactcaatgcatgcaggtcattagttccatttgcaagggccactccccgccaacactaccctccagctcatttaattcaaaataaacgtccagggcaggaaagtcattgaggcagccc

SEQ ID NO: 56203 - DNA, 2921 bp, Homo sapiens
cagtttatttgtccatttgagtcttaaagaggcgttgatgagaactccacaggaaatcatgagacagcagaggtgctttgcagcagagaaggcagggcggggcagaacaaccttccccagcacgcaggtcattagttccatttgcaagggccactccccgccaacactactaccctccagctcatttaattcaaaataaatgtacagggcaggaaagtcattgaggtgcaagaaaggagggaaggctttaaaagcgagctatgggccaggcgtggtggctcacgcctgtaatcccagcacttcaggaggccaaggtgggaggatcacctgaggtcaggagttcgagaccagcctggccaacatggcaaaaccccatctctacaaaaattagccaggcatgatggcaggtgcctgtaatctcagctatttgggaggttaaggtaggagaatcgcttgaacctgggaggcggaggttgcagtgagtctagattgcgccattgcactccagcctgggtgacagagtgagactctgtctcaaaaaataaataaataaaataaaataaaaacaaaagtgagctatgaatttcatttccaaggaaaggagaatacggaagagagagtggagaagttgaagagacccagaggagcatggcaccatgggagagctgtggctccagcgtgcagcggccctgggttcaaattctggctctgtcatttcgcggttgtgcgagggtgtcacatgcttagcctctctgaacctcagtttacccatctgaaaaatgaggaccaaagtggcacctatttcctggggctgttgggaggatccaatgagaccatgagctgatctatgcataacacctggctcagagcaggctctggaatgtagctcacatattttctgggcacctactggatgccaagcaccatgtggggatttggcattgaacaagacaggcaaggcagtgcccttgtggagttcaaggtcttgtgaagagaacaagacagaaaacatgtgaacgcataaaacgagatcatttcggggatttgcaggagggacaaagcaaggtgacttgagaaggtgtttattttagacagcacggtccagggaggtttctccaaggcgaggacattgaggtgagactcggatggagcccattatggggagcagcgtcaaaaacagtgagcaggggagcccctaatcccatcagcaaacagctcccacctgccctggaatggctgctgagagaggtccctgtgggtccccaggcctctgagagctgccacagcccggccagccttcctgagctagtcccatcctgatgggggaatggggggcttcagagtcaacaatgagggctctgcttgcgtttttatttctgatgccaagtggtgtctatgatgcagggtctgacttggggctcttgacaccttgcattttggggatattaagtcaaaatcttaaatgaccacttagcgttaggctctcggctatacgctagagacagacgtgaagaagtcctgcctctcaggccatgctgaggctctccccaagatctgggcagggctgcttcacagccatgccacccctctgcctcaaggcagctgtgaatcagtttttggagttcaaatcagatcgtgccacctgtgattccattgtcttgcaagtggcttccaagaggtagcccaagttcctcaaggtgacatttcaggtgtgttgcracccagccctgctaagccctcccgcctggcccctcctgctccctggtcctcagtgtgccagcaacagccattagctgctgtagacagaaccggacacaagcatccatcctcctccttgaaattgcatgtgctgttcctcccatctagaatgccttttcctaccttcactgctcagcctgcaggatgcatcacagatgatgctgcctggtgaacccttgcctagcaacccgatccgtatctcaagtgaggtcaggtccagctctgggatctacaggacaactacaccaaaatctaagaccccttcatcccaggacccagggaatcacccccacccttcaggaccctgccagaccttcacccagcctgcctttcagggcactaagcctttccatgcccaggtcaatcacagtcgcacaaggaaagaacaaggaagtggtcagactcacagcatccttatcggcagaccatcctgcccactttacaaggaaggggactgaggctttcactttataaggtcactgggtgctatagtttggtttatgtgaccccctccagatctcaggttgaaatttgatctctgctgttagagatggagcctaatggaaggtgtttgggtcatgggggaggactcctcatgaatagatcaatgccctcccttgtgtgggacgagggtggaagtgagttctcactctattcgtttctgcaggagctggttgttgaaaagagcccggcacctccctccgtctcttgcctcctctcttgcatgtgacctctgcacacagcagctctcctttgctttcctccatgagtggaagcagcctgaggccctcaccagaagcagatgcaggcttctcgtacagcctgcagaaccatgagccaaataagcctctattcattgcaaattacccagacacaggtattcctttacagcaacacaaacagacgtagatgcccaacttgcaaatcagagcctggatttgaaccagatctttggttcctctggctcaaagtcatcctctttctactacattggtacaaaagtaattgcagtgtttgccactgaaagcaatgacaaaactgcaattactcaatgcatgcaggtcattagttccatttgcaagggccactccccgccaacactaccctccagctcatttaattcaaaataaacgtccagggcaggaaagtcattgaggcagccc

SEQ ID NO: 56204 - DNA, 2921 bp, Homo sapiens
cagtttatttgtccatttgagtcttaaagaggcgttgatgagaactccacaggaaatcatgagacagcagaggtgctttgcagcagagaaggcagggcggggcagaacaaccttccccagcacgcaggtcattagttccatttgcaagggccactccccgccaacactactaccctccagctcatttaattcaaaataaatgtacagggcaggaaagtcattgaggtgcaagaaaggagggaaggctttaaaagcgagctatgggccaggcgtggtggctcacgcctgtaatcccagcacttcaggaggccaaggtgggaggatcacctgaggtcaggagttcgagaccagcctggccaacatggcaaaaccccatctctacaaaaattagccaggcatgatggcaggtgcctgtaatctcagctatttgggaggttaaggtaggagaatcgcttgaacctgggaggcggaggttgcagtgagtctagattgcgccattgcactccagcctgggtgacagagtgagactctgtctcaaaaaataaataaataaaataaaataaaaacaaaagtgagctatgaatttcatttccaaggaaaggagaatacggaagagagagtggagaagttgaagagacccagaggagcatggcaccatgggagagctgtggctccagcgtgcagcggccctgggttcaaattctggctctgtcatttcgcggttgtgcgagggtgtcacatgcttagcctctctgaacctcagtttacccatctgaaaaatgaggaccaaagtggcacctatttcctggggctgttgggaggatccaatgagaccatgagctgatctatgcataacacctggctcagagcaggctctggaatgtagctcacatattttctgggcacctactggatgccaagcaccatgtggggatttggcattgaacaagacaggcaaggcagtgcccttgtggagttcaaggtcttgtgaagagaacaagacagaaaacatgtgaacgcataaaacgagatcatttcggggatttgcaggagggacaaagcaaggtgacttgagaaggtgtttattttagacagcacggtccagggaggtttctccaaggcgaggacattgaggtgagactcggatggagcccattatggggagcagcgtcaaaaacagtgagcaggggagcccctaatcccatcagcaaacagctcccacctgccctggaatggctgctgagagaggtccctgtgggtccccaggcctctgagagctgccacagcccggccagccttcctgagctagtcccatcctgatgggggaatggggggcttcagagtcaacaatgagggctctgcttgcgtttttatttctgatgccaagtggtgtctatgatgcagggtctgacttggggctcttgacaccttgcattttggggatattaagtcaaaatcttaaatgaccacttagcgttaggctctcggctatacgctagagacagacgtgaagaagtcctgcctctcaggccatgctgaggctctccccaagatctgggcagggctgcttcacagccatgccacccctctgcctcaaggcagctgtgaatcagtttttggagttcaaatcagatcgtgccacctgtgattccattgtcttgcaagtggcttccaagaggtagcccaagttcctcaaggtgacatttcaggtgtgttgcaacccagccctgctaagccctcccgcctggcccctcctgctccctggtcctcagtgtgccagcaacagccattagctgctgtagacagaaccggacacaagcatccatcctcctccttgaaattgcatgtgctgttcctcccatctagaatgccttttcctaccttcactgctcagcctgcaggatgcatcacagatgatgctgcctggtgaacccttgcctagcaacccgatccgtatctcaagtgaggtcaggtccagctctgggatctacaggacaactacaccaaaatctaagaccccttcatcccaggacccagggaatcacccccacccttcaggaccctgccagaccttcacccagcctgcctttcagggcactaagcctttccatgcccaggtcaatcacagtcgcacraggaaagaacaaggaagtggtcagactcacagcatccttatcggcagaccatcctgcccactttacaaggaaggggactgaggctttcactttataaggtcactgggtgctatagtttggtttatgtgaccccctccagatctcaggttgaaatttgatctctgctgttagagatggagcctaatggaaggtgtttgggtcatgggggaggactcctcatgaatagatcaatgccctcccttgtgtgggacgagggtggaagtgagttctcactctattcgtttctgcaggagctggttgttgaaaagagcccggcacctccctccgtctcttgcctcctctcttgcatgtgacctctgcacacagcagctctcctttgctttcctccatgagtggaagcagcctgaggccctcaccagaagcagatgcaggcttctcgtacagcctgcagaaccatgagccaaataagcctctattcattgcaaattacccagacacaggtattcctttacagcaacacaaacagacgtagatgcccaacttgcaaatcagagcctggatttgaaccagatctttggttcctctggctcaaagtcatcctctttctactacattggtacaaaagtaattgcagtgtttgccactgaaagcaatgacaaaactgcaattactcaatgcatgcaggtcattagttccatttgcaagggccactccccgccaacactaccctccagctcatttaattcaaaataaacgtccagggcaggaaagtcattgaggcagccc

SEQ ID NO: 56205 - DNA, 2921 bp, Homo sapiens
cagtttatttgtccatttgagtcttaaagaggcgttgatgagaactccacaggaaatcatgagacagcagaggtgctttgcagcagagaaggcagggcggggcagaacaaccttccccagcacgcaggtcattagttccatttgcaagggccactccccgccaacactactaccctccagctcatttaattcaaaataaatgtacagggcaggaaagtcattgaggtgcaagaaaggagggaaggctttaaaagcgagctatgggccaggcgtggtggctcacgcctgtaatcccagcacttcaggaggccaaggtgggaggatcacctgaggtcaggagttcgagaccagcctggccaacatggcaaaaccccatctctacaaaaattagccaggcatgatggcaggtgcctgtaatctcagctatttgggaggttaaggtaggagaatcgcttgaacctgggaggcggaggttgcagtgagtctagattgcgccattgcactccagcctgggtgacagagtgagactctgtctcaaaaaataaataaataaaataaaataaaaacaaaagtgagctatgaatttcatttccaaggaaaggagaatacggaagagagagtggagaagttgaagagacccagaggagcatggcaccatgggagagctgtggctccagcgtgcagcggccctgggttcaaattctggctctgtcatttcgcggttgtgcgagggtgtcacatgcttagcctctctgaacctcagtttacccatctgaaaaatgaggaccaaagtggcacctatttcctggggctgttgggaggatccaatgagaccatgagctgatctatgcataacacctggctcagagcaggctctggaatgtagctcacatattttctgggcacctactggatgccaagcaccatgtggggatttggcattgaacaagacaggcaaggcagtgcccttgtggagttcaaggtcttgtgaagagaacaagacagaaaacatgtgaacgcataaaacgagatcatttcggggatttgcaggagggacaaagcaaggtgacttgagaaggtgtttattttagacagcacggtccagggaggtttctccaaggcgaggacattgaggtgagactcggatggagcccattatggggagcagcgtcaaaaacagtgagcaggggagcccctaatcccatcagcaaacagctcccacctgccctggaatggctgctgagagaggtccctgtgggtccccaggcctctgagagctgccacagcccggccagccttcctgagctagtcccatcctgatgggggaatggggggcttcagagtcaacaatgagggctctgcttgcgtttttatttctgatgccaagtggtgtctatgatgcagggtctgacttggggctcttgacaccttgcattttggggatattaagtcaaaatcttaaatgaccacttagcgttaggctctcggctatacgctagagacagacgtgaagaagtcctgcctctcaggccatgctgaggctctccccaagatctgggcagggctgcttcacagccatgccacccctctgcctcaaggcagctgtgaatcagtttttggagttcaaatcagatcgtgccacctgtgattccattgtcttgcaagtggcttccaagaggtagcccaagttcctcaaggtgacatttcaggtgtgttgcaacccagccctgctaagccctcccgcctggcccctcctgctccctggtcctcagtgtgccagcaacagccattagctgctgtagacagaaccggacacaagcatccatcctcctccttgaaattgcatgtgctgttcctcccatctagaatgccttttcctaccttcactgctcagcctgcaggatgcatcacagatgatgctgcctggtgaacccttgcctagcaacccgatccgtatctcaagtgaggtcaggtccagctctgggatctacaggacaactacaccaaaatctaagaccccttcatcccaggacccagggaatcacccccacccttcaggaccctgccagaccttcacccagcctgcctttcagggcactaagcctttccatgcccaggtcaatcacagtcgcacaaggaaagaacaaggaagtggtcagactcacagcatccttatcggcagaccatcctgcccactttacaaggaaggggactgaggctttcactttataaggtcactgggtgctatagtttggtttatgtgaccccctccagatctcaggttgaaatttgatctctgctgttagagatggagcctaatggaaggtgtttgggtcatgggggaggactcctyatgaatagatcaatgccctcccttgtgtgggacgagggtggaagtgagttctcactctattcgtttctgcaggagctggttgttgaaaagagcccggcacctccctccgtctcttgcctcctctcttgcatgtgacctctgcacacagcagctctcctttgctttcctccatgagtggaagcagcctgaggccctcaccagaagcagatgcaggcttctcgtacagcctgcagaaccatgagccaaataagcctctattcattgcaaattacccagacacaggtattcctttacagcaacacaaacagacgtagatgcccaacttgcaaatcagagcctggatttgaaccagatctttggttcctctggctcaaagtcatcctctttctactacattggtacaaaagtaattgcagtgtttgccactgaaagcaatgacaaaactgcaattactcaatgcatgcaggtcattagttccatttgcaagggccactccccgccaacactaccctccagctcatttaattcaaaataaacgtccagggcaggaaagtcattgaggcagccc

SEQ ID NO: 56206 - DNA, 2921 bp, Homo sapiens
cagtttatttgtccatttgagtcttaaagaggcgttgatgagaactccacaggaaatcatgagacagcagaggtgctttgcagcagagaaggcagggcggggcagaacaaccttccccagcacgcaggtcattagttccatttgcaagggccactccccgccaacactactaccctccagctcatttaattcaaaataaatgtacagggcaggaaagtcattgaggtgcaagaaaggagggaaggctttaaaagcgagctatgggccaggcgtggtggctcacgcctgtaatcccagcacttcaggaggccaaggtgggaggatcacctgaggtcaggagttcgagaccagcctggccaacatggcaaaaccccatctctacaaaaattagccaggcatgatggcaggtgcctgtaatctcagctatttgggaggttaaggtaggagaatcgcttgaacctgggaggcggaggttgcagtgagtctagattgcgccattgcactccagcctgggtgacagagtgagactctgtctcaaaaaataaataaataaaataaaataaaaacaaaagtgagctatgaatttcatttccaaggaaaggagaatacggaagagagagtggagaagttgaagagacccagaggagcatggcaccatgggagagctgtggctccagcgtgcagcggccctgggttcaaattctggctctgtcatttcgcggttgtgcgagggtgtcacatgcttagcctctctgaacctcagtttacccatctgaaaaatgaggaccaaagtggcacctatttcctggggctgttgggaggatccaatgagaccatgagctgatctatgcataacacctggctcagagcaggctctggaatgtagctcacatattttctgggcacctactggatgccaagcaccatgtggggatttggcattgaacaagacaggcaaggcagtgcccttgtggagttcaaggtcttgtgaagagaacaagacagaaaacatgtgaacgcataaaacgagatcatttcggggatttgcaggagggacaaagcaaggtgacttgagaaggtgtttattttagacagcacggtccagggaggtttctccaaggcgaggacattgaggtgagactcggatggagcccattatggggagcagcgtcaaaaacagtgagcaggggagcccctaatcccatcagcaaacagctcccacctgccctggaatggctgctgagagaggtccctgtgggtccccaggcctctgagagctgccacagcccggccagccttcctgagctagtcccatcctgatgggggaatggggggcttcagagtcaacaatgagggctctgcttgcgtttttatttctgatgccaagtggtgtctatgatgcagggtctgacttggggctcttgacaccttgcattttggggatattaagtcaaaatcttaaatgaccacttagcgttaggctctcggctatacgctagagacagacgtgaagaagtcctgcctctcaggccatgctgaggctctccccaagatctgggcagggctgcttcacagccatgccacccctctgcctcaaggcagctgtgaatcagtttttggagttcaaatcagatcgtgccacctgtgattccattgtcttgcaagtggcttccaagaggtagcccaagttcctcaaggtgacatttcaggtgtgttgcaacccagccctgctaagccctcccgcctggcccctcctgctccctggtcctcagtgtgccagcaacagccattagctgctgtagacagaaccggacacaagcatccatcctcctccttgaaattgcatgtgctgttcctcccatctagaatgccttttcctaccttcactgctcagcctgcaggatgcatcacagatgatgctgcctggtgaacccttgcctagcaacccgatccgtatctcaagtgaggtcaggtccagctctgggatctacaggacaactacaccaaaatctaagaccccttcatcccaggacccagggaatcacccccacccttcaggaccctgccagaccttcacccagcctgcctttcagggcactaagcctttccatgcccaggtcaatcacagtcgcacaaggaaagaacaaggaagtggtcagactcacagcatccttatcggcagaccatcctgcccactttacaaggaaggggactgaggctttcactttataaggtcactgggtgctatagtttggtttatgtgaccccctccagatctcaggttgaaatttgatctctgctgttagagatggagcctaatggaaggtgtttgggtcatgggggaggactcctcatgaatagatcaatgccctcccttgtgtgggacgagggtggaagtgagttctcactctattcgtttctgcaggagctggttgttgaaaagagcccggcacctccctccgtctcttgcctcctctcttgcatgtgacctctgcacacagcagctctcctttgctttcctccatgagtggaagcagcctgaggccctcaccagaagcagatgcaggcttctygtacagcctgcagaaccatgagccaaataagcctctattcattgcaaattacccagacacaggtattcctttacagcaacacaaacagacgtagatgcccaacttgcaaatcagagcctggatttgaaccagatctttggttcctctggctcaaagtcatcctctttctactacattggtacaaaagtaattgcagtgtttgccactgaaagcaatgacaaaactgcaattactcaatgcatgcaggtcattagttccatttgcaagggccactccccgccaacactaccctccagctcatttaattcaaaataaacgtccagggcaggaaagtcattgaggcagccc

SEQ ID NO: 56207 - DNA, 713 bp, Homo sapiens
ggtgaaaccctgtgtctactaaaaatacaaaaattagccgggtgcagtggctagcgtatgtaatcccagctacttgggaggctgaggcaggagaatcgcttgaacccaggaggtagaggttgcactgagccgagattgcaccattgtactccagcctgggtgayagagccagattccatctcataaaaaccaaacaaataaactaacaaaaaaacccaagaggcatgaactcactgtccacggaggaattatgtttgactgtggtcatagatcacatatttccagccagggggaggcgtggattttgtgctgatgctgaaaggagtgagggacttgggactcatctggaatattgtcctgggccagatataacattagacaagtattttcaggacattgcaagagtgatggccctttcttagtgggagagctgccttgaaagagtccattgtcctgacttgggggtgtagtgacgttggactgcagtgagacagagttaaagcagtgcttccccaaatttaatgtgtagtggggtggcacgcacctgtagtctcagctacttggaagactgaggcaggaggaccgcttgagcccacgaagctgaggtcaacctgggcaacatagtaagaccctgtctctaaaaaataaacaaatacagccaggcgcggtggctcatgcctgtaatcccagcacgttgggaggctgaggtgggc

SEQ ID NO: 56208 - DNA, 543 bp, Homo sapiens
agtcttgctctgtcgcccaggctggagtgcaatggcgcgatctcagctcactgcaacctctgcctcctgggttcaagcaattctcctgcctcagcctcctgagtagctgggattacaggcatccgccaccacgcccagctaatttttgtatttttagtggagacaggatttcaccatgttggtcagactggtctcgaactcctgacttcaggtgatccagccaccttggcctctcaaagtgctgggattacaggtgtgagccaccacgcccggccctcttccaggtttcaagttttatttttttggcacctccctaacctgtttctttttctatttctgtcgcccaggctggagtgcagtggtcgaggctcactgtagccttgacctcccaggctcaagccatactcccgcctcagcctycagaatagctgggaccacaggtgcacgccaccacacccagctaattttttgttttcaaattgtttcgtagagatgggggtctcgccatgttgcccaggtgggtctcaaactcatgggatcaag

SEQ ID NO: 56209 - DNA, 700 bp, Homo sapiens
tgcatgtgctcacttagggccatgggtccatgcttgagggtggagccctcaccatgcaccctgccctcttctacccagtatttcccacctcctgcctatataaataagacagttagatggatggtgagagtctcagtgtaactcaatgcaggtttggtcgctcgtcgtttgcagagtacagttaacatgagtgaggtatggcagaaagaaagtgacttcattaaccaaatctagcaatggggaagtagcctgatgccctccaaagtaatcactttgatttttgggggaaaggcaagggcttaaaaagggaaaattttgccaggcatggtggctcacgcctgtaatcccagcactttgggaggctgaggcgggtggatcacctaaggtcatgagatcgagaccagcctgaccaacatggtgaaaccccatctctactaaaaatacaaaaaattagsggggcatggtggcgggtgcctgtaatcccagtgactcgggaggctgaagcaggagaatcacttgaacccgggaagcagaggttgcagtaagccaagattgcaccatcacactccagcctggacaacagagcgagactccatctcaaaaaaaaaagaaaaaaaaaagttgggggggaaacttgatacggaaggcaggcaagaattgtgctgagtacaatgtctgcatgtcttgttctgttggatat

SEQ ID NO: 56210 - DNA, 619 bp, Homo sapiens
ctgtggactggtggaaaagaatggaggctgattgtcaaagaggctgacagccctactccttcctaggggttcaagtttatagtaatggaagtaactacacacagttgtaaattctttcttataaaattcttgttcttcagctgcactcctaagaaaaatgctaccatgcttatggggagctaaaacttcacctttaattcattaggataaatctgtttatgcttcacaagtrgaaagaaagtgtcaaagagctccctccaataatttctgacttttgtctcattttcctccatatttactttttttttatttcttcttcctctattaggctcaaatgttcttttttgtcttctatatttttataaatggaattttagtttcatttcatctatttcattatgcctcaattttaatcttgtactgattaaaatctttattaatattcttggaagagatttttttaagagtctttcttggcaaaatgcacctttaaagtcataagtagatgatatttctgagtggctaaaacatgggtggcgtaacaccaattttgattcatggcctaattttgacacttgctctatgccctggctcttgccactaactagccatgtgacct

SEQ ID NO: 56211 - DNA, 734 bp, Homo sapiens
gcaaaaattatattatgttgggtagatcagtggagggcaagatagattgtaagggacctgatattttcacttactataatgggaagcaaaaggatgatagctagaattgatgaacaaagatctgacaacaaatatattatttagtaatagagaagtaaataaataacatgaaataggcaataaacatgaaaatggttgcctatggtaagtaggatggtgattgtgtgtgggakaggtgaagaggtagggatacgtgaaaacttgtttttgttacgctttcagaactatttgacatttcaaactgaatattttttgataaagactaaaagttaaacaacctcttgattcttagagcagaagtgattattttaaagggaaaaatgacttacaagggtttagtgaattttttagtgcaatatctagaatgttccttcagttgtgattgctgaagctttgagacacctttcgtaggatatcctctttcactctacttctcctgtgtacgtaagatgaggttgcccaaaaatggatggatctcaaagtgaaacatggagtttgaagacattgtccaagtgccaatttgtgagaactgtgatttgtctggaaatttagaatagacagaatactaatattctgtctacactctacatgatgccagaataatcagctccaaagtgaagaatttaggcaatcaagggaatgcaaaaagtcttttgtctcattgccaagttttt

SEQ ID NO: 56212 - DNA, 1184 bp, Homo sapiens
gcatggtatatgagtgatggggcaagagaagccgtgtgccagggtagccactgccaggccttatgatgagacgaggagggttcctgctgtatttcttgtcctgtacctcctctgatgctaaggattagaccagagcttgtttttgtcctgagtggacccaactggatctgtaactctgttaacacgtctatttttcagcagtctcatcagggcgttcaacatataaaagagattaaaggggtattttattagcataaaacattttatgtttacatattcaatatttatatattattttgtcagaccaacgaagctgttctgctaaacacaaacactggaagttagagtttatgggtgattgtctcatcgctttcagtattcagtttattactgtatttcattttgactggatgttaggaaaatcctgagttacagagataagttaaaaatatccatagtttttacgcaaaaattagctgggtgtggtaggcacctgtaatcccgctactcgggaatctgaggcaggagaatcgcttgaaccttggaggtggaggttacggtgagctgagattgtgccactgcactccaacctgggcaacagagtgacactccatttcaaaaaaaaaaaagaccctatatttttaaaaacttgcttaaaatttcagattgcatttcatttatgatgaagcagaacaaaaatactttgtttcwaggtcgactcactacagtgtgtaaaaacttctcacattctttggcctgaacatgaaagccagataaacagtattcagaactctctgctaaaactctctcttgcactgtatgacaagcttgcttccagttcatctattaccgccctattgattcggcgttaggctctgagagaagtaaagcttgagcggaaagcaggcacttgcttattgaaggtgctaacttgttggttttgtatgagtcagcacaaattaagaggagaggagaaccatgcagaacaaaggttttcctcaatagtgtttcaaatacaaggtaagatttatgcaaaattggaaggaaaagctttattttaaagtctagcaacaaatgttaatgagttgaggctctgatgagtcagaatttggtataggatacatttaaatatgtgcttaaataacataaacataaaatatatttaaaatagtgcgcatatatat

SEQ ID NO: 56213 - DNA, 684 bp, Homo sapiens
atcccacgccggtgcacacataatatcctggaggctggggggtaaacaaaggtgacaggctgcaggtcagggcttcccagacccctgggaagggcatgagcctgagaagagcctaggtgttacagcctggctgtctgggtttgaatcctacttcctagctgtgtgaccttggaygaattcctaacctctctgggccttggtttcctcatctgtgaaatgggggataagctgatttcaactcatatgaatgaaatgagataatgagtataaagcccctggtgcatgaaaaggctattataatccagctgggctcagtggctcacacctgtaatcccaagactttgggaggcccaggtgggcagatcacctgaggtcagcagttcaagatcagcctggccaacatggtgaaaccccatctgtagtaaaaatacaaaaattagctgagcctagtggtgcacaccggtaatcccagctactagggaggctgaggaaggagagtcacttgaacctgagaggtgaagattgcagtgagccaagattttgccactgcattccaacctggacgacagagcaagagtctcaaaaaaagaaaaagaaaaaaaggataactattataatcaaggtcctcaaggtagccaagaagggaaaaaagagtcgtgcatgaaacgtttgtccagttccctg

SEQ ID NO: 56214 - DNA, 684 bp, Homo sapiens
atcccacgccggtgcacacataatatcctggaggctggggggtaaacaaaggtgacaggctgcaggtcagggcttcccagacccctgggaagggcatgagcctgagaagagcctaggtgttacagcctggctgtctgggtttgaatcctacttcctagctgtgtgaccttggatgaattcctaacctctctgggccttggtttcctcatctgtgaaatgggggataagctgayttcaactcatatgaatgaaatgagataatgagtataaagcccctggtgcatgaaaaggctattataatccagctgggctcagtggctcacacctgtaatcccaagactttgggaggcccaggtgggcagatcacctgaggtcagcagttcaagatcagcctggccaacatggtgaaaccccatctgtagtaaaaatacaaaaattagctgagcctagtggtgcacaccggtaatcccagctactagggaggctgaggaaggagagtcacttgaacctgagaggtgaagattgcagtgagccaagattttgccactgcattccaacctggacgacagagcaagagtctcaaaaaaagaaaaagaaaaaaaggataactattataatcaaggtcctcaaggtagccaagaagggaaaaaagagtcgtgcatgaaacgtttgtccagttccctg

SEQ ID NO: 56215 - DNA, 684 bp, Homo sapiens
atcccacgccggtgcacacataatatcctggaggctggggggtaaacaaaggtgacaggctgcaggtcagggcttcccagacccctgggaagggcatgagcctgagaagagcctaggtgttacagcctggctgtctgggtttgaatcctacttcctagctgtgtgaccttggatgaattcctaacctctctgggccttggtttcctcatctgtgaaatgggggataagctgatttcaactcatatgaatgaaatgagataatgagtataaagcccctggtgcatgaaaaggctattataatccrgctgggctcagtggctcacacctgtaatcccaagactttgggaggcccaggtgggcagatcacctgaggtcagcagttcaagatcagcctggccaacatggtgaaaccccatctgtagtaaaaatacaaaaattagctgagcctagtggtgcacaccggtaatcccagctactagggaggctgaggaaggagagtcacttgaacctgagaggtgaagattgcagtgagccaagattttgccactgcattccaacctggacgacagagcaagagtctcaaaaaaagaaaaagaaaaaaaggataactattataatcaaggtcctcaaggtagccaagaagggaaaaaagagtcgtgcatgaaacgtttgtccagttccctg

SEQ ID NO: 56216 - DNA, 763 bp, Homo sapiens
cagctaatttttaaatttttagtagatctggggtctcactatgttgcccaggctgttcacaaactcctggcctcaagtgattctcctgccttggcctccgaaggcgctgggatttcaggcatgagccaccatgcccagtctcatttctgttttatctagaacatgttttcatcacactgacttttttgagaagtccaggccagatttaaattccattttgtctttttatcggtggaaaagtagcatatttatgttgcaggacaaagatgaatcaaataggaagaaaatgtaaaacacatttggggccaggcacagtggctcatgcctgtaatcccagcactttgggaggccaaggtgggcagatcacctgaagtcaggagttccagaccagcctgaccaacatggagaaaccatgtttttttttttttttttttttttttttttttttattgatcattcttgggtgtttctcgcagaggtggatttggcagggtcataggacaatagcggagggaaggtcagcagataaacaagtgaacaaaggtctctggttttcctaggcagaggaccctgcggccttcygcagtgtttgtgtccctgggtacttgagattagggagtggtgatgactcttaacgagcatgctgccttcaagcatctgtttaacaaagcacatcttgcaccacccttaatccgtttaaccctgagtggacacagcacatgtttcagagagcacagggttggggtaaggtcacagatcaaca

SEQ ID NO: 56217 - DNA, 763 bp, Homo sapiens
cagctaatttttaaatttttagtagatctggggtctcactatgttgcccaggctgttcacaaactcctggcctcaagtgattctcctgccttggcctccgaaggcgctgggatttcaggcatgagccaccatgcccagtctcatttctgttttatctagaacatgttttcatcacactgacttttttgagaagtccaggccagatttaaattccattttgtctttttatcggtggaaaagtagcatatttatgttgcaggacaaagatgaatcaaataggaagaaaatgtaaaacacatttggggccaggcacagtggctcatgcctgtaatcccagcactttgggaggccaaggtgggcagatcacctgaagtcaggagttccagaccagcctgaccaacatggagaaaccatgtttttttttttttttttttttttttttttttttattgatcattcttgggtgtttctcgcagaggtggatttggcagggtcataggacaatagcggagggaaggtcagcagataaacaagtgaacaaaggtctctggttttcctaggcagaggaccctgcggccttccgcagtgtttgtgtccctgggtacttgagattagggagtggtgatgactcttaacgagcatgctgccttcaagcatctgtttaacaaagcacatcttgcaccacccttaatccrtttaaccctgagtggacacagcacatgtttcagagagcacagggttggggtaaggtcacagatcaaca

SEQ ID NO: 56218 - DNA, 598 bp, Homo sapiens
tggggctccagggatgggcagagactcagatgctcagatctggtatggagccccatgactgaaccccactgagattttgggttctttaatacaacagtgaacctttcaatgaccatgaaggtgtctcagcctcctgagtagctgggattacaggcgcatgccaccatgcctagctaatttttgtatttttagtagagacggggtttcaccrtgttggccaggctggtctcgaactcctgacctcaagcaatccacccgcctcggcctcccaaagtgctgggattacaggcatgaaccaccacacctggccaagactccaactcttaaacaaacaaaaagacactcatattggattcaagcccagctaatgacctcatcttagcttgatcatctgcaaagaccctttccccaaataatatcacattcacaggtcctggggttgaagatttcaatatcttttgggagcacaaaattcaaagtataacaatgatggagatgtagagaaatggacatgttccaaagacatttaggaggcaaaatcaatgactcagggatgggttgcttatggccagttggggaaagaaatgtgttgagcatg

SEQ ID NO: 56219 - DNA, 772 bp, Homo sapiens
gcattcactttcaaaggtttgtacaagttgttggaagacatttaaatagaatttattcatacaaagatagcttaaatgatcacttactttctttaaaattaattacctcaaccattaaaacagaataaattatttcataatattaacagtctccaagtagagcttaaggatcttagtgcctggccaaaatagtagcacagtagaaagaaatttggggatggaaataccagtaaatttctcctctcagttaactattctgaaaatcactgataccaaggttaacactgcagtaattaagtaccaatatttgtcccatttctaatttaaatctctatcctggttattggcattctctcataaactcatttattgttcaacagttaaaagaggaggcatgaattagaacttgcagaggaagaacwtgaaaactccatattgcttgacatgtttcagtttcacaacctgattagcagaacttatagaatcaattcgaggtttaaattcctcccatattatgattaatgctaaatgtaaatttcaagttaacataactaaatttaattctacatcaataaagaaatacgctctaattgaaatgacgatatgagattattcagtgtttagtaatagaatggtgaaattattcccctaggatttttacattactgaggaggtggaaaagaaggagaaaagatagagcaaggctttttgaacactggcgttatcatcctgtttctctctgaggaacatataagtcagccttttatgcttt

SEQ ID NO: 56220 - DNA, 1232 bp, Homo sapiens
  misc_feature (1)...(1232): n = A,T,C or G
acattgcctttcaaaggtccccatcaagcactgagccatagttgcctgtaatgattagatattctttctaagctcacatcctccttttccaaccagtacttcctggaatcatctctcaaataaattattttcactgatatcattgtctcatgatctgcttatgggagaacccatcctaagacatatcttcatgaatcccataaaaatttatattctatattccttttctaaggcctgttatccaacagcaaggaccaaagacagtaatttttaccttctgggatatcaaggtctatggaagggatctcagtctatactgtccagatttatggctatttagctccagggacttcaattcacttgaaagtttccaaaatccatggaagctatcagccatttaaaaggtgctgagtggcttcatatggaagcatatttattatctagccttggtaagatatatagactgtgaatattatacccagaaaacatcagtctgaactctgacaccaaacagtcactagtcttgaaaaaaaaattatttcacctgtctaacatcagtattctaatccacaaaatgaaaagttgaaatagatgctccctcagcagctctccagctgttaggytccatgattctgattctaaataggtctctgaagtccattacatgtgacacatttttttcttaattttttttcttagaagataaacttaagggccaggcacagtggctcacgcctgtaatcccagcactttgggaggccaaggcgggcagatcacaaggtcaggagatcgagaccatcctggctaacaaggtgaaaccccatctccactaaaaaaaaaattacaaaaaaaaattagctgggcgtggtggtgggcgcctgtggttccagctactcaagaggctgaggcaggagaatggcgtgaacccgggaggtggagcttgcagtgagccgagatcatgccactgcactccatcctgggcgacagagcgagactccatctcaaaaaacaaaaacaaaaacaaaacaaaaaaaaaacacgataaatttactagcagtattctttctcaaaaccaatttattaattcaaatttagtnnnnnnnnnnnnnnnnnnnnnnnnnnnnnnnnnnnnnnnnnnnnnnnnnnnnnnnnnnnnnnnnnnnnnnnnnnnnnnnnnnnnnnnnnnnnnnnnnnnntgtgtttttcagttactggaaacaagaagagattac

SEQ ID NO: 56221 - DNA, 651 bp, Homo sapiens
aattttggataattgctctagtagtgatacagtgatgaagaagggtgctgctgctacacagagggccaagggagagcagagacctatttgagcaaagtcctacatgccgtattaggtgaggatgttataggcagtggaacaggcagctgcaaagcgcataagcagaatgagctgcatgtgttcaaaaaacagaaggaaagtgagtgtggctggaacacagggagggaggacgagagtggtcggaagtgaagtcagaaagatacaccagggctcaatcatgaaggacctttgaatttacagtgaggacattggattttattctcagttcaatggcaagacataagttaataatatatatctatgcatatatagtaacacatatatgcctatatatgtgaattgctgtataattgaactgctaaatgataaaatgaactccatcataatttcctgccattaaatgatctgcccaggtctaattaatgggggaaaatgaggtygttttatgtacagtcacgtgtcctttccagaattaggtattttaaaggtgaaagcagtttggcatcatctctccacgctaatatgttagatgattgataacatattcaaatagcatttattgagctctccacaatggggtgaagataaatg

SEQ ID NO: 56222 - DNA, 651 bp, Homo sapiens
aattttggataattgctctagtagtgatacagtgatgaagaagggtgctgctgctacacagagggccaagggagagcagagacctatttgagcaaagtcctacatgccgtattaggtgaggatgttataggcagtggaacaggcagctgcaaagcgcataagcagaatgagctgcatgtgttcaaaaaacagaaggaaagtgagtgtggctggaacacagggagggaggacgagagtggtcggaagtgaagtcagaaagatacaccagggctcaatcatgaaggacctttgaatttacagtgaggacattggattttattctcagttcaatggcaagacataagttaataatatatatctatgcatatatagtaacacatatatgcctatatatgtgaattgctgtataattgaactgctaaatgataaaatgaactccatcataatttcctgccattaaatgatctgcccaggtctaattaatgggggaaaatgaggttgttttatgtacagtcacgtgtcctttccagaattaggtattttaaaggtgaaagcagtttggcatcatctctccacgctaatatgttagatgattgataacatattcaaatagcatttattgagctctccacaatggggtgaagayaaatg

SEQ ID NO: 56223 - DNA, 665 bp, Homo sapiens
atgaacaattttaataaatccattagattcctcttttattggtttcctctgagcaatactaataaataacagaagccaattactaggtgcaaaagtaattgtggtatttgccattaaaagtaaagaaaggctgggcacagtggctcaaacctataatcccagcactttgggaggccgaggcaggcgaatcacctgaggttgggagttcgagaccagcttggccaacatagtgaaaacctgtctctactaaaaatacaaaaattagctgggtgtggtggtgcacgcctggaatcccagctactcaggaggctgaggcaggagaatcgcttgaacctgcgaggcagaggttgcaatgagctgagattgtgccactgcactccagcctgtataacagagagagactctgtctcaaaaaaaaaaaaaaaaaaagtaaagagaaagtacttttaatggcaaagactgcaattacttttgcaccagcttaatattactcagttgtgtctatgaaaaattttttaatctaaacaataatttggataaatttttgaataaggtatstaacctaaataataacttcacatgttcctaagtatctgttaatttatttgaatgcctggcccacttaaaaatctgatccacaaaatgctatagtcatgggtccatag

SEQ ID NO: 56224 - DNA, 644 bp, Homo sapiens
ctgacaggttagtggctgagaatttagggtcaatttttctaggtatatatcttcagttgactcctatattttgctctgcattctcacacccacacacctttgtgctttatctcacactccaggtttcggaggcataaccagagccttctcagttgtagccctttgtttaaacactctagactgtgttccagctccctccatcccattcctccagctgcttttcctcttccaggtatccactgaaatctcattctctctctctctttctctctctctctctctctctccatatatatatatgtatctcttctctctcattgtggatatgtcctgttgaagtttcttcawttttatttaaataagcatgtggtcagtctgctatatggcccataaaaccccacctttacatttttaatgctagtcaattctcctagcaccttatctatttattttcactcagggaatcaatcaaattattaagtagagtgctaaacaaagcaaagcaacctaatacttatttaacattatccaagtccagccatcatcacatttcacttagcttcaggaatccattttaacattaagttcttatcacaaaaattaaattacagggttattgccttttatgtatatttgaattgcat

SEQ ID NO: 56225 - DNA, 601 bp, Homo sapiens
ccatcacgcctggctaattttttatatttttagtagagaaggggtttcaccgtgttagccaggatggtcttgatctcctgaccttgtgagctgcccgcctcggcctcccaaagtgctgggattacaggcgtgagccaccacgcctggctgaacagcttattaattaaagacaaatactcatagcctgtgaaagaataccacactccacacagggccatacggaggtagtactccagaaaagagtaacaaccaggtgctgtagaatgtaagttttgtagcatcaagatggagaagctccactggtccccagaggaggggactggcttgtttgaataactcaaaaaattgatagggaactgaaacccactacaaagtaataagcaggaactgttctggttccctggataagaatggataagaagggttcatttggctaagagagctkattcatgggagcaaagtgggaaggggaatttgttctcaggccatctaaggctgtatcgttttcatcagatgtcaaggcgacatatcatactgggccttaatttccggccttataccgcaacttggcaggcagcatccagagtgtggatataaacag

SEQ ID NO: 56226 - DNA, 1831 bp, Homo sapiens
ttgtctatatatttcaataaaacatttacctaataataatgacctttattcattctctttcagccactgttaataataagtgccgagaccagctcagtcggggagaccctaacctagcggtgctagaggaattaaagacacacacacagaaatacaggggtgtggagtgggaaatcagggatctcacagccttcagagctgagagcctccaacagagatttacccacatatttattgacagcaaaccagtgataagcattgtttctacagattatagattaactatgtgtttggcaaagtgtattcactgggcagatcctggaatactgacacactgaaaaatactacagaaaaaactcctgatggagactctgattcagcttgtgtgacactaatattttcattttgggtggtgagcaaatgtctttcctcactcagagaagggctcagtatccctaaacagcatagctgagttatgactggcctaatttagagctgcaccaacttcatgtaccaaatagggacaccgctggcctctgtgcttccctctgactcgaatacaccagaactgggatcatttctgcaccctggaaactgacctagaggtcctcctttgtcacatgcactgtcattctgtctcccagaggggctcacgggttgactatgcctatgtggacaaagtggaatcagccctcagtggtcttctgtccatrgacaacatcaaattctgtaattaaatctccgttggcatcaaacatgatctctgtcccatcaggggtcttgaaatgcacgttcttgagaggacgaagcagctggggaaggatggatgacactgtagatgggcagggccagtcccagggcctgtgcaaaatgcatcaggtcctcagccaccgtggtgagcaggggctgcctcaggcagggccaacgtatccatgaggcacgggagacccagggctgtgatatttgcagggtcccatgaaaatgttctaatgttaactgcttgtaaaagcaaagaaaaaaattaaaaagtaattaatgggccatgcacggtggctcaagcctgtggtcccagcactttgggaggccgaggcaggcagatcacgaggtcaggagctcaagaccagcctgaccaatatggtgaaatgccgtccctaccaaaaatacaaaaattagccaggcgtggtggctcacgcctgtaatcccagccactcaggaagctgaggcagaagagtcacttgaacccgggagacggaggttgcagtgagccaagatcatgccactacgctccagcctgggcgacagagcaagactctgtctcaaaaaaaagtaataatgaacatataataatgagtccaacccaggatatattcatctttagaccaaggcaatggtaaaattgaattaagaatttttttttccacggaggaaggaacgcacaaaagccacagtgtggcccctgctccagggattccgtctgagcaaacacttcctccttggccttcccatcacactccaagtggagtaaaatcctggcgggacctacacaggtcagtccctgaacacctagacatcctgatccctcagtcacaaacctagcatggacttaagacccctcatcctggccaggcatggtagcttatgcctgtgatcccaacacttaccccaaagtggacagatcgcttgagcccagaagtttgagaccagcctgggcatcatggtgaaaatacaaaaattagctgggcgtggtggtgcatgcttgtagtcccagctactcgggaggctgaaggatcgcttgagcccaggaggttgagactgcagtgagctgtgaatg

SEQ ID NO: 56227 - DNA, 1831 bp, Homo sapiens
ttgtctatatatttcaataaaacatttacctaataataatgacctttattcattctctttcagccactgttaataataagtgccgagaccagctcagtcggggagaccctaacctagcggtgctagaggaattaaagacacacacacagaaatacaggggtgtggagtgggaaatcagggatctcacagccttcagagctgagagcctccaacagagatttacccacatatttattgacagcaaaccagtgataagcattgtttctacagattatagattaactatgtgtttggcaaagtgtattcactgggcagatcctggaatactgacacactgaaaaatactacagaaaaaactcctgatggagactctgattcagcttgtgtgacactaatattttcattttgggtggtgagcaaatgtctttcctcactcagagaagggctcagtatccctaaacagcatagctgagttatgactggcctaatttagagctgcaccaacttcatgtaccaaatagggacaccgctggcctctgtgcttccctctgactcgaatacaccagaactgggatcatttctgcaccctggaaactgacctagaggtcctcctttgtcacatgcactgtcattctgtctcccagaggggctcacgggttgactatgcctatgtggacaaagtggaatcagccctcagtggtcttctgtccatagacaacatcaaattctgtaattaaatctccgttggcatcaaacatgatctctgtcccatcaggggtcttgaaatgcacgttcttgagaggacgaagcagctggggaaggatggatgacactgtagatgggcagggccagtcccagggcctgtgcaaaatgcatcaggtcctcagccaccgtggtgagcaggggctgcctcaggcagggccaacgtatccatgaggcacgggagacccagggctgtgatatttgcagggtcccatgaaaatgttctaatgttaactgcttgtaaaagcaaagaaaaaaattaaaaagtaattaatgggccatgcacggtggctcaagcctgtggtcccagcactttgggaggccgaggcaggcagatcacgaggtcaggagctcragaccagcctgaccaatatggtgaaatgccgtccctaccaaaaatacaaaaattagccaggcgtggtggctcacgcctgtaatcccagccactcaggaagctgaggcagaagagtcacttgaacccgggagacggaggttgcagtgagccaagatcatgccactacgctccagcctgggcgacagagcaagactctgtctcaaaaaaaagtaataatgaacatataataatgagtccaacccaggatatattcatctttagaccaaggcaatggtaaaattgaattaagaatttttttttccacggaggaaggaacgcacaaaagccacagtgtggcccctgctccagggattccgtctgagcaaacacttcctccttggccttcccatcacactccaagtggagtaaaatcctggcgggacctacacaggtcagtccctgaacacctagacatcctgatccctcagtcacaaacctagcatggacttaagacccctcatcctggccaggcatggtagcttatgcctgtgatcccaacacttaccccaaagtggacagatcgcttgagcccagaagtttgagaccagcctgggcatcatggtgaaaatacaaaaattagctgggcgtggtggtgcatgcttgtagtcccagctactcgggaggctgaaggatcgcttgagcccaggaggttgagactgcagtgagctgtgaatg

SEQ ID NO: 56228 - DNA, 718 bp, Homo sapiens
tagagatagtataggttttgaatattgctctcaccctttactagctgtgattttgagcaactactcacacataatctgtacattgtcactgagcttgtacacataaagcatttagtacagtgtctattttaaaattttatcagtaaatattaactattaatattttatcatcatcatcgtcatatttcttatcaagacaaaattataatatttatgagaagaaagcatctatcagcaatgacttgagcttatacttttataattaaaattttcatcataaaattttacaaagacaacttgaacccggacaaacttgtcaaaagttgtgttgaagaataaatgattaaagttcagtygtaaatattcatcagcaatagtgaacacataggtttgagatttcatattcattgaaattgctttgagttcaactttgctaaagaatttaatttttttcacagttgaaaccattgctattttttctatcaaaagctatattataaacaaattcttaaaaagaggcaacattctgatattctaaaatccaaaatacgtagatgataagtaatattaaataaagcaactaaatatcttgcccttggaactcagaggtttccctttaaatttaacttaagaagaacatagtggacacccaatatgtatttactgaattaaaaaaaaaacaaatatttctattaataaataaaagaccttttcgttg

SEQ ID NO: 56229 - DNA, 500 bp, Homo sapiens
ttttaatatgctggggcagcctttgggttactgaatttagacctgcatttctccctttcttaatcatctattatttaaataggccattttatagataatataacagagactcacatttattttcttaattcaaatacttgagagcagagatataccttatctgtaacaacttttataattaccacagatggaaccgtaatactcagtgaagtcttgcaacctttacatatagtgtgctgcattaacatctgtttctagctctcttggcatacgtgacatccttggatggctagaagcatatccttactcatttttgtgtttatagaacggcatagtggcaagtatgggcamtgaaaatataacttgcttcacaaaggagaggcaatataaaaatggacaaatgcacctctttggtaaattgtcaatattaaacatttcacttaaaatatttttttctgtgggtgacacgataccatcaactgatcacaggctgaaaaaca

SEQ ID NO: 56230 - DNA, 725 bp, Homo sapiens
atggcatttgaagggaataaaaatacagatgtgattgccattgattattttcctcctctttgcttccttacttgctgactgagtgtgcctagatgagatgaacagttggttagcacatgctgggcaattaccgtgctgcaaatttgcagctacggtgatcctataaggcacttctttcttgatctttctgtcctcaattaggagatgacatgattagcaaaagatattcttacatctagtataaaagtaactgaattgtactttcaatattgcaaaaaaaggtgaaagtgaggagaaatatgagggtgaattcaatttagagtgatttgggacattgagtgctgacactctttcctggatataagatttcatggatagcagactttcttttttttatccactggtactagataacccatttatcttagatgataggtttatgcattttattttttgagaaaaaagccactggattttaaaaattcaactcagacttaataattttgctgacagacagcaggatattagagacagtcctcaataatcacagttctgattcagatgaagtattttgaatacaaagtgacagcagaaaatggcatagatttcaataactttaagaaccaawcttgcattgtctgagtaaactctggctggtgattattgaataagcatgtttacctgtgattttacacaggaaagggtatcatttcacagcaaaatga

SEQ ID NO: 56231 - DNA, 1284 bp, Homo sapiens
tgaactttatttaaggggaagagtaataaccaattcctcccttcctatattccttccttctttctcaatgtgttttagagtgggagttggggaaaggctacctctttgttttagaacagtgattctcaaacttcaatatatcaaaatcacctggtagtcttgtgaaaacctagattgctgggtcccggccccagagtttctgattcagtagatatcaggtatggccagagtatgcatgtctacaaactcccaggtgatgttgatgctgcctgctgggagcacattttgacaaccactattttagaggttctgccatgattaggttgtattatttctcaacggtcgaatggacgagttcaataatttaaaaaggaagtgctaaagtccaaaaggtcatgaactttagagactgggataggagagaggttggagacttagaagagttcaaagcttgcctccgtgctttcctgagtgagaaggcctgcacgggtgtcaatagcaagtgggcatatggggtcatcctgttgagacactcgacagagatgaccagggctgagctcagcataaaaagaagctgccagtggagctgcagaatttgttaggcactcagacatgacatggcaacaacatcagcagtgtgcctgcagggcaccggaaccaggatcctctctctctttccaactgcatgagccctagggtacagctgaagaggaagaggctaccagagatgattggtctgatgtctctccaacttagttagaggagccttaacccagcctgaatttaatttagaaaaataatgaaatgtgataaatattgccctctgaacgctgyggagcagtcaagaccagttttaatatcttctgctgaaacaaagccccattaactctttgactaggaagcatggttgttaccctgattgcagaggccccctcagctggggcaaagttcaggggggatattgcttcccacacacggagaatggcaattgccaggttgtgagcatgtggaatacggagaggaccagagaagcatttgaaacggagctcacagattactgcagggtattctaactgtaaatgcattctctttgttaaatggatgttagttgttaggaaagaaatggaattaatgtctcattcataggttcaagctgcatatgattttctaggcatatgtcaggagctgggtatacaaaggtgcattagatatgactacagttctcaagaggtattcagtttagagaaggggtggtcatttgttattgtgtttgtctaaggcagt

SEQ ID NO: 56232 - DNA, 1109 bp, Homo sapiens
tgctgcggcaccagtcattgtcattatattcatagcagtctttcaagcaaaaaggagagggagcaaacagtcttcccaagacaagattctgcctctttagccaaatgtgaaaactttcccatatccattctgagctgcaagggagtctgaggaagaaagtttctggccaaggagcaggggtctgcactcactatggtctgtcctctgttgaccaggatgttggggctggaagtgtttgtcagaccctgggcaacttctaaattagccttcctgagcctcagagaagactcggtgggaccacttggtcaggggcctggaccttgaccaggaactggtggcttgtgtttgatacaagaacaagaaccccagaaggaaaactaaagagacagaagcttctaggccgggcatggtggctcatgcctgtaatcccaacactttgggaggctgaggtgggcagatgacttgaggtcaggagttcgccaggcgtggtggcgagtgcctataatcccagttactcctgaggctaaggcgggaggattgcttgaaccggggaggcagagtttgcagtgagctgaaatcatgccactgcgctccagcctgggtgacagaatgagacttcgtctcaaaaaaaaaaaaaaaaaaaaaagcagcagcagcttctagaacagtggttcgcagagtgtggtctgtgccagcagcatcagcatcacctgggaactcattagaaatgcagagtctcaggccgcaccgggacctgccgattcccagattctcaaatctgtattaggaaccagtggtctacaaacccgtgcgcacgwcttggggaacgtttgttttcccctttgcttcccttagctgcatttttttcccctgaattcgaagcctgcttcgttgcctgatgacgtgtgagtccctgtgtccggtgaacataatcatttcttttgtatttccgccacccaccccgaatgcctgtactttaccctctcccagggtttttcctgtttctcataagccagcattgagaaaaatccaaacccttttgagatacctggttttcttggcaagactgcagctttatagctgtatttagaacagcgtcgaatggtgaa

SEQ ID NO: 56233 - DNA, 615 bp, Homo sapiens
ggggccgaggtaggtgaatcacctgaggtcaggagttcgagaccagcctggtcaacatgacaagacttcatctctactaaaaatacaaaacttagctgcctgtggtcccagctacttgggaggctgaggcaagagagaatcgcttgaacccgggaggcagaggttgcagtaagccaagatcaccaagatcacgccactgctctccaacytggatgatggagtaagactctgtttcaaaaaaaaaaaaaaaaaaaaaaacacgtattctgcatctttcctgagtcttcctccaaaaggagtcctggtgtcaccccggctccacttcctacagctctgagaccttagattaaggcttccctgccctgggcctcagtcttctcacctgtaaaatgtaggtaataaccacttcttccctaacaagtgacagtcaaaggagggagagactcggaactatgcctaatctatagtcaccctaagtcagcgtggatattgtcaccatttttaaaaaattgtttgtttgctttagagacagggtcttgccctgttgcctagaatagacaacagaagtataattatagctcactgcagcctggaactcctggattcaagggatcc

SEQ ID NO: 56234 - DNA, 615 bp, Homo sapiens
ggggccgaggtaggtgaatcacctgaggtcaggagttcgagaccagcctggtcaacatgacaagacttcatctctactaaaaatacaaaacttagctgcctgtggtcccagctacttgggaggctgaggcaagagagaatcgcttgaacccgggaggcagaggttgcagtaagccaagatcaccaagatcacgccactgctctccaacctggrtgatggagtaagactctgtttcaaaaaaaaaaaaaaaaaaaaaaacacgtattctgcatctttcctgagtcttcctccaaaaggagtcctggtgtcaccccggctccacttcctacagctctgagaccttagattaaggcttccctgccctgggcctcagtcttctcacctgtaaaatgtaggtaataaccacttcttccctaacaagtgacagtcaaaggagggagagactcggaactatgcctaatctatagtcaccctaagtcagcgtggatattgtcaccatttttaaaaaattgtttgtttgctttagagacagggtcttgccctgttgcctagaatagacaacagaagtataattatagctcactgcagcctggaactcctggattcaagggatcc

SEQ ID NO: 56235 - DNA, 645 bp, Homo sapiens
ttggatcaagcaaggtcctacaggaggactgctgtggctcagtccccaggacagctccagggagagttcaggctgctccttgcagttttccgatcaagacaagagagctggcgtgatgtttcagagacaggggcttgctctgtcaccaaggttggactgcaatggtgcgatcataggtcactgcagcctcaaactcctgagctcaagcaattctcttgcctcagcctcccaaatagctgggactataggcactcaccaccatgtccggctatttttaattttttttttttgtagagatagggtcttgctgtgttgcccaggctggatttgaactcctggcctcaagtgatcctcctgccttggcctcccaaagtgttgagattacaggcatgagccattccacccggccagctggcatgcttctaagcctgccttcaccactaattggttaagggctggcctccaaggrgagtgcaaattcccaggcactccagtctcagcacacacaggcaaagtgagagcagccctctgccaacatgcaggtgctggctaagagaaagcacacaaggagctgtgtgcagagcgtggtctgagtgcgtgtgggcagaggccccaagagccctgctatgtgctcttattccaagt

SEQ ID NO: 56236 - DNA, 554 bp, Homo sapiens
caccttctctattaaaatgagattttaattttttttctcttcagttcatcggttaacaagataaaaaaattaataaaaaattaactttttaaaacatttaaagtaacgtaggagtggaagcagtatgtggactcatggggcttgggtctgaatcctacctagatcggcactgcgaaatggggataatgatctcctagagctgctgaaataggaaaatggaagaacagcagctgaygtattaatattatcattattactactacccattacctgacaagtcataattgtgacatgcaagaggctggaccagttgtttcaacaattttttccgtctagaattcggcggtagggtctgagacaacacctcagcttagatcagtgccttctctgaacagcgttcactaagcagcccccaaccccaaaacccccaagtccccgggcgccgaggacgctgcgagtcctgcgcatgcgcaaggttgctctctcgctcaccgcctccttggcgaatggcctgttccattctcgagggatgccggcgggagcgtgaggcggga

SEQ ID NO: 56237 - DNA, 667 bp, Homo sapiens
aatgtaccatgtatgcttaaaatgaatgtatctacatttgttcctgagatacaggttgatggacggatggctacatggatgtgatggagatggtttactatcgggaccttccgcatcctgctgatgttttgttgcttaggatatgaatggctgagcggaggctgtaaaacctggcactctgcttgggtatgaggttcttcctgccatcctgccatcatttgttttttatgttttgtcgccaaaggtgaccttgaggaaccctgggagctcaggaaggaaggagmgcccagaagcagggacagggagctggttggggaggaccagaaatcaggtttgtgaaggttccagagaggacctgtccttgggaggagcgtgggggactgagatgggggaggggtcattggaatgatgcgggcgctacttggcattgtccattgtgaggcaccaccggggtcatcagggattggtggagagggagtataaagccccagggttgctaagggagggcccagaccgaagaaggtttggtggaaaggagaacctttgtctccttctaattgctcctaagcctcacgctcccttgccctgcgtgtcctgttgcttccctgatcttctacgtgacctgtagctaaaccttccaccagcgcttgagaacttaatttgaact

SEQ ID NO: 56238 - DNA, 667 bp, Homo sapiens
aatgtaccatgtatgcttaaaatgaatgtatctacatttgttcctgagatacaggttgatggacggatggctacatggatgtgatggagatggtttactatcgggaccttccgcatcctgctgatgttttgttgcttaggatatgaatggctgagcggaggctgtaaaacctggcactctgcttgggtatgaggttcttcctgccatcctgccatcatttgttttttatgttttgtcgccaaaggtgaccttgaggaaccctgggagctcaggaaggaaggagcgcccagaagcagggacagggagctggttggggaggaccagaaatcaggtttrtgaaggttccagagaggacctgtccttgggaggagcgtgggggactgagatgggggaggggtcattggaatgatgcgggcgctacttggcattgtccattgtgaggcaccaccggggtcatcagggattggtggagagggagtataaagccccagggttgctaagggagggcccagaccgaagaaggtttggtggaaaggagaacctttgtctccttctaattgctcctaagcctcacgctcccttgccctgcgtgtcctgttgcttccctgatcttctacgtgacctgtagctaaaccttccaccagcgcttgagaacttaatttgaact

SEQ ID NO: 56239 - DNA, 667 bp, Homo sapiens
aatgtaccatgtatgcttaaaatgaatgtatctacatttgttcctgagatacaggttgatggacggatggctacatggatgtgatggagatggtttactatcgggaccttccgcatcctgctgatgttttgttgcttaggatatgaatggctgagcggaggctgtaaaacctggcactctgcttgggtatgaggttcttcctgccatcctgccatcatttgttttttatgttttgtcgccaaaggtgaccttgaggaaccctgggagctcaggaaggaaggagcgcccagaagcagggacagggagctggttggggaggaccagaaatcaggtttgtgaaggttccagagaggacctgtccttgsgaggagcgtgggggactgagatgggggaggggtcattggaatgatgcgggcgctacttggcattgtccattgtgaggcaccaccggggtcatcagggattggtggagagggagtataaagccccagggttgctaagggagggcccagaccgaagaaggtttggtggaaaggagaacctttgtctccttctaattgctcctaagcctcacgctcccttgccctgcgtgtcctgttgcttccctgatcttctacgtgacctgtagctaaaccttccaccagcgcttgagaacttaatttgaact

SEQ ID NO: 56240 - DNA, 667 bp, Homo sapiens
aatgtaccatgtatgcttaaaatgaatgtatctacatttgttcctgagatacaggttgatggacggatggctacatggatgtgatggagatggtttactatcgggaccttccgcatcctgctgatgttttgttgcttaggatatgaatggctgagcggaggctgtaaaacctggcactctgcttgggtatgaggttcttcctgccatcctgccatcatttgttttttatgttttgtcgccaaaggtgaccttgaggaaccctgggagctcaggaaggaaggagcgcccagaagcagggacagggagctggttggggaggaccagaaatcaggtttgtgaaggttccagagaggacctgtccttgggaggagcgtgggggactgagatgggggaggggtcattggaatgatgcrggcgctacttggcattgtccattgtgaggcaccaccggggtcatcagggattggtggagagggagtataaagccccagggttgctaagggagggcccagaccgaagaaggtttggtggaaaggagaacctttgtctccttctaattgctcctaagcctcacgctcccttgccctgcgtgtcctgttgcttccctgatcttctacgtgacctgtagctaaaccttccaccagcgcttgagaacttaatttgaact

SEQ ID NO: 56241 - DNA, 667 bp, Homo sapiens
aatgtaccatgtatgcttaaaatgaatgtatctacatttgttcctgagatacaggttgatggacggatggctacatggatgtgatggagatggtttactatcgggaccttccgcatcctgctgatgttttgttgcttaggatatgaatggctgagcggaggctgtaaaacctggcactctgcttgggtatgaggttcttcctgccatcctgccatcatttgttttttatgttttgtcgccaaaggtgaccttgaggaaccctgggagctcaggaaggaaggagcgcccagaagcagggacagggagctggttggggaggaccagaaatcaggtttgtgaaggttccagagaggacctgtccttgggaggagcgtgggggactgagatgggggaggggtcattggaatgatgcgggcgctacttggcattgtccaytgtgaggcaccaccggggtcatcagggattggtggagagggagtataaagccccagggttgctaagggagggcccagaccgaagaaggtttggtggaaaggagaacctttgtctccttctaattgctcctaagcctcacgctcccttgccctgcgtgtcctgttgcttccctgatcttctacgtgacctgtagctaaaccttccaccagcgcttgagaacttaatttgaact

SEQ ID NO: 56242 - DNA, 610 bp, Homo sapiens
tgggggctgagcctctgccccactgccctgccctggcagtgaggtgcagcctgcagtgtgtgcacggccggttccgggaggaggagtgctcgtgcgtctgtgacatcggctacgggggagcccagtgtgccagtgagtcctgccccagggcccccaaagagccagctcctctcaagaccccccttcaatggggcatcagctcccaggagcccgctgtgtgcctctctttccaactcattcagtgacaacacgttgagatcttgaaactggccacagcatggatatttacaccaaagaaattggcaaatgctataaaccatggatttttttttttcttttgagagagagcaagctcaatattccaacttaccagctcrctcctgaccctcaccacccactcttttggagcaggtggccagaggaaggggcaccctgagcttagctccccggcagggcaggaaagggcagggattctgaagtccacacacaaactcaggctcccctaccccagccaaggtgcattttcccttccacacctgtgacctgaggatcgacggagactgcttcatggtgtcttcagaggcagacacctattacagagccaggatga

SEQ ID NO: 56243 - DNA, 519 bp, Homo sapiens
tcatcaaaccagatgacacaaatcaaatgacatttcactttgttttggtccattttgtttgttagagacaagagtgcagcggggccatctcagctcackgcaacgtccagctcctcggcccaagcgatcctcccacctcagcctctccagtaactgggataacaggtacgcaccaccaggcccgactaatcttttttggaattttttgtagagatggggtttcgccatgatgccctggctagtcttcaactcctggactcaagtgatctgcccacctcggccccctaaagtgctgggattacaggcctgagctgtgtaatttcatgccgcgtgacacagcccagtaaaaaggaagaaaccccgcgggtccagcgtctactcacaggggtgggctgatggctgataaatcccagcaggagccaaatgaggagccaaaagcgcagccgcatgtcctgatcctttcagggtgccctgaggcggccaggacagaggtggaggtggcttagggcaggggggagg

SEQ ID NO: 56244 - DNA, 519 bp, Homo sapiens
tcatcaaaccagatgacacaaatcaaatgacatttcactttgttttggtccattttgtttgttagagacaagagtgcagcggggccatctcagctcactgcaacgtccagctcctsggcccaagcgatcctcccacctcagcctctccagtaactgggataacaggtacgcaccaccaggcccgactaatcttttttggaattttttgtagagatggggtttcgccatgatgccctggctagtcttcaactcctggactcaagtgatctgcccacctcggccccctaaagtgctgggattacaggcctgagctgtgtaatttcatgccgcgtgacacagcccagtaaaaaggaagaaaccccgcgggtccagcgtctactcacaggggtgggctgatggctgataaatcccagcaggagccaaatgaggagccaaaagcgcagccgcatgtcctgatcctttcagggtgccctgaggcggccaggacagaggtggaggtggcttagggcaggggggagg

SEQ ID NO: 56245 - DNA, 519 bp, Homo sapiens
tcatcaaaccagatgacacaaatcaaatgacatttcactttgttttggtccattttgtttgttagagacaagagtgcagcggggccatctcagctcactgcaacgtccagctcctcggcccaagcgatcctcccacctcagcctctccagtaactgggataacaggtacgcaccaccaggcccgactaatcttttttggaattttttgtagagatggggtttcgccatgatgccctggctagtcttcaactcctggactcaagtgatctgcccacctcggccccctaaagtgctgggattacaggcctgagctgtgtaatttcatgccgcgtgacacagcccagtaaaaaggaagaaaccccgcgggtccagcgtctactcacaggggtgggctgatggctgataaatcccagcaggagccaaatgaggagccaaaagcgcagccgcatgtcctgrtcctttcagggtgccctgaggcggccaggacagaggtggaggtggcttagggcaggggggagg

SEQ ID NO: 56246 - DNA, 889 bp, Homo sapiens
atcctctcgccttggcctcccaaagcactgggataacaggtgtgaaccaccgtgcctggccccaagtcagttcactttctactttgtcaaatagcctctgaaaaatgtatcctaaataggtatgtgtagcatccatgagaaatatcagatatttccttcaatcacatggatgatcacatgttcctctggaagcttatcaccactaaggtatgtgagtaccatggagaaaataccaagtctatttagaataaattagaaatcactgggcaccataccttaagatggcccccaacagtgaagaccaagtctgatctgaggtttacggtggacctgctcatgagtactaacacagattacatcttctcctttgctctggaggaaagcctgctggcrcaactctttacaggctttttctcttattgaacgtttctttctgaatttctctttttttttttcaaattctgtttgcactcaaaaaaagtattcgcttaatagctcagaagcacagatgatctactgattcctcctgatcaggtcaggctgtcagagctgagttcagattaccctcagcctgtactgtatctagtttttaaatattttggtgcctagtccaggccttacagaataacctttaggtccattattacccaagtcttccatgaatggaaggtttgcaaattgatcctctttatagacattagccatatggctgctttattttttttctacaagcttgttttctctttcctcagaattgttggcctgtaggattcttgaacttcttccacacttcgttataaaagtgagcatataaaggcttaaatattagtgctcaagtatgtttggagcgaaaactgggaatgcatggtcatgcagatttgtttctttt

SEQ ID NO: 56247 - DNA, 621 bp, Homo sapiens
ccagcctgaccaaagtggcgaaaccctgtctctactaaaaatacaaaaattagctggtcgtggtggcgggtgcctgtaatccagctattcaggaggctgcggcaggagaatagcttgaacccaggagatagaggttgcagtgtaccgagatcgggccattgcactccagcctgggcgacagagcaagactccatctcaaaaaamcaaaaaaacaaacaaaaaaaacaaagtataaagtctctcaagtgatttatatttggtggtgtttgcttctctgttaaattttcttttggtggattaagctattggactctgctagttttgcattgctataaagaagtatctgaaaccgagtgatttataaagaaaaagaggtttaattggctccgattctgcaggatgtacaagtagcatggtgctagcatctgctcggcttctggtgaggcctcagggagcttttactcatggaggaaggtaaagtgggagcaggcatgtcacatagcaagagggagcaagagagagaaggaggaggtgccaggctctttaaacaaccagagcttgcatgaattcagagcgaggactcactcattaccaggaagaaggagcctagccgttcatgag

SEQ ID NO: 56248 - DNA, 827 bp, Homo sapiens
aagatatgccaaagaagcaatttacaaattaacgtttggagtagcattctcagtaaattgggactgtctccacccatagttttgcctaacaagcttcccgatcacccaggtaaatccttttccctcctgcactcacgtctctgcaaggctgccatctccttgtgggacactccctccccattcccaccatgaaacgtaactctgtaacttccaagaaagaatcctgatggtctaagtcagagtttatccatctcagcgctattgatatttgagccacataattctttgttttaggaggtgttctgtactttgtcggatgtttactatcctgacctctaccactaggtgcccgaagcactcctcccccgccccccagaagtgacattcaaaaatgtctgcagacattgccaaatgtcccctgcggggaacatcaccccacttggagaaccacccctctaagtattatcagatggagaaaatctttcctaactcagtcatttgatgctacccacagactagatagagcaattacttctttgtttttctttttttctgagacagagtctcactttgttgtccaggctggagtgcaatggtgtgacctcagctcactgcaacctccacctcccgggctcaagcgattcccctgcctcagccccycgagtagctgggattacaggcatgtgccaccacgcccagctatttttttgtatttttggtagagatggggtttcatcatgttgtccaggctggtcttgaactcctgacctcaagtgatcgcctgcctctgcctcccaaagtgctgggattacaggtgtgagccattg

SEQ ID NO: 56249 - DNA, 699 bp, Homo sapiens
agagtccaacgaataactcaagaaacatttggagattatcctcaaccacaactagaatttgcacaatataaggtaagatgtcgtaataaatattaagtacaagatatcaacattgtttaaaaagaacaaaaaccttaagtggaaaacagatctaagaaactgttcctttttcacttgtcacttaaatttcatgtaataaatttatgaattaaatagacctctttattgtatttataagttcctctgttagcaaaagagacctttagaaattatgaatctgggctgggcgtgatggctcactgcaacctctgcctcccaggttcaagcaattctcctgcctcagcctcccgagtagctgggattacaggcacctgccaccacacctggctaatttttttttttggagttttagtagagacggggtttcatcgtgttggccagactggtctcgaacggctggcctcaggtgatccaccttgcctcggcctcccaaggtgttgggattacagacgtgagccactgcgcccagccataagttgataattattttacctgggtgatgtgcacatggggctcataccgtgctcctyacttttgtatatgtttaaaatcttccataattagaagttaaaaagatatctcagttgggcacagtggctcacacctataatcccagcactttgggaggctgaggcgggc

SEQ ID NO: 56250 - DNA, 530 bp, Homo sapiens
taaaaataaataaataaataaataaataaatagtgatacagatagatagatacataaattatatcattcactgggtagattgagaagagagctgtagagagaatctgagtgtaatagtcagggcaggctaactgctgtaagaaacagtgcccccacatctcagyggtataactcaaaagaagttttttccttcttatgacagtcaattcctgacatctggagcatgacctttcacaacattattccgggacccagtctccttccatctagtggctctgtcatcctcctagggccttggagtggtctgcttttgaccagctaatgggaggggagaggcagaataggatcctgtgaagacttctagggtcaggtctggaaatatcttttgctcacactccattggccagaacaagactgcctcagtgcagaggaagctgggaaatgtagtttagtagggtacccagaaggaaaagggaaacagtctctgccacactgaagcaacaccaaaatctgagggttggatgtaggaa

SEQ ID NO: 56251 - DNA, 756 bp, Homo sapiens
ccagggaggctccgccccacttcttagctttggccccaacgttagtcttgttgctgctctcaggcgtgctctgcgtgtgaaagatgacttggaggctgggcgcggtggctcacgcctgtaaygccagccctttgggagaccaaggtgggaaaatctcttgagcccaggagttcaagaccagcctgggcaacatagggagaccccgtctctacaaaaaatacaaaaactagcccagcgtggtggtggtgcacctgtagtcccagctgctggggaggctgaggtagaaggatcacctgagctggggaaggttgaggctgcagtgagctgagatcacaccactgcactccagcctgggtgacaaagcaagactccatctcaaaaacaaaacaaaacaaaaaataacaaaaaaaaagagggtgaaaggcagccccagagtgggagaagagatttgtaaaatggacaaaggccttataattggaatatataaagaactcctaaaaatcactaagaaaaccacagacagcccaagagaaaaatgggcaaatggctcaagtaggtgtctggtgaaagaggatatgcagatggccaatgaatctgcacaaagtgctccacatcattaatcattagggaagtgcaaattaaatccacaggagacacctgggcacaccctccagaaagcacacaatgacctgctggcaaggacaggaacgaccactttggaaaactctttggcagcacagccaaactgagcctttc

SEQ ID NO: 56252 - DNA, 756 bp, Homo sapiens
ccagggaggctccgccccacttcttagctttggccccaacgttagtcttgttgctgctctcaggcgtgctctgcgtgtgaaagatgacttggaggctgggcgcggtggctcacgcctgtaatgccagcyctttgggagaccaaggtgggaaaatctcttgagcccaggagttcaagaccagcctgggcaacatagggagaccccgtctctacaaaaaatacaaaaactagcccagcgtggtggtggtgcacctgtagtcccagctgctggggaggctgaggtagaaggatcacctgagctggggaaggttgaggctgcagtgagctgagatcacaccactgcactccagcctgggtgacaaagcaagactccatctcaaaaacaaaacaaaacaaaaaataacaaaaaaaaagagggtgaaaggcagccccagagtgggagaagagatttgtaaaatggacaaaggccttataattggaatatataaagaactcctaaaaatcactaagaaaaccacagacagcccaagagaaaaatgggcaaatggctcaagtaggtgtctggtgaaagaggatatgcagatggccaatgaatctgcacaaagtgctccacatcattaatcattagggaagtgcaaattaaatccacaggagacacctgggcacaccctccagaaagcacacaatgacctgctggcaaggacaggaacgaccactttggaaaactctttggcagcacagccaaactgagcctttc

SEQ ID NO: 56253 - DNA, 1316 bp, Homo sapiens
actgtagaagttgggaacattaaacagatttctggatttaactaaatttgtgttgtaatttgaattgatttcaactctgcagtttgttttttgttgttgtgttttttgttttcttgttttgttttgttttgttttgtcttgttttgttttgttttgttttgttgagatggagtctcaatctgtcacccaggctggagtgcagtggcgtgatctcggctcactgcaacctctgcctcccaggttcaagcgattcccctgcctcagcctcccaagtagctgggattacaggcatgggccaccatgcctggctaatttttgtatttttagtagaggcggggtttcgccattttggccagactggtctcaaactacggacctcaagtgattcacccacctgagcctcccrtagtgctgggattacaggtgtgagccaccatgcccagcctctgcactatttacaaaaagctgagactatctaaataattattgactcagtataccaacccagtcatatcaatatattgtattcctttcagcagttacctgacaaatacaagtagcattgttgccttatcctgaagagcagaacagttacttcctagtaaaatagaatcctctagatataaagattaaaaataataattctggggatcccaacgataattcatctttaatttactgtttctcatagaggttataaatggggaatgttatttcatttgcggtattagtagggggcacatcccaatatttaatatatgatatccggctgggcatgatagctcaagcctgtaatctcaacactttgggaggctgaggcaggtggattacttgaagccaggagttcgagaccagcgtggccaacatagcgaaaccctgtctctactaaaaatacaaaaattagccaggcatggtggtgtgcacctgtagtcccagctacttgggaggctgaggcaggagaatcgcttgaacctgggaggtggagattgcagtgagctgaggttgtgccactgcactccatcctgattgacagagtgtgactctttctcaaaaaaaaaaaaaaagtatgtatgtatgtatgtatgtatatatatatatatatatatatatacacacacacacacacacacatatatacatatgtatatatgatatatctttctagtggggtcacttaaaaatatttcagcaatggataaaactgggcttctctttgtctttagataacaggactagctttcaatcccttcaaggatttggacaacagaaacattgttggaagcattggaagtgtgttactaagcgctaatcgtaaa

SEQ ID NO: 56254 - DNA, 648 bp, Homo sapiens
aacttttgtgcttcagggaagtcaccagttttgccatcctgagctcagaagaaggaaaaaagcccatctcaaatggcctgtccaaatggttgacttcagtctgctggctcctcttaggtttcactagcctggcttcagccttttttacagcactttatagcttggaattgagcaaagaccaagccaccagctggatgatttcaattattttatcagtgcttcagaacatcttcatcagccagccagtaaaggtatgtgagggatgggamgaaccattggagttgcagaagttaggggaactgaggtccctgggtgtcaatccaaggtgcctagtggttttgacaatgtaacataaacaacaaaaaacaaataggcaaaccaggctgggtgtagtggctcacacatgtaatcccagcaatttgggaggccaaggcaggcagattgcttgagtccaggtgttcgagaccagcctgggcaacatgatgaaactccatgtctacaaaaattagaaaaaattagccaggcatggtggtgtgctcctatagttccagctacttaggagtctaaggtgggaggattgcttggcccaggaggtcgaggctgcagtaagccgtgattgcgccactgtactccagcctaggtgacaga

SEQ ID NO: 56255 - DNA, 659 bp, Homo sapiens
caaaagggcaggctgtgctggggaggggtagggaagcccaggaatgagaggcctgccccgggctccatcctgggagctggtctgactggtttgggatcatgtgacagcaataaggaggccttgactcctaccagtccatatactgacactcccccaccgcccccgacacacagcagccccccacccacctgtgatgggtggtttcttatactgggcacttttgaggtgctcctccaccagcttgggtgtgacacagatcacgtgctggcccttccagtacttgaccatattgagggattgcagggtactgatgatgtcattttgggtgatactggtcatctggctgcaaaaagggatgagagcaaatgccagacctggtgcccttgtgggatctggccaggatggtgacagggtatraggaagcaggatcgtggcccatctcagggcaagtcctgcccccagggcccgggaggccccctcacctgaggtccttgatggacagtgtgccccggaagtcccgcaggatctctagcagcacccaggaccagtagctgcggtagctgagcttgcccaggtcagacagtggcttctccggggagccgactgtgctctccagcttggagagctcataacctggcagcagtagaaagaggaactta

SEQ ID NO: 56256 - DNA, 659 bp, Homo sapiens
caaaagggcaggctgtgctggggaggggtagggaagcccaggaatgagaggcctgccccgggctccatcctgggagctggtctgactggtttgggatcatgtgacagcaataaggaggccttgactcctaccagtccatatactgacactcccccaccgcccccgacacacagcagccccccacccacctgtgatgggtggtttcttatactgggcacttttgaggtgctcctccaccagcttgggtgtgacacagatcacgtgctggcccttccagtacttgaccatattgagggattgcagggtactgatgatgtcattttgggtgatactggtcatctggctgcaaaaagggatgagagcaaatgccagacctggtgcccttgtgggatctggccaggatggtgacagggtatgaggaagcaggatcgtggcccatctcagggcaagtcctgcccccagggcccgggaggccccctcacctgaggtccttgatggacagtgtgccccggaagtcccgcaggatctcyagcagcacccaggaccagtagctgcggtagctgagcttgcccaggtcagacagtggcttctccggggagccgactgtgctctccagcttggagagctcataacctggcagcagtagaaagaggaactta

SEQ ID NO: 56257 - DNA, 659 bp, Homo sapiens
caaaagggcaggctgtgctggggaggggtagggaagcccaggaatgagaggcctgccccgggctccatcctgggagctggtctgactggtttgggatcatgtgacagcaataaggaggccttgactcctaccagtccatatactgacactcccccaccgcccccgacacacagcagccccccacccacctgtgatgggtggtttcttatactgggcacttttgaggtgctcctccaccagcttgggtgtgacacagatcacgtgctggcccttccagtacttgaccatattgagggattgcagggtactgatgatgtcattttgggtgatactggtcatctggctgcaaaaagggatgagagcaaatgccagacctggtgcccttgtgggatctggccaggatggtgacagggtatgaggaagcaggatcgtggcccatctcagggcaagtcctgcccccagggcccgggaggccccctcacctgaggtccttgatggacagtgtgccccggaagtcccgcaggatctctagcagcacccaggaccagtagctgcggtagctgagcttgcccaggtcagacagyggcttctccggggagccgactgtgctctccagcttggagagctcataacctggcagcagtagaaagaggaactta

SEQ ID NO: 56258 - DNA, 850 bp, Homo sapiens
ctatggctcaagataaatcccatgtttcagggccctggcctctgactgctgcctgcctctccagcctcagcaccctgccttgcagctggcgggatttttcagtctagcaagtcactgtggtttcctagcccctgccatttggcttccacatacaacttcccctccatccccgtgaagggtaggagatggtacaggcctagagccagcctcaggaagtttgctgtgggagctcacatgtgaaggcaagagaactttccagttctcctcccagccccaccaggccgcccttaggcctttcttccctggcaaggtgggtagggtgttcctacctaagatgtcatctggagttctgattcaggtctaaccttgagcctacctgatayctttgcccaaatccttggtcctttctatcagggccccacctttccttgcagtggggcacccagtccctgctagggcctgccaaggcacaaccttgtatgttcttttccttggcagcagcagacacagtatttttaacctactcaggcttgggaagcagttggctcaggagtttgcccagctctggtgaccttcacctctagaaactgtgactgccaggaaaggaagagtcaaaactgatgcccgaagctgggtcagtctgggccttcaatattatctgggacccggaaacatttgttcaacaagatgaatgaaagctctttgtataaggtgctgcagtcatcccactcccaccaaatcaaacatgcaacagacttgggacccattctactcctggcctgccaggctctcagggcaggtaagagactgggacacgaaccagttcaacccaagggctcagtgaacctga

SEQ ID NO: 56259 - DNA, 1594 bp, Homo sapiens
ttgagcagctccggcaggatgtagtccagtggcatagggatgaaggggaaccgggcagccacatggccattgatgcggacacggggcgcattgccatacttgtgctcacacaggcgtctgcggataggagcgagggttcagtcaggggcccctccaccagtggtttgcaactggaaacaattctgcccccctaagtaacatatggcaatgtgcagagacatttttgtttgtcacaactaggcagtactgctggcgccagggatgctgctgaacttcctaacgtgcacggggcagcccctrtgacaaagaattatctggctggaaatgtcaatagtgccatggttgagaaaccctgctccccgcagatcatgccccgggcaagggctcagacccaagccttccctgccccagatgtctgcccaccccctgagccattcttgcctcacctggcaaagtccacccacttctcaataatcttctttggtgagagacgagtacagatgatgccgacaaagtcaggctggccggagaaaggaggtcaggactacccacgcccctagccccaccccaagatgctggcaacttcggaactgccccaaagcaccagccccacagcctcagcccccaggcccttgacccggatccccagcccagtctcctctgtctcacttaatgttcccaggtgggtctcaggtcccagagccccaccttgtcctcatgcagcgccaggtgatgcgtggccaacatgcggattccaagcctcgaagtcagcgtcttgtccaagaagtagcggacgagcttttcatcctgtaaagagtgaggtctcagaatcccgtgcccttcccacccccagcaggcccggcctctcctttgctgccccaacctctatgtgcttccggctctcacgtaggccctctgccaagagggtcaccacatccttgtggtcatccagcagctgtcgcaccagctggcagtactgggcctcgtccgcctggtccttgatctgcaggtcacagagtcatgaggaagggtggtccaagcccaacctctcagcccctcaccctgctctggcccagcactcaccggagggaagtctgtcagcttctggaaggcacggatatatagctcatgctgcaaggaagaggtgtgggaattcacaaagccgcatgggcactgagcagagaacagccacccccacctacccatggggatcaccacccagctggtcgaccacgtgatcaaacccccacttcgacccttccaggctccgtgaatacacacctttggcttctgaaggcctggggttgaatcctgtgtggccctgacacctttaggcaagcaatcgtctgccactctgggccccagactccccacttgcccccggggcagggtggcccgctgacctaaggtcctctctaccttaccacgtgcagtatggtggggttgcagccaatgatgaaaggaaggcagcggaagcccttgatgcggtgagcaatcctcactggaagttcttgctgcaggtaccgagcacttttctgggagaaaatgagaagggaaggcggggctggagcctgagtgtctgggagagctccag

SEQ ID NO: 56260 - DNA, 1271 bp, Homo sapiens
taggcaccatgttgatgctagaaggtctgggccccaccagatgtttttacagttcctgtgagcagctgctactagttgccaaatgccagcaagaatcaagaagactcggcttggctgggcacggtggttcatgcctgtaatcccagcactttagaaggccaaagctggcggatggcctgaggtcaggagttccagacctactcaggaggctgaagcacaatatttgcttaaatccagaaggcagaggttgcattgatccgagatcgcaccactgcactccagcctggtgacagagcaagactccwtctcaaaaaaaaaaaaaaaaagaaagaaaaaaagaaataggctcactggttaggacctgagggtgaacagctctgaagaggagcaaaggcggagacttcctaacatcagcatagctcattatggtgtgtcagttgtcatggtgatgggaaaggatacctgagcagggtatcccacagggaggctgcatctatcagctgggatccagttacgctgcagtaatagcagcccccaaatcttaggggctcacaacaccatgttgatttctcactcatatccatgtcctccatgggaccactctgttctatgctatcttcattctagagccctgtctgaaggaaaagtctcaagctggaactttccgtctccagacaccgaagagaggaaaggtggcagaccccatgacggcttttaaagcttcctcgtggaagtggcacatgtcatttccactcaaagtccatggtctaaagcaagccacatagccatacctgatgtcagtgaactggggacaaaaaaccattctatgtagcaggtccccaaagagagggccagtgaatacatgtgatttttttttgttggttgtttttttagagtcagtgttttgttgtgttgcccaggctggagtgcataggtgcatggtgcaatcataactcactgcagcctctacctcctgagcttaagtgatcctcccacctcagcctcctaagtagctaggactacaggcaagcaccaccacgcccagctaatttttttttattgttttattttttgtagagatagggtctcactatgttgcccatgctggtctcaaactcctggcctcaagtgatcctcctgcttcaccctcccaaagcactgggattataggcgtgagccaccacacacatcccagtgaatgtttttgaacaattataaaatcttcccccgtctgccctcttccttacaaatactgcctttgcattttcttc

SEQ ID NO: 56261 - DNA, 1355 bp, Homo sapiens
atcccctctcaccatctccactttgcctccggttctattttccaaggtcccgggtgcaaatgtttgttgaatgactgatgaatgaaaatgatttgagtttgttaccttttatgcttatatgttgtggaaaatgaaattctcctcaaaagggaaggaaatacttgagagctgcataggaaggaaattatctaattaagaatgtatagaaacttcactgttgggcaaatcatcgttgtgacacygggggaagaagccatttaggtgctcagaagggaggctggaattcagagcaggactggacgtgccccacgacggtggttcttaggtcaggagtcagcaaacagtggcctgggggcccgatatggccgacgacctgtttttgcacaacctgccagctagagattgaagatgaacactgataatcgatttgatgatagggagcaccacccccaaagaattctatttgtctcatttgtaaacccgtattacaaacaaattgtactcaatcattatgtttgaaatttccctaatgacaaatttgtggaaaagtattttctgtcttgttatataagtacttgtacaacatattctatcagcctcttggtctgcaaaacctaaaatttactatctggctgtttacagaataagtgtgctaatccccgccccaggctaacagagctggacctgggaggcagacatctggatgctgggttagttagggtgaccgaatggatgggaaagggaatggagcaggaagacatgctgctatctttttttttttttttgatacagggtctttctctgttgcccaggctgtagtgcagtggcatgatcatggttcactgcagccttgacctcctgggttcaagcaatcctcccacctcagcctcctgagtaccactacacccggctaattttttattttttgtagagatggggtctcactgtgttgcctaggctggtcttaaactcctgagcccaggtgatcctcccacgtcagcctcttaaattattgggataacaggcctgagccaccacacccagccattgctttcttttaaattattattagtttttgttttttttttgtatttaattttgagataggatctctctctgttgctcaggctggagtgcagtggcacaatcagggctcaagtgatcctcctgcctcagccctccaaagtgctaggactacagcccctaactggcatgctactttcctctgcttgatccttcccccattctccctttagccttgaccttatgtcatgggttcaacttggacactgaaaacgcaatgaccttccaagagaacgcaaggggcttcgggcagagcgtggtccagcttcagg

SEQ ID NO: 56262 - DNA, 1505 bp, Homo sapiens
ccggcccacgtccctcggcccccatcccgcagcccgaacagctccgacagcccaccccgcgacctcgacgcctggcgcgtgctgctgccctcgcgcccgcgcgcggagcgggtggcgcgcctggtgcagcacgagaacgcttcgtgggacaacgcctcggacctggcgctgctgcagctgcgcacgcccgtgaacctgagygcggcttcgcggcccgtgtgcctaccccacccggaacactacttcctgcccgggagccgctgccgcctggcccgctggggccgcgggggtgagctggggaccggcgctgggccgggcggcaccgggcggtgcaggggccgtctgggccgcagcgcgggctccctgccttttcccttccagaacccgcgcttggcccaggcgcgctgctggaggcggagctgttaggcggctggtggtgccactgcctgtacggccgccagggggcggcagtaccgctgcccggagacccgccgcacgcgctctgccctgcctaccaggaaaaggaggaggtgggcagctgctgggtaagcggcgggggcggggcccgcggaacgcgggcccgagagggctctaggaagagggcggggcctgtggaaggcgagtccaagtgggctctagggagagggcggggcctgcggaaggcgggtccgagtgggctctagggagggagcggggcctggggaaggcgggtccgagtgggctctaggaaggggcggggcttgcggaactgggaatggggcggagccggggtggaagcggggccagaacgagctgggggtggggcctgcccctagagaacttttgggagggagctgaggcgggctctgagctggtgctatggtttctctctatctctggatttaaggagaatcttaaagtgagggctgaattcttacacaaattagtatttggagtctgatttggagaaggtggaacttgatacttccgcaaatgggaaaatctggagtcctggaaagccccaggagctctgatattctctgcacacacgcagaggcaagtaacacacacactttgttgctgcagaatgactcgcgttggagccttttgtgccaggaggaggggacctggtttctggctggaatcagagactttcccagtggctgtctacgtccccgagccttcttccctctgcagactcatggcccatggatcagccatgtgactcggggagcctacctggaggaccagctagcctgggattggggccctgatggggaggagactgagacacagacttgtcccccacacacagagcatggtggtgagcaggacgcttttgggccctaggggctcctgggagtgcacagacccatggcaggggctcaggggtcagccatggggccccaactgaggtggccacctcctctccctagcctgtggcctgcggctggaggctgctccagtgggggtcctgtggccctggctggcagaggtgcatgtggctggtgatcgagtctgcactg

SEQ ID NO: 56263 - DNA, 1505 bp, Homo sapiens
ccggcccacgtccctcggcccccatcccgcagcccgaacagctccgacagcccaccccgcgacctcgacgcctggcgcgtgctgctgccctcgcgcccgcgcgcggagcgggtggcgcgcctggtgcagcacgagaacgcttcgtgggacaacgcctcggacctggcgctgctgcagctgcgcacgcccgtgaacctgagcgcggcttcgcggcccgtgtgcctaccccacccggaacactacttcctgcccgggagccgctgccgcctggcccgctggggccgcgggggtgagctggggaccggcgctgggccgggcggcaccgggcggtgcaggggccgtctgggccgcagcgcgggctccctgccttttcccttccagaacccgcgcttggcccaggcgcgctgctggaggcggagctgttaggcggctggtggtgccactgcctgtacggccgccagggggcggcagtaccgctgcccggagacccgccgcacgcgctctgccctgcctaccaggaaaaggaggaggtgggcagctgctgggtaagcggcgggggcggggccygcggaacgcgggcccgagagggctctaggaagagggcggggcctgtggaaggcgagtccaagtgggctctagggagagggcggggcctgcggaaggcgggtccgagtgggctctagggagggagcggggcctggggaaggcgggtccgagtgggctctaggaaggggcggggcttgcggaactgggaatggggcggagccggggtggaagcggggccagaacgagctgggggtggggcctgcccctagagaacttttgggagggagctgaggcgggctctgagctggtgctatggtttctctctatctctggatttaaggagaatcttaaagtgagggctgaattcttacacaaattagtatttggagtctgatttggagaaggtggaacttgatacttccgcaaatgggaaaatctggagtcctggaaagccccaggagctctgatattctctgcacacacgcagaggcaagtaacacacacactttgttgctgcagaatgactcgcgttggagccttttgtgccaggaggaggggacctggtttctggctggaatcagagactttcccagtggctgtctacgtccccgagccttcttccctctgcagactcatggcccatggatcagccatgtgactcggggagcctacctggaggaccagctagcctgggattggggccctgatggggaggagactgagacacagacttgtcccccacacacagagcatggtggtgagcaggacgcttttgggccctaggggctcctgggagtgcacagacccatggcaggggctcaggggtcagccatggggccccaactgaggtggccacctcctctccctagcctgtggcctgcggctggaggctgctccagtgggggtcctgtggccctggctggcagaggtgcatgtggctggtgatcgagtctgcactg

SEQ ID NO: 56264 - DNA, 1505 bp, Homo sapiens
ccggcccacgtccctcggcccccatcccgcagcccgaacagctccgacagcccaccccgcgacctcgacgcctggcgcgtgctgctgccctcgcgcccgcgcgcggagcgggtggcgcgcctggtgcagcacgagaacgcttcgtgggacaacgcctcggacctggcgctgctgcagctgcgcacgcccgtgaacctgagcgcggcttcgcggcccgtgtgcctaccccacccggaacactacttcctgcccgggagccgctgccgcctggcccgctggggccgcgggggtgagctggggaccggcgctgggccgggcggcaccgggcggtgcaggggccgtctgggccgcagcgcgggctccctgccttttcccttccagaacccgcgcttggcccaggcgcgctgctggaggcggagctgttaggcggctggtggtgccactgcctgtacggccgccagggggcggcagtaccgctgcccggagacccgccgcacgcgctctgccctgcctaccaggaaaaggaggaggtgggcagctgctgggtaagcggcgggggcggggcccgcggaacgcgggcccgagagggctctaggaagagggcggggcctgtggaaggcgagtccaagtgggctctagggagagggcggggcctgcggaaggcgggtccgagtgggctctagggagggagcggggcctggggaaggcgggtccgagtgggctctaggaaggggcggggcttgcggaactgggaatggggcggagccggggtggaagcggggccagaacgagctgggggtggggcctgcccctagagaacttttgggagggagctgaggcgggctctgagctggtgctatggtttctctctatctctggatttaaggagaatcttaaagtgagggctgaattcttacacaaattagtatttggagtctgatttggagaaggtggaacttgatacttccgcaaatgggaaaatctggagtcctggaaagccccaggagctctgatattctctgcacacacgcagaggcaagtaacacacacactttgttgctgcagaatgactcgcgttggagccttttgtgccaggaggaggggacctggtttctggctggaatcagagactttcccagtggctgtctacgtccccgagccttcttccctctgcagactcatggcccatggatcagccatgtgactcggggagcctacctggaggaccagctagcctgggaytggggccctgatggggaggagactgagacacagacttgtcccccacacacagagcatggtggtgagcaggacgcttttgggccctaggggctcctgggagtgcacagacccatggcaggggctcaggggtcagccatggggccccaactgaggtggccacctcctctccctagcctgtggcctgcggctggaggctgctccagtgggggtcctgtggccctggctggcagaggtgcatgtggctggtgatcgagtctgcactg

SEQ ID NO: 56265 - DNA, 760 bp, Homo sapiens
  misc_feature (1)...(760): n = A,T,C or G
ttttccatcttcaggaaaacatgcaggaggctacttctgaccagctgctggcccttgaccctcctctcctgccctggnncaaaggctgtttcatccnctgggataaaatgaagcttctgtggatttccacttccaagtattgtgtttctgaaatagagcctatgtaatgaaatgacctcttctttaagccagccaccaacctaatttaggaaatctagagcaatctccagggcgacagattataggcattaacatgcaaacaaactgccttaaaagttcaaatttgcatttagactggacaaaggggaaagaaatgactttctatgctgttccttgcatcatcatggtttcaaaaattataaatctctgaaatggtgccagaagggaacttccttagcttctctcattcatacttaacttggacttcattcatctctgaaagcatgccttttcactctcaatgtgagatragaaagagttgtaaactctcccgcagcttcagatgaaagcaattagtagaacaaaattgaagatcgcatcttgagtgtacagactcagagaaaagatataaaatatagattttttcacttccctgatatgacacaataattttacctttaagacaatgtctctcaaacaaactgtcctaccaagaagacacatgcactcacgtgttcatcacagcactattcccaacagcaaggacatggggtcaacctaggtgctcatcagtggtggattggataaagaaaatattgta

SEQ ID NO: 56266 - DNA, 594 bp, Homo sapiens
cccctgtgtgggcttatcctctgctgagaccattgtggttctctggtgccagaggcacccagaggtctgtgatctgcctgctttgaggcgggaagggttgttccagttctgctttcccaagcggtggctgtgggcaacccttatgatccaggacgcatggtcatcttaacgagcagctggctttacacccagggcgagcagaggtcttaaattatgcccgttgtcctggagtaatttagagcagcctcttttgtattcaggcatcctggtttgcatggtaaggtatgaatayagttgcctttaaacagcacgatgaagtgggcgggttattgttctcatttcaccaaggaggataatgaaccttagcgatctcgagtgactttcccggccccatcccctttgaggggcagggctcgctctgcttccctgtctgggcaccaccctcctctctgcacctcagtccacgccgggatgtcctttctgacctcactgcagtggcacttccccctcaaccgggggtgcccagaacgaatgggtgtatttgggtgaagccagtatgactgtttctacccattttggttcttccccaggccc

SEQ ID NO: 56267 - DNA, 1580 bp, Homo sapiens
ggaaaaaaaggatgcacctgcattgtcttgtaattgtaactatggcatttgcaaaaactgaactagattttcccattttcatgtatggtgctttcaatagttgtgtgtgtgtgtttctgcagaagcaatgaatttggttagacctacaggtgtaattttgtcaactttcactcttgcaataagcccatgacacagacaaagaacaaaccgttgtcttttttgaatgacatttacatgcattccactgcacgtcatttacaaaaaaggaaacatgtcttttaaccaaaaagactcataggtgtaacagcaaaaagcaaaagactttgccttatccaggatcacaaggctgggaagccaagaacccaactacaggtttctaattctgagtcttaaaaacttttcatcacctgccctacatctccagtgttgagtcatcaacttattgtgggaaaagtaagctttgaaagcagaggagtttaacacaaagctcttccaatagcgtgacctccagttccttacacacctctctgagcctcagtttcctcaaggttaaatttgcctgatatccacatgtgcagaatacttttggagaaacagtaagatatatgattctacactactgtctccatcacttatacacacatatatcattggttatgagattataagagagcagagattttgctttggtttctgttgaatctttctggaaataacatctccaatgatgaaagaaagraatttgtaaagcatatattaaatacctgaaagcctgcatgtattattttctccctcttctacgtttttattttctacatattttattgtagagggttctaagggcctggatttatggtctactttgtctgactgacacaaagtcctccagccacctcagcagaaatcaaacacacgggatgacggcacatccatgagggacagctggtattcgtgacggtgtataaataataaatttagcgtttaaaaatctcacataggtcttctgattttattaacctagacaacttataataattatgataaacagacattgtcattaaatatagcagccatttgataagattaaacataatgcaatacatcttcctttcctcacattcagtataataaattacccttaggcttctaaatgaagcattttataattgagcaaaacagatcgatttttagcggtccttatttatatgcaaaacagacttcttgagaatggtaaacttgattaaaatctctctaattgcaaatcacaagtaactttttctcccaagccttaactattctattaatgtataatttatggcatacaaggatagtaaaattctaatgtgcttatgatccagatggaagaaagagttaaatagagaaaacaacaaagtatataagatgggaagaaaatggaattaaaattttaaaaaatattgcactagataatgtcccagctgttacagatgccacaaaacaacagagattggtatagaatataatagcggaatcagcctcaggagactttaaagaggtttccatggaagatctagatttagagaggaaaaagtcctcagaaa

SEQ ID NO: 56268 - DNA, 1179 bp, Homo sapiens
tcatcttgtaagcacaactttgtgacctccacaatgtaagtattttattttaaaagtcatctttaaaaggcttgtttacaacatcatctaaacttgcagttttgaggtcagagccccagtaataattattaaattgtgttacatttccttgtattttttttgtttgttttttcactgattctgccactgacctctttaagcaatccaaactagtattgattgaggtcctctcaggctaatgtgcagtactttgttcaagatacagtcattgagaaagtgctttgtaatgtgagatcttttatttacactgaaaaatatgaatattttccagttggrttgatgtgtactggcggaaaagccttaacttcctatgtagacatttatggttcattgtataaatgtcataatgctctcctgtgcttttaacaagcaatttctttgtaatactttatggcattcttttgtgctgaggccagcctctgtcttttgcaactctgctttataaacaacctcttttgtaaaccattctgtgacttgctgaagtgcacatagtcatctgtgtagtactcgctatttttcaagaattgaaattaaggcttctcatttatttttcaaatctcactagacactcacaactatttgttgtgacatttctattctctccacattgcagatgagaaaaattaagcctcagatatatcaggtaacctgtcaaatatcacagactcaatcagtaacacttgagcctcaacctcggatctatctgattccagaattttacctgtttatctgaatatagtgtatacaagtggtcctatcatgtttatagaagaagcagttttagatatttcttagaaagagaaagattgttttgtagcttggaatagtataactcaattgtcctctgtttctgtttttcaaaaaccaaagaaggatggccccacaatttcactttaggtgttgaaatcagagaaataaaaacatatgttgacacaaaaacatacatacaggctcttggcagctaatatggtttgactgtgtccctacccacatctcatcttgaagttccccacgtgttgtgggagggcctggtgggaagtaattgaatcatgggtgcaggtttttcctgtgctgttcttgtgatagtgaataagtctcatgagaattgatggttttttg

SEQ ID NO: 56269 - DNA, 677 bp, Homo sapiens
tcaatgggtttcgggtctacaaacttgcccagaaatttaaacaagagattatgatgttttatcaaagaaaccaccttcagcctccttctctttctattgctatatacttagcatataaggatattaataaaatgaagaagacagasaaagagggagagagaagtatttttgctgctttgctggctacccctctattttgcttctagagatgttgtgttccatttgccattaccacaattctgtacttcatcctggctgccactctgtccttgttgaagtttatgataattgcggtatactggatttggtagttaagagccatcacttgacatctattgtcatgtctctatcatctccgtggctaccaataagccaaactggatgacaacctccctgctaccagctcttgcctgaggagagagccaccattgaacttagtgatattggtgtccacttaccagtccattctggtgtgttcctgtgaaataaaatcctcagataagtcttttatcatcatctaaatatgaccattcacacatgtcctcttccttgagccttttcatcccctttcctaccatctgttgcagaaattcaggtgtttcaatgttgctccatatgcatatctctttttccaaggtatacaagccatgtctgctgcaagtttgatacatcctctg

SEQ ID NO: 56270 - DNA, 702 bp, Homo sapiens
ttatccacctgcctcagcgtcccaaagtgctgagattacaggcatgagccactgcacctggccctcagtgatagataaatgtttatgctgtgccgatcaatttaactctgagaaaaataggaaaccaaaaaaagtttttcaaacaagaactgaagttctcagatttgaatttggaagaggcatttgacagtaagtagagaggcttgacagtgactggagcataaatagactagacataggatataaacacgaatgttactataacagaccaagagagagatgacaagacagacatagggcacttgtaattaggatgagaagaagaaggagaaagaggcaagggaaggaaggaggaggtgagagagatgacagaaggctacgtgaaaataggggaagaaataattttactctttaattctctccacaaatgcagctcaacttgccagagtcaggtggctctgggggaacttgaactaggtgcacccaagtggcasacattttggtgtagggtttcagtggcaggcattgtttttgaagtacctcatgggaagaatcacctaaatcttggggatgccttatccactttaaaagcaagtctttcctgaaagtactgaccagcgatagtttttaagctgaaataacatacccataatccatttatgagttcagactccactgaggttttcaaaaggctattatcat

SEQ ID NO: 56271 - DNA, 807 bp, Homo sapiens
atgtgtccagggaagaaaggatgaaagatgcagaatatgcttctttccatgccttcctgatccctccacagcgtttgccatgcgtgcttccattcatgtgttcccacagcggtggctcagcctggagcaggcactcagcctccagggctccagcacattggcccctgcagaggccccagccagcacctagccttcatctggcctggcctgccttctcttccgtggcgtgcagagttgagtggatgctcaaggctgggctgccatcagtctctacatgttcattgcctgtagaaaagggcatggaattttaaaaaggaaatttaaatgaaagacttcaacaaacagtaaacgaaaactgcaagcggtgatgccttgcgcttgtgtgctctctttctgtctttcacactccaaccccgccccccaccgccaccataagccctaatgactctgctctgatggtgggaaaatgttataaccacgtaaataaatattcctcggcatcaggactgaagtggcccccaccaatcttggatgtccaagagccaccccattgcagcccctcttctacccccaccmaacccccacctggcagctacacagggggaactgaccgcctcccctctggagaggggccattgtgtgagcatcctttgggcttgtggtacctgtttcaaggtggcaaaccagctgccaagcagacttcagccttagaagccataggccacagcagagaggggcctgcctggccagtgccctgtattttgggactcctggaatattgaaaattgaagaattcccaaaacaagg

SEQ ID NO: 56272 - DNA, 1317 bp, Homo sapiens
catctactgctacaactttaaccatcttttcaacactgatgattctccctctgctctgtcctttcagtactgcttttctcctgaactccagacccatatctcttgctgcttgcaagcagtttattctgaatccccttgactccacaactggtccagtatttaactcagtttccctaaatcctcccatattacagaagtgaagaaaccaacatgtgaaattcagtagcttgccaaagagagagaacctggactagaaatctgaggcttctttccagtctagtgttctcatctgctgggccaaaactgcctgtcgttggtagagggagaatataccactattttcctcaatagtagttgagccccaacctcagtgtcacctttagtttttccctttcttgtctttccccctagcccctaactgcccaatccartgagtccttttaactctactcccaaaatgtctgtaagtattcattcatatccccctccctcattttatctccactctcattgccttttttctgggtcttacattctttcttttttaaaaaactattttaattttaattttttattgagacagggtctcactttgttacccaggctggtctccaactcctgccttcaggcattcctcccatgttggcctctgaaagtgctgggattacaggtatgggccattgctcctggccctgggtcttacattctgaagcatctgtcactatgtaattagaatattttctaaaatcttttgaaaggcttggactattgtaatcatttcctaagtttacataaagtctgtagtcactcttcctctctccactctacgtgccactgctggggtaatttggcagagatttagcttagatagtgtcacatgctcaaaaattttatctttgttgtctattagtaagttctagtttattgaactgctactgtcgattgctaactctcaaaaaaatccttcagttcactgtcagtatttccttttatgtttaatatgtttttactctttagcgaggttttatctgtggtgtgatcttatatgacctggttttaaaaagtggggatgaatttgctttttctagatgctcttgcctgggccaatttttatgttaattctttggtttggagtgcctggaacattcagatattataattgaaagtataattttgaagcccaaatctatgtgggttgcaggcccagggttcgttccggttcttaaaagagacctttcttcctacccgctacagcccaaaagcttagatacactttcttctctgttccttgggctgttatgtgattttttttttttc

SEQ ID NO: 56273 - DNA, 724 bp, Homo sapiens
cattattttttcttaggtatgtgaatagtatgtagttatgtttaaaaagaagagatacatactgaaatatttatgggtaaatatttttagatatatatcaaaaatttatgtgtaaaattatatacaatacctgaaatttgcttcaaaatcatatgygggagttaggtaggagtacaggtgatatataaatagtcattaatgaggctgggggcggtggctcacgcctgtaatccagcactttgggaggccgaggcgggcagatcacaaggtcaggagatcgagaccatggtgaaaccccatctctactaaaaatacaaaaaattagctgggcgcggtggcgggcacctatagtcccagctactcaggaggctgaggcaggagaatggcatgaacccgggaggtggagcttgcagtgagccgagatcgtgccactgcactccagcctgggcgacacagcaaaagtccgtctcaaaaaaaaaaaaaaaaaaaaaaaaaaaagtcattaatggttaattactgaagtagatttaaaaaatggaccatggtattaaaagaaataatgataaaaaattccttaacagagttttcaaaccatttttcccttcagttttaaagctttttgttattttactgaatctctgttctaagcccctttctgggaacagaaaagactatgtcccttactatagtttgacttagaattttttgcctttatcatggtgtg

SEQ ID NO: 56274 - DNA, 724 bp, Homo sapiens
cattattttttcttaggtatgtgaatagtatgtagttatgtttaaaaagaagagatacatactgaaatatttatgggtaaatatttttagatatatatcaaaaatttatgtgtaaaattatatacaatacctgaaatttgcttcaaaatcatatgtgggagttaggtaggagtacaggtgatatataaatagtcattaatgaggctgggggcggtggctcacgcctgtaatccagcactttgggaggccgaggcgggcagatcacaaggtcaggagatcgagaccayggtgaaaccccatctctactaaaaatacaaaaaattagctgggcgcggtggcgggcacctatagtcccagctactcaggaggctgaggcaggagaatggcatgaacccgggaggtggagcttgcagtgagccgagatcgtgccactgcactccagcctgggcgacacagcaaaagtccgtctcaaaaaaaaaaaaaaaaaaaaaaaaaaaagtcattaatggttaattactgaagtagatttaaaaaatggaccatggtattaaaagaaataatgataaaaaattccttaacagagttttcaaaccatttttcccttcagttttaaagctttttgttattttactgaatctctgttctaagcccctttctgggaacagaaaagactatgtcccttactatagtttgacttagaattttttgcctttatcatggtgtg

SEQ ID NO: 56275 - DNA, 724 bp, Homo sapiens
cattattttttcttaggtatgtgaatagtatgtagttatgtttaaaaagaagagatacatactgaaatatttatgggtaaatatttttagatatatatcaaaaatttatgtgtaaaattatatacaatacctgaaatttgcttcaaaatcatatgtgggagttaggtaggagtacaggtgatatataaatagtcattaatgaggctgggggcggtggctcacgcctgtaatccagcactttgggaggccgaggcgggcagatcacaaggtcaggagatcgagaccatggtgaaaccccatctctactaaaaatacaaaaaattagctgggcgcggtggcgggcacctatagtcccasctactcaggaggctgaggcaggagaatggcatgaacccgggaggtggagcttgcagtgagccgagatcgtgccactgcactccagcctgggcgacacagcaaaagtccgtctcaaaaaaaaaaaaaaaaaaaaaaaaaaaagtcattaatggttaattactgaagtagatttaaaaaatggaccatggtattaaaagaaataatgataaaaaattccttaacagagttttcaaaccatttttcccttcagttttaaagctttttgttattttactgaatctctgttctaagcccctttctgggaacagaaaagactatgtcccttactatagtttgacttagaattttttgcctttatcatggtgtg

SEQ ID NO: 56276 - DNA, 724 bp, Homo sapiens
cattattttttcttaggtatgtgaatagtatgtagttatgtttaaaaagaagagatacatactgaaatatttatgggtaaatatttttagatatatatcaaaaatttatgtgtaaaattatatacaatacctgaaatttgcttcaaaatcatatgtgggagttaggtaggagtacaggtgatatataaatagtcattaatgaggctgggggcggtggctcacgcctgtaatccagcactttgggaggccgaggcgggcagatcacaaggtcaggagatcgagaccatggtgaaaccccatctctactaaaaatacaaaaaattagctgggcgcggtggcgggcacctatagtcccagctactcaggaggctgaggcaggagaatggcrtgaacccgggaggtggagcttgcagtgagccgagatcgtgccactgcactccagcctgggcgacacagcaaaagtccgtctcaaaaaaaaaaaaaaaaaaaaaaaaaaaagtcattaatggttaattactgaagtagatttaaaaaatggaccatggtattaaaagaaataatgataaaaaattccttaacagagttttcaaaccatttttcccttcagttttaaagctttttgttattttactgaatctctgttctaagcccctttctgggaacagaaaagactatgtcccttactatagtttgacttagaattttttgcctttatcatggtgtg

SEQ ID NO: 56277 - DNA, 724 bp, Homo sapiens
cattattttttcttaggtatgtgaatagtatgtagttatgtttaaaaagaagagatacatactgaaatatttatgggtaaatatttttagatatatatcaaaaatttatgtgtaaaattatatacaatacctgaaatttgcttcaaaatcatatgtgggagttaggtaggagtacaggtgatatataaatagtcattaatgaggctgggggcggtggctcacgcctgtaatccagcactttgggaggccgaggcgggcagatcacaaggtcaggagatcgagaccatggtgaaaccccatctctactaaaaatacaaaaaattagctgggcgcggtggcgggcacctatagtcccagctactcaggaggctgaggcaggagaatggcatgaacccgggaggyggagcttgcagtgagccgagatcgtgccactgcactccagcctgggcgacacagcaaaagtccgtctcaaaaaaaaaaaaaaaaaaaaaaaaaaaagtcattaatggttaattactgaagtagatttaaaaaatggaccatggtattaaaagaaataatgataaaaaattccttaacagagttttcaaaccatttttcccttcagttttaaagctttttgttattttactgaatctctgttctaagcccctttctgggaacagaaaagactatgtcccttactatagtttgacttagaattttttgcctttatcatggtgtg

SEQ ID NO: 56278 - DNA, 724 bp, Homo sapiens
cattattttttcttaggtatgtgaatagtatgtagttatgtttaaaaagaagagatacatactgaaatatttatgggtaaatatttttagatatatatcaaaaatttatgtgtaaaattatatacaatacctgaaatttgcttcaaaatcatatgtgggagttaggtaggagtacaggtgatatataaatagtcattaatgaggctgggggcggtggctcacgcctgtaatccagcactttgggaggccgaggcgggcagatcacaaggtcaggagatcgagaccatggtgaaaccccatctctactaaaaatacaaaaaattagctgggcgcggtggcgggcacctatagtcccagctactcaggaggctgaggcaggagaatggcatgaacccgggaggtggagcttgcagtgagccgagatcgtgccactgcactccagcctgggsgacacagcaaaagtccgtctcaaaaaaaaaaaaaaaaaaaaaaaaaaaagtcattaatggttaattactgaagtagatttaaaaaatggaccatggtattaaaagaaataatgataaaaaattccttaacagagttttcaaaccatttttcccttcagttttaaagctttttgttattttactgaatctctgttctaagcccctttctgggaacagaaaagactatgtcccttactatagtttgacttagaattttttgcctttatcatggtgtg

SEQ ID NO: 56279 - DNA, 521 bp, Homo sapiens
ttctaggaggtggaaatagagcagagaacaagacactgccctcaaggagccaaatgcttgtggtgcagataggtagcacaggagcctgtgtgaagatgctagatcctggcaggcacaggagttaagggggcagggaagttgkgctgcagctagagtgcctggggaggcctctctgagaagggacagttgagagctcagtgatgagaggtagggagcaagaacattgtaagcagcaagaacgggcagtgatcctgagcacaatctggtcagaaacagaaaagagagtttggctttagccgggagaagaccctccacttcttcctttcctgcacatacaaacaatgcatatacccctctttaacaacttaaatggctgtatgccccttcactattctgctcctagctttttcaattatctaccatgtatttcagggatcattcccgatcagcacacaaaacatgtcctcattctgttaaagctgtatgttattccattgtagggaagaaccataatttattca

SEQ ID NO: 56280 - DNA, 669 bp, Homo sapiens
atttctaggagccatctgttctgaagttcatgtgcagcaatcagcaacctgttcctaattgaaaaagactgatggggtaaagagccacagagcggaattctaggcaaagtaacatcctcctatagccaggttcggtcaggaacataggcatgagtctaggcttgaagactcagccgcacgaacttagagctgtgtggctttgaatgggtcactcaaccttaatgccttcagctgtaaaatkggcattgcaatagtgcctcccttttggaattcttgtgaaacatatacatgattgagaacataaaacactcatcaaaatacctggtactgcaagtactcgatgactattagaggctaatgatgatgatgctttcatcagtatcaatgtgtatttggatatacttttgttgcagcctcacaaaggaaaaccaggaaacttcgaggttggaacaggatgttcgagtgtgactctgtgctatctcaaagcagatatgaactgagaatagattcaccaaatgacccactttatcattcaataaaatgtgctgatctggcagttgagtatgtagtcttcccaggatctcacagacgtgcagacattgtgagcttctgggtacatgtgcacccacacatacacacacacaaacacactgtacagatgcctgatgc

SEQ ID NO: 56281 - DNA, 669 bp, Homo sapiens
atttctaggagccatctgttctgaagttcatgtgcagcaatcagcaacctgttcctaattgaaaaagactgatggggtaaagagccacagagcggaattctaggcaaagtaacatcctcctatagccaggttcggtcaggaacataggcatgagtctaggcttgaagactcagccgcacgaacttagagctgtgtggctttgaatgggtcactcaaccttaatgccttcagctgtaaaatgggcattgcaatagygcctcccttttggaattcttgtgaaacatatacatgattgagaacataaaacactcatcaaaatacctggtactgcaagtactcgatgactattagaggctaatgatgatgatgctttcatcagtatcaatgtgtatttggatatacttttgttgcagcctcacaaaggaaaaccaggaaacttcgaggttggaacaggatgttcgagtgtgactctgtgctatctcaaagcagatatgaactgagaatagattcaccaaatgacccactttatcattcaataaaatgtgctgatctggcagttgagtatgtagtcttcccaggatctcacagacgtgcagacattgtgagcttctgggtacatgtgcacccacacatacacacacacaaacacactgtacagatgcctgatgc

SEQ ID NO: 56282 - DNA, 630 bp, Homo sapiens
gcaggggcacaattttaagcactggctttattttctcctgaatctttgctcctgctctttcattggttcagtgtgccttctccctccttgacttctggttccataacctaagaaccctgtctaaaatttgtatagacaagaattttgcaatagggacactttcagttatgacatatccctgtatttgaagaaactgggtgaccagccggtgagattttatttctaatagctggaggagagcccctggtgcagaatgatgggagtgttcactggaagctcacctggcacactctgttgtttcaggtgagcacatggatcccccaactggttcaggatacacctttagaccttgaagagagtattcagttccatgcaaaccagttggttctcatggaacaacagggagaccaatgagaatgagaacatggacccaactcctatctgtgagatgtgttccagcaccatgaggccttgtgaatgcttagtgaagtgcttaggagaaattgtattcyttctcatgtgaaactgaataatcatagtgcattccatacatgatacaaggccctagagatctaaatagataccagtgaggaaaatattttatatttatatctatatatgtgtatatat

SEQ ID NO: 56283 - DNA, 848 bp, Homo sapiens
ttattacatatcacatggtaaaagaatccctctaaataatacttctctcttggattacatgaatctttgtcatttaaagctcagtataagtaaaaaaaaaaaaatacaatgaagagattacttcattcacaaataagtatcgaattttagtgcttaaaaattaacaaggtgggccgggcgtggtggcttacgcctgcaatcccagcactttgggaagccaaggtgggtggaccgtgagatcaggagattgagaccatcctagctaacacggtgaaacccatctctactaaaaatacaaaaaattagcagggcatggtggcacgcgcctatagttccagctacttgggaggctgaggcagaagaatcacttgaacccgtgaggcagaggttgcagtgagccgagatcgcaccactgcacttcagcctgggtgacagagtgagactctgtctgaaaaaaaaaaaaaaacattaccaaggtggagatcatgaaaatggcatgaatagtgtgggatttctctaagattgttgatattaattccattagactcttatgtgagtgaagacgaagacttcccctgagtaagttcagacagcattgtgataacatttctacatcaattcctcaggatttaactatatattcttgaaaacatctcaattttcaagtgtttctttcaagcatggtgcacattaaacagagatagcccttcaacaggttgaactcagcatatgctgagtctgaaatggaaatgatggagttagagaaccakacaacaatggtaatgatttcagaaacatggtgttgagcagaacaaagcagacacaaaagagtacctatggcatggcat

SEQ ID NO: 56284 - DNA, 622 bp, Homo sapiens
tagatgaggctggcaccaaagaggaggaggaaggactgttccattaggcctgaagctcccacagtgttggacttagcaggctttcttgctgaggcggctgggataccatttggtgtcacccaggggagttggccacgtgggctgagcaccaggagcagctaatgcctgttccacccaggcgcctgaggctgggaccctctccgaccccataattttctacccaggtggacgtgcacccagagcagcatcagcccccagtacaatatctgcgagcagatggttcagatccgggatgaccacatccgcttcatctccgagctcgctcgctacagcaacagtgaggtgagcatgcaggctgctggggcacaggcccgtgggcccasggccagaaggggtaaggagcagccaggaaagaacatggacccacggaacactggagagtagaagggagggaggcaggagggtaaagtggccaacagcaggggttttggagccaggcagactggggtgaattctggtggtgctgctgccctttgtaagttattcaacatctctttgcttcaatttcctcatctgtgaaatgagggtgataacagtatctatcctgaaaggttcattgaga

SEQ ID NO: 56285 - DNA, 809 bp, Homo sapiens
aagatgttcctctcatctgttaaataaaacccaactcaagacttgcctctaacaggaaccaggaaaattcctagatgacatctgtggcattctgtaagagccagtttttcagggattactttgtgcatagaaacaaatgcatgcacattgtgcagataaaaaggacctccagtggattgtccagccagatttgttatcctcatattttcaaggtgtaatcatatacctttcctcatgtggatctacatacaacactgggtggtaacactgaccaaagcccatcagtgattgtcagttggggatgctgagctatgacaygggatagttagcaaaacacacatgcctagggcctaccccaggcctactgaaacagaacttctggggatgggccccaggtatctgaattttggtacaaagccaacatctcccatgagtctgataactgatgatcaaactgtgatcatcatagataatgtatttagactggggatagacatgcccaacaccaagtatccttcttttgatcttgcctttagggacctgaaatggtttttagacctaacttaccactcttaaggatctgccacagtttcaagaccctctaaacacaggcatgtctgcaaggagagctgcatgaacatctatcagttcacaggtttagtcagagtgaaccttaacacaaagcatcttaattagagctttttctaaaagttagtccttgtatttcttacagttttcattttatcatgtacctttattatttatgtaatagtttttctttaagcaaatttgattttcccctaagtaga

SEQ ID NO: 56286 - DNA, 809 bp, Homo sapiens
aagatgttcctctcatctgttaaataaaacccaactcaagacttgcctctaacaggaaccaggaaaattcctagatgacatctgtggcattctgtaagagccagtttttcagggattactttgtgcatagaaacaaatgcatgcacattgtgcagataaaaaggacctccagtggattgtccagccagatttgttatcctcatattttcaaggtgtaatcatatacctttcctcatgtggatctacatacaacactgggtggtaacactgaccaaagcccatcagtgattgtcagttggggatgctgagctatgacacgggatagttagcaaaacacacatgcctagggcctaccccaggcctactgaaacagaacttctggggatgggccccaggtatctgaatttyggtacaaagccaacatctcccatgagtctgataactgatgatcaaactgtgatcatcatagataatgtatttagactggggatagacatgcccaacaccaagtatccttcttttgatcttgcctttagggacctgaaatggtttttagacctaacttaccactcttaaggatctgccacagtttcaagaccctctaaacacaggcatgtctgcaaggagagctgcatgaacatctatcagttcacaggtttagtcagagtgaaccttaacacaaagcatcttaattagagctttttctaaaagttagtccttgtatttcttacagttttcattttatcatgtacctttattatttatgtaatagtttttctttaagcaaatttgattttcccctaagtaga

SEQ ID NO: 56287 - DNA, 587 bp, Homo sapiens
cctccctctctcctgggacctcactctcaacactgctgcaatttgcgatgttactaagctcactttttcccttcctgtggctgcttcacaaaaaacacattgtgctcagctcgtgtgttatttctcattacrtttccaaccctagtaactgtttcccatgttcctccgactatttccagttggaatgatttctcatttgtaaacacttggtctcattttctcatggtgatgcaaaaagtatccagaagaagatttatgcatactggaatttcaggggcttggaatcaatgtagggatactgagctgtttccataattctgaagcctcttctgttgtccaggtagcagttaggaaggtccatgtgctccagagccgtgtgaccgtatggaaactataggtggtcggcttgttccatgttgatgtccaccctccctcacccagaaggcttgcgtcagtgggcgaggctcagccctgcctggaccccacatggatactgtgactctattgctccccggcatccagcatcactttaggaagttttgaggtcacttccacttcactgagtaactttgtaaaagcttgaatct

SEQ ID NO: 56288 - DNA, 587 bp, Homo sapiens
cctccctctctcctgggacctcactctcaacactgctgcaatttgcgatgttactaagctcactttttcccttcctgtggctgcttcacaaaaaacacattgtgctcagctcgtgtgttatttctcattacgyttccaaccctagtaactgtttcccatgttcctccgactatttccagttggaatgatttctcatttgtaaacacttggtctcattttctcatggtgatgcaaaaagtatccagaagaagatttatgcatactggaatttcaggggcttggaatcaatgtagggatactgagctgtttccataattctgaagcctcttctgttgtccaggtagcagttaggaaggtccatgtgctccagagccgtgtgaccgtatggaaactataggtggtcggcttgttccatgttgatgtccaccctccctcacccagaaggcttgcgtcagtgggcgaggctcagccctgcctggaccccacatggatactgtgactctattgctccccggcatccagcatcactttaggaagttttgaggtcacttccacttcactgagtaactttgtaaaagcttgaatct

SEQ ID NO: 56289 - DNA, 587 bp, Homo sapiens
cctccctctctcctgggacctcactctcaacactgctgcaatttgcgatgttactaagctcactttttcccttcctgtggctgcttcacaaaaaacacattgtgctcagctcgtgtgttatttctcattacgtttccaaccctagtaactgtttcccatgttcctccgactatttccagttggaatgatttctcatttgtaaacacttggtctcattttctcatggtgatgcaaaaagtatccagaagaagatttatgcatactggaatttcaggggcttggaatcaatgtagggatactgagctgtttccataattctgaagcctcttctgttgtccaggtagcagttaggaaggtccatgtgctccagagccgtgtgaccgtatggaaactataggtggtcggcttgttccatgttgatgtccaccctccctcacccagaaggcttgcgtcagtgggygaggctcagccctgcctggaccccacatggatactgtgactctattgctccccggcatccagcatcactttaggaagttttgaggtcacttccacttcactgagtaactttgtaaaagcttgaatct

SEQ ID NO: 56290 - DNA, 1750 bp, Homo sapiens
attaatttacactgagggaatatagcacctttcatccgaagaactgaaggtgctttacaaacattagcatttaaaaaacaattacatttaaaaatctggattcttgatgtcaaatctcttcgactccagatacacaatttcctggaagctgatggaaagtgattctatttctgacaatgaaagaggctcagaaagagtcctaatttgctttcacagtacaggcattttccaaaacctggttctgggcttacaaagcacacacacacaaatcttaatgcaatgaacaatatttcaaaccttatttcccaaagcaaaacctagggcttaagacgtcaaaatcttccaacagttctagacatccagacagaataggagctgatgcagattgcatatgagatgtactgttgatccaggtgttttaggatcacactcaaatgaatataaagtagtgaaactttttggggaaacacattaacttataaaaagctagccaagagcatatcggccaaaggaggaaagggagtaaatggcaattcaaagtagacagttctcactagagcctagggcactttattagaaaccaagtatatcataggcaaataaaaatagtttttacccccattgatacaacataagggattttacattcagcctagatatagggagtaacaaatcctcctgcccataaatctatgacttgcaagtatcttccaccacatgataactctatatagtacatatagtacatagcccttatttattggagggatccaaaatattccttgtaggctcacaaagtccaatacattagctctctcttccctttacacgtctaatagtaaaaactattttttccatgcaaaaagccattattcagttgaagagaaatcaggcaaaacagagatggcagataaggaatggagagaatattattggcacgtgcccaactagtgacaaacaaatgcagtacacaatgacttaaaaataaaagtcacattatagggataacaaaaacaactacatcaatctaagctaaggagtgtcaaacagggagggctgggagttaccggttctattagtacaacttaagtggaaagcaagcacttaaatacaatttatggtaacaggaaaaaaaaaaatactgcagagagctgttcaaagaccacaccaagttgtctgcatcattaatttccagtgtttcacaattagtaaaatacatagctacatatccctgtgagataaaaatacctttccacctgaattacactgggatcagggcagtaacacgaagctactgacccaacattagttcaagtgtgtgcagcaaatgtcttagccacctctttcakatagctatataattaaaaactatgtaaggagctgggtggtttgagggaaaaaaattaaatcaaaacagtattgtgctcaattaataaaagaaaaccctgatgaaaaattatatgccaagaagcttagactataaagatttttattgcatttttaggtaacctggaagttcttatcctgaaggggaaaagtgggttttcaaaactacctgaacagatgctaaagtgctttattaattggctggcttcacaagtatttcctggaataacaaaaattaatcatagtaaagggataccaactatttcacaaaatgtacattccaacatcatttatgactacagtcataagagatactggaatacttgtccttattaagtggacagttgcatattcagaactgatc

SEQ ID NO: 56291 - DNA, 1750 bp, Homo sapiens
attaatttacactgagggaatatagcacctttcatccgaagaactgaaggtgctttacaaacattagcatttaaaaaacaattacatttaaaaatctggattcttgatgtcaaatctcttcgactccagatacacaatttcctggaagctgatggaaagtgattctatttctgacaatgaaagaggctcagaaagagtcctaatttgctttcacagtacaggcattttccaaaacctggttctgggcttacaaagcacacacacacaaatcttaatgcaatgaacaatatttcaaaccttatttcccaaagcaaaacctagggcttaagacgtcaaaatcttccaacagttctagacatccagacagaataggagctgatgcagattgcatatgagatgtactgttgatccaggtgttttaggatcacactcaaatgaatataaagtagtgaaactttttggggaaacacattaacttataaaaagctagccaagagcatatcggccaaaggaggaaagggagtaaatggcaattcaaagtagacagttctcactagagcctagggcactttattagaaaccaagtatatcataggcaaataaaaatagtttttacccccattgatacaacataagggattttacattcagcctagatatagggagtaacaaatcctcctgcccataaatctatgacttgcaagtatcttccaccacatgataactctatatagtacatatagtacatagcccttatttattggagggatccaaaatattccttgtaggctcacaaagtccaatacattagctctctcttccctttacacgtctaatagtaaaaactattttttccatgcaaaaagccattattcagttgaagagaaatcaggcaaaacagagatggcagataaggaatggagagaatattattggcacgtgcccaactagtgacaaacaaatgcagtacacaatgacttaaaaataaaagtcacattatagggataacaaaaacaactacatcaatctaagctaaggagtgtcaaacagggagggctgggagttaccggttctattagtacaacttaagtggaaagcaagcacttaaatacaatttatggtaacaggaaaaaaaaaaatactgcagagagctgttcaaagaccacaccaagttgtctgcatcattaatttccagtgtttcacaattagtaaaatacatagctacatatccctgtgagataaaaatacctttccacctgaattacactgggatcagggcagtaacacgaagctactgacccaacattagttcaagtgtgtgcagcaaatgtcttagccacctctttcatatagctatataattaaaaactatgtaaggagctgggtggtttgagggaaaaaaattaaatcaaaacagtattgtgctcaattaataaaagaaaaccctgatgaaaaattatatgccaagaagcttagactataaagatttttattgcatttttaggtaacctggaagttcttatcctgaaggggaaaagtkggttttcaaaactacctgaacagatgctaaagtgctttattaattggctggcttcacaagtatttcctggaataacaaaaattaatcatagtaaagggataccaactatttcacaaaatgtacattccaacatcatttatgactacagtcataagagatactggaatacttgtccttattaagtggacagttgcatattcagaactgatc

SEQ ID NO: 56292 - DNA, 656 bp, Homo sapiens
atcctttatgcccttccctgttcatgaggctcttgtaggttacactgtgaatttcaaagcagcaagagtgagcctggtttgctgaatgctgcttgccaattacaaacactcattttgaactctgtgtgaacaagaaataaacttctcctatcattttgcattttcccagttgtttattgggacttactctagctaaaaaaaactcttcagaattaaatatagaagattaaatctaaaacatcataaacaaatggataataaatccaccaaagagaattatttctttcaacaatatctgggtataagcagggtgctaaatttaggtaggttttattctgttttcttctatctggatatatatatatgtatatatatttgcaggagtgtctcagtaactgacaggacatttgtctcaagtggtrtctttatgtccattctgggttttccttcagggagacaaaccctgcagagaatcacatcagtcactgacataatgactcaagacagtgaagtcaacattcattgccatattccctcctgggaaatgtttctgagtgcaggtcacacatgttgatctagcagaaaatccaatctacttcctctctaaggtagagtaaaaatcaaaagaggcaacttttttgttttttttttttttt

SEQ ID NO: 56293 - DNA, 915 bp, Homo sapiens
gccacaaaatgttgatctttgatcatatttaagtaaaagaaagttaataagcaccataaaataaattctatgaaggcttctcaaatatccattgcactggttagaaacaaatgagagaacacattctatccagcgagtaatcaatgacttctcatcagctcttactattcaaaaaccaagttgtatgaaacaaaacatctaaataaaaccaactttaaactacttgactctataatgaacatttttctgtatagattcatagtaagcactggtgcattatttatttatccctgcctcaactgttaactaaaccattgactctaggtaaacacctgctctgaacaaagtccctgtaccagatgctttggggatagaggtaaatgacatggctgctgtctgatataccagcagagggatgagttagtagcagctaattactagtcacttatattgaaacatcccatatcatctatgccttattgattcctacacckggctcacactcagctttctgaggtgccttctcaaaggtaacttcctattcaaaataacattttcatattcactacctcttttccctatttatttcttctttacacatactactacctgacatcgtatcatatttactctgtcttccaacactaaaatgtaagctccttgagggtggagttttgtgtggtccctcactacatctctagcacacacattttctggcacttggcgagcattagatatgaaagccagcaataaatacttgctaaataaagctgttatgaaacagaaataaccacaacagagaggggattggaattttccatttgcatctcaggatctgtcctctaccccctctttaccctgttgtgtgatctgtgcccttgctcttctctacagatgacatcaataggctccctc

SEQ ID NO: 56294 - DNA, 584 bp, Homo sapiens
tcgctctgtcgccaggttggagtgcagtggcgcgatgcaaccttcgcctcccgggttcaagcgattctcctgcctcagcctccccagtagctgggactacaggcgcatgccatcacacccagctaatatttgtatttttagtagagacggggtttcaccatgttggccaggatggtctccatctcttgacttygtgatccgcccacctcggcttttcaaagtgctgggattacaggcgtgagccaccgcgcccggccgagagaacaccgtactttaaaatgtatgtaataacagacttttgctggtattgtggtaaacaactatgaagctggataaagtgtgtgttgccacaatttcaggtgctggggagcagcctgcacaacactgtgattttggctagaagggacgtatgggaggttagcgccacatgcatcctgggtttctcctgcggcattttccaaatggaaatggagactcagtgtacagccaaatacggcgtggggaaggaaacagacactggaccactaaagtgtatgagattgtggatcatgtgtctgagagaagagggattctgagaaggatcc

SEQ ID NO: 56295 - DNA, 1060 bp, Homo sapiens
aatagcaaaatagtttgttatccaactaaacaattggttactacttcaaaataaagcatttttcatacaggtggaattatctacttggcccccctacctcatcagatctccccatcattcatgccatgtcatcatgaatttcttgctgttctcaacttgatttcaacatggattttctctttttcatgaattttggctctgtctgaccttaaacctaagctttctctgtatttcttactccctccaaccatgcccttttttgcatccccaattgccttcactgataaaatgcaaatgttaacctctgataaattgccaaatttccaaatgataaaataccagtatctttcctactttcttcatggatggatatttttgtgaggattctttttactgtgatgtaaaatatagttgtgaacttctagaagcagttgactactaacagatatcaatacctattttaaaagtcccacagtttaatttactagattttcttttttgcttctttagattcagagaaattcaatacacagtttctgaaaacccatttccactcagaactaatcactcttctaccatcctctcatgcaatctccacattttgctgcagtggaattattatcagctcctttatagagaggaagaaactgagacacttaaatatttaataacaaggcagtyctcattcagctagtaagagatgaagccaggattcacaccaagagagtctaaatatggagctcatgtttttatccattaagatatagggagaataaaaaatgttttagattaaaaaaagagaagttgatctaataaagcaatttaatcaattcacatttcattaacaaaaagtcaagaactatggaattttacttaccagaaaatgaatagaaatatttcctttaaaacaggtaaacctttcccagctcataaataatcaagcctatcccttttctatgaagctgtgatttggtctcataatccatctcaacatgatgttccacatagttatgatcactagattgtcatcagtattcaagatgacatcaaattgttacct

SEQ ID NO: 56296 - DNA, 794 bp, Homo sapiens
gggattacaggtgtgtgtcaccactcctggctaatttttgtatttttagcagagacagggttttgccatgttggccaggctggtcttgaactcccggcctcaggtgatctgcctgcctcatcctcccaaagtgctgggattataggcatgtgccactgcacccggctgagactatttttctaactcagtttgtacaggccctagcatggtgcgtgggtatgagagaaaaagagactggagctccaatggaggatgcctcagttctctctctctctctctctctctctctctctctctctctctctctctctctctctctstgtgtgtgtgtgtgtgtgtgtgtgtgtgtgtgattgttggaggccaggcctggcttacttcctgagcctaattcaattggagtgtttccatagagagggggagataccatctagtccagtttagcatccacattcatttctctccatctccatatggagctgaacagatcactcaggtctaaccaagttccctgagagttttacaaccttgttactgctttggaaagaccattatactccagctttgtgtagaacagagagagacaagggctgtcttttgaatatattccactcttatctaacgacacagagttgtcgtaacctacctataataataacctttgtgatactggagctgccagcgtgtgaggagggacattctttcaggtgtcccttcatcttcatctctgattagtatattctgtttgtaaaggcaatgcttgagccagtagctttcaaacatttttgaatggg

SEQ ID NO: 56297 - DNA, 794 bp, Homo sapiens
gggattacaggtgtgtgtcaccactcctggctaatttttgtatttttagcagagacagggttttgccatgttggccaggctggtcttgaactcccggcctcaggtgatctgcctgcctcatcctcccaaagtgctgggattataggcatgtgccactgcacccggctgagactatttttctaactcagtttgtacaggccctagcatggtgcgtgggtatgagagaaaaagagactggagctccaatggaggatgcctcagttctctctctctctctctctctctctctctctctctctctctctctctctctctctctgtstgtgtgtgtgtgtgtgtgtgtgtgtgtgtgattgttggaggccaggcctggcttacttcctgagcctaattcaattggagtgtttccatagagagggggagataccatctagtccagtttagcatccacattcatttctctccatctccatatggagctgaacagatcactcaggtctaaccaagttccctgagagttttacaaccttgttactgctttggaaagaccattatactccagctttgtgtagaacagagagagacaagggctgtcttttgaatatattccactcttatctaacgacacagagttgtcgtaacctacctataataataacctttgtgatactggagctgccagcgtgtgaggagggacattctttcaggtgtcccttcatcttcatctctgattagtatattctgtttgtaaaggcaatgcttgagccagtagctttcaaacatttttgaatggg

SEQ ID NO: 56298 - DNA, 377 bp, Homo sapiens
gcactgatgagatgactccaaaagtcccraaaagcttgagcaggtgttccatcaccttctcttgcacccttccattcttctggggggtggccagagcccacagcttaggagacaagtagagatcatagaccaggagcatcttgctggggaggttctcgttggggaacagtgggacgggggtggtcctcctcaccttccggtggtcctcattcaactcaaggaccactgaatacttcaaagcatgtgctgtggttctccagtcccgtgtaagatgtttcacctgcagaacataaagcaaatctgaaatagtatctaatgtccttgtccatccttgtgtatgctataagctccctccctcacttccttatccctgtaac

SEQ ID NO: 56299 - DNA, 737 bp, Homo sapiens
tttttttttttttttttttgagacagagtctcgctctgttgcccaaactggactgcagtggtgtgatctcggctcactgcaacctccgcctcctgggctcaagcgattctcctgcctcagcctctcgagtagctgggattacaggtgcccgccaccaggcccggctaatttttgtatttttagtagaggttttgccatgttggccaggctggtcttgaactcctgacctcaggtgatctgcctgccttggcctcccaaagtgctgggattacaggggtgagcaaccgcgcctggcctctaacagatttttaaactcattttcttgtttttttcttccttaggtagaagattatgaaatgtgcaaaaattgatcatctggtttcttttcctaatatttatatttcttatttatatttcttatttcattctcttgcttagtgactttgaaagcacttccagaagagaatacaaaagcagtgctaatgccaggcgcctttgtcttttctctgatgccaggagaatgctcatgagtgtcttcccttgagcgtgatgccggcagtcatttgatgtgcaygtggaagtttttggttatattatgcaactacccttccattctctttttggtgctctggttgcatggaaaagttatctggtggtgatttctgagactttggtgcccccatcacccaaggtatccttctattcttatataaaacattgctattaggagtaaatgt

SEQ ID NO: 56300 - DNA, 780 bp, Homo sapiens
ccagggagtgctttygggattctgttttttgctggattttgctgtttttaaattaattcatttgtttattttggttgggtgcacttccctttagcacaatccactggaacagcataatatatgacatcaatacataaccctaaatctaggttattcaggattccagaacactgcagaaggactttagcagaacagcaagggttgcttccaggcatcccagcaaggacagtgcctccaccataatataaactggtaaatatatgcttccatgtcacaactacagccttccagtaactatcagacagggagtgtttagaaaagaacaaatatacatctcccaagaaaaaaactaatatttagaaaacatctttccagaaaggaatgatccatggagatgcaattctacccaccaaaccaaacaaaacaaaacaaaaacaaaaaacctatcttttacacaatatgtgtaaagagtaagacctttcaattttacttttgatggacaaaaatgcctatcaaatgatttcccacaaaccaaatagcagttaccccaaaggttaattcagatctctccttctggagaaactgaaacgagccttaaaatgtgaatcttcctttttgatcttgcagtaatcaaggtttaaaaagtattagggttcagattcatccagaatatgccattccccaagaaaacaaaggggtagacactctagaggaagatggaaaggactgtatcagatgagcagggttaatcccttcccaagccattaacaatctctgttg

SEQ ID NO: 56301 - DNA, 780 bp, Homo sapiens
ccagggagtgctttcgggattctgttttttgctggattttgctgtttttaaattaattcatttgtttattttggttgggtgcayttccctttagcacaatccactggaacagcataatatatgacatcaatacataaccctaaatctaggttattcaggattccagaacactgcagaaggactttagcagaacagcaagggttgcttccaggcatcccagcaaggacagtgcctccaccataatataaactggtaaatatatgcttccatgtcacaactacagccttccagtaactatcagacagggagtgtttagaaaagaacaaatatacatctcccaagaaaaaaactaatatttagaaaacatctttccagaaaggaatgatccatggagatgcaattctacccaccaaaccaaacaaaacaaaacaaaaacaaaaaacctatcttttacacaatatgtgtaaagagtaagacctttcaattttacttttgatggacaaaaatgcctatcaaatgatttcccacaaaccaaatagcagttaccccaaaggttaattcagatctctccttctggagaaactgaaacgagccttaaaatgtgaatcttcctttttgatcttgcagtaatcaaggtttaaaaagtattagggttcagattcatccagaatatgccattccccaagaaaacaaaggggtagacactctagaggaagatggaaaggactgtatcagatgagcagggttaatcccttcccaagccattaacaatctctgttg

SEQ ID NO: 56302 - DNA, 1467 bp, Homo sapiens
tggctccctgttagtcagggaagatgaacctagaggaagtagaaggaagaagagtgacatgcaggaagcttccctagaaacattctcattagccttccttgggtctgtgcctcgatacaccagcccatcatcatcatgatcatcaacaccattatcatcatcattgtgctctgtagcagccacagacctggcagttctcaatggccatttacagaatgcccacatgtgctgggctctgtgagagactatacagacactggacaatcaagtgaagagtgattctgcttgcaaatggacagtgaagagagtgcttcccatcccttcgtatttgcctttgatgactaagaatgaggcacattgttgcctgtggagttaggaaaacaactttccaatgacccactttcccatatctcttagctattgcagctcatacaatctcagggctggaaaagatcctagaaatgatcagactcactttgcaaaaggacatgaaagtccagagaagctgtgactcacctgaagtcagggaactcatcaatgagaacaggaacaggagcctgggttacctactttcaagctcagcagactttccagcataccaccatgcctctcttcttgaataatttcctgaagttctaagaaacatgagtagaatatacctgatactaaaacaatatgagtatttctggtagaagtagtaaattgcctgtttctatattagaacaatgattttataaagattattattactaagaagacaaagagaatatttctgaaatgttgacagttggtatacttttctggaattccaatttgctttcctggttaaattttggagtctcaaattttattattaaattatcatatctttaactattaaatggtatctaatttcatgattgaagacagtaaaggtgctaggtataaaaagacagcataatctttctaacagtgccgtggaagggcccttttgaagccaaagtcttcaaatgtaattcagccagaatatactatggtattatgtgtgccttttcttgattttttttcccattaaagaatgttgaatttgaatgttttgttttagacactcccaattttggtgtgggagcataggacttgaacagactggctctaattctttataagaaaaagtaatgtataacctagtagagagcataggctttagagtccaaagatttgagttcaaattccaaattattcagtttctctaaactttagtgtgccgtatgataaatggtgatgagaattstttctgtggatactatctgggattagtacatgtaaagtgtctgggacacatgggctgtcattaaatggcagctaattttaaagctgctaaaggaacattttacgtagaccaaatgcttctgatatattgtctcacttcacctcacggttccactgcaaggaaactcgggctgagagaatttgggccattggcccaga

SEQ ID NO: 56303 - DNA, 494 bp, Homo sapiens
ctgtgtataccaaaatccacgcatacccaggcccaactggccctgtgaaacccatgtatatgaagagtttcatactctattcgcatgtgactttttgtatatgtgtagagaacagcatatgagcaggctctgcatcccacaaatactctatttttgaactgtgtttggttgaaaaaaatctgcacataagtggacttgtgcagttcaaactcatgttgctcaagggtcaactgttactttgctgattaagctgtatcatggtcaaaactgagctttctaatacactgtctcccctactcctcctaattcctggtcttggatctggactacccaaagaaaaacatacagtggaaatacttacctggatagcagcaaggaacagagctgccccaaaagtagraagagagagaggtgttcttcaaacctgcctctagaaggcaggtctggggctcagcaggtgtgtttaccctatggaagcaggatctgagtgaagt

SEQ ID NO: 56304 - DNA, 764 bp, Homo sapiens
tccaggagagaagggtcctcgggcttggccctgaggatagaaagacagtccaggtcacaccatcatggccaccactcacagcagccagaaaccccaaccctaatcctcccatcgacctcagagggcagccaccagtctcctcctcagagctgggttaagaacccccaaccctttggaaaaagagtaggtgtcttgctactagaaactccaacccttccaggaaaaccagcaagaggctcaggggaagttttgcagatcacccccagaaacatcttccttgaggctgaattgttctttttagtcttttctaatcttcaccaagtgacacaggagcatgagcctgtgggaagctcaccagggcctgtcaggagagccgagggggctgtaggcggtcaccacgatgcctttggactggcagtactggattaacttctcctgagtgagatatgggtggcactcaatctgcaaatgcaaaaacaagagctgatgggagcactgtggctacacrctgatgggacacagatgaagcttcctatgctaaagtccctccctaccccatacagaaaactatgtataacaaacaccctatttcccagataagctgtaacttcctacagttcccaggtagtatccttggtgttattattatcttattatagatgttctcatgggccctagaggcttttcttggctttagccacttatcaactatcacagttctgaggatctcatggctgcctctttgtcagaccccaaatcgtcac

SEQ ID NO: 56305 - DNA, 732 bp, Homo sapiens
ttcttgtgccaacaactagactgcaaatagttaccgggcctccacaggacagggtatgcatgtagaacgtgggtagggactcatgtgtatgggggttggtgtgtgcacgtgcctggaggggagggccagggctgaccgtgcctcatggctgtgtgcactacagacagcagctgtgtttgctgacagttttaaattgcacatctaccaactggcaaagagcagtgctcctcaaactttgaagaagtgtgcgtatgagtcactgctggtgcggattcaaatggcctgcgtggggcccgagactgtgatttctaagacgctcccaggtgatgccagtgctgatggtccactggctataccttgagcagcaagaacagaaagtcacccacacgtaatctgctaagggagctcaaaacacaccacaggttgcacctgagccccaagggacctggtctgcaccaggcatcccataccttaaagccagtcggccagtgaataaggtagaggtccaggtagtccagcttcaggtcgctgagtgtcttctggcaggctcctttcaccaggcccttctcatggtacgtgcaccacagctaagccagcgagagggcacatgtcatcattgccagccacaaggcagcttcctggctggaaagacagagcagtctcctctccccaaaacccatttgytttaccatgatgctgtgaatggttgtgagggcatttccactgcgtact

SEQ ID NO: 56306 - DNA, 994 bp, Homo sapiens
acatatattaattgagcacctaatgccagacattgtggacaagtggtaaaccaaagcaacagggcccatatgtttagggagcttgaagaccaatggagaaacagatcatatacagtgtaagtagatttgtgtaaagttctataaagaagaagtgcacggtgcctaggagatataagccaggtaggatcaagtttttccaggaggatgaccactcaataaatatcaaagttgaataggaatcattagactaaggggcagggagtggggaagggaggaagaagagaaggaggggaaggatgtagcattctaggtagggaatacacatgtgtgaaggccaaatgatcatagggagaaggaagggtcactataaggagcaatgggaagccactgttctaagctggggagtggtagggggtgacttgtgacacaatcactaaggtattctaccatatcacccacccctggctgcctagaagagagtaaaagtggattcagaaagacttgttaggaggctactgagaaaatgccggcaagaggtgatggtagcttgggctaaggtgttggtagtgtgttaggggtgtggtgtgtctgtgaataggatgaggaggatggaaaaaaatatttgaaacataaaccttgattgatactgatttggattagattgtgtaaagaggctttaatgagacattctagaaattacacttccacgtaagtgtcactgccttctaagtgttatattatgaggttacacacccatttcaaagatgcttcatgggtgtcaacaattctgagaagcttctttcagaayttacgtcagaaccagtgtataaaccatagcagaaaaataggcttattgctatatagaaaatatttcataaatccccaaagctaaggaaacaaatatgtgtgtaatgttcttaagttgatgcagggttcataaagacttccttttatgagtttgaccttccaacttgtagagtgaggtcacttcttt

SEQ ID NO: 56307 - DNA, 994 bp, Homo sapiens
acatatattaattgagcacctaatgccagacattgtggacaagtggtaaaccaaagcaacagggcccatatgtttagggagcttgaagaccaatggagaaacagatcatatacagtgtaagtagatttgtgtaaagttctataaagaagaagtgcacggtgcctaggagatataagccaggtaggatcaagtttttccaggaggatgaccactcaataaatatcaaagttgaataggaatcattagactaaggggcagggagtggggaagggaggaagaagagaaggaggggaaggatgtagcattctaggtagggaatacacatgtgtgaaggccaaatgatcatagggagaaggaagggtcactataaggagcaatgggaagccactgttctaagctggggagtggtagggggtgacttgtgacacaatcactaaggtattctaccatatcacccacccctggctgcctagaagagagtaaaagtggattcagaaagacttgttaggaggctactgagaaaatgccggcaagaggtgatggtagcttgggctaaggtgttggtagtgtgttaggggtgtggtgtgtctgtgaataggatgaggaggatggaaaaaaatatttgaaacataaaccttgattgatactgatttggattagattgtgtaaagaggctttaatgagacattctagaaattacacttccacgtaagtgtcactgccttctaagtgttatattatgaggttacacacccatttcaaagatgcttcatgggtgtcaacaattctgagaagcttctttcagaacttacgtcagaaccagtgtataaaccatagcagaaaaataggcttattgctatatagaaaatatttcataaatccccaaagctaaggaaacaaatatgtgtgtaatgttcttaagttgatgcagggttcataaagacttccttttatgagtttkaccttccaacttgtagagtgaggtcacttcttt

SEQ ID NO: 56308 - DNA, 620 bp, Homo sapiens
ttgcaccctgtctttgttatttttttcttttttctttttccttcatccattggctgtttttctcctgtatcagtggttctcaacagggagagatttgacaatgtcaggggacatttttggttgtcataactggacgaagggcactcccagcaaggaaggtcacaaaacattctgtaagacacaagagagyccctgcctaataaatagttacctgaacaaaatgatcaatacttccaaggttaagaaatcctgatctatgtcttttggggtttctcacaagtcttctttctgtacataatgcaactgttgtcataatataacaagtataaaaaaattctctgtagttttgaagagcaaaaattctgagtcaagagacttgttttctatataagaaggtcttagagacttgctacttgaccttgaataagtcattaaatctatcaggaacctcatttcttcaagaaaaagttgttggtaaggttttggccatgcttcctaggtaagtaattaattcattaaagaaacttcatattgacaaacaaataaataaaacagcatagacaccaccctctcaatattgagatgtaggttgggtttagaattcaggcatgatagaccct

SEQ ID NO: 56309 - DNA, 723 bp, Homo sapiens
cttctgttgataaagtaaaagtgatttcctttttgatttctttttttctgcctcttattttcataagaaaaaaaaaatcccttccagttttcaatttcaagaaagctgacaacctcccattttcttttctgatatgggcttttcttttgtagaaaatccatatatttattttattgcttattaggagagacaaaggagagacaaaggcaaatgatttttagacagmaagtggcgattgcccacgccaatttcattttgtatttttttaaattcctagcagttttgtttttccattataatctctatgtatgtttttttttgtttgtttgttttttgtttttgtttttgagacggagtctcgctctgtcgcccaggctggagtgcagtggcgggatctcggctcactgccagctccacctcccgggttcacgccattctcctgcctcagcctcccaagtagctgggactacaggcgcccgccactacgcccggctaattttttgtatttttagtagagacggggtttcaccgttttagctgggatggtctcgatctcctgacctcatgatccgcccgcctcggcctcccaaagtgctgggattacaggcgtgagccaccgcgcccggcctctatgtatgtttaaattacattgatgaaaacatttttatacactgtatattcttataaattgtggaacaccgtatttccttaattatcttcaat

SEQ ID NO: 56310 - DNA, 675 bp, Homo sapiens
atggtgtttttgaaataaaggataaacaattattttctttctcattgccaatatctggcactcagataaaaagatagccaatgtctctaatgccttgccccagtctaaagaggactgtgatggtcaattgtatgtgttaactcaactgggccacaggctgcccagacatttagttaaacattattctgaatgtgtttgcaagggtgtatctggatgaaattaccattctaataaatagaccgagtatagcaaattgcattccataatgtgagtgggcctcatccaatcagctgatggcctagatggaaccaaaaggctgactctccccaaagtaagtggattcctactgcttgattgccttgatctgggacattgttttttttcctgccaatggattaaatgggaacattagctctttctggatcttgagcctgtcagaatttaggctgagactgcatcatttctctcccaattctcagggcttaggactcagactggaactccaccattggctcttctgggtcaccagctagctgattgcagatcttgggactcatcagcctccattatcatttgaaccagcttcttataataaatctctctctctctcttctctctctctctctctctctctctmtatatatatatatatatatatatatatacacatgtgta

SEQ ID NO: 56311 - DNA, 675 bp, Homo sapiens
atggtgtttttgaaataaaggataaacaattattttctttctcattgccaatatctggcactcagataaaaagatagccaatgtctctaatgccttgccccagtctaaagaggactgtgatggtcaattgtatgtgttaactcaactgggccacaggctgcccagacatttagttaaacattattctgaatgtgtttgcaagggtgtatctggatgaaattaccattctaataaatagaccgagtatagcaaattgcattccataatgtgagtgggcctcatccaatcagctgatggcctagatggaaccaaaaggctgactctccccaaagtaagtggattcctactgcttgattgccttgatctgggacattgttttttttcctgccaatggattaaatgggaacattagctctttctggatcttgagcctgtcagaatttaggctgagactgcatcatttctctcccaattctcagggcttaggactcagactggaactccaccattggctcttctgggtcaccagctagctgattgcagatcttgggactcatcagcctccattatcatttgaaccagcttcttataataaatctctctctctctcttctctctctctctctctctctctctatmtatatatatatatatatatatatatacacatgtgta

SEQ ID NO: 56312 - DNA, 675 bp, Homo sapiens
atggtgtttttgaaataaaggataaacaattattttctttctcattgccaatatctggcactcagataaaaagatagccaatgtctctaatgccttgccccagtctaaagaggactgtgatggtcaattgtatgtgttaactcaactgggccacaggctgcccagacatttagttaaacattattctgaatgtgtttgcaagggtgtatctggatgaaattaccattctaataaatagaccgagtatagcaaattgcattccataatgtgagtgggcctcatccaatcagctgatggcctagatggaaccaaaaggctgactctccccaaagtaagtggattcctactgcttgattgccttgatctgggacattgttttttttcctgccaatggattaaatgggaacattagctctttctggatcttgagcctgtcagaatttaggctgagactgcatcatttctctcccaattctcagggcttaggactcagactggaactccaccattggctcttctgggtcaccagctagctgattgcagatcttgggactcatcagcctccattatcatttgaaccagcttcttataataaatctctctctctctcttctctctctctctctctctctctctatatmtatatatatatatatatatatatacacatgtgta

SEQ ID NO: 56313 - DNA, 675 bp, Homo sapiens
atggtgtttttgaaataaaggataaacaattattttctttctcattgccaatatctggcactcagataaaaagatagccaatgtctctaatgccttgccccagtctaaagaggactgtgatggtcaattgtatgtgttaactcaactgggccacaggctgcccagacatttagttaaacattattctgaatgtgtttgcaagggtgtatctggatgaaattaccattctaataaatagaccgagtatagcaaattgcattccataatgtgagtgggcctcatccaatcagctgatggcctagatggaaccaaaaggctgactctccccaaagtaagtggattcctactgcttgattgccttgatctgggacattgttttttttcctgccaatggattaaatgggaacattagctctttctggatcttgagcctgtcagaatttaggctgagactgcatcatttctctcccaattctcagggcttaggactcagactggaactccaccattggctcttctgggtcaccagctagctgattgcagatcttgggactcatcagcctccattatcatttgaaccagcttcttataataaatctctctctctctcttctctctctctctctctctctctctatatatmtatatatatatatatatatatacacatgtgta

SEQ ID NO: 56314 - DNA, 531 bp, Homo sapiens
ggagggattgcaagacaggtctgtagtgagagaatgtgggagaagagcgatggtagaagaggtggcagaggcaaaaatggacaatcatgtttggtatggaggcccttacaagagagtttggggtatttttttgtattctctttggcactaggaagccacttacagcaagcaatatcaaagctaccatattaccttggattccttgattattttgtgctcttccactccaaacagccaccaccagtrtctgtggttagggactgttccactcctgagtctgctttggttttccataaaacaggaaggatcttggaatgtttgtttccctgaaacaatccttaaccaatggctgacagtgcaggggcataagtaccccagctcccatgtctctagtgggagtgactctgagggacaaccaacactgtctccaacttccttgtgtgactgagctaaaattcccattcatggggcttacttgatagtgtatccctgtttagttttgtgttcttctctggttcactttcccactct

SEQ ID NO: 56315 - DNA, 742 bp, Homo sapiens
agccaaagatactttggccaaggaagttatccagtgacctagtttcatctcagtttacaagaccatgatccatggtttagttcaagtcacacttgagataaagacattagtaacacattacacagaattaaagaattgaggttaaatgttaagtgacatgtccaagatcagaaataaaattaatagaaaatctgactcaatcttaggtgcctggtgtcctagtctaaaccccttacactaaataacayaacagtaatgtcacaacatatcaaatccattcaagatcctaacactagaggctttaagtttaagaagccagttgtgataactggaaaatggctgtactgggcactgttacctttatgtacttcttggtccctaaagagctggtgtcttttatagttttccttcaaatggtagatactacagaattaaaaggtgtgtcagagactggtaggtatccactagtgaacctacgtcctgaattgtccagaaaattcctatttcacatctgttgtcacagcacaattagcattggcatcatttttctttcttaatagtatgctatgttggaagataattcctgcatttctgtacacactatgagggaggcagtaaatgtcctttgttctggactatcttttcaagaatatttatatagtgaacagccttggaaaatagagttagtttttctccagagcaaaaggcaggcatatactgctgttataaaagatttggatcc

SEQ ID NO: 56316 - DNA, 1077 bp, Homo sapiens
attcagatgcttaattgagaagtagtttatataaagagaataaaacctatcttgtcttgcaaactaattgctaaagatgtgcatccatgatacccactgtagactcattagccttttgtaggaagttcaagtccctctgctttttggagttcccactagtcataggaatatgtatgtcattattgacttttcccctccctcattctccaaattcaattatacattttaaaacctagcatgtcttctccatccctttcatttatttctgccctaggtcctttgtttgccatggatcattgcgtgacttaggtactaatctttctgctcctggttttgtcccttaaaatccatccccttcacaactatttcagaaatttacttaaaatacaaatttattcatagtacttccttttttagaaccttcatcagatccccatccactatagcatgaagtctgagtttcttaagcagagcgcatacgttttcaacagttcaacttctttctgactctcagccacctcccttcacctctcccagactcaattttgcatttccagcaccattgaacttacatgcactgcagtttctggccttgttacatttactcagattattctctgctgcatcatcatgatcatatttattttttaagactttattttttaaagcagttttaggttcatagcaaaattacagagatttcttatatacctcctaccctcacacatgcacagcctctaccattttcaacatcctctatcagagtggtacatttgttgcaatgaatatacattgaacacatcattatcacccaaagtccatagtttatattggggttcactcttggtgttgtactttctatgagcttagacaaatatataatgacatgtacccatcattatattatatggtgtttttttcactgccataaaagtcctcaatsctccacctattcagaactccatccctggcaatttctgcccaccattgatctttttactgtcttcacagtttttgccttttccaggatgtcatatagttggattcatacagtatgcggtcttttcatattgctgt

SEQ ID NO: 56317 - DNA, 674 bp, Homo sapiens
agtgagattcaggagctcataaaaaagctctaaatatgtacaatgactcataatgtgttgcatggctcaaaggaaaaccagattaaaagaaaaaacaaaaagtggaaatttacttcattttgtgtgatgttgtcaaagcactcagactgtggaatgtcaatattgctagctagcagggctggactgtctcctgagccccaggccaggactcgcttccatctgtaagcaaaatttaaggacattcaagattggtaagggtcattataatgtaagcaaattatgctatcaccatctgcatcaatatcaaaactgtgtacaattgaacctttctttagagaaaggggactttgctccccaagacatccttaaataagtctctccacaattctctctttttctttttcatgtctttctctctggcatcattaatggaaggagtgattattgataacataatctcaaagcctatttaacacattcactaatgcagtttataaattagtgggatyaactgaatattaaaagacctacaatagcatatggattatatacctgaatggtcatctctcctatgtcagaaaaaaaatatagctggaatgtcattcattggattattatacaacatatttatttgcaaatatatgaaattaaaaatgaataagcttcatttgctt

SEQ ID NO: 56318 - DNA, 652 bp, Homo sapiens
cgggtgcagtggctcacgcctgtaatcccagcactttgggaggccgaggcaggtggatcacgaggtcaggagatcgagaacgtcctggctaatacggtgaaaccctgtctctgctaaaaatacaaaaaattagccaggcgtcatggcaggtgcctgtaatcccagctacttgggaggctgaggcaggggaattccttgaacccaggaggtggaggttgcagtgagccgagatcgcgccactgcgccactgtactccagcctgggcgacagagtgagacaccatctaaaaaaaaaaggactcctcattcctgctgtgtactctgtctattggcctatgctcagaaagggctttttctttatgagacaggaatgtgcccggyttctgtcatcacatatataagacagacaagactggaatcaaactttcccacagaattggcgtaaggaccgaaagagacattatgtatctttgaaagcgccatggatactgcttactctgactattattatgaatgctttaagttggtcatttaggagctaagaaacactgatgagattctgtcttgtatgagcatgattgtggtgtttctttctctctcctgctggactttaagcaacttgaaggtaggactctaaggctgacgcaaccgcg

SEQ ID NO: 56319 - DNA, 652 bp, Homo sapiens
cgggtgcagtggctcacgcctgtaatcccagcactttgggaggccgaggcaggtggatcacgaggtcaggagatcgagaacgtcctggctaatacggtgaaaccctgtctctgctaaaaatacaaaaaattagccaggcgtcatggcaggtgcctgtaatcccagctacttgggaggctgaggcaggggaattccttgaacccaggaggtggaggttgcagtgagccgagatcgcgccactgcgccactgtactccagcctgggcgacagagtgagacaccatctaaaaaaaaaaggactcctcattcctgctgtgtactctgtctattggcctatgctcagaaagggctttttctttatgagacaggaatgtgcccggcttctgtcatcacatatataagacagacaagactggaatcaaactttcccacagaattggcgtaaggaccraaagagacattatgtatctttgaaagcgccatggatactgcttactctgactattattatgaatgctttaagttggtcatttaggagctaagaaacactgatgagattctgtcttgtatgagcatgattgtggtgtttctttctctctcctgctggactttaagcaacttgaaggtaggactctaaggctgacgcaaccgcg

SEQ ID NO: 56320 - DNA, 652 bp, Homo sapiens
cgggtgcagtggctcacgcctgtaatcccagcactttgggaggccgaggcaggtggatcacgaggtcaggagatcgagaacgtcctggctaatacggtgaaaccctgtctctgctaaaaatacaaaaaattagccaggcgtcatggcaggtgcctgtaatcccagctacttgggaggctgaggcaggggaattccttgaacccaggaggtggaggttgcagtgagccgagatcgcgccactgcgccactgtactccagcctgggcgacagagtgagacaccatctaaaaaaaaaaggactcctcattcctgctgtgtactctgtctattggcctatgctcagaaagggctttttctttatgagacaggaatgtgcccggcttctgtcatcacatatataagacagacaagactggaatcaaactttcccacagaattggcgtaaggaccgaaagagacattatgtayctttgaaagcgccatggatactgcttactctgactattattatgaatgctttaagttggtcatttaggagctaagaaacactgatgagattctgtcttgtatgagcatgattgtggtgtttctttctctctcctgctggactttaagcaacttgaaggtaggactctaaggctgacgcaaccgcg

SEQ ID NO: 56321 - DNA, 1492 bp, Homo sapiens
tcccgtgggaaaacctgacacacaatggcgcggctgctccgggcaccctcaacccagcgccctgcggcaaggcctggagcagcctggtggtcttggtgcgctccctttgccctccccgcaaccctctgcgagcactcgtcccaggagagagaccctggctagggtggaggttgcctcccgcaaagggcgctgttgctggggcctcccctcccccattctcttgtttttctgcttctgagactcgggagggaggcggcaggcgcctccgcagccgatagagcagctattgtgaccttcccttgcagagcgggaacccagccgagtgtgtaccgccggcggtggcgggggaggaggcgactgtgtgtgcaaacctcagtcggagagggggtggcgctgggaaataaaggtttgcaacctcaggcagttgggcccttcagagggcgtttggttgtgtttagactcggttgctttctaacactaattgcaggctcaaaaggagcggaatttattgcgaaggccaaggcggcttgtttataatttatgaagttttaaatggctgtgccgcgggccccaactttctcctgggctggcagccgcgcggaaacgcgccctcccccggctcgccgcccacccccacccacgcccctcagatgagtctcacgccaatggcaggaacagatccgagctattagaagtctcgggaacctccagagatgacagaaggtggcagatttggtccaagccctcaccccactcgagaggagggcgtcggggaaagctgtggctgcctggagagggagcccctgatcccacacttccttggagcctgagtgtgagaggaagctaatgtcagccgggctagacaccgtttaaagtctaatccatgaaaccctaagccgcaaatgacacttggggctttgcagacacccgcagactcagcagatactcctgcggtaacacactgtgctggaaaacgcctggagccatgacacattaygtatttttattattatttatggtaggaagaggagatgagggaaaatcgggctgaatctaagcagcctgacaattcagctagttaatatttagccagttaagaaaggtggttgtaatccctgcaaggcagtgagctctcctttgatttctctaatagcttaaaaaataatttcttacaagacaattagaaattctgcctatggatgcaaatttcatagaaaacaatgttaagccttgaaagtgggtaaaatgtgccttcgattgaagtcatttattctgttgatacacttctacaacatatatattttaaacctgctcagataaagtgaaatttagcaaaaggatatcccctcccacccccaaatctaacatgccattttaaaaacagcacaaaggaacaaggaaactaaatattattttgagccatcattacttagtgaaatacaaacatccaaatagaaacgattgttgttccaccagaagattagaagttaaa

SEQ ID NO: 56322 - DNA, 1492 bp, Homo sapiens
tcccgtgggaaaacctgacacacaatggcgcggctgctccgggcaccctcaacccagcgccctgcggcaaggcctggagcagcctggtggtcttggtgcgctccctttgccctccccgcaaccctctgcgagcactcgtcccaggagagagaccctggctagggtggaggttgcctcccgcaaagggcgctgttgctggggcctcccctcccccattctcttgtttttctgcttctgagactcgggagggaggcggcaggcgcctccgcagccgatagagcagctattgtgaccttcccttgcagagcgggaacccagccgagtgtgtaccgccggcggtggcgggggaggaggcgactgtgtgtgcaaacctcagtcggagagggggtggcgctgggaaataaaggtttgcaacctcaggcagttgggcccttcagagggcgtttggttgtgtttagactcggttgctttctaacactaattgcaggctcaaaaggagcggaatttattgcgaaggccaaggcggcttgtttataatttatgaagttttaaatggctgtgccgcgggccccaactttctcctgggctggcagccgcgcggaaacgcgccctcccccggctcgccgcccacccccacccacgcccctcagatgagtctcacgccaatggcaggaacagatccgagctattagaagtctcgggaacctccagagatgacagaaggtggcagatttggtccaagccctcaccccactcgagaggagggcgtcggggaaagctgtggctgcctggagagggagcccctgatcccacacttccttggagcctgagtgtgagaggaagctaatgtcagccgggctagacaccgtttaaagtctaatccatgaaaccctaagccgcaaatgacacttggggctttgcagacacccgcagactcagcagatactcctgcggtaacacactgtgctggaaaacgcctggagccatgacacattacgtatttttattattatttatggtaggaagaggagatgagggaaaatcgggctgaatctaagcagcctgacaattcagctagttaatatttagccagttaagaaaggtggttgtaatccctgcaaggcagtgagctctcctttgatttctctaatagcttaaaaaataatttcttacaagacaattagraattctgcctatggatgcaaatttcatagaaaacaatgttaagccttgaaagtgggtaaaatgtgccttcgattgaagtcatttattctgttgatacacttctacaacatatatattttaaacctgctcagataaagtgaaatttagcaaaaggatatcccctcccacccccaaatctaacatgccattttaaaaacagcacaaaggaacaaggaaactaaatattattttgagccatcattacttagtgaaatacaaacatccaaatagaaacgattgttgttccaccagaagattagaagttaaa

SEQ ID NO: 56323 - DNA, 1011 bp, Homo sapiens
actcttgagagactggaaaaacatcatctgtcatcataggatttaacccttgcttaagatccggcggcagcttctggtgggcttccctagtgcggcgtccctgccccgtcttgctctggcccctctcattctctgctccagccagactgaacagctcttacttccttctaaacgcttccaacattttaatcttggctctaccttggaatgcccagggttatgtgacttgcccaaggacaaaataaggatgtagtggagttgatattcaaagccggatttatctcactccaaagcaaggacaaagaattcccttaggaaatcagcggtggcccatctatttgtgtggagaaacaagagttgcttataattctgggtagtgggatgtccccatcgcttcacctagtcaacacctgtgtctcatttaaaactcaattcaggcatcgctgcactttcagtgggttgttttttttttttaggtttgaagctcatttaacaacgagcaaaggggttgcagagtaagaacgctgatgtttttctctgggaataggtggccacatccaaagacaaagaaatgttcgaagtctttgcatttggagagaaaacaccatgcccattgctgcagcctgaatycccaatgagtagtgcctctgtctggagttaaaggatgatgtaccatgtggaaccaggatgtggtaactccttaaaccctgccactctttcacacctttgatatgactcattttgatgaaattcaacgaactcagagcacctgctcatgcagcagaatatttttgagctagaaagctccacgacttcctctccctaagactgcagaaagcttagccccaggctatgaagagaaccagcagaatgaccactggcaccagaggacactggtcttgcccgcccacccttcgctgtgccggctcctcacccctgtgctgggtgcagtagaggctggtcctccaagtctcacttgggacttgcccaagtgagagacactagggcaaa

SEQ ID NO: 56324 - DNA, 1011 bp, Homo sapiens
actcttgagagactggaaaaacatcatctgtcatcataggatttaacccttgcttaagatccggcggcagcttctggtgggcttccctagtgcggcgtccctgccccgtcttgctctggcccctctcattctctgctccagccagactgaacagctcttacttccttctaaacgcttccaacattttaatcttggctctaccttggaatgcccagggttatgtgacttgcccaaggacaaaataaggatgtagtggagttgatattcaaagccggatttatctcactccaaagcaaggacaaagaattcccttaggaaatcagcggtggcccatctatttgtgtggagaaacaagagttgcttataattctgggtagtgggatgtccccatcgcttcacctagtcaacacctgtgtctcatttaaaactcaattcaggcatcgctgcactttcagtgggttgttttttttttttaggtttgaagctcatttaacaacgagcaaaggggttgcagagtaagaacgctgatgtttttctctgggaataggtggccacatccaaagacaaagaaatgttcgaagtctttgcatttggagagaaaacaccatgcccattgctgcagcctgaattcccaatgagtagtgcctctgtctggagttaaaggatgatgtaccatgtggaaccaggatgtggtaactccttaaaccctgccactctttcacacctttgatatgactcattttgatgaaattcaacgaactcagagcacctgctcatgcagcagaatatttttgagctagaaagctccacgacttcctctccctaagactgcagaaagcttagccccaggctatgaagagarccagcagaatgaccactggcaccagaggacactggtcttgcccgcccacccttcgctgtgccggctcctcacccctgtgctgggtgcagtagaggctggtcctccaagtctcacttgggacttgcccaagtgagagacactagggcaaa

SEQ ID NO: 56325 - DNA, 696 bp, Homo sapiens
attaagaaaacattgctcacgtggcagggaatgaaagcctctggccaacagccagcaaggaactgagccttccaacaatcacacaagtgagctctgaagtgaattcttcagtccmctttaaccttgagatggctgcagccccagacaatgattcaatttaacgtcataagagacagtgattcagaaacacccagttaagttgctcctagattttcagtcctcagaaactgtgaaatacaagtgtttattgttttaagctgctaaatttgggggtagttacacaacaacagataatgtacccatctacatttttgcatctcatgattaccatgctacctcaacctgcctcttttcttatctgcactcctgcagtagccttctaacctgtgtccctttcccatttctgctcttcaagaatttgtcatccacatttgtattttttaaataaaattagttcacatccctctcctgtttaatacccttcagtggcttcccagttgactcaaaataaaaaccagtgccccccaaatagtctttcacaatctgattccaatctatatctcgaacttattctcatttctcttttcccatttcttaccatgatccagctatattggcccttcattttataccaagactcttgattttctttatggttagagggctaggagaaagagggaaattctaacaacaggg

SEQ ID NO: 56326 - DNA, 785 bp, Homo sapiens
atcacctctgcctctgagcttcagtttcctcctctgaagactgagaagctgaatatgaggctaagattctttctagctcaaattttctgtgttccaaaaacatgatgcattacttgagctcttcctatgtgcctggcactattctagrtgattataaatgtacagtatgtcctttaatctccaacaacaatgcatccttttcatccctgttttatgaaaaaggaaacagatccacaaagaggccaagctagggaggaaccgagtcagatgtctgtatcctgaaagtaactctgagcctgatccgctcaggcactggaagcttccctacatcccctttctccaatttcttcaacacaacctgagcagacgcttgcatgtgcagttcttttcatctttcccctgacatcaccccaatcacctaagttacttgtctctgaattgccttcaatttgtcttcatctttctagaacagaagagatgatggcaatgcaccttgcaggtgcagtttccttggggacccctgaacaaggaggtaaacttcatctgttgaagtctcctatagaagagtagagagtctgtctggatggtgctgcctaagaggcaagaaaccacaggacccaaaaatagccatggagcaccacttgggataagtgcccaataaatgaaggggtagggaaatagagcccagggaaaaaggttaaagaaattggaatttgctcacataaacatagtaaaactgatcaatattgggagacacttctccatgggactcagctttttgcatg

SEQ ID NO: 56327 - DNA, 772 bp, Homo sapiens
catagaatgtactaacatagatgatattgtgctctttttgaacagttattttggctggaaattatattttaatataggtgcatatgatatgttatctcagggtaatatatttacatttaatgcattaatatataacagtttgttatatttgtgacataattttcatatgttacacatatgttaatgttttccatttgattttgtgaacataaaccatgtctaccttaatgaccattgtggtttcagtgtctagcacatttttgcacacatggtaggtatttcaggtcagttggagtttatcagtctggtgaccatgaaaatgtgccactcagatctcctgtaatgagacactttgttgattgatagtcccagctgccttcctcctggatgcactaccagatttgcaaagagtcgatgcttccccagccagtaactgagttatttaggggtgctgatgcaggttcctttccagaggatgtggaacttctttaagagggaacttttggcttaaggacttctctcactggcctggctaaaagatttttagaactaagctacagtccaaggttcttcccacctaatactccttccttyactatctctttctgtgggtgttggatcttcatcatggtctgatggctcttcctgcttattcctgcttcctcctcttcatctttcccaggtattacccccagtaaatctcttgcaggtgtaatcttgtcttagcgtctgctttttagagtatccaaactaacccaggtgttaccaagag

SEQ ID NO: 56328 - DNA, 732 bp, Homo sapiens
gcacttttgctacagcaggtagaaagacaaacactcttatttcatactgatgatttggcttgtttctatgtaggagtgttttcatggttgagttagttggctagtttctgttaaacaatagtaataagcactaacatttattgagtgttttctttatgccaggaactgttctaaacacttcacatgtatttaatcatcatccatataaactctattaaagaaatcctataaaacaggtactattatccccactttayagaggacagagaagcagagggataagtaatctgttcaagattacaaagtaagtggcagagacatgatttaaacccaggaggactgattctagaattcacactcttaacctttattattccgctttctcaaatgtcaatgagaaatctgaccagccaaaactgtcatatttggcatacagaaccaacatttataccttaaataaccccatgtaactgttcagaggatcacagaattttttcccccctagggacaagttagaactcagtattcttttcagttaaagttatatttcatattaagtggaaaagaatacttgtgcgtcaacctatacttgtacaaatccttcagatgactgcaagatctcttttctgtggaaggtattagacctaggcccatacctatgaagttgttgaaccttgtctgggagacaaataaaaatttatataactgaatgacaactcctaccatccctca

SEQ ID NO: 56329 - DNA, 596 bp, Homo sapiens
acacacacacacwctctctctctctctctctctctctctctgtgtacaagtttaaacaaggtatttatcctttctgaatctgtcttctctgtaaaacagagacaagaataccaaccatacagggtatcgtgtggataaaatgattgctctccttttctattgttatttttagagtccttctaattgagtgtctcctcaagttttatgcttgagctggaatccctgctctctgttatcttagcatccattgctgtgcaacatctgctggatcagatatttgcttttttttttttctttcttaggatcttctgttggccttgttttgacagtctgtctcatcttggggttttagcctctgtgatattttctcagactcattttggtctctgacttattttaaagagcagtaattggtaatgataatagtaatagctgacactaataaagatcttattaattgctagtcaacatgctaagtgcttcatataggttattttaagtaatctacggaagagcgctgtaagaccaatggtttctattatctctagtgccttacgttgtcttcattttttacaggtgaggaatctgagttatag

SEQ ID NO: 56330 - DNA, 647 bp, Homo sapiens
cattgtttgtcctatctgacccaacgtataataagtgaagcagattatcttcattcaccaaactggctctaatttacttcttataatctttatcaaattcaccctcaaaggaagatttaccattgttgagagtattatacagaaccaaaacatgttctagagaaaatagcaaaagaagagtttttaaataaaagtaggcattaatggtatccatggaaaaagcagacagcttttccaggtaactgctggcaaatggacatcactcatttgaatgtaaatcctggtattatgatgttctttagaatactgatattttgtgctcaygtcctatgtatcatgcaactgctgtgtcattcaaatgaaaattcattacctattttcaggtgggaaatggtggtgctcaccagtatctctgttccttctcttcatttctgacacacagctagatgacacttaccagctttcttgcagtgagctggagccatgaaatgtggatggaagtgatgaggatcttttccagggctggcctcaggaccctctccacaatccggcatattatcttattcccattctgctgggggatggcagggctctgcatagaggactctgaagcactagaagagtctagaaccactaggtggatggat

SEQ ID NO: 56331 - DNA, 647 bp, Homo sapiens
cattgtttgtcctatctgacccaacgtataataagtgaagcagattatcttcattcaccaaactggctctaatttacttcttataatctttatcaaattcaccctcaaaggaagatttaccattgttgagagtattatacagaaccaaaacatgttctagagaaaatagcaaaagaagagtttttaaataaaagtaggcattaatggtatccatggaaaaagcagacagcttttccaggtaactgctggcaaatggacatcactcatttgaatgtaaatcctggtattatgatgttctttagaatactgatattttgtgctcatgtcctatgtatcatgcaactgctgtgtcattcaaatgaaaattcattacctattttcaggtgggaaatggtggtgctcaccagtatctctgttccttctcttcatttctgacacacagctagawgacacttaccagctttcttgcagtgagctggagccatgaaatgtggatggaagtgatgaggatcttttccagggctggcctcaggaccctctccacaatccggcatattatcttattcccattctgctgggggatggcagggctctgcatagaggactctgaagcactagaagagtctagaaccactaggtggatggat

SEQ ID NO: 56332 - DNA, 2016 bp, Homo sapiens
aaaaataaaaatatgaaagaagtttccacccagatcttctctctatatgtaaccaagtcttttatttatttcattgcacagaagtacttttatttcagcttaacttgaactacaagagttggagtaattgctttgtcatcagtaattcattttcattcttatgtgcttaaagttacagctaaagtagaacagttacacacactgaagccatgctttataagattaaattcacatatcctaaaattcaccaggcgaaatcatgcacatttaattcctgcagcacttgaatgctatttaaggggaaaagaggaaaataaatyagagagccttacctttgatttcaaagacatctgaaaggctctgagcatggtgcttccttgaagccagcagatgacagaaattacctggaaaggataatggcatggagaaggtaggtctcagcctcaaactccgaggaagcacttgaagtggaatccatcttcttcaaaagatagtccaggactgataatagggctttatttccagctgaaaagactgattgtttaatttaaccatttgagataattattctccatcactcttgactcattttgctcttatcaagccaaatctctgtaatctttgcagaaattttatactgataataagttctataatgacacactttatgcttgtggcattagtaatctgacagcaacagacaaaactgaattaacacctgtaatgaatcagtttactgtgggtgattaatgaggggattgaaactcaaatattcaaaacatgacatttgaaatcacatcatttgattcctatagaacagtcagctgttataaaatagtatgtttcttattaggataatcagttaattatctaagtgagcttaaggcccatgtgttctactgatacatgattatgatgtgtattctgaatgtgggagtttccactcttattggaactcaacatggatgcatctaggaagtttaaggctgtaggggcctgggcctccagtagtatggggatgagttgcactatgcaaagactcttcagggcagctgtctcctgttttaggatttttatcttgaaacgtcctgtctcaattgcagccaggtaggctgtggataagggtttggggatatggtttgtcctgtttgggaggagtattccctgacattgttttgaatgactggtgcatggtgaccactagatagttcttgttgctgagttctctactgtcagcgcagccctactgactggatcagaatgagccctccccgccaccacccagctcacctggggaggccaccactgtgctcaaatcccaatctgcaacacgactcccagggtttgggatgagggtgatcacaggaaccttttccctcatttaaaattatgattgagccaggggcggtggctcatgcctgtaatcccagcactttgggaggctgaggcaggcagatcacgaggtcaggagatcaagaccatcctgggtaacatgtgaaaccccgtctttactaaaaatacaaaaaaattagccgggcgtggtgctgcacacctgtagttccagctactcaggaggctgaggcaggagaatcgcttgaatccaggaggcggaggttgcagtgagcctagatcgtgccactgcactccagcctggtgacagagcgagactctgtctaaaaaaaaataaaaaataaaaagtaaaaataaataaataaaattataattggattttccagcctgaacaagcttttcagtttccttgtcctatatttgaaacaaccaatgatagatttaagcagagcagttagcttatttatctggtgagtgtattttccagatatcactttcctgcctgcaagcttaaatgcaaatacaatgtgttcttctaaccattaaaaaaaaaattgtgagcagagctgtattcatcaggcaatatgaccatttttgttttaaaattttgttaaggtgtactgacactcatctgggcaacatgaaatcatttgtagaagatgaatt

SEQ ID NO: 56333 - DNA, 2016 bp, Homo sapiens
aaaaataaaaatatgaaagaagtttccacccagatcttctctctatatgtaaccaagtcttttatttatttcattgcacagaagtacttttatttcagcttaacttgaactacaagagttggagtaattgctttgtcatcagtaattcattttcattcttatgtgcttaaagttacagctaaagtagaacagttacacacactgaagccatgctttataagattaaattcacatatcctaaaattcaccaggcgaaatcatgcacatttaattcctgcagcacttgaatgctatttaaggggaaaagaggaaaataaatcagagagccttacctttgatttcaaagacatctgaaaggctctgagcatggtgcttccttgaagccagcagatgacagaaattacctggaaaggataatggcatggagaaggtaggtctcagcctcaaactccgaggaagcacttgaagtggaatccatcttcttcaaaagatagtccaggactgataatagggctttatttccagctgaaaagactgattgtttaatttaaccatttgagataattattctccatcactcttgactcattttgctcttatcaagccaaatctctgtaatctttgcagaaattttatactgataataagttctataatgacacactttatgcttgtggcattagtaatctgacagcaacagacaaaactgaattaacacctgtaatgaatcagtttactgtgggtgattaatgaggggattgaaactcaaatattcaaaacatgacatttgaaatcacatcatttgattcctatagaacagtcagctgttataaaatagtatgtttcttattaggataatcagttaattatctaagtgagcttaaggcccatgtgttctactgatacatgattatgatgtgtattctgaatgtgggagtttccactcttattggaactcaacatggatgcatctaggaagtttaaggctgtaggggcctgggcctccagtagtatggggatgagttgcactatgcaaagactcttcagggcagctgtctcctgttttaggatttttatcttgaaacgtcctgtctcaattgcagccaggtaggctgtggataagggtttggggatatggtttgtcctgtttgggaggagtattccctgacattgttttgaatgactggtgcatggtgaccactagatagttcttgttgctgagttctctactgtcagygcagccctactgactggatcagaatgagccctccccgccaccacccagctcacctggggaggccaccactgtgctcaaatcccaatctgcaacacgactcccagggtttgggatgagggtgatcacaggaaccttttccctcatttaaaattatgattgagccaggggcggtggctcatgcctgtaatcccagcactttgggaggctgaggcaggcagatcacgaggtcaggagatcaagaccatcctgggtaacatgtgaaaccccgtctttactaaaaatacaaaaaaattagccgggcgtggtgctgcacacctgtagttccagctactcaggaggctgaggcaggagaatcgcttgaatccaggaggcggaggttgcagtgagcctagatcgtgccactgcactccagcctggtgacagagcgagactctgtctaaaaaaaaataaaaaataaaaagtaaaaataaataaataaaattataattggattttccagcctgaacaagcttttcagtttccttgtcctatatttgaaacaaccaatgatagatttaagcagagcagttagcttatttatctggtgagtgtattttccagatatcactttcctgcctgcaagcttaaatgcaaatacaatgtgttcttctaaccattaaaaaaaaaattgtgagcagagctgtattcatcaggcaatatgaccatttttgttttaaaattttgttaaggtgtactgacactcatctgggcaacatgaaatcatttgtagaagatgaatt

SEQ ID NO: 56334 - DNA, 2016 bp, Homo sapiens
aaaaataaaaatatgaaagaagtttccacccagatcttctctctatatgtaaccaagtcttttatttatttcattgcacagaagtacttttatttcagcttaacttgaactacaagagttggagtaattgctttgtcatcagtaattcattttcattcttatgtgcttaaagttacagctaaagtagaacagttacacacactgaagccatgctttataagattaaattcacatatcctaaaattcaccaggcgaaatcatgcacatttaattcctgcagcacttgaatgctatttaaggggaaaagaggaaaataaatcagagagccttacctttgatttcaaagacatctgaaaggctctgagcatggtgcttccttgaagccagcagatgacagaaattacctggaaaggataatggcatggagaaggtaggtctcagcctcaaactccgaggaagcacttgaagtggaatccatcttcttcaaaagatagtccaggactgataatagggctttatttccagctgaaaagactgattgtttaatttaaccatttgagataattattctccatcactcttgactcattttgctcttatcaagccaaatctctgtaatctttgcagaaattttatactgataataagttctataatgacacactttatgcttgtggcattagtaatctgacagcaacagacaaaactgaattaacacctgtaatgaatcagtttactgtgggtgattaatgaggggattgaaactcaaatattcaaaacatgacatttgaaatcacatcatttgattcctatagaacagtcagctgttataaaatagtatgtttcttattaggataatcagttaattatctaagtgagcttaaggcccatgtgttctactgatacatgattatgatgtgtattctgaatgtgggagtttccactcttattggaactcaacatggatgcatctaggaagtttaaggctgtaggggcctgggcctccagtagtatggggatgagttgcactatgcaaagactcttcagggcagctgtctcctgttttaggatttttatcttgaaacgtcctgtctcaattgcagccaggtaggctgtggataagggtttggggatatggtttgtcctgtttgggaggagtattccctgacattgttttgaatgactggtgcatggtgaccactagatagttcttgttgctgagttctctactgtcagcgcagccctactgactggatcagaatgagccctccccgccaccacccagctcacctggggaggccaccactgtgctcaaatcccaatctgcaacacgactcccagggtttgggatgagggtgatcacaggaaccttttccctcatttaaaattatgattgagccaggggcggtggctcatgcctgtaatcccagcactttgggaggctgaggcaggcagatcacgaggtcaggagatcaagaccatcctgggtaacatgtgaaaccccgtctttactaaaaatacaaaaaaattagcygggcgtggtgctgcacacctgtagttccagctactcaggaggctgaggcaggagaatcgcttgaatccaggaggcggaggttgcagtgagcctagatcgtgccactgcactccagcctggtgacagagcgagactctgtctaaaaaaaaataaaaaataaaaagtaaaaataaataaataaaattataattggattttccagcctgaacaagcttttcagtttccttgtcctatatttgaaacaaccaatgatagatttaagcagagcagttagcttatttatctggtgagtgtattttccagatatcactttcctgcctgcaagcttaaatgcaaatacaatgtgttcttctaaccattaaaaaaaaaattgtgagcagagctgtattcatcaggcaatatgaccatttttgttttaaaattttgttaaggtgtactgacactcatctgggcaacatgaaatcatttgtagaagatgaatt

SEQ ID NO: 56335 - DNA, 2016 bp, Homo sapiens
aaaaataaaaatatgaaagaagtttccacccagatcttctctctatatgtaaccaagtcttttatttatttcattgcacagaagtacttttatttcagcttaacttgaactacaagagttggagtaattgctttgtcatcagtaattcattttcattcttatgtgcttaaagttacagctaaagtagaacagttacacacactgaagccatgctttataagattaaattcacatatcctaaaattcaccaggcgaaatcatgcacatttaattcctgcagcacttgaatgctatttaaggggaaaagaggaaaataaatcagagagccttacctttgatttcaaagacatctgaaaggctctgagcatggtgcttccttgaagccagcagatgacagaaattacctggaaaggataatggcatggagaaggtaggtctcagcctcaaactccgaggaagcacttgaagtggaatccatcttcttcaaaagatagtccaggactgataatagggctttatttccagctgaaaagactgattgtttaatttaaccatttgagataattattctccatcactcttgactcattttgctcttatcaagccaaatctctgtaatctttgcagaaattttatactgataataagttctataatgacacactttatgcttgtggcattagtaatctgacagcaacagacaaaactgaattaacacctgtaatgaatcagtttactgtgggtgattaatgaggggattgaaactcaaatattcaaaacatgacatttgaaatcacatcatttgattcctatagaacagtcagctgttataaaatagtatgtttcttattaggataatcagttaattatctaagtgagcttaaggcccatgtgttctactgatacatgattatgatgtgtattctgaatgtgggagtttccactcttattggaactcaacatggatgcatctaggaagtttaaggctgtaggggcctgggcctccagtagtatggggatgagttgcactatgcaaagactcttcagggcagctgtctcctgttttaggatttttatcttgaaacgtcctgtctcaattgcagccaggtaggctgtggataagggtttggggatatggtttgtcctgtttgggaggagtattccctgacattgttttgaatgactggtgcatggtgaccactagatagttcttgttgctgagttctctactgtcagcgcagccctactgactggatcagaatgagccctccccgccaccacccagctcacctggggaggccaccactgtgctcaaatcccaatctgcaacacgactcccagggtttgggatgagggtgatcacaggaaccttttccctcatttaaaattatgattgagccaggggcggtggctcatgcctgtaatcccagcactttgggaggctgaggcaggcagatcacgaggtcaggagatcaagaccatcctgggtaacatgtgaaaccccgtctttactaaaaatacaaaaaaattagccgggcgtggtgctgcacacctgtagttccagctactcaggaggctgaggcaggagaatcgcttgaatccaggaggcggaggttgcagtgagcctagatcgtgccactgcactccagcctggtgacagagcragactctgtctaaaaaaaaataaaaaataaaaagtaaaaataaataaataaaattataattggattttccagcctgaacaagcttttcagtttccttgtcctatatttgaaacaaccaatgatagatttaagcagagcagttagcttatttatctggtgagtgtattttccagatatcactttcctgcctgcaagcttaaatgcaaatacaatgtgttcttctaaccattaaaaaaaaaattgtgagcagagctgtattcatcaggcaatatgaccatttttgttttaaaattttgttaaggtgtactgacactcatctgggcaacatgaaatcatttgtagaagatgaatt

SEQ ID NO: 56336 - DNA, 744 bp, Homo sapiens
ttaaaaatgaatcactgaatatcaaagcatttatatcaaaggaaaagattagagtgatttaattatcctactctaaagactaatacagcttaataagatagagtgtacaaagtaaagtagcaagggacaaagaatataaacaattcccactccaggcctggcgtagtggctcatgcctgtaatcccagcactttgggaggccgaggcaggtggatcacgaagtcaggagttcaagaccagcctggccaacatggtgaagccctatctctactaaaaatacaaaaattagctggacatggtggcacgtgcctgtaatcccagctactcgggaggctgaggcaggagaattgcttgaaccaggacccaggaggyggaggtagtagtgagcaagatcgcaccactggactccagcttgggctacagagtgagactctatctcaaaaaaaaaaaaaaaagaaagaaaaaaaaaagaagaaagaattcccactccagagaagacagcagcagctacattttgtacagctcttggctacttatacttcattgtatccctacggtacacttcccgtttctgaattttggttttctcatctgcaaaacaaataatagtgggacaatacgatagcagcagactgtgaaatataaaggtatggaaaggtctgagtggcatagaataaatgttagctagtattagtatcattatcatcatcatcatcatctcaatgttgaatcttcacaatgatt

SEQ ID NO: 56337 - DNA, 744 bp, Homo sapiens
ttaaaaatgaatcactgaatatcaaagcatttatatcaaaggaaaagattagagtgatttaattatcctactctaaagactaatacagcttaataagatagagtgtacaaagtaaagtagcaagggacaaagaatataaacaattcccactccaggcctggcgtagtggctcatgcctgtaatcccagcactttgggaggccgaggcaggtggatcacgaagtcaggagttcaagaccagcctggccaacatggtgaagccctatctctactaaaaatacaaaaattagctggacatggtggcacgtgcctgtaatcccagctactcgggaggctgaggcaggagaattgcttgaaccaggacccaggaggcggaggtagtagtgagcaagatcgcaccactggactccagcttgggctacagagtgagactctatctcaaaaaaaaaaaaaaaagaaagaaaaaaaaaagaagaaagaattcccactccagagaagacagcagcagctacattttgtacagctcttggctacttatacttcattgtatccctacrgtacacttcccgtttctgaattttggttttctcatctgcaaaacaaataatagtgggacaatacgatagcagcagactgtgaaatataaaggtatggaaaggtctgagtggcatagaataaatgttagctagtattagtatcattatcatcatcatcatcatctcaatgttgaatcttcacaatgatt

SEQ ID NO: 56338 - DNA, 670 bp, Homo sapiens
tccactctgtcccgaggcaggcagtagagacttagttactcgtattccacatctggagatctggaggcttctcccaagatggaagagatgagtggtgagagaatatgagattattagaagaagcttggctgggcacagaagcaagctaagtggagtcaatagagtggaagggtctatytaaacatatacacccccctcccccccgccaaaaacacacactctttgctgcctcacatttatcaccttaagaaatttttgaacacctggtctgtatacaaatacataacaagaaaggaaaaaaatatagatgatctcttatcaaaagtacatattattttgctaaagagaagctacaccttaatcctgatattcaggaaattatgttgccacattaaataaatggtgaggggtaaaccatttgtaaaaaaaaatcaaagcacacacacaaatcattccagacaccatttcccattttctgacttattactatacacaatgcagcttttagctcctgcattcttatatccttttgaatgttcaccagactattaatttaaaaagccaggtgcttcgtctgctcctctaatcgctgtgacctgtttttgtgattcgaaaaaggcaaaaagactaactctggcttgggtgggaatcatttttggaatagtggttg

SEQ ID NO: 56339 - DNA, 670 bp, Homo sapiens
tccactctgtcccgaggcaggcagtagagacttagttactcgtattccacatctggagatctggaggcttctcccaagatggaagagatgagtggtgagagaatatgagattattagaagaagcttggctgggcacagaagcaagctaagtggagtcaatagagtggaagggtctatttaaacatatacacccccctcccccccgccaaaaacacacactctttgctgcctcacatttatcaccttaagaaatttttgaacacctggtctgtatacaaatacataacaagaaaggaaaaaaatatagatgatctcttatcaaaagtacatattattttgctaaagagaagctacaccttaatcctgatattcaggaaattatgttgccacattaaataaatggtgaggggtaaaccatttgtaaaaaaaaatcaaagcacacacacaaatcattccagacacyatttcccattttctgacttattactatacacaatgcagcttttagctcctgcattcttatatccttttgaatgttcaccagactattaatttaaaaagccaggtgcttcgtctgctcctctaatcgctgtgacctgtttttgtgattcgaaaaaggcaaaaagactaactctggcttgggtgggaatcatttttggaatagtggttg

SEQ ID NO: 56340 - DNA, 1640 bp, Homo sapiens
acacaccaattttattgtgatggtcatctataggaaaggagagagacaagtaggatagatagtggtgttacccttattacatttgatttatgaagaaaaaggaatttaagcaaatgtgcaaattcctttttctcaaaacgttattttgaatatgtgggaggtcatactattttttaagctttttggtatgttttaaatatttaaacataaaaacaaaatcaaatttaacaatgtaggccactctcctcaggaaatacattcttttatattttccaaaattttcattcgctccctttccttttctccctattttccccatcattcaccaaaatgctttgtaggtcttaactcctgaaaaaatttccagagtcctcactctgcctgcctctcccctctctgcacccctgctggatgtacacacacctctattatcttagctgtcatactgacatgtattgagctgaaccatgagagaytgctgcttttggtaggtcaaaacatttgaatatagggaatgtcatacagtttaactgataatgatatttacatatctgtctttgctatcagactctggaacccttgaaagtccatgtttgattcactgccctatccaaggattggtgcatatagggtgctcatttggacatttaaattaaattggtcccataattagaggcatttcctctgcacctctctttcagtttcttccccccagctttaaagggatagacatctgacacaaacattctccagcctagatcagaaaggaactgtagagtagtcattgttttggtatttgttccatggagttctacttatggaaaggactagaagtagcatatatgtgtgaagaattcataagagctgctcagctatgggacaaagggattcttggaaaactgagaagccaatgtattgttacaataatgcacagtgatgtacatgtatgcatctttgcactcactcatccacctattcactcattcagaatcagtatgcaacttatccaaatgtatcaagaataacccaggaatccaaatataatgtgctactttcaaccagaaagtgccaatataaactgccaatttcaaccagaggtactactgctcacctctagccttctgatatttaacccacacaattaactgaccagaatcttccaatctaggaagagacaattatgattgttattagtggcttgtagctttacagcagctggtttcaggaattagccagtctgtatggggtttacaaaggaccaaaagaccaaaaaggtatgtcccataaccacagttaagagcaaaaggagatattctaacaggaaagagcatcataaaatttaaacactataggggagaggttcaagatggctgaccagaggtacaggacacgaacttctgcaaaaagaacaaaaatagcaagtagatagtcacactttaaatagaacatataagtaaagaagtcacaggaaacacctgaggcaatgaaggagaagcaggcaagtgacagcccagctgggatcccctgagagccttgataggttccccagcatgggaaatggataagagggatctccagcagtccacattctcaccttaggctcctataaccctagccacaggagagtcccttgactctcc

SEQ ID NO: 56341 - DNA, 1640 bp, Homo sapiens
acacaccaattttattgtgatggtcatctataggaaaggagagagacaagtaggatagatagtggtgttacccttattacatttgatttatgaagaaaaaggaatttaagcaaatgtgcaaattcctttttctcaaaacgttattttgaatatgtgggaggtcatactattttttaagctttttggtatgttttaaatatttaaacataaaaacaaaatcaaatttaacaatgtaggccactctcctcaggaaatacattcttttatattttccaaaattttcattcgctccctttccttttctccctattttccccatcattcaccaaaatgctttgtaggtcttaactcctgaaaaaatttccagagtcctcactctgcctgcctctcccctctctgcacccctgctggatgtacacacacctctattatcttagctgtcatactgacatgtattgagctgaaccatgagagactgctgcttttggtaggtcaaaacatttgaatatagggaatgtcatacagtttaactgataatgatatttacatatctgtctttgctatcagactctggaacccttgaaagtccatgtttgattcactgccctatccaaggattggtgcatatagggtgctcatttggacatttaaattaaattggtcccataatkagaggcatttcctctgcacctctctttcagtttcttccccccagctttaaagggatagacatctgacacaaacattctccagcctagatcagaaaggaactgtagagtagtcattgttttggtatttgttccatggagttctacttatggaaaggactagaagtagcatatatgtgtgaagaattcataagagctgctcagctatgggacaaagggattcttggaaaactgagaagccaatgtattgttacaataatgcacagtgatgtacatgtatgcatctttgcactcactcatccacctattcactcattcagaatcagtatgcaacttatccaaatgtatcaagaataacccaggaatccaaatataatgtgctactttcaaccagaaagtgccaatataaactgccaatttcaaccagaggtactactgctcacctctagccttctgatatttaacccacacaattaactgaccagaatcttccaatctaggaagagacaattatgattgttattagtggcttgtagctttacagcagctggtttcaggaattagccagtctgtatggggtttacaaaggaccaaaagaccaaaaaggtatgtcccataaccacagttaagagcaaaaggagatattctaacaggaaagagcatcataaaatttaaacactataggggagaggttcaagatggctgaccagaggtacaggacacgaacttctgcaaaaagaacaaaaatagcaagtagatagtcacactttaaatagaacatataagtaaagaagtcacaggaaacacctgaggcaatgaaggagaagcaggcaagtgacagcccagctgggatcccctgagagccttgataggttccccagcatgggaaatggataagagggatctccagcagtccacattctcaccttaggctcctataaccctagccacaggagagtcccttgactctcc

SEQ ID NO: 56342 - DNA, 1640 bp, Homo sapiens
acacaccaattttattgtgatggtcatctataggaaaggagagagacaagtaggatagatagtggtgttacccttattacatttgatttatgaagaaaaaggaatttaagcaaatgtgcaaattcctttttctcaaaacgttattttgaatatgtgggaggtcatactattttttaagctttttggtatgttttaaatatttaaacataaaaacaaaatcaaatttaacaatgtaggccactctcctcaggaaatacattcttttatattttccaaaattttcattcgctccctttccttttctccctattttccccatcattcaccaaaatgctttgtaggtcttaactcctgaaaaaatttccagagtcctcactctgcctgcctctcccctctctgcacccctgctggatgtacacacacctctattatcttagctgtcatactgacatgtattgagctgaaccatgagagactgctgcttttggtaggtcaaaacatttgaatatagggaatgtcatacagtttaactgataatgatatttacatatctgtctttgctatcagactctggaacccttgaaagtccatgtttgattcactgccctatccaaggattggtgcatatagggtgctcatttggacatttaaattaaattggtcccataattagaggcatttcctctgcacctctctttcagtttcttccccccagctttaaagggatagacatctgacacaaacattctccagcctagatcagaaaggaactgtagagtagtcattgttttggtatttgttccatggagttctacttatggaaaggactagaagtagcatatatgygtgaagaattcataagagctgctcagctatgggacaaagggattcttggaaaactgagaagccaatgtattgttacaataatgcacagtgatgtacatgtatgcatctttgcactcactcatccacctattcactcattcagaatcagtatgcaacttatccaaatgtatcaagaataacccaggaatccaaatataatgtgctactttcaaccagaaagtgccaatataaactgccaatttcaaccagaggtactactgctcacctctagccttctgatatttaacccacacaattaactgaccagaatcttccaatctaggaagagacaattatgattgttattagtggcttgtagctttacagcagctggtttcaggaattagccagtctgtatggggtttacaaaggaccaaaagaccaaaaaggtatgtcccataaccacagttaagagcaaaaggagatattctaacaggaaagagcatcataaaatttaaacactataggggagaggttcaagatggctgaccagaggtacaggacacgaacttctgcaaaaagaacaaaaatagcaagtagatagtcacactttaaatagaacatataagtaaagaagtcacaggaaacacctgaggcaatgaaggagaagcaggcaagtgacagcccagctgggatcccctgagagccttgataggttccccagcatgggaaatggataagagggatctccagcagtccacattctcaccttaggctcctataaccctagccacaggagagtcccttgactctcc

SEQ ID NO: 56343 - DNA, 1640 bp, Homo sapiens
acacaccaattttattgtgatggtcatctataggaaaggagagagacaagtaggatagatagtggtgttacccttattacatttgatttatgaagaaaaaggaatttaagcaaatgtgcaaattcctttttctcaaaacgttattttgaatatgtgggaggtcatactattttttaagctttttggtatgttttaaatatttaaacataaaaacaaaatcaaatttaacaatgtaggccactctcctcaggaaatacattcttttatattttccaaaattttcattcgctccctttccttttctccctattttccccatcattcaccaaaatgctttgtaggtcttaactcctgaaaaaatttccagagtcctcactctgcctgcctctcccctctctgcacccctgctggatgtacacacacctctattatcttagctgtcatactgacatgtattgagctgaaccatgagagactgctgcttttggtaggtcaaaacatttgaatatagggaatgtcatacagtttaactgataatgatatttacatatctgtctttgctatcagactctggaacccttgaaagtccatgtttgattcactgccctatccaaggattggtgcatatagggtgctcatttggacatttaaattaaattggtcccataattagaggcatttcctctgcacctctctttcagtttcttccccccagctttaaagggatagacatctgacacaaacattctccagcctagatcagaaaggaactgtagagtagtcattgttttggtatttgttccatggagttctacttatggaaaggactagaagtagcatatatgtgtgaagaattcataagagctgctcagctatgggacmaagggattcttggaaaactgagaagccaatgtattgttacaataatgcacagtgatgtacatgtatgcatctttgcactcactcatccacctattcactcattcagaatcagtatgcaacttatccaaatgtatcaagaataacccaggaatccaaatataatgtgctactttcaaccagaaagtgccaatataaactgccaatttcaaccagaggtactactgctcacctctagccttctgatatttaacccacacaattaactgaccagaatcttccaatctaggaagagacaattatgattgttattagtggcttgtagctttacagcagctggtttcaggaattagccagtctgtatggggtttacaaaggaccaaaagaccaaaaaggtatgtcccataaccacagttaagagcaaaaggagatattctaacaggaaagagcatcataaaatttaaacactataggggagaggttcaagatggctgaccagaggtacaggacacgaacttctgcaaaaagaacaaaaatagcaagtagatagtcacactttaaatagaacatataagtaaagaagtcacaggaaacacctgaggcaatgaaggagaagcaggcaagtgacagcccagctgggatcccctgagagccttgataggttccccagcatgggaaatggataagagggatctccagcagtccacattctcaccttaggctcctataaccctagccacaggagagtcccttgactctcc

SEQ ID NO: 56344 - DNA, 1523 bp, Homo sapiens
agaccctgggttcccaaaaatctgatttctcctttttgttatccaaactctctccgtttcacctttaccgataaatgaggaggaggcagtaaactgatgtgctccttgacagcaaaaactctgtcatctctgcaactcaagcacccaacccaagcctgagtctggacgaacaaagtttaaggcgtcctagggtagaggacaagggcattcccaagttcccagtggattgtgctccaaagctcttttgtaaactggtagtttcgaacttggaaagcattttctttttccataagtataaagctctagaggaagcctaagtccttagactaggtcatacagctctatttagccacaaaaatctaataatgcatccaaagtagagaacttcagctattctattgcttcctcctaaataaccattgaaaatactgctttcatgagaaagtgtgttccaacttagcatgccagaaacagatttccattttcctcaagaccaagaatgagcttttcctactwaaaaaaaaaacaaataaataaaagggaagagaaaaaataagagaaaggcaaagggagagaaggtgttggctatactagaaatagccctgacacgggagatacaactttgcaaggaaggtgagataagacagaaacttctgggtgagaataagatatcctgaagtatttttctacttttatgtaacatgtattccacaattctttagtttaaaaacttgccttaagtgttctaaattaggaactaaaaagcagttcctttaaggggagtttggagaagggagagatttctggtttgcgggtcataaatcaatgagccagagacagcctatgttcacctaagacaacactcttgatttctgttcttccgtttcttggctgattcagtcatgatgctaataatattctaactttcaggttgataatgtcagcttaaaattgggaggaggaaagatattggactgtaagcttcttaaagggcaggaccactttctattcatttccatataccccagtcccctcagtgctcaacatatgtaattcatcaacacataatataatttaaggaagggctttaacttttcaatgtagtagcaaaacatgtgggctttagagtcaaacttctcagattcaaatcatttttcctccctgaaaaggagggaagcaagcctgcctaacatccttgagttttctcatctggaaaaaatagtggtaacagtacttacttcacagagttgctgtggggattaaatgcatttctgtttctaaaacacagaacactgtacctgccccacagttagcacttgacagatcttagcagctattatttttccatgatcattgagctaattgtcttgtatcttgcccgcaaattagtttctcagggaatgtggtaaacataaaagttggttggtataaagggttaaattgtgaaccccaaaagatatgtctactcagaacctgagaatgcgacctcatttggaataagaatttttgcagatgtaattaag

SEQ ID NO: 56345 - DNA, 606 bp, Homo sapiens
aaaattgtgcagaccctcaaggagacagaccagtctcatctttctatcccctggttaaaaaaaaaaagatgcagtgtctgagatgctgcagactctacatcatccaggaaaacccctgcaccacaacagctcagacgcagccgagaggaatcacgttcttcctctagattgctggtcggggcttgcagtcacagccagatccaacttcagggcgggcgtctgtgagtcaagattcaagggcagagcgtgttcgggggggatgatgtccctttaagtactggcagcagggctgggcgctgcagcggctcccaaacactctctcctgctcctccaggcccgcaccacctgccctggtcacccctcctgctgcctcaaagacagccttgrgttttcagagactggctgcatctcacaggactgctcttacatagataaaaacccaacctccagtgcaggaggaaaaatcagctggtgtccacggaagagccaaaagaacgaggattctctgctctgtggggtgatcccgttttagcagccaagcccggggcgggccccaacctgcatctacacagccatgggctggaggcacacacgtgactcttttgg

SEQ ID NO: 56346 - DNA, 947 bp, Homo sapiens
gcatgtgaaagcaaggagctgaaggatactgtggggtggacctagacctcaattctagctagttcagatgatttctggttaaaaaaaaaaaaaargtgtgtgtgtgtgtgtgtgtgtgtgtgggcggcgggggacttggttttccaggcagtgtacctcctgtgtcccaagttagaggcagtgattgagttgtggctttttcctgcctactctgtagataatttggttcaacgaatcaaatgattgacacttatgttagaaattcccagtggattttgtcacatggttttctcttcactgtcttgtactactggagttttgtgggtatttttacatgaagttgggaatgaataaatcagggactgcgatctgtagttatatttagcacatttaatgaacatccatatcacataattttgggatcagtattagactcacttttaacgacacacatggagtgtctccatgtatgacttaggggtcgacatagaccaaagtgaacttacgtttctttctataacatttcctaggccttgtcctgggatgtaggaagttcccacagtataagccctatggattagcaaaattgtcatatgacaatttttaaatgactttttaaagcactgtactaaaaaaatgaaagcattagaaatgattgagcattgagctgaggtgtttttctgtttgcgagatacggtcaaggaggcgcaaagaggtaggtcaaagtgacctgacaggttttgctgttcttggaaatcgtgcagaaaaagaaagctctttataccacaaattggggaagccccttggcacacatacaatttcttgtctcaacaggcgagttacggacattaaaaaaatgctagttttttttttccccctttcagaagcatcctattttttacctctatggttaaagctactatggatggagacagctaacaaatgca

SEQ ID NO: 56347 - DNA, 1144 bp, Homo sapiens
cattagttaataagttaatatgtgaatttttttggcctgcttatgtggtggatttcattcatgtttcaaatgttgaatcggccatacatacctagattaaatgtgtgctacatgtttatttattatattttttttgtgatggatagattgaaataatcttttttattataaataaatttaagtaatctaggataaaaaatagcttcaatttttattcaaattgggtttagattgctgttttagtaccattttgtcraggatttctgtgtctatcttcataagaggtattggtccataatttttctttttgtactattttttctggtttggtattaaggtaatgctggcatcataaaatattttaggaagtatttcctctgcttcttctttctggaaaaattgtgaggaattggtattcttttttcttaactatttggtagaattcaccaatgaaactactgggcctggtgctttctttgttggaagtataattattgattcaacttctacaacaggtataggattattcaggttatgtatttatccttgtgtattttggtagttttgtgtgttttgatagttttgtgtgttttgatagtttgtgtatttcaagaagtttttttcattgtaactaagttataaacttgatagatgtagccttgttcatactatttctttattgtccttttgatgtttataacatcagtagaactaatgattttctcaaactacagatctaagtagtgcaagaaacactaacaggataaatactaaaagtgtacatttagtcacttcgtattcaaactgtggaaaactaaagacaaattgaaaatcttgaaggcatccaggggtggggggtaaatgaaaaggtacctcacctctacaggaacatggataagaaatacagcaactttctcaatgctaactatgtgaacaagaagagaatggaatggattattgaagtatagaaggaaaaatgaataatttcatatctaataaaattatctttcaaaactgaagaataaacatttttaaacaaaaagctgaaggaaattttttctagcagacttgtccataagaaattttgtaatctatagaaacttctgagatcaaggaacttggaaatgggactatggtgaacaga

SEQ ID NO: 56348 - DNA, 1125 bp, Homo sapiens
tttgaaataagtaattgaaattatttctcatttttaacttttatttccttgggaaaaacataggaagactttttttgtgtttaaaatacagtatttatctttcagtaatcacattyactaatataaaatacctattttatagattaaatgattgtaattatttataaattgtatgacagtaagtcatggtttcaaatggagtactgaaagggagaaaacaactctgtccttaatatagagatttttttttctatttttctttcttatttaggcagttatttatttttaattattaaataaaatgaagagacgactttgggcgtaggtgacaaaataaaacctcacagatctgggtgatttagagaatgaagaaaagtcagctaaacaagaaatgagacagctttccaagtgcaaatagcattacaaacaaagataagagacagcaatgggcaagatgtgttgcaggtaacctgtgcagactggtctggctagagaagatgattcggcggtcaaattaagaagctccagctttatcttgagcacactgtaaacctatttaaggttcttaagcagggaaatgacttggtcacatatctgatttacaaatataactctgaagatgatgtgtttgaggggacaaacgggggtgtgcacgtagttagtgcaaaatgaagcacagttatgatacaggtaagcgtggtcagctgctgcaaaacagacctgaaacaaactggtgaattgtaaattggtacaatttgatagtacccttaggaagtgagagtgggaataactgtgacagtgtgtacttaacactgttgagtgttttctcaagagtccaggtagttatagtaagttgtaattgagagaaaaatatatcatgttgggagggctcactgaaaacttgtgtagttcctaggttttcttccttttgaagaatgcaccccatatcatatcaaacaagagaaaaaatagtttctactatatatcatatgttccaaattataaaaataatgcaaaataatatattttaagtattttttcaaatgtaaaaaaataagtaaatgggtttgtatattgttttggtcttttactactgtacaatttacttataattggctatgcttt

SEQ ID NO: 56349 - DNA, 1125 bp, Homo sapiens
tttgaaataagtaattgaaattatttctcatttttaacttttatttccttgggaaaaacataggaagactttttttgtgtttaaaatacagtatttatctttcagtaatcacatttactaatataaaatacctattttatagattaaatgattgtaattatttataaattgtatgacagtaagtcatggtttcaaatggagtactgaaagggagaaaacaactctgtccttaatatagagatwtttttttctatttttctttcttatttaggcagttatttatttttaattattaaataaaatgaagagacgactttgggcgtaggtgacaaaataaaacctcacagatctgggtgatttagagaatgaagaaaagtcagctaaacaagaaatgagacagctttccaagtgcaaatagcattacaaacaaagataagagacagcaatgggcaagatgtgttgcaggtaacctgtgcagactggtctggctagagaagatgattcggcggtcaaattaagaagctccagctttatcttgagcacactgtaaacctatttaaggttcttaagcagggaaatgacttggtcacatatctgatttacaaatataactctgaagatgatgtgtttgaggggacaaacgggggtgtgcacgtagttagtgcaaaatgaagcacagttatgatacaggtaagcgtggtcagctgctgcaaaacagacctgaaacaaactggtgaattgtaaattggtacaatttgatagtacccttaggaagtgagagtgggaataactgtgacagtgtgtacttaacactgttgagtgttttctcaagagtccaggtagttatagtaagttgtaattgagagaaaaatatatcatgttgggagggctcactgaaaacttgtgtagttcctaggttttcttccttttgaagaatgcaccccatatcatatcaaacaagagaaaaaatagtttctactatatatcatatgttccaaattataaaaataatgcaaaataatatattttaagtattttttcaaatgtaaaaaaataagtaaatgggtttgtatattgttttggtcttttactactgtacaatttacttataattggctatgcttt

SEQ ID NO: 56350 - DNA, 1125 bp, Homo sapiens
tttgaaataagtaattgaaattatttctcatttttaacttttatttccttgggaaaaacataggaagactttttttgtgtttaaaatacagtatttatctttcagtaatcacatttactaatataaaatacctattttatagattaaatgattgtaattatttataaattgtatgacagtaagtcatggtttcaaatggagtactgaaagggagaaaacaactctgtccttaatatagagatttttttttctatttttctttcttatttaggcagttatttatttttaattattaaataaaatgaagagacgactttgggcgtaggtgacaaaataaaacctcacagatctgggtgatttagagaatgaagaaaagtcagctaaacaagaaatgagacagctttccaagtgcaaatagcattacaaacaaagataagagacagcaatgggcaagatgtgttgcaggtaacctrtgcagactggtctggctagagaagatgattcggcggtcaaattaagaagctccagctttatcttgagcacactgtaaacctatttaaggttcttaagcagggaaatgacttggtcacatatctgatttacaaatataactctgaagatgatgtgtttgaggggacaaacgggggtgtgcacgtagttagtgcaaaatgaagcacagttatgatacaggtaagcgtggtcagctgctgcaaaacagacctgaaacaaactggtgaattgtaaattggtacaatttgatagtacccttaggaagtgagagtgggaataactgtgacagtgtgtacttaacactgttgagtgttttctcaagagtccaggtagttatagtaagttgtaattgagagaaaaatatatcatgttgggagggctcactgaaaacttgtgtagttcctaggttttcttccttttgaagaatgcaccccatatcatatcaaacaagagaaaaaatagtttctactatatatcatatgttccaaattataaaaataatgcaaaataatatattttaagtattttttcaaatgtaaaaaaataagtaaatgggtttgtatattgttttggtcttttactactgtacaatttacttataattggctatgcttt

SEQ ID NO: 56351 - DNA, 705 bp, Homo sapiens
tgagacctccccagctctgatgaactgtgactcaattaaacctctttcctttataaattacccagtctcaggtatgtctttataaacagggtgagaacggactaatagagatcctaacacctaattccatcacaattcctctgatatcctacaacctatccttgtctgtatgacaaggataaccacaaccaatatgctttatatttaaatgatggaggaagaggagaggaaagaacacaaataaattaatatatactttgcatatattatatataataaatatataataaattaatatatactttgttaatatgtccataacaaagcaaggaagaaaatacttataagaataaatgctgtatttattttatttagttttattttattttattttattttattttatatttctgcaactggtcacaagattgagattatttgaagaacaatcttagccacaagggaaatggaattggtgctacatatcctggtggaatctttgcttcttgaggaattaagawctgcaaactaccagagcctaaagacgtggggattagaaacaaatatcgtctgagtgggctattaggtataatcgtgagggctgccacttccattttaacacttggtatccaggactccgttctgggtatgtgaaaaatcaggtaccatgtactggtcacttgttccaagtatatatttaatgca

SEQ ID NO: 56352 - DNA, 676 bp, Homo sapiens
tataaaaagttactaacaattacagctgtgagtgccggaaaatgggcagtccaactattcaaatgcgtattccttatggacttgccacatggtcttcaattctcatctcaggcattcatttaaaatccctttttaaaatggcatgtcatttgggaaggttaatatattaaagttcttcctaagttaagctgttgaaattttaggaatggtaatatttgaacagttcagaaattttctataaagcgacttttactggaccaaatggctaagtgtctataatcagataaaagctatttcaataataattggagtctcatctttttgtttggcaatatgttttttcatacattaaaggaactttggtaaatgagaagattatcagctctttgagtagagactctgagtgaacagaatcgttgaaagcacagcatctagatatataaagaaatttagacaactctgggaacactgaccaaaaatactgattattaatgaaaatggacattaagtttttccaggatgtactaatgacttaatttatcaaataatttaacatccttaacttcccaggttakggtgagacaccttgcttgaaatctacttggaggtgcctggtgaatcttttaacccagtctcgagccaactgtttacacttaacgtaccaaagacttatcac

SEQ ID NO: 56353 - DNA, 697 bp, Homo sapiens
gaaatctgacagaaaaaattaatgcagagtcatatagctctcacctttcttcttcaggattatttaattgtggctggaagtcctgaggctctgtacttgtaagcactttcagtacaaagggtgacactttgattaaggcagttgaatataatggttaagtacatgaattttgatgctgtcagaaataattgttgtaaacagaagcttgcctaaattcatatctagggtccacccctttcatatgctgtgggacccttggggtatctgtgcctcaatgtcacatgtatcacagaaataaaacaggggcagtaacagttcctatctcacatcattgttatmaagattgggtgcacgtttgcaaaatgctcagaatataggaaactagatgtaaatgatttttaaataaaataatgacttggtgctgtcatggggtatatttcccttgttacgacaatacatttagcattgctttagaaaaggaaattcttgttgggtcaatttgaaatcttaacactgactagatttaattggtttctaaacttggtgtctgagaattttgattgtattttttgcttctgattgctttagcaaatgtgactatgccttaaacatgcctgtcaaaaattggaaaagtatattttttcttatgttcacacacacacacacacacacacacacacacagtcacatacataca

SEQ ID NO: 56354 - DNA, 697 bp, Homo sapiens
gaaatctgacagaaaaaattaatgcagagtcatatagctctcacctttcttcttcaggattatttaattgtggctggaagtcctgaggctctgtacttgtaagcactttcagtacaaagggtgacactttgattaaggcagttgaatataatggttaagtacatgaattttgatgctgtcagaaataattgttgtaaacagaagcttgcctaaattcatatctagggtccacccctttcatatgctgtgggacccttggggtatctgtgcctcaatgtcacatgtatcacagaaataaaacaggggcagtaacagttcctatctcacatcattgttataaagattgggtgcacgtttgcaaaatgctcagaatataggaaactagatgtaaatgatttttaaataaaataatgacttggtgctgtcatggggtatatttcccttgttaygacaatacatttagcattgctttagaaaaggaaattcttgttgggtcaatttgaaatcttaacactgactagatttaattggtttctaaacttggtgtctgagaattttgattgtattttttgcttctgattgctttagcaaatgtgactatgccttaaacatgcctgtcaaaaattggaaaagtatattttttcttatgttcacacacacacacacacacacacacacacacagtcacatacataca

SEQ ID NO: 56355 - DNA, 697 bp, Homo sapiens
gaaatctgacagaaaaaattaatgcagagtcatatagctctcacctttcttcttcaggattatttaattgtggctggaagtcctgaggctctgtacttgtaagcactttcagtacaaagggtgacactttgattaaggcagttgaatataatggttaagtacatgaattttgatgctgtcagaaataattgttgtaaacagaagcttgcctaaattcatatctagggtccacccctttcatatgctgtgggacccttggggtatctgtgcctcaatgtcacatgtatcacagaaataaaacaggggcagtaacagttcctatctcacatcattgttataaagattgggtgcacgtttgcaaaatgctcagaatataggaaactagatgtaaatgatttttaaataaaataatgacttggtgctgtcatggggtatatttcccttgttacgacaatacatttagcattgctttagaaaaggaaattcttgttgggtcaatttgaaatcttaacactgactagatttaattggtttctaaacttggtgtctgagaattttgattgtattttttgcttctgattgctttagcaaatgtgactatgccttaaacatgcctgtcaaaaattggaaaagtatattttttcttatgttcacacacacacacacacacacacacacacacastcacatacataca

SEQ ID NO: 56356 - DNA, 697 bp, Homo sapiens
gaaatctgacagaaaaaattaatgcagagtcatatagctctcacctttcttcttcaggattatttaattgtggctggaagtcctgaggctctgtacttgtaagcactttcagtacaaagggtgacactttgattaaggcagttgaatataatggttaagtacatgaattttgatgctgtcagaaataattgttgtaaacagaagcttgcctaaattcatatctagggtccacccctttcatatgctgtgggacccttggggtatctgtgcctcaatgtcacatgtatcacagaaataaaacaggggcagtaacagttcctatctcacatcattgttataaagattgggtgcacgtttgcaaaatgctcagaatataggaaactagatgtaaatgatttttaaataaaataatgacttggtgctgtcatggggtatatttcccttgttacgacaatacatttagcattgctttagaaaaggaaattcttgttgggtcaatttgaaatcttaacactgactagatttaattggtttctaaacttggtgtctgagaattttgattgtattttttgcttctgattgctttagcaaatgtgactatgccttaaacatgcctgtcaaaaattggaaaagtatattttttcttatgttcacacacacacacacacacacacacacacacagwcacatacataca

SEQ ID NO: 56357 - DNA, 1214 bp, Homo sapiens
ggtgtgagaattttcacatcaattgggtatgagaaatggcaagggctttttttttgtctatatcaaatataatctggcttaagcctccctttaactaggttggcaaaaaaaaaaaaaatagtccagtatcatttttcctccccaacctttgtgttgtataagaactccacagtttctgcagtttatccagagtagaagtgagtcaggcccttaagccacagggatagctcttgcttttcttcttagccatctgaaggcaaaaagtgtgtctcaacccctctctaccagtctcaggggtctttgctaaggtccctaagctgctgcacctgggctcttaacaccagaagggctccgggaccccctacccaaggttctcctacccagtgcacctgcagcttcagcattgtttccatttcaaggagccagcttccctcctgtctcaaccctctggcacgtttcagcttaaaattttcgcagatctagacttattgacggttgttttttaggttcctgacaatttttttcagtcctgaaaaactaagtccctgctgtgcattaggagttccaagaccctaagaacaaaggcctggctaccttctttggtatgggaatacatgaatctacttcctttctcagaaagatgccgcaataaaaatacagtgtaaattactcaggaagtcactctgcttcataaatcaacaaatacaatttctttctacatatttatgtaataaaaagcttttttgttaacaaatacatttttattaaggtataattgaataccataaaatgcacakatattaattgtatagggtgatgagttttgataaatttatatacccatgtaactaaaaccctaataaagatatggcatagccataaccctgaatagttccctcatgttattttctagtctctgccctcctctctgctcagacacaacctctattctgatttctattgtcatggactagttttgcctgttcttgaaccttgcaaaaagtagaatcatacagcatatattcttgtgtgtctgacttcttttgctaagcataatgtgtttgagattcatcttgttgacaacaatttttttttttttttttttttctgagacggagtcttgctctgtcacccaggctggagtacagtggcgcaatcttggctcgctgcattttttgcctcccagattcaagcgattctcttggctcagccta

SEQ ID NO: 56358 - DNA, 678 bp, Homo sapiens
ccttgagtgcaccaggctcactctttcctctcagcctttgcagtgactcttctctctgtctggaatactcttccctccgatttctgcgtgctttgcttcttcaagctatactcaagtgtcgtcatctcttgatgcttactctggccactgtatttaagattcagaccccatcatccccactttccttacctgatggtttttctcctaagcactaattgcgttttaatattctacataattatttattatgtatattgcccaactccaattagaaggtaagctctataagggcaaaaatttttgcctgtttggttcactgttttatctaagtattagagtattgcttcrtatatagtgcttaataaatactaattaaatgcataaattaatgaccaaataaatatcatgatgcttgccagttatatacatccaagccttcttttatttaagctctaaaatatttcagccctccccaaactgggcttcctcctctttccaactcaaaccatagaagcctacacaccatgacaataaatggagacaacattaggagaaatgggagaagctatctttgccccaattcattcttggtaaaggaatgtggtcttcttcctgtgaacttactccattttctgacatcataatactttttctggtcatggacattagttttatagt

SEQ ID NO: 56359 - DNA, 675 bp, Homo sapiens
gagtatattatatggtgtgtgattgcatttggaagcatcagtaaatacataggattgacaatgaggaagattatagtgttattagacctaccatcatgatgttagataagatttgtaatttgaagtagagacagygcttaccaaatatctattattcccctacatgtttgagcccctctaacatttatattggggccatataattaattctaacaaatgtgataataagcaaaagtaactaattgtgaactgcatttagaaaaaaaacccactacaatgtaggatcagagtagcaaatgaaaggccacaatattttatggaatgttaaagagttagaaaaaacactggaggcatttttcctggaaagcttgagggtaaagtgcgagttgtcctaaaatatctggtgtgttacagtgtagaggaatgaaaagccttattctaatggcgtgaaagtatatagcagagctaatcagtgaaaaatacagaggaacttattagattcaatataaataagaacttgcttttgataccacatgtgggaccctgcattacatttgtaaatcatttatttttcggttttgccattgtctgccacttccagtagaatagaagttcttcaagaatatgtatcttgttcatagctattttcctaatgctttgcatggtcctagccag

SEQ ID NO: 56360 - DNA, 675 bp, Homo sapiens
gagtatattatatggtgtgtgattgcatttggaagcatcagtaaatacataggattgacaatgaggaagattatagtgttattagacctaccatcatgatgttagataagatttgtaatttgaagtagagacagtgcttaccaaatatctattattcccctacatgtttgagcccctctaacatttatattggggccatataattaattctaacaaawgtgataataagcaaaagtaactaattgtgaactgcatttagaaaaaaaacccactacaatgtaggatcagagtagcaaatgaaaggccacaatattttatggaatgttaaagagttagaaaaaacactggaggcatttttcctggaaagcttgagggtaaagtgcgagttgtcctaaaatatctggtgtgttacagtgtagaggaatgaaaagccttattctaatggcgtgaaagtatatagcagagctaatcagtgaaaaatacagaggaacttattagattcaatataaataagaacttgcttttgataccacatgtgggaccctgcattacatttgtaaatcatttatttttcggttttgccattgtctgccacttccagtagaatagaagttcttcaagaatatgtatcttgttcatagctattttcctaatgctttgcatggtcctagccag

SEQ ID NO: 56361 - DNA, 632 bp, Homo sapiens
accatcttaagagttttgcaaaataaagtgaatttatctattagacaaacataaatattttcagagtgcagttgcttctttcagaaaccttccctgaatccattttttgaagaatgtcttctaagagagtaaaaacattttccatgtatttatagactctagggtatcagaaagcttgaaagattatagagatccatgtagtaataacattttaatgttgraaaaaataaatagaatttaaaggattcaatcactgtcataaatatttgagtagcaaagtcaggagcaatagctgaggaacagcaggaactcactgatcacttacttctgctgagcactcatctatgtgctttacatagttagatgacaacaagcctgtgaggcagacatcattatcctcttggtacagataacagagagagggtatgtcatgtttctaaggtcacaaaactactgactagcaaagccagaattgaaacccagagagttaggctccaaatcattttttgttagtcttgctttctgggggaaggggatatgattatttaatcagccttattattgtttacacaatgatatgatttggctgtgtcctcacccaaatctcattgtgaattatcgttcccataatc

SEQ ID NO: 56362 - DNA, 650 bp, Homo sapiens
ggatcctaatcatattcctagctgtatgaaagtctggaaaatgtcacttttagttttctagcctctgcagtataggaaggcactctacaagaagggtagaatgaattctgtgcaagcccctctgctctatctgccacaaaattatttcaaaaacgtgaacttcgggcattcaaaaaagagcaaaattcaaatctttactctaggatttattagctgcgtgaccttggacaggatgcaaggtccaatattactcagccaatttttcctctgtacaatggaagtataatatatacctcacagaattgccattcattcattgatttatatctctatcaaatttttactgatttttaccttagtaccagaagttttagttgaaagtgacaaaaactaattggttgattaagccaaaaagaaaactattaaaggatatttggtaggtcgcagaattgccaggagggctagagagccaggctcaaggatgaacttccaggataccaccacaaacagttgtcaggactagcctgaagacactgctactgccttcacctcccagcattcaatgctacattttgcacygccagcaggaactttactgacacaagcactactgccagccctgttataggaactcaacaatgccacctctg

SEQ ID NO: 56363 - DNA, 923 bp, Homo sapiens
aacattttttatgctctacatgtaccaagtctctgcagggaaaaattatgtttcttaagcaaaaatctgtaggggccaagggaaagtttccttccaccctctgaaggtttgctgaaaatgaactgacaatcaacagattaacaggagaaaagacatacagatgtatttaatatgcttagcacagggaaattgtaggagaatgattagccaataacccaatgagatccagatgtttatacaccttcataagggaaggggagatggcaggtgtagcaattttgaggagtagtaaatagttttttaaggggaatgaatggacccaatctttagtcaatgtttagcaaataattctctttgggaactgaacggcacccaagaacagacagtagtttgagacaaagtttgtctgggctctaggtgtgatgtgtgattttcagtctcttcctcttctctggttaagtttcagagtagggtaacaaagtcgattgggttccttttagagggcctggtttctaggtggattaggaactttggaaagcagcctcatcctgtgctctgggtcttgtgctttatttctcagggtttggtccttgctccacttaaaggttaaccttgctgttttcaaatcagtttctggaatgacctggagttgcatctsttagggtcaccctcaccagtacattcctggctgaagacagggatagtttgtttttgttttgtttttgtgtggtcattttatattattcattgcctacagagcatctttatgaatttaaaggaatgtttgtggggttgagcattttagaaggcactacttttccgtttgtgggaaaagttgtgaacaaatgagctttctatttcagggcaatgaactgattcttaattttttttagctgctgaaatatttaaaatgcatggtttta

SEQ ID NO: 56364 - DNA, 735 bp, Homo sapiens
tgttggagtatagagaactatgcaaaattatagaggaggagatgtactgttattgcttctataaacacgaggctaaaggttatgggggggttcatttgatctaagctggtcatgtttactcacccatactcttcacccattttaataggaagaacgtcaacagcatttccatatatccactaactttcaaggaggtaaatatcttatgatcttccttttcacaaataaggaccagcaagagagtcaagtggcttgtgacaggacccaaagtctcccttgaactcaaccattaatctgattttctaagggttttccaagactactatttcccatgtccctactaagattggaaaaaatacaatttttttaaacactcatctatattactcttgaagttcagacaaggctaatagtctcctaaggaaaaattcaaacataagaaaagacacagccaataagcaaacagtttgatgcttcttcacctagggaacacacaagtttaaccagcccttacgtcaagaaataaaatttgatcagcacattttccccaggtctcccttcccccttgagtggttatatattataggatctttccggtttggattccttatagacttttacgatgttcgtaagacttatctaacttcctaactttttccttaaaattccttgacctctttatatttggtgtttattaaattttattgcttatcaaaattgagtgwttactaaatg

SEQ ID NO: 56365 - DNA, 714 bp, Homo sapiens
ggatcctgaattacaactgaagctcattctttcacaaacagcaacaagataaatgagggtcaaataatctagcactgtgtgaaatttcaaaactcaacacttccacccagagttaaagatggtcaaatagagaaaacagaagagtgaaccaaagttcaattggaagtagaaccactaagataaagatagatagatatctcatagttatatgtatgtgtgtatatctataaaatagctataaatacatataaatataatatatggttatatctatatgatatatagttataagttagttatcaatagatatatagatccattatatatagatataactataattatagatataaccatatagttatataactacatatagatataactagttatatagatatacatagatatatagataactatatagttayataactatatggataactatatatatataaaaccattacatataactatatagttaatatcaacttaatacatagatcttgaagccagttactggccaaagcattagataaaccatcttcgtttatagacaacaaccatataatccttggtttctactgattctccctatggcttgctggtttagtaaccatttgagctcaatgtgtctatctacctatctataactacttctcaataaataggttcatcttaagtggaaacatgtaagtcgtagaattctaa

SEQ ID NO: 56366 - DNA, 821 bp, Homo sapiens
ttgttttacagcctctgtgcccaggtttatgtggaaacaaaatcataatatgagtgtgatgagggtgaagaagtgaaggaaggaaggagggagggagatgcaaactcactaggcttagacacacttgggtgggtgtttctctaataaatcccttccttctctactgcagagcagtgcagaaaagcgatctgaagaaccctctgacataaagccagtagaccctcatccacatcttgcttcttctccttgaactgacagaaagtcacatacaagccccccagtgtttcaactcaacattttttgtttctccaagccaccactgctgttgtaaaacctacttaatcttactactggcttccaactctcacttccatcaataattactacccagagacaagaactaatccacatakgaagaccttggaagcttttattgttcaacacaaaagcaagactaccaaagttcatttgtaagaggaaagcagaacttagtggtgacttttcaaagatgttttaggactagtcctaaaatgaggcatcaaccaatatcttggttcatctaagaaagtccctcagtagaacactgtcaggtattatctctatgaatacccttactcagataaccatatgacaaacttgctcaggaaataataaagtgtttctttttagaactatgggattggtctcaaccaatataactaaattattaaagtatggagtggcactagatgcagagaacatttcttacccaaagtgtcatgatatcaaagatgaccaatgttctgggtactagaaatgtagtggagaaccagaaagacagg

SEQ ID NO: 56367 - DNA, 683 bp, Homo sapiens
cctgccagagttgattgggttgctcgtaacaaaaaaatgatgactgatggaaataataaggagtagtatttttcccaaataaaatatggtgttaacatgctaaccttttttaaaatctctggctttcaacatctgtaactattaagtgcatacttagagatgagctctcaaatataaattcaagaggtaytgcctcccttgtttcaatctaaatttatattctaaatttctttatttaactttcaaaaatattgtgctaatgttaaagaatttgtaatcaatgataaatacaactaaaattagtagttaatgtgaattttattttcatatcaattcagaaaatttagaatgccataaaactttcaacaacattaacttgttaaaccgtaaaagacaattttagagactacatactaaaagcctagaatattaatatacatagttaagaaaagttcatgagctaatgtccaaattatctctgacattcaacaaagttctaatagcaatgttttggcagaaaagaaaggtttttcggtctctgaagagcaaatgactgtttatatcatctctgtcattgcctgagtcagtaaattgcctcaatcatgtaaattaaataatgttaaattttctgctcaagtatgtcttctagactcatacttttaggttgttaatagtgagtcaga

SEQ ID NO: 56368 - DNA, 683 bp, Homo sapiens
cctgccagagttgattgggttgctcgtaacaaaaaaatgatgactgatggaaataataaggagtagtatttttcccaaataaaatatggtgttaacatgctaaccttttttaaaatctctggctttcaacatctgtaactattaagtgcatacttagagatgagctctcaaatataaattcaagaggtactgcctcccttgtttcaatctaaatttatattctaaatttctttatttaactttcaaaaatattgtgctaatgttaaagaatttgtaatcaatgataaatacaactaaaattagtagttaatgtgaattttattttcatatcaattcagaaaatttagaatgccataaaactttcaacaacattaacttgttaaaccgtaaaagacaattttagagactacatactaaaagcctagaatattaatatacatagttaagaaaagttcatgagctaatgtccaaattatctctgacattcaacaaagttctaatagcaatgttttggcagaaaagaaaggtttttcggtctctgaagagcaaatgactgttyatatcatctctgtcattgcctgagtcagtaaattgcctcaatcatgtaaattaaataatgttaaattttctgctcaagtatgtcttctagactcatacttttaggttgttaatagtgagtcaga

SEQ ID NO: 56369 - DNA, 675 bp, Homo sapiens
tctcccagtcaagattcttctctgagaagaaaaacaccagcccaccctttcaaagagttcctgtcacaaacattaagctgcatcagaaaagaagaccaaaaaagacacagagagtaagtgatgagagagatgtaagaatataatgaaggcgaagaggggaatgagatgtaatagaaaattgcaggaaggaaggtccagaaggagtagccaaacgattcaaatgaaaaagagaaacttccacatttggacaggatggaataataaaccagttttacccttccatatgaaaaactaataataataataataataataaaaagacaaatatataaaatcacaccactcaaaacagaggacaccaggtgaccaaggacacagaccccccagaggggtgagacctaaggagaacatgggagagcccaamagtctccttgatttgaggagacagagccgggagtctggacaagtcaggatagctagaattctcagggcagagtgaaggagagaagagagctgcgcgaagaactctggagatctgcagaagaaccccttcagcattcaactgaacactgatcatgtgtgttgaaaaatctacctgaggtcagggaacaaaccacacaaaaggattagagggaataaagttggagctcacacaggaccaggaatagtgtcagt

SEQ ID NO: 56370 - DNA, 675 bp, Homo sapiens
tctcccagtcaagattcttctctgagaagaaaaacaccagcccaccctttcaaagagttcctgtcacaaacattaagctgcatcagaaaagaagaccaaaaaagacacagagagtaagtgatgagagagatgtaagaatataatgaaggcgaagaggggaatgagatgtaatagaaaattgcaggaaggaaggtccagaaggagtagccaaacgattcaaatgaaaaagagaaacttccacatttggacaggatggaataataaaccagttttacccttccatatgaaaaactaataataataataataataataaaaagacaaatatataaaatcacaccactcaaaacagaggacaccaggtgaccaaggacacagaccccccagaggggtgagacctaaggagaacatgggagagcccaacagtctccttgatttgaggagacagagccgggagtctggacaagtcaggatagctagaattctcagggcagagtraaggagagaagagagctgcgcgaagaactctggagatctgcagaagaaccccttcagcattcaactgaacactgatcatgtgtgttgaaaaatctacctgaggtcagggaacaaaccacacaaaaggattagagggaataaagttggagctcacacaggaccaggaatagtgtcagt

SEQ ID NO: 56371 - DNA, 388 bp, Homo sapiens
  misc_feature (1)...(388): n = A,T,C or G
ggatccctgggaaatctcactctggatttcaagcctagagaattgggtggaatcacctgcaaatccacttatagggtgaatagtaagagacgggggatgggggagaaggacaggaacgaagaaaacagagaaacggtaaagaacaaaaaaaccttcctctgaatatgaccctgcaacccaaaattctaaaacatatggacaaatctaatgctaagtaatacagccagcagaacaaataatcaaacattaacttamctcagttgagattatttttatgaaacaatctgagactttaaaataagtgtgttttagatatcttaagagatacatgaaagcncaattcactggtgtgttgcataaaataacattcataaaattctggttttgt

SEQ ID NO: 56372 - DNA, 635 bp, Homo sapiens
aaatcagtcttccaccatccaaccaaactaaactcccctgggatactaacttggattgccaagctttgttaggtggatgagcactaacagaggtataatcactatcccaaagttgaaagacagagattccacttgtccagttttccttgggatcactcaagatatttcttggaaagaacgtttaatagaacatatggtttaaagtgccagctacttctgaaaagtatccagagtaaaatctaggctaaaacagtatgatatccagaccacccaaactttaaattactttaatatgttaatggcttctctcatctgcgcatctttgttcatcttgctcaccacactcttcggctgcctggacttagaccctcagtagcatgggcacctaagcacacagaaagctagaacatgcatttcccaatttttgtgtttttagggtttcaccatgttggccagggtagtctccaactgctgagctcaagtgatctgcctgcctygacctcccaaagtgctgggattacaggtctgagccactgctcctggtcaacctctttgtgtttaaatactgctctttcctcctgtccttgtgaaatgtctctgtatgtgttaaagggtagttcttccctttgtgctgt

SEQ ID NO: 56373 - DNA, 579 bp, Homo sapiens
tttgggaggccaaggcgggaggactgctgttggccaggagttcaagaccagcttgcgcaacacagtaagacccagtctctacaaaaaaattttaagttagccaactgtggtggtgcatgcctgtagtcctagctacttggaaggctgaggtgggacgacagcatgagcctaggaactggaggttacagtgagctatgattataccactgcagtccagcctgggtgacacagtgagaccttgtgtctataaaaaaattttttaaatggcttccttttgtatttacaatctaaatgcctttaytgctttataaaagcctctgcctaactctcccagcttcatctctctccctaacactctttccttttgttcacttcactggagtccaactgattttctgtccctcagatattctaagctttttctcacatcagggtttctgacctcatttcttgtatctacaattgtctctccctcctgtccatacatggctggccctttgtctatgcttacattttagttcaaatgttagctatgtgaagagagcatctctggccactctagctaaagtagttctgccc

SEQ ID NO: 56374 - DNA, 703 bp, Homo sapiens
atcctcctgcctcagtctcctaaaaggctgggattacaggtatgaacccccaggcctgcctacttcgtgtgttttatctggcaatgctgagaggacagctagatgtcgaggacagccagatttcgaggacagccagacgtcaagggggaaagcaacttgctggctcacacagccagccaggtctattgtggagccctagtcgcaaacacatacaccccagctttcaagtttttaaatatttatttagttagttatttgttttttgagacagtcttgctctgtcacccaggctggagtgcagtggtgcaatttcagctcactgcaacctctgcctcccagattcaagtgattgtgcctcagcctccctagtagctgggactacatgtgcgcgcctgcactgcccarctaatttttgtacttttagcggaaacggggtttccccatattggccagagtggtctcaaactcctgacctcaagtgatccacccacctcggcctcccaaagtgctgggattacaggcgtgagccaccgtgcccggctagcttttttttttttttttttttttaattaggttgaatgcttgttgagctgggtgcctcacatccgttgtctgttatacaaagaactactgattatgggtctctacgagcaaaaatggcagaacacctacagggcacaggggagatgggagcagggattag

SEQ ID NO: 56375 - DNA, 703 bp, Homo sapiens
atcctcctgcctcagtctcctaaaaggctgggattacaggtatgaacccccaggcctgcctacttcgtgtgttttatctggcaatgctgagaggacagctagatgtcgaggacagccagatttcgaggacagccagacgtcaagggggaaagcaacttgctggctcacacagccagccaggtctattgtggagccctagtcgcaaacacatacaccccagctttcaagtttttaaatatttatttagttagttatttgttttttgagacagtcttgctctgtcacccaggctggagtgcagtggtgcaatttcagctcactgcaacctctgcctcccagattcaagtgattgtgcctcagcctccctagtagctgggactacatgtgcgcgcctgcactgcccagctaatttttgtacttttagcggaaacggggtttccccatattggccagagtggtctcaaactcctgacctcaagtgatccacccacctcggcctcccaaagtgctgggattacaggcgtgagccaccgtgcccggctagcttttttttttttttttttttttaattaggttgaatgcttgttgagctgggtgcctcacatccgttgtctgttatacaaaraactactgattatgggtctctacgagcaaaaatggcagaacacctacagggcacaggggagatgggagcagggattag

SEQ ID NO: 56376 - DNA, 540 bp, Homo sapiens
atatcatttgcaattcagggaacaagttacttccatttttaaatgtgaatgtttatactttaaatacacgtcttcctattattcttcagttattatataacctaaatttagaatccagaagatcctagctttgctatggcccttttcacagcagcattttgtatgccatgcatcaatctataccaagttcatgaaccccaaaattacagtgagaaacaactcatataaagaatggcagatcattttccaaaccygaaatgctaatataatgccatccggataatttattttgtctttctacgagagacatttggtctcccagagatcactaaagacttctaattctggtgcctaaggctgggacagcatgcactctcttcaagagaagttccactaaaatgcaaaatgacttttatttcttaccactccacacaatacaagtgttagaaaagtgccctaaatatcctggtatatcctgctgtggtttttctcaccaaccttgctcatttccacagatcattagttttatattctggagtt

SEQ ID NO: 56377 - DNA, 540 bp, Homo sapiens
atatcatttgcaattcagggaacaagttacttccatttttaaatgtgaatgtttatactttaaatacacgtcttcctattattcttcagttattatataacctaaatttagaatccagaagatcctagctttgctatggcccttttcacagcagcattttgtatgccatgcatcaatctataccaagttcatgaaccccaaaattacagtgagaaacaactcatataaagaatggcagatcattttccaaacctgaaatgctaatataatgccatccrgataatttattttgtctttctacgagagacatttggtctcccagagatcactaaagacttctaattctggtgcctaaggctgggacagcatgcactctcttcaagagaagttccactaaaatgcaaaatgacttttatttcttaccactccacacaatacaagtgttagaaaagtgccctaaatatcctggtatatcctgctgtggtttttctcaccaaccttgctcatttccacagatcattagttttatattctggagtt

SEQ ID NO: 56378 - DNA, 600 bp, Homo sapiens
atacaaatgtatttctaacttcatttcctatgtttctcgtttgcacaacattataatctgtatgatctattcaaaatgtcttaaatatcctttgctcgtttattcattcctaggattcaattccccctacctgaaacatattctcccatcttcactgatataaattccatctattttcatggttcttctcaatgcttgtggctccatggatctcacttgaattctgcccattggcaattattttaatccattctgagtttccattttttacatacatctctcaaacacaacattatatcaaaattacttgcaatgcttgtacaatgcacattttcaggctccattctagatatttggattcagtaaatcaatggtgagcccacagaatttttgtttttaacaaaatttacaagtgattctgactcyggtggacttgtgattatacttttagaaacaccacatagcagttattatttggtttatttatttgaaccttaattacacattcattttcagtttgcaaatttcctatttgcctctctgattgccccagtaagattgtaaattaactgaggataataacaaaatatacacttttct

SEQ ID NO: 56379 - DNA, 764 bp, Homo sapiens
aggtttctctcctacattatggtggttcactagcaattttcggcatttcttggttgtagacacaccaccctgatctctgccttcatgctcatgtggctttctttctatgtgcatgtctgtctcttcayatgacatttttttataagaatacccatcgtattgaattaggggcctaccctactccaacagaacctcacccaaactaattacatctgcaatgactttattccccaataaggttatattctaagatcatgaaaattaggatatcagtgtatacatttgaggggaacacattcaactcatgacataaaccaacattacaatttcagctaattcagaaggaaaccttactttatcagaaaaatgtgaaaattggctaaagtagtacctgtcaattcttaacctttaattacatgatcatgatgtgtccggaattggtgggttcttggtctcactgacttcaagaatgaagccacggaccctggcggtgagtgttacggctcttaaggtggcgcgtctggagttcgttccttctgatgtttggatgtgttcggagtttcttccttctggtgggtttgtggtctcgctggctcaggagtgaagctgcagaccttggctgtgagtgttacagctcttaaggcggcgcgtctggagttgttcgttcctcccagtgggctcctcctctcgctggcttcaggagtgaagctgcagaccttcgctgtgagtgttagagctcataaaagcagtgtggacccaaagag

SEQ ID NO: 56380 - DNA, 862 bp, Homo sapiens
aaactttaaggtttcagacttttattgcctcatttctggatcatcaaagtagtctcctaaattctttcccttttttctaaagaatattatcactctaaagcatcctactcattaatatcacactcataatcttgaaaacatcaaattttaattgtacccatattggaaactatttatagtttttattacttcttgaataaaatctaagttctacttattattcaaagtctctacaatggcatacttcacctatccatcctcaactcccaccacaactatatattaacagattcacttccttataaactccagtgccaaatatcctcccttgttattcacgttttttatttcctttaccacctcatttctccacatgtaactcaaatcctaccatctttataattctgggactcctttaatcattctttcactatcttctcatgaatccccaggtatatttactttttgccagtcatgaggtcattttctttgcattgctatataaaactttaaaaatcatttaagctttataacttatgaggtaagtagttttattttctctattttacagatgtgaaaactaaaggtgaaaagggttaagaaacttaaccaagattkcatagctagcatgtggcagaactatggtaaggtctgcaaaagcatggatgttgttttgtaataatttattagtttctgcaattcctggcacacattaaaaaagtacttgataaatacattttgagttggttgagtaggggttattaaatttatcttttattttgaaggaggcattctagtttgtgtctgaccgattttactgcatgttcaggtacttcttacaaaatagtggggctaccttaca

SEQ ID NO: 56381 - DNA, 1052 bp, Homo sapiens
atatacccaataatgggctttctgggttgaatgatagtactaagttctttcagaaatctccaaactgctttccacagaggctaaatcaatttacatttccaccaacagtaggcaagcattcctttttctccacagccttgccagcatctacaactccattttgtttttgttttcatgtgagtacttaggataatgtctttcgcattgtaggcaattgatgaatatgtgaagcaggaaagaaagacaatgtattagtttttacaataatggtttccaagtcaaatattatgtttccatcagctgtatctcatacgtttaaatatagttaaatgcttctgtgcagaattttttttctggaattttctgaaaactttataggcttttccaaatttcaaatcctgtgaaaaattattcaataaatcatgaaaacagaaaaaagtattataattctcatatgaaaagtaaagcttacaaagcaacataagaatgttactggttcaaaggaatttaataatttactgacaataaattgaaaacaaaagtggaaaaagtggactagaagtcaacgattaaggtcagatttctatgagccagcacaaaaacatgtgggagagaagccaacaatttctaatcagtgttatttgtaactgccatattatgtgtgtttttctggctctgtatgctgctaatgcttagtcattcttgcaaatgaaataaacattaataaatacatgtgcacagtatactttatatacagtatactctgttgtgtagttccccaagaaatagcaagctttggaagcaaaaaartccttagattggcaattttgaaagagattctgtggagtgctattaacctttttaactacagactacagttctttgtaaataatttaacagaagacatgcaaagaaggaacatgatattctttgtgaatattgtgacttgaaattacaaacatctgaaaatctgaattagaaaagcaatggagattttcatcaaacacacacaaataaaatcagtatcagagtaagccaacaaaatatttgca

SEQ ID NO: 56382 - DNA, 1137 bp, Homo sapiens
ccctgaacctaaaataaaagtagagataaataaataaatataaataatatttatttattattggtaaataaatgaggcatttatttaccaagacaatgtttgtgttcyatgaccagttctgaaaaaatggagttaaatacatttatccaaaaaatggataaaaatactagattattatcctgatgcacaacaggaacctgttgtgctgtactcattttgtttagtcacatgttcacaaaaaagaattacaattaggagtattttttttaaacatgagcaaaagcgatattgaagcagttatggtgtctggggtaaatacctggggttcatcctcttgcaccaagaaaatttaggacacagacacatatgaggagtttaggagcagaggtttaatgggaaaagaaaaagaaaagaaaacagctctctctctctctagggagagggaggagatttccaagaggaaaggccagctggcagcacatgtggtgaattttatagtcaggctccagtaggcggtgtctgatttatgtagagctcacagattggttccatcaggtgtgacatttacatagcccagggaaggctggccaccctaccctaatcttattatgtaactgaactttccccttggccagggccatcttgtctgctccttactgtacatgtggctggcagagaagggaaggtggagccgctattttgaacatgattggcacaactgccagcatctatatctgcagcttgattttacaggctgctctttgttagaaaggaacatgatttggggctacttttcattaaaaggaaaactgtaccgaagacttccataccctcactatctgtgtaagtaatttcttcttcattcctgtaccaatatgagatagtctgagtttgtgggtaagggaataattgccatacttcttcttttaccttaagaaactggtcctctgtgcaacttcattttgcatgtagatgtaatttgtttgtctgcaagggaatgtacatattttaaactcactggctcataacgaatgcttctggagcactagggagttaggggaagtggcaggttaggcatagagaagtatgtgcaggtttcagcaaagagcaagaagaaatgtgcaagcctttagggcc

SEQ ID NO: 56383 - DNA, 1137 bp, Homo sapiens
ccctgaacctaaaataaaagtagagataaataaataaatataaataatatttatttattattggtaaataaatgaggcatttatttaccaagacaatgtttgtgttccatgaccagttctgaaaaaatggagttaaatacatttatccaaaaaatggataaaaatactagattattatcctgatgcacaacaggaacctgttgtgctgtactcattttgtttagtcacatgttcacaaaaaagaattacaattaggagtattttttttaaacatgagcaaaagcgatattgaagcagttatggtgtctggggtaaatacctggggttcatcctcttgcaccaagaaaatttaggacacagacacatatgaggagtttaggagcagaggtttaatgggaaaagaaaaagaaaagaaaacagctctctctctctctagggagagggaggagatttccaagaggaaaggccagctggcagcacatgtggtgaattttatagtcaggctccagtaggcggtgtctgatttatgtagagctcacagattggttccatcaggtgtgacatttacatagcccagggaaggctggccaccctaccctaatcttattatgtaactgaactttccccttggccagggccatcttgtctgctccttactgtacatgtggctggcagagaagggaaggtggagccgctattttgaacatgattggcacaactgccagcatctatatctgcagcttgattttacaggctgctctttgttagaaaggaacatgatttggggctacttttcattaaaaggaaaactgtaccgaagacttccataccctcactatctgtgtaagtaatttcttcttcattcctgtaccaatatgagatagtctgagtttgtgggtaagggaataattgccatacttcttcttttaccttaagaaactggtcctctgtgcaacttcattttgcatgtagatgtaatttgtttgtctgcaagggaatgtacatattttaaactcactggctcataacgaatgcttctggagcactagggagttaggggaagtggcaggttaggcatagagaagtatgtgcaggtttcagcaaagagcaagaaraaatgtgcaagcctttagggcc

SEQ ID NO: 56384 - DNA, 1564 bp, Homo sapiens
ttcctgagcacagaattgctatgtaaaacaactatataaattaagtgctatttggtaaatataataaagagagtaattatatggtctttccagcataactcatttggttttctttatcactttgttagatagaacatacataataatgctacatagtcatacatgactggcattccagtggtaattctaattttaatgagaataatttaatgtggactgggtttgaaatcaggttggcagatgatttggaagaaaaaatatattttctcttatcttgtagaaataaaactcttatttgataggattttgaattatttatataactcattattcttctttctttcttttttttttttttttttttttttgagacagggtctcactctcttgcccaggctggagtgcagtggtacattcatgactcactgcaaccttcgcctccccagctcaagcaatcctttcacctcagcctccagtatagctggtactacaggtgtgagccaccgcacctggttaatttttgtattttctgtagagatggggtttcaccatgttgcccaggctggtcttaaactcctgcactcaagccaccccsctgcctcagcctcccaaagtgctgggatcacacatgtgtcagccaccatgcccagcctcattattcaaaaatgtatgttgacttctactgaatttgtgtttgttatctactgagaggttgttatggactttttccttctccatgatttatgaatatatcaaacattttcaatatatttcctaatttgtaattatcccaggaaaattctgggataataataccctcttccaagagtattatttccaatatggctacattcttactttgtcatagtcttagctctgtgatctagaaaacaatgcatgagtctaaaagtactgttggtattatgttattggatagtgcaatccctgggtggcagggctcaatgaaagcataaaatgaggcagggaaggagagataataaatataagggcatatgttcttgaacagttttagcttagtactcagcaagactaattcttggttttggaaggcatctttggaaactttaagcaatatggcatctaagaaaaaggaagggagaatgtagtctcccacttggcccatgataatgatagccataaattattctgtactgtaggtcagttaatcctccaagcactttacagaaatcagtacatttagttgtcataactaccttaatgatagatgttattacaaatgaggcttatagtaattatgtaacttgtctaagttcaaacagacagtaagtgagaagtgtaacccccactcctccctgtcacccatatctcatcagcaaagtccactccaaaaaactgtaagtcatgtgtactttcatgttgaggtaactgtcgtctccaggtagtcactgagtaatgcagtctgtgtgacagtgttctgaatgcaccgatgcagaatttaccctccttactgggtagcatcacacaacctgtgagactccttcacctatcatgatggcattagaaactaaagagtcatctgcat

SEQ ID NO: 56385 - DNA, 1564 bp, Homo sapiens
ttcctgagcacagaattgctatgtaaaacaactatataaattaagtgctatttggtaaatataataaagagagtaattatatggtctttccagcataactcatttggttttctttatcactttgttagatagaacatacataataatgctacatagtcatacatgactggcattccagtggtaattctaattttaatgagaataatttaatgtggactgggtttgaaatcaggttggcagatgatttggaagaaaaaatatattttctcttatcttgtagaaataaaactcttatttgataggattttgaattatttatataactcattattcttctttctttcttttttttttttttttttttttttgagacagggtctcactctcttgcccaggctggagtgcagtggtacattcatgactcactgcaaccttcgcctccccagctcaagcaatcctttcacctcagcctccagtatagctggtactacaggtgtgagccaccgcacctggttaatttttgtattttctgtagagatggggtttcaccatgttgcccaggctggtcttaaactcctgcactcaagccacccccctgcctcagcctcccaaagtgctgggatcacacatrtgtcagccaccatgcccagcctcattattcaaaaatgtatgttgacttctactgaatttgtgtttgttatctactgagaggttgttatggactttttccttctccatgatttatgaatatatcaaacattttcaatatatttcctaatttgtaattatcccaggaaaattctgggataataataccctcttccaagagtattatttccaatatggctacattcttactttgtcatagtcttagctctgtgatctagaaaacaatgcatgagtctaaaagtactgttggtattatgttattggatagtgcaatccctgggtggcagggctcaatgaaagcataaaatgaggcagggaaggagagataataaatataagggcatatgttcttgaacagttttagcttagtactcagcaagactaattcttggttttggaaggcatctttggaaactttaagcaatatggcatctaagaaaaaggaagggagaatgtagtctcccacttggcccatgataatgatagccataaattattctgtactgtaggtcagttaatcctccaagcactttacagaaatcagtacatttagttgtcataactaccttaatgatagatgttattacaaatgaggcttatagtaattatgtaacttgtctaagttcaaacagacagtaagtgagaagtgtaacccccactcctccctgtcacccatatctcatcagcaaagtccactccaaaaaactgtaagtcatgtgtactttcatgttgaggtaactgtcgtctccaggtagtcactgagtaatgcagtctgtgtgacagtgttctgaatgcaccgatgcagaatttaccctccttactgggtagcatcacacaacctgtgagactccttcacctatcatgatggcattagaaactaaagagtcatctgcat

SEQ ID NO: 56386 - DNA, 632 bp, Homo sapiens
atactgaaaacacttcagtgacttttaaatacaaatcagagctcttaacatgcagtacatggcctggctggcgctacctttctaattccatttcttccactctcctccatgtaccccaggctccagacatggagccttctttctgttgtgtggacaggccatgctcaagcyttcctcagcccatttgcactttctgggtcttccgtctgtgatagtctcccctcagaacaacaccggccccagttcaacattgggatctcagcaaaatgtttccccctcagagaaacctattttaatagccctttatgaaatataaaagccctacttgcattcaatcactttaaaacctattttgtcattgtattcttttcatgtcctccacttataccaccagaatgtgtgttccaagaaaagagaggccttgtctattttattcagaactgcatttctagcacttaaagtggtgtctggatgggaaaacaaggaaggaaggaaggaaggaaggaaggaaggaaggaaggaagtgaaggaaggaaggaaggaagtgaaggaagtgaaggaaggaaggaaggaagtgaaggaaggaaggaaggaagtgaaggaaggaaggaaggaagtgaaggaaggaagga

SEQ ID NO: 56387 - DNA, 632 bp, Homo sapiens
atactgaaaacacttcagtgacttttaaatacaaatcagagctcttaacatgcagtacatggcctggctggcgctacctttctaattccatttcttccactctcctccatgtaccccaggctccagacatggagccttctttctgttgtgtggacaggccatgctcaagctttcctcagcccatttgcactttctgggtcttccgtctgtgatagtctcccctcagaacaacacyggccccagttcaacattgggatctcagcaaaatgtttccccctcagagaaacctattttaatagccctttatgaaatataaaagccctacttgcattcaatcactttaaaacctattttgtcattgtattcttttcatgtcctccacttataccaccagaatgtgtgttccaagaaaagagaggccttgtctattttattcagaactgcatttctagcacttaaagtggtgtctggatgggaaaacaaggaaggaaggaaggaaggaaggaaggaaggaaggaaggaagtgaaggaaggaaggaaggaagtgaaggaagtgaaggaaggaaggaaggaagtgaaggaaggaaggaaggaagtgaaggaaggaaggaaggaagtgaaggaaggaagga

SEQ ID NO: 56388 - DNA, 632 bp, Homo sapiens
atactgaaaacacttcagtgacttttaaatacaaatcagagctcttaacatgcagtacatggcctggctggcgctacctttctaattccatttcttccactctcctccatgtaccccaggctccagacatggagccttctttctgttgtgtggacaggccatgctcaagctttcctcagcccatttgcactttctgggtcttccgtctgtgatagtctcccctcagaacaacaccggccccagttcaacattgggatctcagcaaaatgtttccccctcagagaaacctattttaatagccctttatgaaatataaaagccctacttgcattcaatcactttaaaacctattttgtcattgtattcttttcatgtcctcyacttataccaccagaatgtgtgttccaagaaaagagaggccttgtctattttattcagaactgcatttctagcacttaaagtggtgtctggatgggaaaacaaggaaggaaggaaggaaggaaggaaggaaggaaggaaggaagtgaaggaaggaaggaaggaagtgaaggaagtgaaggaaggaaggaaggaagtgaaggaaggaaggaaggaagtgaaggaaggaaggaaggaagtgaaggaaggaagga

SEQ ID NO: 56389 - DNA, 1113 bp, Homo sapiens
tgtgatatgacatggtctaaaacccactactggccaggcgcggtggctcacgcctggaatcccagcactctgggaggtcgagatgggtggatcacgaggtcaagagatcaagaccatcctagctaacacggtgaaaccctgtctctactaaaaatacaaaacattagccgggcgtggtggcgggcgcctccagtcccagctactcgggaggctgaggcaggagaatggcgtgaacccaggaggcggagcttgcagtgagccgagacggcgccactgcactccagcctgggtgacacagcgagagactccatctcaaaaacaacacaacacaacacaaracaaaacaaaacaaaaaaaccccactactaaatgtgcattatgatctcaactctgcaaaaatatgaattcacacacaaaattatacagaaaaaagcaagaatgtaaatagaaaaaaaataaaccactgtgttcctaaataaagaattgtggattaatttttttcttcagtatttttccaactttctgcaataagatacaatgaattgtataagaagtaaacaagaaatagatactactaattataaagacgtaggccccaaggattgtacatgcccacctcgcctctaggctggtcaaagagaattccagctgccttccttgtctcttttcttgcctgtctccagttcaatcatttatattgctgataggttcttaagtcactttctaatcacagtgctcccggaatcagaactcttcaaaaatttttcactgcctatgaaatagtttgaaatttttgacgtgagcaaccaggctcactatttgtatcccctgaatgtgtgcctatgtttgacattcaggtcaaacaacatcaaattcaacttgccacttgcaaagacttgagtcctaccgtttttccctttgtaacgaaaccattcttcacttgtcatatatcaaaatgtaatcaaaatttcccagatgcttccttattgcctcagctggaataacaacttgcccatatcttttaatggcccttatatcatactgccttcaattataattattcacattattgttacatatgaagtatcaaaataaatcatttttaggagaatt

SEQ ID NO: 56390 - DNA, 607 bp, Homo sapiens
agtatcagtacagaaaaagttgtaaaacagaaactggtcctttgccataactggtttagaagcactgttctgaaaattcaagggtggtcagtgcagttagaatgataaggatacaaagtgagagtaggacaagctcaaagaggagaggaaggtgtaggtgacttacgctggacctcagagactctgataatggatatattccattacacacctgggacaccgataatggtttctaagcacacgagtgacyagtgcatgcaaagaagctggaggataccagaagtaaagtacatggagcaagaccagtcagaaggttactggagttgttcaggcaaagggtaatggcagcctggactactgtaatggtaaaggtgatggagagaaatgaaagctctgagaaatatctcagaagagaaatcaaaaagttctgggtgatggattgggttaagggtaagcgagaggaaaatgccaagaataagacatgagcatctgggtggacaggggtggctaagaatgaacaggtttgctatgggagcagcagtcacaaactgagttctagaccagttaattttgtgtccaggtgtacataagcaagttggaagatgga

SEQ ID NO: 56391 - DNA, 687 bp, Homo sapiens
ctcagattcttaattgactcaaatctggacagccccttttgccatgtaaagtaacattcctagattctggtgattaagacatttttgatggtgactaccataccatggaacctttttttttgcagatggcttgggaaaagatgcactaatacacataaatgctatgtttctgatgataaatcatagtactgctttgtccttttagtgcaagtgtttatgtttttgcgggaaaatacaacaaattatgacatataaatggagtgtcttttttttttgagatggagtctcactctgtcacccaggccggagtgtagtggcacgatctcggctcactgcagcctccgtctccctggttcaaatgattgtcctgcttcagcctcccaagtagctgggattacaggtgcccaccaccactcctagctaatattttttgtatttttagtagagatggggtttcaccatgttggccaggctggtctcgaaatcctgacatcaaatgatccgcctgcctcggcctcccaaagtactggaattatgggtatgagccatcgcgcccagcctwaattgtcatttgaaaaaataactaatcaatactcttcaaaagtgtcaagatgatttaagttataagactgaggaactgttacagactgcaggaagctaaagaggaacaataactaaatgcaatgt

SEQ ID NO: 56392 - DNA, 1216 bp, Homo sapiens
ttgtcttttaatgttttttaaacactacatagcaactttttcccatgacaatatttattgatcatctttccagatcatcatgtctgaatctgtctcagtcttttagtcagataagatttccattgtgcatttttgttatttttgtagactgtacccaaatttatttacttagtagtctctgttgatagtcatttaataagtattgccaaattgtccttcataaagattgtacaaattgatactaccaaataccgtgaacgatagtactgtttttccacacccttattacattgtactatcatctttgccaggtgaaaataatacctgattgttaactagcatacctataattataaataaggttgagttttcttatgttttggtcaattatgatctgtgtcttttaaaatagtcttttctcctattttctgcttacttttgttcaggtcatataatggcttgaacccgggacgcagaggttgtggtgagcaacagtgcgagactccatctcaaaaacaaacaaaaaaaaaactttagaatgaaaaaaaatctttctaagcctcaaaactccaaaaaacaatttatgagaaattaacaaatatgataaaatttcaaattactacacatcataaacaaaaaattagaaaatatatttgtaatatatagagagagttctttttttttttttttgagatggagtttcacccttgttgcccaggctggagtgcaatggtgcaatctcggctcacgcaacctctgcctcctgggttcaggcgattctccttcctyagccgcctgagtaactgggattacagcggcctgccaccaagcctggctaattttttgtattttttagtaaagacggtgtttcactatgttggccaggctggtctcgaactcctgacctcatgatccacctgcctcagactcccaaagtgctgagattacaggtgtgagcccgacccattctgaagttttaaaagtacagttccatgtttactatttatagtttcatttaaaaatatttattaattttaagtttatattctcaatccagctagaatttaatttaatgaagagtgactttagattgtttttcttagtgactatctagtagtgccaatatttaatgaatgatcaatcttttctccactaataataatgataataagtttaatacatttggttctaattctgaactctttctttctagaga

SEQ ID NO: 56393 - DNA, 615 bp, Homo sapiens
aatttctctycactctgaggtaattgtctttctgctcagccttgctgcagtgagcaggtgagctgacagggccagagtaggctggagagcttgtctgccttgttattgttccaggtgtccttgtaccagacatgaggtcggggagaatagagttcatgttttctctgtgccagccttgagcccttgctaacgactttcttcatgaaaagagaagtagctgaccattactcagcacctacttggcttcgagcactttcctagcattctacctatgactttaatcttccccacacccccatgatataggtattattctattttacagatgaagaaaccgaggcccagacacattaagtatcgtgccaaaatccagtggcatggccaggacttggactcccattcaagcccttgccatttctactcagccacgtttacaaacacctagggtttgaatggcgatgtccgatggcaggctgaccctccactgcccatctgcaaggggcctctaggagctaccagctgcctctctttcacccggatttcactggataattttggagtcacctgactgagggacctgtcataagcattcccccgcccccacataccctgtag

SEQ ID NO: 56394 - DNA, 615 bp, Homo sapiens
aatttctcttcactctgaggtaattgtctttctgctcagccttgcwgcagtgagcaggtgagctgacagggccagagtaggctggagagcttgtctgccttgttattgttccaggtgtccttgtaccagacatgaggtcggggagaatagagttcatgttttctctgtgccagccttgagcccttgctaacgactttcttcatgaaaagagaagtagctgaccattactcagcacctacttggcttcgagcactttcctagcattctacctatgactttaatcttccccacacccccatgatataggtattattctattttacagatgaagaaaccgaggcccagacacattaagtatcgtgccaaaatccagtggcatggccaggacttggactcccattcaagcccttgccatttctactcagccacgtttacaaacacctagggtttgaatggcgatgtccgatggcaggctgaccctccactgcccatctgcaaggggcctctaggagctaccagctgcctctctttcacccggatttcactggataattttggagtcacctgactgagggacctgtcataagcattcccccgcccccacataccctgtag

SEQ ID NO: 56395 - DNA, 615 bp, Homo sapiens
aatttctcttcactctgaggtaattgtctttctgctcagccttgctgcagtgagcaggtgagctgacagggccagagtaggctggagagcttgtctgccttgttattgttccaggtgtccttgtaccagacatgaggtcggggagaatagagttcatgttttctctgtgccagccttgagcccttgctaacgactttcttcatgaaaagagaagtagctgaccattactcagcacctacttggcttcgagcactttcctagcattctacctatgactttaatcttccccacacccccatgatataggtattattctattttacagatgaagaaaccgaggcccagacacattaagtatmgtgccaaaatccagtggcatggccaggacttggactcccattcaagcccttgccatttctactcagccacgtttacaaacacctagggtttgaatggcgatgtccgatggcaggctgaccctccactgcccatctgcaaggggcctctaggagctaccagctgcctctctttcacccggatttcactggataattttggagtcacctgactgagggacctgtcataagcattcccccgcccccacataccctgtag

SEQ ID NO: 56396 - DNA, 1277 bp, Homo sapiens
cattcaactagtaattcacatatagatttccatttggctgaagaaagttttgttttcctgggtctgttcttaattartaattcgattcaagtttaattaacattgtctagtgattgtttttgcttccttagcattcttcaaactattagctttgaaatttgaagtagctatctcaagtggataaagaacagtcttttttcttaaagacaatttcttcagtaggaaagattgtaattcagttatttgcaattggtatcaattggtggagcagagactaggggttgcggcagaggccatgatagtaggagctgcacccgtcccctgagacccctgctgcccacgtgcctgctgggtaaacacaggttggaccgactcacaaccaaaatcttgatccagtgtgtggacgtaaaaatcttcctggcatatttttgaaacctgattgcaaaggagatttttttttttttggaaagcctgagtatctaagaggcatgaaaataacgcatcattttagagagattctatgtgacaagagaaataaataatgtcatgacttcaactttttttaaaaacgcttttcagaaatgtgtagagaaacccaattatggaaacaattgataattgctagaactgatgttctttagaatggagaatattcagaaagagaaacctaggaaaaaattcattagctcgatccacaatgtagcaaaagtgttggaagaaaagcaaatcccaaatggaaggtaacaggctgtcccagttgtctattgccccctagggactattcccagaggctttccttcaggaagtagaggatgacaatatacatttgagcccaggcccaaacagctgccccgttgatgcctttttttttttttttttttgagacagagtcttgctctgtcacccaggctggagtgcagtggcatggtcttggctcactgcaacctctgcctcccgggttcaggcaagtctcctgcctcagcctcccgagtagctgggactatagtcatgtgccaccacacccagctaaatgttttgtattttttggctagagatggggtttcaccatgttggccaggctggtctcaaactcctggcctcaagtgatctgcctgcctcggccttccaaagtaccctttgatgactcttttgtggcaggtcttgtaatttagtggtaaagagctcagatctgagctggaatcctggcttcaccaccgacaggtcataccatatttgacgaatcacttaatctctgaatctgcaaaatggggatagca

SEQ ID NO: 56397 - DNA, 1277 bp, Homo sapiens
cattcaactagtaattcacatatagatttccatttggctgaagaaagttttgttttcctgggtctgttcttaattaataattcgattcaagtttaattaacattgtctagtgattgtttttgcttccttagcattcttcaaactattagctttgaaatttgaagtagctatctcaagtggataaagaacagtcttttttcttaaagacaatttcttcagtaggaaagattgtaattcagttatttgcaattggtatcaattggtggagcagagactaggggttgcggcagaggccatgatagtagsagctgcacccgtcccctgagacccctgctgcccacgtgcctgctgggtaaacacaggttggaccgactcacaaccaaaatcttgatccagtgtgtggacgtaaaaatcttcctggcatatttttgaaacctgattgcaaaggagatttttttttttttggaaagcctgagtatctaagaggcatgaaaataacgcatcattttagagagattctatgtgacaagagaaataaataatgtcatgacttcaactttttttaaaaacgcttttcagaaatgtgtagagaaacccaattatggaaacaattgataattgctagaactgatgttctttagaatggagaatattcagaaagagaaacctaggaaaaaattcattagctcgatccacaatgtagcaaaagtgttggaagaaaagcaaatcccaaatggaaggtaacaggctgtcccagttgtctattgccccctagggactattcccagaggctttccttcaggaagtagaggatgacaatatacatttgagcccaggcccaaacagctgccccgttgatgcctttttttttttttttttttgagacagagtcttgctctgtcacccaggctggagtgcagtggcatggtcttggctcactgcaacctctgcctcccgggttcaggcaagtctcctgcctcagcctcccgagtagctgggactatagtcatgtgccaccacacccagctaaatgttttgtattttttggctagagatggggtttcaccatgttggccaggctggtctcaaactcctggcctcaagtgatctgcctgcctcggccttccaaagtaccctttgatgactcttttgtggcaggtcttgtaatttagtggtaaagagctcagatctgagctggaatcctggcttcaccaccgacaggtcataccatatttgacgaatcacttaatctctgaatctgcaaaatggggatagca

SEQ ID NO: 56398 - DNA, 1361 bp, Homo sapiens
tgcatgcttttcaaatattcctccgagtctggaatgtagagacagcttaggagctcagaatctgaacattgtcactgtagcctgctctccagtttcaaattcactttgctttctttcctgttttaatttttattttttccaggtgtggagattggttaagcggccacaacatactcttatttaacaacatcagtgccgactgcttgaggactcagttagctaaattggcactggggccgacatgtgactttttgaccctacaattgcaagtatggagctgtttgttttttcagaagtgtctaaaacatgtggaacaggtataaagtttccacatgagccaacttctttggtttgctctgatttaaacaaactgcttcccacagctgtgccaagaatattctttccagtctcatctttttgagcaactccaagctcagagctttccaaaatggaattttaccatgtctcagatgtggcaaaatcttaaaccaacacttctccatgccagaataatagcaacctagctcaggaagaaatcaaagctgcatttctattaaacaagattattaacatggtagaaaagaggagactattttgttaatgatcaaatatacaggcttcagccaactaaagctttgaagcaaataattgtagatagaatccctcactggagctaatcattacagcaaatgacatttgaaatcttctttcctactaactataggaattgaacactaaaacaagttgccagcacagcatttgatcttctgagctcaaagtgcacttgctccaaattgcagagccttgaactcagttgggacaatgccttcttctgcccaaatgagctaaaaataagttgcagtgaaacttactaatctagtgtatgctagtgacaaaaactgagtcctggcaaagctgcagggaatagagttgagtgctggcayaaagcaagctccaaatagcttgtctcacttcttgtctggaattacctgcccattccttgagccagtcggcccaagtggcttacatgagctaaccaagaaatcaaggcttctgtgggtcagttagctctgctggggttttcagtccaagactgcacccctcacttggtcattcacccatttaaaatgcaagctccttctcccctgggagcaaccagcctgcggagggtgagggaaaaaattctctaccttcgctaaaacagctcatgggtttttgcaagtgatagactgggatcttgtcatatcaaaaatggaaagaagacaaggctactgtggattctaggttggtgaatagaatatggagtgaatatcccattcaaaagaggccctatttttcaaatttaatataataagtatgca

SEQ ID NO: 56399 - DNA, 676 bp, Homo sapiens
ccacttacagaagaggaggacaaggcccagagaagatcccccagactcagccagggcacgaggggtcgggtgagttttgagatcgatagagccttctttcactctcctgtgacgacatgacagtagataaaaagcatataccttcatgcactctcatgggctctggcaccatgtttagagtygggctagggttctttgcaatctggtaacctatggcttaaacttatacccaaacctctcttcctgcttcttgtctgtgcacatcctcttcccatcagaccatccatagctcaagctcaacagctttcccagctagtgttcctcctcccttttccatggagtgcaggaagcaaggcagaattcctcatctctgccttaatgtccagttcactttccatcttcccaagtattgttagtgccccttcaaacaagaaaggacaggtagtcatgtttgtaggtggcattcaagaagcaataagttggtttatacatggttgtccagatggccacattctgttgatagctctgacatggaactatctttctcagcaacaataacattcccaaaaagtatcagccagaaaacagctagcctgacggccacagatggcctcagcacagaagcaaattcatgtgtctaatactttggggagctgggctttaacaaggcagattt

SEQ ID NO: 56400 - DNA, 2148 bp, Homo sapiens
tgggtaacaagagtgaaactccatctcaaaaaaaaaaaaaaagaatggtcccctataaccttgaagccaacccaaggttttccaaggttttcactctttcctcccctgccctcctcaaagatactatctaaagtcccaacttaacagtgatatgagaactcaatgatatcataataacatttgtgtatcactttacttttccatatgttttattaaactaggtgtataatatatgagtgatgatacttacaatttacgatatggaaactagttcagaggctcaaaaagattacctcaaagtcactgggctagcaaaggcaggactcacattctggtcttckggctccaagtctgtgctctttgcactaaagggtgctttgctttcatcacagaaacctcaaataatgtgtacttaagtgagtgaaatattgtacctattttaatagatattcagtgttacgggcatatgccaaaggtaaagtttcttgctaccccagaatttgacaagtcaaagccaggatcctcaaatctacataatataatattttcacatttaagacagaaaaagctttcatacatttattgagacacagatgcagcactggtagcatttaaattatagtgctgtgctccgatgtgccccgatcccatcgttgttttcgttcattttaaaaatgagcacgacattcctgaagatttcttacacatctttttacaactagttacgaattcaaatcaggtggcaatcccaggatccagctgttgcttctcagctcacaaaaatctccgcaaacctcccagagtgctaaattactacctcagtcctcttcgtttaacctcaaactgggtcaccctctaatcaagaaaaattaatgactagcaacatatttttcttttcctcttaattagagtaattccaccctggcagtaactctcagactgaactatgctaataacgaagttttaattcagaaaaaaagcaacaagcaatcaaaagtaactaagccatcccattcctggttgactgctagtcatgagttcaggccagtgtccagtttaccatgaagctaatgaggctccagcttcagggccccaagaaataagttcacatgatcataggtttttgtaagttttttagcagcaagacattttaaccacaattggttatgactcacctctctttccattgtaacttttcctccagcttacttcccctcagactgcagagtactggagtggctgctagaattttgggaatctagataaggattcatttttagtttgagtttggagggctatatgtatgcaatctgtagtcactttcgtgtataggtaagttagcgctggctgtcctggtacagaaatggttttcatgaatacacctgctactcactgggaccactcacccatgcggcaaaactgggggcagagggcagaagtcacactgcattagactgcacatactgggcaaagtgcttaacctcttggagcctcagttgtccacctttaaaatgaggataatgtcagcacctatctcaaaggttgtgagttattaaaatagattattattattactattactattattaagactaacatgacttactgtgtatcaggcacagtgttacttgcttaacatacacaatctcaattaatcccaggtttagagaaatgaagtaatttaccaaaggtgacacagcttataaactggggagccacgagataaatatgggcatcctttaacccacgatgctacttatttgcgggctaaatctagacactcaatgtcatcattaaactgggtcaagccaaggccaagtgctcactggagattgatggcaatcaaggtcaggctgggagccatgtaagacacacagaaagtctagggtgtagtccaaggatcaggacaggtatcataagctgcagggaaacattagcaaaaacaactagtgccaagcacattgttaggcatgttacctatgtgtaattggtatcattttatacttattaaaccaccaaaagaagtttgaaaataaaataataacatccaatgctggcaatattttgccagcctgctacattcatttattcatgtcaggtatataaattgctacactctgctggaaagcaatttgacaatatatatat

SEQ ID NO: 56401 - DNA, 2148 bp, Homo sapiens
tgggtaacaagagtgaaactccatctcaaaaaaaaaaaaaaagaatggtcccctataaccttgaagccaacccaaggttttccaaggttttcactctttcctcccctgccctcctcaaagatactatctaaagtcccaacttaacagtgatatgagaactcaatgatatcataataacatttgtgtatcactttacttttccatatgttttattaaactaggtgtataatatatgagtgatgatacttacaatttacgatatggaaactagttcagaggctcaaaaagattacctcaaagtcactgggctagcaaaggcaggactcacattctggtcttctggctccaagtctgtgctctttgcactaaagggtgctttgctttcatcacagaaacctcaaataatgtgtacttaagtgagtgaaatattgtacctattttaatagatattcagtgttacgggcatatgccaaaggtaaagtttcttgctaccccagaatttgacaagtcaaagccaggatcctcaaatctacataatataatattttcacatttaagacagaaaaagctttcatacatttattgagacacagatgcagcactggtagcatttaaattatagtgctgtgctccgatgtgccccgatcccatcgttgttttcgttcattttaaaaatgagcacgacattcctgaagatttcttacacatctttttacaactagttacgaattcaaatcaggtggcaatcccaggatccagctgttgcttctcagctcacaaaaatctccgcaaacctcccagagtgctaaattactacctcagtcctcttcgtttaacctcaaactgggtcaccctctaatcaagaaaaattaatgactagcaacatatttttcttttcctcttaattagagtaattccaccctggcagtaactctcagactgaactatgctaataacgaagttttaattcagaaaaaaagcaacaagcaatcaaaagtaactaagccatcccattcctggttgactgctagtcatgagttcaggccagtgtccagtttaccatgaagctaatgaggctccagcttcagggccccaagaaataagttcacatgatcataggtttttgtaagttttttagcagcaagacattttaaccacaattggttatgactcacctctctttccattgtaacttttcctccagcttacttcccctcagactgcagagtactggagtggctgctagmattttgggaatctagataaggattcatttttagtttgagtttggagggctatatgtatgcaatctgtagtcactttcgtgtataggtaagttagcgctggctgtcctggtacagaaatggttttcatgaatacacctgctactcactgggaccactcacccatgcggcaaaactgggggcagagggcagaagtcacactgcattagactgcacatactgggcaaagtgcttaacctcttggagcctcagttgtccacctttaaaatgaggataatgtcagcacctatctcaaaggttgtgagttattaaaatagattattattattactattactattattaagactaacatgacttactgtgtatcaggcacagtgttacttgcttaacatacacaatctcaattaatcccaggtttagagaaatgaagtaatttaccaaaggtgacacagcttataaactggggagccacgagataaatatgggcatcctttaacccacgatgctacttatttgcgggctaaatctagacactcaatgtcatcattaaactgggtcaagccaaggccaagtgctcactggagattgatggcaatcaaggtcaggctgggagccatgtaagacacacagaaagtctagggtgtagtccaaggatcaggacaggtatcataagctgcagggaaacattagcaaaaacaactagtgccaagcacattgttaggcatgttacctatgtgtaattggtatcattttatacttattaaaccaccaaaagaagtttgaaaataaaataataacatccaatgctggcaatattttgccagcctgctacattcatttattcatgtcaggtatataaattgctacactctgctggaaagcaatttgacaatatatatat

SEQ ID NO: 56402 - DNA, 2148 bp, Homo sapiens
tgggtaacaagagtgaaactccatctcaaaaaaaaaaaaaaagaatggtcccctataaccttgaagccaacccaaggttttccaaggttttcactctttcctcccctgccctcctcaaagatactatctaaagtcccaacttaacagtgatatgagaactcaatgatatcataataacatttgtgtatcactttacttttccatatgttttattaaactaggtgtataatatatgagtgatgatacttacaatttacgatatggaaactagttcagaggctcaaaaagattacctcaaagtcactgggctagcaaaggcaggactcacattctggtcttctggctccaagtctgtgctctttgcactaaagggtgctttgctttcatcacagaaacctcaaataatgtgtacttaagtgagtgaaatattgtacctattttaatagatattcagtgttacgggcatatgccaaaggtaaagtttcttgctaccccagaatttgacaagtcaaagccaggatcctcaaatctacataatataatattttcacatttaagacagaaaaagctttcatacatttattgagacacagatgcagcactggtagcatttaaattatagtgctgtgctccgatgtgccccgatcccatcgttgttttcgttcattttaaaaatgagcacgacattcctgaagatttcttacacatctttttacaactagttacgaattcaaatcaggtggcaatcccaggatccagctgttgcttctcagctcacaaaaatctccgcaaacctcccagagtgctaaattactacctcagtcctcttcgtttaacctcaaactgggtcaccctctaatcaagaaaaattaatgactagcaacatatttttcttttcctcttaattagagtaattccaccctggcagtaactctcagactgaactatgctaataacgaagttttaattcagaaaaaaagcaacaagcaatcaaaagtaactaagccatcccattcctggttgactgctagtcatgagttcaggccagtgtccagtttaccatgaagctaatgaggctccagcttcagggccccaagaaataagttcacatgatcataggtttttgtaagttttttagcagcaagacattttaaccacaattggttatgactcacctctctttccattgtaacttttcctccagcttacttcccctcagactgcagagtactggagtggctgctagaattttgggaatctagataaggattcatttttagtttgagtttggagggctatatgtatgcaatctgtagtcactttcgtgtataggtaagttagcgctggctgtcctggtacagaaatggttttcatgaatacacctgctactcactgggaccactcacccatgcggcaaaactgggggcagagggcagaagtcacactgcattagactgcacatactgggcaaagtgcttaacctcttggagcctcagttgtccacctttaaaatgaggataatgtcagcacctatctcaaaggttgtgagttattaaaatagattattattattactattactattattaagactaacatgacttactgtgtatcaggcacagtgttacttgcttaacatacacaatctcaattaatcccaggtttagagaaatgaagtaatttaccaaaggtgacacagcttataaactggggagccacgagataaatatgggcatcctttaacccacgatgctacttatttgygggctaaatctagacactcaatgtcatcattaaactgggtcaagccaaggccaagtgctcactggagattgatggcaatcaaggtcaggctgggagccatgtaagacacacagaaagtctagggtgtagtccaaggatcaggacaggtatcataagctgcagggaaacattagcaaaaacaactagtgccaagcacattgttaggcatgttacctatgtgtaattggtatcattttatacttattaaaccaccaaaagaagtttgaaaataaaataataacatccaatgctggcaatattttgccagcctgctacattcatttattcatgtcaggtatataaattgctacactctgctggaaagcaatttgacaatatatatat

SEQ ID NO: 56403 - DNA, 1440 bp, Homo sapiens
aatggtcaatattgatctccacrcctcctttggatccctgagtcaaatgtctgggctataagaatttctctggaggggctgtactccctccccaaggtggctgagtaacattctacatatggcaggcacatggctgcacattctctcatggtgtgggattgggtgttgattgacacagcacaaatagaaactttattttatattcccaaagctcaactcagctgtacttctcaccacgtggcaaaggatggaccaaaggctgggagcaactgggagtgtctgggtgagtttggatatttaattttgctctgatccattgagagacagagagggaagaaattgtgtggcacagagcctctggagtgtaagtgacactctgaaagcattcccttcttcctctgcggcttctcccggatctcatagaaatagggggccacatagaaaatgcctaaatttaaagtctaactggtgcatttagggaattgagggagaagggaactcttctaaactagtagaaagacccccaacatagaagtaagaaaaaaacctttaaaatacctgaagacatattaaaataaatagggctgccttgcttttcccttcctgacaagattttttatgtaaccacacaagcacaatcactgtgtctggaagatttggggactccacaaacacatgatggattcaagacagaggcttggagggctgtgctgatgggggttgaaccccagagaaagattcttgtgtagtcccatggattataacccctccccatataccatatttcattgtatctaaggatccatccagtgtaatagaggccattattttatgtttcactaagaaatacaagtagtcacctattaaattatgttatgccattgattgtaagatgcattttgattttacagatgttaatacatgaacaacttaagaataggtgaggtacagtagtcaaagatctacaaatcctagcaggcagcagagaggaccagcccttcatccagttctctttatcagcacactaagatgtatgcccagaacttccttgggcttctctttagtgagctgagtaggccttcctttatatctcacccagctggcgattagaggtggctctggccttctccacgtctcctatgcgctttggaaagttaaaattgtcttcaaagttctgagatgagcatatttgtgaaatggatggtatatgcttttcagacatctccatcttgctgaatccaatttattgttgtggcactccattgacaattctccctaatactgtgtggcttcataccccatgctgcctatccaggctatactgtggaacccaatcactgtgtttatgttgagaaggttctccaaactcctttctttttttaatctctccacatcaaaacttatctgtccgggtcctattcccttaagtccttgctaggt

SEQ ID NO: 56404 - DNA, 1440 bp, Homo sapiens
aatggtcaatattgatctccacacctcctttggatccctgagtcaaatgtctgggctataagaatttctctggaggggctgtactccctccccaaggtggctgagtaacattctacatatggcaggcacatggctgcacattctctcatggtgtgggattgggtgttgattgacacagcacaaatagaaactttattttatattcccaaagctcaactcagctgtacttctcaccacgtggcaaaggatggaccaaaggctgggagcaactgggagtgtctgggtgagtttggatatttaattttgctctgatccattgagagacagagagggaagaaattgtgtggcacagagcctctggagtgtaagtgacactctgaaagcattcccttcttcctctgcggcttctcccggatctcatagaaatagggggccacatagaaaatgcctaaatttaaagtctaactggtgcatttagggaattgagggagaagggaactcttctaaactagtagaaagacccccaacatagaagtaagaaaaaaacctttaaaatacctgaagacatattaaaataaatagggctgccttgcttttcccttcctgacaagattttttatgtaaccacacaagcacaatcactgtgtctggaagatttggggactccacaaacacatgatggattcaagacagaggcttggagggctgtgctgatgggggttgaaccccagagaaagattcttgtgtagtcccatggattataacccctccccatataccatatttcattgtatctaaggatccatccagtgtaatagaggccattattttatgtttcactaagaaatacaagtagtcacctattaaattatgttatgccattgattgtaagatgcattttgattttacagatgttaatacatgaacaacttaagaataggtgaggtacagtagtcaaagatctacaaatcctagcaggcagcagagaggaccagcccttcatccagttctctttatcagcacactaagatgtatgcccagmacttccttgggcttctctttagtgagctgagtaggccttcctttatatctcacccagctggcgattagaggtggctctggccttctccacgtctcctatgcgctttggaaagttaaaattgtcttcaaagttctgagatgagcatatttgtgaaatggatggtatatgcttttcagacatctccatcttgctgaatccaatttattgttgtggcactccattgacaattctccctaatactgtgtggcttcataccccatgctgcctatccaggctatactgtggaacccaatcactgtgtttatgttgagaaggttctccaaactcctttctttttttaatctctccacatcaaaacttatctgtccgggtcctattcccttaagtccttgctaggt

SEQ ID NO: 56405 - DNA, 1440 bp, Homo sapiens
aatggtcaatattgatctccacacctcctttggatccctgagtcaaatgtctgggctataagaatttctctggaggggctgtactccctccccaaggtggctgagtaacattctacatatggcaggcacatggctgcacattctctcatggtgtgggattgggtgttgattgacacagcacaaatagaaactttattttatattcccaaagctcaactcagctgtacttctcaccacgtggcaaaggatggaccaaaggctgggagcaactgggagtgtctgggtgagtttggatatttaattttgctctgatccattgagagacagagagggaagaaattgtgtggcacagagcctctggagtgtaagtgacactctgaaagcattcccttcttcctctgcggcttctcccggatctcatagaaatagggggccacatagaaaatgcctaaatttaaagtctaactggtgcatttagggaattgagggagaagggaactcttctaaactagtagaaagacccccaacatagaagtaagaaaaaaacctttaaaatacctgaagacatattaaaataaatagggctgccttgcttttcccttcctgacaagattttttatgtaaccacacaagcacaatcactgtgtctggaagatttggggactccacaaacacatgatggattcaagacagaggcttggagggctgtgctgatgggggttgaaccccagagaaagattcttgtgtagtcccatggattataacccctccccatataccatatttcattgtatctaaggatccatccagtgtaatagaggccattattttatgtttcactaagaaatacaagtagtcacctattaaattatgttatgccattgattgtaagatgcattttgattttacagatgttaatacatgaacaacttaagaataggtgaggtacagtagtcaaagatctacaaatcctagcaggcagcagagaggaccagcccttcatccagttctctttatcagcacactaagatgtatgcccagaacttccttgggcttctctttagtgagctgagtaggccttcctttatatctcacccagctggcgattagaggtggctctggccttctccacgtctcctatgcgctttggaaagttaaaattgtcttcaaagttctgagatgagcatatttgtgaaatggatggtatatgcttttcagacatctccatcttgckgaatccaatttattgttgtggcactccattgacaattctccctaatactgtgtggcttcataccccatgctgcctatccaggctatactgtggaacccaatcactgtgtttatgttgagaaggttctccaaactcctttctttttttaatctctccacatcaaaacttatctgtccgggtcctattcccttaagtccttgctaggt

SEQ ID NO: 56406 - DNA, 1308 bp, Homo sapiens
tgcatattgatgatggtgatgatgacccttttgttctgagctattagaagtaaatggcatataaagtaattaaaataacagaattctgggaagtggtggaatgagaaattaaaaactgatataattttacatccttgtggaaatccattgatcataattagcacataagctaaatcagaataaatgggtagattctaaagtacgagcataatatcataggttatggataatgtattttctttttatttaatggatatatgattggttctcaaatgctgttcaactggtaatggaaatgggtttcccttaaaagccttttttctaagctttcatagcaccaagacattayggttttcttcaaatgtgatgtagaccccatgtacatgctgtcaacttaaacaggtactagaatagacagctctggggtgaagggcaagggtcaaacaatcagaggtggccatctattgcagagatcatcaaacaggcatggcatcaatggattcaggcaagaatgttagaaattaatcagctcagctctcagtgtttagccaggctgattatatatgccctggaatgtgagcatgcgatgacaggcctgagaaactaaagtaataagagtccattcccaacaaaggccgggaagacggatcaatttgcaatattcttttctgcacccatgcaacaaagcagaaacatgaaagcagaacactaagggatgctccctatgaactggacaaatcaataaacatcagtggtaaagaaaaaaagtttctcattctcttgggtaccctgagggcttttccatctcaggaaagtgatgagtggtggtggcctctgtcatgttcccttcacctacacggtgtcgtctcctgccgtctcaaggtgaacactgctaagcatcggcagaaggaggattttgtgggagtgtttaaggaaatgactgcctcttgttagagatgcgctatgctggccaggaggtggatggacaactctgtctgtggcctcggggggatacattgaagggagggtcaaatgaagtaagatagtgggtctccctagccccccaaccatactaaatgaaccaggtgagtcttttctactgtcagtgtttgaaaggctgcataatattgagggtcctctttattttcctggacttaagtcatcaatggagagcaagaaaaatagtcagcagacaaagaatagccaggaagcaatttagagatagaagaatatgcttaggtctaagacagactattaacagcttgattccaattctggcataatgtggcagagacccagatctcaatg

SEQ ID NO: 56407 - DNA, 807 bp, Homo sapiens
cagatgagccatggaattgtcaacctattgtcatcttaacaggagtttactgaagcaatgtaaataacacttcactagaaagctgcaggttctgacttgcaaataatatagtccaagagctcccaataacacgtgacagtaatgcaagatgttccctgcgaacaccatgtcagtcagacataaaggttgattcatgacatctggaaacagctgccttttactgaaagacaaagaaatttcaaattgcattaaatacagcctgctaatatgcttaccttccatccacaaatcattggcagacatttggggctgagatttcctcacattgtcacaaaaattaggtcagagtaataaatagaaaagatgttagaatttggacaaggaggtaacaagcagatccccaaataggtcaaaaacagcaaagccaatcaaaaccatttaggactgtgactgtggttatccaaaagtgacagggtctgggagtacatgtggatgaactgaactataacattattcttgaaagattgtctccattcaacaacatcaatatatatcacccrgaaacctactattaaattagtgtactcctgtctcatctaaatctagatcattgctaattatacatgatgcttttttcagagcttaaatgtaggagtcaggaataacaggattcaaatataggcccttcaatgtgatgttcctaaaatactttttttttttccccacaaagtctactgtttgtcatctttagcatgggagatgccaatggtaccaacatctttggattattataaggtttgaatcaga

SEQ ID NO: 56408 - DNA, 1287 bp, Homo sapiens
tgcatgttaaaatttcaaaatcccttctcaataacaaaatttaggaaaatataggaaaggtagagagaaggacagttttggtgtatgtattagttcattctcacactgctataaagaactacctgaggctgggtaatttataaagaaaagaagtttaattgactcacagttccacatggctggggaggcctcaggaaacttacaatcatggcgaaaggcaaagggcaagcaagtacatcttaccatggcgaagcaggagagagagagcaagtgaaggcagaagtgccacacttttaaaccrtcagatccagatctcataaaaactcacttactatcacgagaatagaatgggggaaatctgcgcccatgatccaatcacctcccaccaggaacctcccctgacatgtggggattacaattcaacatgagatttgagtgggggcacaaatccaaaccatatcagtgtttgcctcctgtttttcctccatgcgttgatttctttttacatagttatcgtcaccctgctgtacagttttgcagcttggttttcacttaacctcatcataagcatctttatgtgttatcacatcctttttcataaacatttcaaatagttgcccaatcgtccattaagcagaggttctctggttaattatatttaatttcttctagtgagatgcttgggtgatttaatttttttatattgtaagtaacttagcaataaaaaactttgtgtctaggaaattacatatttaggatttcttttttcttggagaaattcccagaaaaaaagttgaaaagtaaagccttcttctttattataaaatgagtatattcttattataaaaagttattaaaatctgagaacatgaatttttaaatgtgataaatttgcataaacctacacacaaataggtgtgtgtaaaaactcatgaaatctgaataaggtctatagtcaagctaacagcattgcactgatgtcaactttctgggtttgatgctgtacaatattatgcttctgaatgtattcattcatactgttgtgagtagttggagaacctttgttctcattagactatcatattccattgtgtgtctataccacacaagatgtaaccattggaagaatctgggagaaggatacatggggttttctgtattatttttccaaattacagtgagtctgtgattattttaaaataaaaggttaaaaaatatgagagagagaaggaaaaaaaagcccatcactcaagcacaaaccctgttaaagttttgatatatttctct

SEQ ID NO: 56409 - DNA, 1196 bp, Homo sapiens
gcgaattgaacaatgagaacacttggacacagagtcaggaacatcacacactagggcctgtcgggtggggggaggggggagggatagcattaggagatatacctaatgtaaattacaagttaatgggtgcagcacactaacgtggcacatgtgtacatatgtaacaaacctgcacgttgtgcacatgtaccctagaacttaaagtataaaaaaaatgcttacacatcactgtataatccttttaaagaaaacgtatttatatatattcacatggcagacttctgttgcataggtagaatatataatcaaactgcagaatgcatatttaattagattttaaaaaataagtatatatattcatgtgcatattaaaaaggtctgaaagaatgtacagcaaaccattttaaagtagttctggaaactgcmatcagcagggccaaagggaatatatttactttatgaatggacagatttgagtttctccggtaagaatatatcgctttgtaatacaaataagtagccaccagaaaacataaatgcactgggtaagttcacatactttttttttgagactctgtagctcacgctggagtggtgtgcgatcacggctcactgcagcttcagcctcccaggttcaagctcagcctccggagtagctgggacagcaggccagcactacaacgtctaaataatttttgtattttttttaagagatggggtcccactatgttgcccaggctggtcttgaactcctggactccagtgatcagcccacctcagcctcccaaagtgctgggattacaggtgtaagccactgggcctggatgttcatattatttaaaataaatcttttcacaacaaaaatctattggctcttttataaatatgaaatttaacacatttcttctaatacaatgtatctccaggttactgaattaaagacttcctaagatattcactgaagcgttacctataaaaatatacactgggaacacttaaatgcttataataatcaatagttaagtaaatgactaaatatcaacccaagagaatttttcaatttgcctattttgtttatgaattgcctacagttttataaggattttgaaagctaactcaacaaaaaataatgtgtataattatatagaatacatagcaatacaaaatacttatacatataagtaaaaaaaattcca

SEQ ID NO: 56410 - DNA, 1196 bp, Homo sapiens
gcgaattgaacaatgagaacacttggacacagagtcaggaacatcacacactagggcctgtcgggtggggggaggggggagggatagcattaggagatatacctaatgtaaattacaagttaatgggtgcagcacactaacgtggcacatgtgtacatatgtaacaaacctgcacgttgtgcacatgtaccctagaacttaaagtataaaaaaaatgcttacacatcactgtataatccttttaaagaaaacgtatttatatatattcacatggcagacttctgttgcataggtagaatatataatcaaactgcagaatgcatatttaattagattttaaaaaataagtatatatattcatgtgcatattaaaaaggtctgaaagaatgtacagcaaaccattttaaagtagttctggaaactgccatcagcagggccaaagggaatatatttactttatgaatggacagatttgagtttctccggtaagaatatatcgctttgtaatacaaataagtagccaccagaaaacataaatgcactgggtaagttcacatactttttttttgagactctgtagctcacgctggagtggtgtgcgatcacggctcactgcagcttcagcctcccaggttcaagctcagcctccggagtagctgggacagcaggccagcactacaaygtctaaataatttttgtattttttttaagagatggggtcccactatgttgcccaggctggtcttgaactcctggactccagtgatcagcccacctcagcctcccaaagtgctgggattacaggtgtaagccactgggcctggatgttcatattatttaaaataaatcttttcacaacaaaaatctattggctcttttataaatatgaaatttaacacatttcttctaatacaatgtatctccaggttactgaattaaagacttcctaagatattcactgaagcgttacctataaaaatatacactgggaacacttaaatgcttataataatcaatagttaagtaaatgactaaatatcaacccaagagaatttttcaatttgcctattttgtttatgaattgcctacagttttataaggattttgaaagctaactcaacaaaaaataatgtgtataattatatagaatacatagcaatacaaaatacttatacatataagtaaaaaaaattcca

SEQ ID NO: 56411 - DNA, 711 bp, Homo sapiens
aaaagaaagtttaaataaaaactcttcaagaattactatctatttaaagaaaatatgccataacaacttggtatacgtttttaagtcactgcaagaagcatttgggaagcttaaaaaaaaaagcaaggcagggggtgatgggaaagcgcgggtagtgaattaaaggtgtatgataatgagggtctggatagtgaagaagaggaaatgmagagggaatgggaaacccaaatcttaaatggtgaaaccagaaggcttcatgctaaactaagtattaggaacaaggatagcaaaaaagtgaaagattacttcaaagattctcactcacataatgaaagaaatctgaagtggcagggtggggtgacttttatttagaacaataggacaggccagtgtcaccataggccattcaaatgaagacgcttcccaccagcaggtagaaatttatttatttatttatttattttttgagatggaattttgctcttgttgcccaggctggagtgcaatggcgcgatctcagctcaccgcaacctccacctcccaggttcaagcaattctcccgcctcagccttccgagtagctgggattacaggcatgcgccaccatgcctggctaattttttttgtatttttagtagagacggggtttctccctgttggtcaggctggtcttgaactcctgacctcaggtgatccgcctacctcggcctcc

SEQ ID NO: 56412 - DNA, 628 bp, Homo sapiens
ttataaagcaacttttttttttttttcgagacagagtcttgctctgtcacccaggctagagtgcagtggtgcgatctctgcctcagcctcctgagtagctaggactacaggcgcccaccaccacgcccagctaatttttgtacttttagtagagacgggatttcaccatcttggccaaagctggtctcgaactcctgacctcatgatccacccgccttggcctcccaaagtgctgagattacaggcatgagccaccrcacccggctaaaaccctaacttgctaatcatttcaaatactgacttcttaaatttgaagattattattcagtatggaaaaaaaatcacagacttaggatataagcaatacttttttggcaggaggggaggatacttgaaaataatagaaaactatatactgggaaactggtgacaatgtgatctatccagtgttgtgcaacagaactttctacaatgatgggaatgttcagtgtctatgctgtccaatatatacctgctatgatttggatatggtttgtttgtacccaccaaatctcatgttgaaattttatccccagtgtgatattgcaggaaagtgggacataaggtagggtgtttgggtcatgggggt

SEQ ID NO: 56413 - DNA, 628 bp, Homo sapiens
ttataaagcaacttttttttttttttcgagacagagtcttgctctgtcacccaggctagagtgcagtggtgcgatctctgcctcagcctcctgagtagctaggactacaggcgcccaccaccacgcccagctaatttttgtacttttagtagagacgggatttcaccatcttggccaaagctggtctcgaactcctgacctcatgatccacccgccttggcctcccaaagtgctgagattacaggcatgagccaccgcacccggctaaaaccctaacttgctaatcatttcaaatactgacttcttaaatttgaagattattattcagtatggaaaaaaaatcacagacttaggatataagcaatacttttttggcaggaggggaggatacttgaaaataatagaaaactatatactgggaaactggtgacaatgtgatctatccagtgttgtgcaacagaactttctrcaatgatgggaatgttcagtgtctatgctgtccaatatatacctgctatgatttggatatggtttgtttgtacccaccaaatctcatgttgaaattttatccccagtgtgatattgcaggaaagtgggacataaggtagggtgtttgggtcatgggggt

SEQ ID NO: 56414 - DNA, 518 bp, Homo sapiens
tgacagccttgctcctaacaccccatagctcctcttctctcctccatgcattactgtgagagggctttgctgtccggttcttgccctctgagaatatgacatttttggtgtaacagtggatgctgtgtattatccatttttccagagggactaagttgtacttctcttttccttgatcccagtttctaggagctaatactgtgtccagaattggtgggttcttggtctcactgacttcaagaatgacgccgtggaccctcgcggtgagtgttacagttcttaaaggcggcgtgtccggagtttgttccttctgatgttcggatgtgttcagagtttcttccttctggtggggttcgtggtctcgctggctcaggagtgaagctgcggaccttcgctgtgagtgttacagctcttaaggcggcgcgtctgaagttgtttgttcctccgggtgggttcgtggtctcactggcttcaggagtgaagctgcagaccttcgcwgtgagtgttacagctcttaa

SEQ ID NO: 56415 - DNA, 518 bp, Homo sapiens
tgacagccttgctcctaacaccccatagctcctcttctctcctccatgcattactgtgagagggctttgctgtccggttcttgccctctgagaatatgacatttttggtgtaacagtggatgctgtgtattatccatttttccagagggactaagttgtacttctcttttccttgatcccagtttctaggagctaatactgtgtccagaattggtgggttcttggtctcactgacttcaagaatgacgccgtggaccctcgcggtgagtgttacagttcttaaaggcggcgtgtccggagtttgttccttctgatgttcggatgtgttcagagtttcttccttctggtggggttcgtggtctcgctggctcaggagtgaagctgcggaccttcgctgtgagtgttacagctcttaaggcggcgcgtctgaagttgtttgttcctccgggtgggttcgtggtctcactggcttcaggagtgaagctgcagaccttcgctgtgagtgttacagctcwtaa

SEQ ID NO: 56416 - DNA, 688 bp, Homo sapiens
gtgtatatctcaagcaggacattttgggtttaaggatttacgttgtgtgttctttacccccagctctttagtagctggtgattgacagcatgtcaggagaaattttggccccagataatcctaaaatgaccacagtgtggtgttccccaagctgagttccgtggaacactagtccttgagagagacagggctgcgtgatcaaatctggttgggaagggcagactaccacacttccctcttgaagggccacagtgtattttggaatggtaaagcctctgagaagtgctacaagaaagaagttcagwagtcaggtgagcttcagaggagtatgattagtggctcaacaatgacatcaagaattcatcccagatatttccacatcaatttcaaactgaagatggttctttttatggtcacaagagggctgccactgacaagtagggcctcatgcttccttattcacgtccggaagagggaagggagagtgagaaaaaaactgcttttccaactgtctttcccttcagtttgattgggccaacttaagtcatgatagtcaccgggagactgctaggtactgatttactcacactaatcagatccaccgcttgaaagctgggaatggagttagcttccctgaagaacatgactgtgtggagcaggagtgaatttttggggaaaaaaaaggtaa

SEQ ID NO: 56417 - DNA, 688 bp, Homo sapiens
gtgtatatctcaagcaggacattttgggtttaaggatttacgttgtgtgttctttacccccagctctttagtagctggtgattgacagcatgtcaggagaaattttggccccagataatcctaaaatgaccacagtgtggtgttccccaagctgagttccgtggaacactagtccttgagagagacagggctgcgtgatcaaatctggttgggaagggcagactaccacacttccctcttgaagggccacagtgtattttggaatggtaaagcctctgagaagtgctacaagaaagaagttcagtagtcaggtgagcttcagaggagtatgattagtggctcaacratgacatcaagaattcatcccagatatttccacatcaatttcaaactgaagatggttctttttatggtcacaagagggctgccactgacaagtagggcctcatgcttccttattcacgtccggaagagggaagggagagtgagaaaaaaactgcttttccaactgtctttcccttcagtttgattgggccaacttaagtcatgatagtcaccgggagactgctaggtactgatttactcacactaatcagatccaccgcttgaaagctgggaatggagttagcttccctgaagaacatgactgtgtggagcaggagtgaatttttggggaaaaaaaaggtaa

SEQ ID NO: 56418 - DNA, 688 bp, Homo sapiens
gtgtatatctcaagcaggacattttgggtttaaggatttacgttgtgtgttctttacccccagctctttagtagctggtgattgacagcatgtcaggagaaattttggccccagataatcctaaaatgaccacagtgtggtgttccccaagctgagttccgtggaacactagtccttgagagagacagggctgcgtgatcaaatctggttgggaagggcagactaccacacttccctcttgaagggccacagtgtattttggaatggtaaagcctctgagaagtgctacaagaaagaagttcagtagtcaggtgagcttcagaggagtatgattagtggctcaacaatgacatcaagaattcatcccagatatttccacatcaatttcaaactgaagatggttctttttatggtcacaagagggctgccactgacaagtagggcctcatgcttccttattcaygtccggaagagggaagggagagtgagaaaaaaactgcttttccaactgtctttcccttcagtttgattgggccaacttaagtcatgatagtcaccgggagactgctaggtactgatttactcacactaatcagatccaccgcttgaaagctgggaatggagttagcttccctgaagaacatgactgtgtggagcaggagtgaatttttggggaaaaaaaaggtaa

SEQ ID NO: 56419 - DNA, 688 bp, Homo sapiens
gtgtatatctcaagcaggacattttgggtttaaggatttacgttgtgtgttctttacccccagctctttagtagctggtgattgacagcatgtcaggagaaattttggccccagataatcctaaaatgaccacagtgtggtgttccccaagctgagttccgtggaacactagtccttgagagagacagggctgcgtgatcaaatctggttgggaagggcagactaccacacttccctcttgaagggccacagtgtattttggaatggtaaagcctctgagaagtgctacaagaaagaagttcagtagtcaggtgagcttcagaggagtatgattagtggctcaacaatgacatcaagaattcatcccagatatttccacatcaatttcaaactgaagatggttctttttatggtcacaagagggctgccactgacaagtagggcctcatgcttccttattcacgtccggaagagggaagggagagtgagaaaaaaactgcttttccaactgtctttcccttcagtttgattgggccaacttaagycatgatagtcaccgggagactgctaggtactgatttactcacactaatcagatccaccgcttgaaagctgggaatggagttagcttccctgaagaacatgactgtgtggagcaggagtgaatttttggggaaaaaaaaggtaa

SEQ ID NO: 56420 - DNA, 620 bp, Homo sapiens
tagcacttaccaccaacttcatggtgcatactttcttatttatttttgtattgtcgatcttctccagtggcatgtaaatttatgagggttgggctttggtttgttttgtcccatgttctatttccagcacctagaatagttcctggaacatagcaggggctcaacacatattttttgaatgaacagtagctttacatgctctctttcttakttttatagaaccctgcaagctggttattatttacattttagaaatgaagcagctaagatgtggagaggttaagtacctattaatagtcacagatgctaataagcagcagagatagaatttgaatctagcctctgatttctccctgagccccagcttcatatatgactacctgttatatagaatagtagagacagcatctgaaacttacatccctgtggtatcatagaaagatatttggtctttgtctttggttcctggcacagagctcctagaacccagagctcctgcatgataagggttacagaacatcttgtgtactaatgaggtgactcttggcaagcccctggatagtttcaggatgggggctggtcaccagaaagaccaaccttgattagaaccttggaacttt

SEQ ID NO: 56421 - DNA, 2063 bp, Homo sapiens
caaaggacatatctttgggggaaaatgtctgtgtctgttttgctgaccttgaatacttcttctcggaaaaagaaaacagaataatggcacgtttttcttttttgatttattgtctggccctcatcagcccctgcctctcatagcattttgtttgacacctgaaagccagggggttgcattaaaattcttgcactttccatataatcgctggctctggggtgatttcagtaaaaggggcatggtgattgtcctggatgttagtgkggtgtcattaacattacttccagggtctaagtctatcgcgtggcaggggagagtgatacttaattggatttttgcaatcttaaaggcgacaattgctcctttctttagaagccatacattgagttcagagttgaacctgctcaattccagcattgcatctacctattaacttcacaggcagttaaacagaggagcataaaaccgcatgactaactgtgctcatagccgctgaaaaccagataagggaatcttgaaatcctttattccagcacactgtgagtactacatatattttcagtgataaataataatgcaaaatttccctttgtccacagtcctttgactgctccccactccctgtgaaaaagctcacatttattaattggaatgaaatttgagaaggtgattttggaaggccttaatagaaggaattgctaaaaagaacttgagaggacaggccccaggagagacacagaagagagagtaagcagcaatcctgaccattcatggtagcaatgggccaagattgcttgcagaccagtggttctgaaccctggctaaccataagaaccactgggaggctttaactgactctgatgcctgggccccaccccagacctaccaaatcagaatctcttggtaactggatatttgcgtatgttaaaagctcccaggtgattctcatgtgcagcgtgggtttgtgaacttttgctacagggcgatgacaatgctcatgcccgagggtttaggatatctgctaagggtgcaggtcttggaactatgattgttggggatcttgccaagctgtgcattcaagaacccttagaatcccattgtatgggctctcacccaactgtgtcggaactctgtgcactgaggtgcagctcatgccttcctcccttacctccttgattcctcaaactgcacatttgattttcttttttactgaatcagtattagcaaaaaagagttacaaatttggtggccaatgagctatgaatttgtgtcattgatggggctgtatgaaggttgacacttattcctgacccctagttttctcatctgtaaaatgtaaataataataatagtaataataatctaaatgtacttcttgaagcaggtcgtgattaaccctcccattgacattttcctcactggttactctgagcataaacaaagacatggactacattcatttggaagttgggcattattttaggcggtcctaaagggttctaactatgagctttacatggaagatcccatctgctgcttctggggatcctgtggacacacggggattgtccaggatgtgtaatgatgccattcattaaaagctaaaagtccaacccagccatcagagacctgagaaagtcagggttgggaagggactaaaatgatggctttagaaatagtataacagagtatttaggagatttgtgagggtgccctattaaagacaccagcatattacctccttggaataataacacctcacaaatggggaatataaaccacccttgggaggtgtggggagcacagttttctaaatatgaacttgattatctcgtaagacagagaatatggcacacagggtaacttggttttgatggagaaacaggaaaaaaaaaaaaaaaaggaaataagggagtgcctggtatgtagccttgctttaaaaatggtgctggatgaatgaagagctatatttgggttcccatattactgagttactcttttccataaatttgagctcaagaaagagcaattaaaaagacacaataggatgttcacaaaacacc

SEQ ID NO: 56422 - DNA, 2063 bp, Homo sapiens
caaaggacatatctttgggggaaaatgtctgtgtctgttttgctgaccttgaatacttcttctcggaaaaagaaaacagaataatggcacgtttttcttttttgatttattgtctggccctcatcagcccctgcctctcatagcattttgtttgacacctgaaagccagggggttgcattaaaattcttgcactttccatataatcgctggctctggggtgatttcagtaaaaggggcatggtgattgtcctggatgttagtgtggtgtcmttaacattacttccagggtctaagtctatcgcgtggcaggggagagtgatacttaattggatttttgcaatcttaaaggcgacaattgctcctttctttagaagccatacattgagttcagagttgaacctgctcaattccagcattgcatctacctattaacttcacaggcagttaaacagaggagcataaaaccgcatgactaactgtgctcatagccgctgaaaaccagataagggaatcttgaaatcctttattccagcacactgtgagtactacatatattttcagtgataaataataatgcaaaatttccctttgtccacagtcctttgactgctccccactccctgtgaaaaagctcacatttattaattggaatgaaatttgagaaggtgattttggaaggccttaatagaaggaattgctaaaaagaacttgagaggacaggccccaggagagacacagaagagagagtaagcagcaatcctgaccattcatggtagcaatgggccaagattgcttgcagaccagtggttctgaaccctggctaaccataagaaccactgggaggctttaactgactctgatgcctgggccccaccccagacctaccaaatcagaatctcttggtaactggatatttgcgtatgttaaaagctcccaggtgattctcatgtgcagcgtgggtttgtgaacttttgctacagggcgatgacaatgctcatgcccgagggtttaggatatctgctaagggtgcaggtcttggaactatgattgttggggatcttgccaagctgtgcattcaagaacccttagaatcccattgtatgggctctcacccaactgtgtcggaactctgtgcactgaggtgcagctcatgccttcctcccttacctccttgattcctcaaactgcacatttgattttcttttttactgaatcagtattagcaaaaaagagttacaaatttggtggccaatgagctatgaatttgtgtcattgatggggctgtatgaaggttgacacttattcctgacccctagttttctcatctgtaaaatgtaaataataataatagtaataataatctaaatgtacttcttgaagcaggtcgtgattaaccctcccattgacattttcctcactggttactctgagcataaacaaagacatggactacattcatttggaagttgggcattattttaggcggtcctaaagggttctaactatgagctttacatggaagatcccatctgctgcttctggggatcctgtggacacacggggattgtccaggatgtgtaatgatgccattcattaaaagctaaaagtccaacccagccatcagagacctgagaaagtcagggttgggaagggactaaaatgatggctttagaaatagtataacagagtatttaggagatttgtgagggtgccctattaaagacaccagcatattacctccttggaataataacacctcacaaatggggaatataaaccacccttgggaggtgtggggagcacagttttctaaatatgaacttgattatctcgtaagacagagaatatggcacacagggtaacttggttttgatggagaaacaggaaaaaaaaaaaaaaaaggaaataagggagtgcctggtatgtagccttgctttaaaaatggtgctggatgaatgaagagctatatttgggttcccatattactgagttactcttttccataaatttgagctcaagaaagagcaattaaaaagacacaataggatgttcacaaaacacc

SEQ ID NO: 56423 - DNA, 2063 bp, Homo sapiens
caaaggacatatctttgggggaaaatgtctgtgtctgttttgctgaccttgaatacttcttctcggaaaaagaaaacagaataatggcacgtttttcttttttgatttattgtctggccctcatcagcccctgcctctcatagcattttgtttgacacctgaaagccagggggttgcattaaaattcttgcactttccatataatcgctggctctggggtgatttcagtaaaaggggcatggtgattgtcctggatgttagtgtggtgtcattaacattacttccagggtctaagtctatcgcgtggcaggggagagtgatacttaattggatttttgcaatcttaaaggcgacaattgctcctttctttagaagccatacattgagttcagagttgaacctgctcaattccagcattgcatctacctattaacttcacaggcagttaaacagaggagcataaaaccgcatgactaactgtgctcatagccgctgaaaaccagataagggaatcttgaaatcctttattccagcacactgtgagtactacatayattttcagtgataaataataatgcaaaatttccctttgtccacagtcctttgactgctccccactccctgtgaaaaagctcacatttattaattggaatgaaatttgagaaggtgattttggaaggccttaatagaaggaattgctaaaaagaacttgagaggacaggccccaggagagacacagaagagagagtaagcagcaatcctgaccattcatggtagcaatgggccaagattgcttgcagaccagtggttctgaaccctggctaaccataagaaccactgggaggctttaactgactctgatgcctgggccccaccccagacctaccaaatcagaatctcttggtaactggatatttgcgtatgttaaaagctcccaggtgattctcatgtgcagcgtgggtttgtgaacttttgctacagggcgatgacaatgctcatgcccgagggtttaggatatctgctaagggtgcaggtcttggaactatgattgttggggatcttgccaagctgtgcattcaagaacccttagaatcccattgtatgggctctcacccaactgtgtcggaactctgtgcactgaggtgcagctcatgccttcctcccttacctccttgattcctcaaactgcacatttgattttcttttttactgaatcagtattagcaaaaaagagttacaaatttggtggccaatgagctatgaatttgtgtcattgatggggctgtatgaaggttgacacttattcctgacccctagttttctcatctgtaaaatgtaaataataataatagtaataataatctaaatgtacttcttgaagcaggtcgtgattaaccctcccattgacattttcctcactggttactctgagcataaacaaagacatggactacattcatttggaagttgggcattattttaggcggtcctaaagggttctaactatgagctttacatggaagatcccatctgctgcttctggggatcctgtggacacacggggattgtccaggatgtgtaatgatgccattcattaaaagctaaaagtccaacccagccatcagagacctgagaaagtcagggttgggaagggactaaaatgatggctttagaaatagtataacagagtatttaggagatttgtgagggtgccctattaaagacaccagcatattacctccttggaataataacacctcacaaatggggaatataaaccacccttgggaggtgtggggagcacagttttctaaatatgaacttgattatctcgtaagacagagaatatggcacacagggtaacttggttttgatggagaaacaggaaaaaaaaaaaaaaaaggaaataagggagtgcctggtatgtagccttgctttaaaaatggtgctggatgaatgaagagctatatttgggttcccatattactgagttactcttttccataaatttgagctcaagaaagagcaattaaaaagacacaataggatgttcacaaaacacc

SEQ ID NO: 56424 - DNA, 2063 bp, Homo sapiens
caaaggacatatctttgggggaaaatgtctgtgtctgttttgctgaccttgaatacttcttctcggaaaaagaaaacagaataatggcacgtttttcttttttgatttattgtctggccctcatcagcccctgcctctcatagcattttgtttgacacctgaaagccagggggttgcattaaaattcttgcactttccatataatcgctggctctggggtgatttcagtaaaaggggcatggtgattgtcctggatgttagtgtggtgtcattaacattacttccagggtctaagtctatcgcgtggcaggggagagtgatacttaattggatttttgcaatcttaaaggcgacaattgctcctttctttagaagccatacattgagttcagagttgaacctgctcaattccagcattgcatctacctattaacttcacaggcagttaaacagaggagcataaaaccgcatgactaactgtgctcatagccgctgaaaaccagataagggaatcttgaaatcctttattccagcacactgtgagtactacatatattttcagtgataaataataatgcaaaatttccctttgtccacagtcctttgactgctccccactccctgtgaaaaagctcacatttattaattggaatgaaatttgagaaggtgattttggaaggccttaatagaaggaattgctaaaaagaacttgagaggacaggccccaggagagacacagaagagagagtaagcagcaatcctgaccattcatggtagcaatgggccaagattgcttgcagaccagtggttctgaaccctggctaaccataagaaccactgggaggctttaactgactctgatgcctgggccccaccccagacctaccaaatcagaatctcttggtaactggatatttgcgtatgttaaaagctcccaggtgattctcatgtgcagcgtgggtttgtgaacttttgctacagggcgatgacaatgctcatgcccgagggtttaggatatctgctaagggtgcaggtcttggaactatgattgttggggatcttgccaagstgtgcattcaagaacccttagaatcccattgtatgggctctcacccaactgtgtcggaactctgtgcactgaggtgcagctcatgccttcctcccttacctccttgattcctcaaactgcacatttgattttcttttttactgaatcagtattagcaaaaaagagttacaaatttggtggccaatgagctatgaatttgtgtcattgatggggctgtatgaaggttgacacttattcctgacccctagttttctcatctgtaaaatgtaaataataataatagtaataataatctaaatgtacttcttgaagcaggtcgtgattaaccctcccattgacattttcctcactggttactctgagcataaacaaagacatggactacattcatttggaagttgggcattattttaggcggtcctaaagggttctaactatgagctttacatggaagatcccatctgctgcttctggggatcctgtggacacacggggattgtccaggatgtgtaatgatgccattcattaaaagctaaaagtccaacccagccatcagagacctgagaaagtcagggttgggaagggactaaaatgatggctttagaaatagtataacagagtatttaggagatttgtgagggtgccctattaaagacaccagcatattacctccttggaataataacacctcacaaatggggaatataaaccacccttgggaggtgtggggagcacagttttctaaatatgaacttgattatctcgtaagacagagaatatggcacacagggtaacttggttttgatggagaaacaggaaaaaaaaaaaaaaaaggaaataagggagtgcctggtatgtagccttgctttaaaaatggtgctggatgaatgaagagctatatttgggttcccatattactgagttactcttttccataaatttgagctcaagaaagagcaattaaaaagacacaataggatgttcacaaaacacc

SEQ ID NO: 56425 - DNA, 2063 bp, Homo sapiens
caaaggacatatctttgggggaaaatgtctgtgtctgttttgctgaccttgaatacttcttctcggaaaaagaaaacagaataatggcacgtttttcttttttgatttattgtctggccctcatcagcccctgcctctcatagcattttgtttgacacctgaaagccagggggttgcattaaaattcttgcactttccatataatcgctggctctggggtgatttcagtaaaaggggcatggtgattgtcctggatgttagtgtggtgtcattaacattacttccagggtctaagtctatcgcgtggcaggggagagtgatacttaattggatttttgcaatcttaaaggcgacaattgctcctttctttagaagccatacattgagttcagagttgaacctgctcaattccagcattgcatctacctattaacttcacaggcagttaaacagaggagcataaaaccgcatgactaactgtgctcatagccgctgaaaaccagataagggaatcttgaaatcctttattccagcacactgtgagtactacatatattttcagtgataaataataatgcaaaatttccctttgtccacagtcctttgactgctccccactccctgtgaaaaagctcacatttattaattggaatgaaatttgagaaggtgattttggaaggccttaatagaaggaattgctaaaaagaacttgagaggacaggccccaggagagacacagaagagagagtaagcagcaatcctgaccattcatggtagcaatgggccaagattgcttgcagaccagtggttctgaaccctggctaaccataagaaccactgggaggctttaactgactctgatgcctgggccccaccccagacctaccaaatcagaatctcttggtaactggatatttgcgtatgttaaaagctcccaggtgattctcatgtgcagcgtgggtttgtgaacttttgctacagggcgatgacaatgctcatgcccgagggtttaggatatctgctaagggtgcaggtcttggaactatgattgttggggatcttgccaagctgtgcattcaagaacccttagaatcccattgtatgggctctcacccaactgtgtcggaactctgtgcactgaggtgcagctcatgccttmctcccttacctccttgattcctcaaactgcacatttgattttcttttttactgaatcagtattagcaaaaaagagttacaaatttggtggccaatgagctatgaatttgtgtcattgatggggctgtatgaaggttgacacttattcctgacccctagttttctcatctgtaaaatgtaaataataataatagtaataataatctaaatgtacttcttgaagcaggtcgtgattaaccctcccattgacattttcctcactggttactctgagcataaacaaagacatggactacattcatttggaagttgggcattattttaggcggtcctaaagggttctaactatgagctttacatggaagatcccatctgctgcttctggggatcctgtggacacacggggattgtccaggatgtgtaatgatgccattcattaaaagctaaaagtccaacccagccatcagagacctgagaaagtcagggttgggaagggactaaaatgatggctttagaaatagtataacagagtatttaggagatttgtgagggtgccctattaaagacaccagcatattacctccttggaataataacacctcacaaatggggaatataaaccacccttgggaggtgtggggagcacagttttctaaatatgaacttgattatctcgtaagacagagaatatggcacacagggtaacttggttttgatggagaaacaggaaaaaaaaaaaaaaaaggaaataagggagtgcctggtatgtagccttgctttaaaaatggtgctggatgaatgaagagctatatttgggttcccatattactgagttactcttttccataaatttgagctcaagaaagagcaattaaaaagacacaataggatgttcacaaaacacc

SEQ ID NO: 56426 - DNA, 2063 bp, Homo sapiens
caaaggacatatctttgggggaaaatgtctgtgtctgttttgctgaccttgaatacttcttctcggaaaaagaaaacagaataatggcacgtttttcttttttgatttattgtctggccctcatcagcccctgcctctcatagcattttgtttgacacctgaaagccagggggttgcattaaaattcttgcactttccatataatcgctggctctggggtgatttcagtaaaaggggcatggtgattgtcctggatgttagtgtggtgtcattaacattacttccagggtctaagtctatcgcgtggcaggggagagtgatacttaattggatttttgcaatcttaaaggcgacaattgctcctttctttagaagccatacattgagttcagagttgaacctgctcaattccagcattgcatctacctattaacttcacaggcagttaaacagaggagcataaaaccgcatgactaactgtgctcatagccgctgaaaaccagataagggaatcttgaaatcctttattccagcacactgtgagtactacatatattttcagtgataaataataatgcaaaatttccctttgtccacagtcctttgactgctccccactccctgtgaaaaagctcacatttattaattggaatgaaatttgagaaggtgattttggaaggccttaatagaaggaattgctaaaaagaacttgagaggacaggccccaggagagacacagaagagagagtaagcagcaatcctgaccattcatggtagcaatgggccaagattgcttgcagaccagtggttctgaaccctggctaaccataagaaccactgggaggctttaactgactctgatgcctgggccccaccccagacctaccaaatcagaatctcttggtaactggatatttgcgtatgttaaaagctcccaggtgattctcatgtgcagcgtgggtttgtgaacttttgctacagggcgatgacaatgctcatgcccgagggtttaggatatctgctaagggtgcaggtcttggaactatgattgttggggatcttgccaagctgtgcattcaagaacccttagaatcccattgtatgggctctcacccaactgtgtcggaactctgtgcactgaggtgcagctcatgccttccycccttacctccttgattcctcaaactgcacatttgattttcttttttactgaatcagtattagcaaaaaagagttacaaatttggtggccaatgagctatgaatttgtgtcattgatggggctgtatgaaggttgacacttattcctgacccctagttttctcatctgtaaaatgtaaataataataatagtaataataatctaaatgtacttcttgaagcaggtcgtgattaaccctcccattgacattttcctcactggttactctgagcataaacaaagacatggactacattcatttggaagttgggcattattttaggcggtcctaaagggttctaactatgagctttacatggaagatcccatctgctgcttctggggatcctgtggacacacggggattgtccaggatgtgtaatgatgccattcattaaaagctaaaagtccaacccagccatcagagacctgagaaagtcagggttgggaagggactaaaatgatggctttagaaatagtataacagagtatttaggagatttgtgagggtgccctattaaagacaccagcatattacctccttggaataataacacctcacaaatggggaatataaaccacccttgggaggtgtggggagcacagttttctaaatatgaacttgattatctcgtaagacagagaatatggcacacagggtaacttggttttgatggagaaacaggaaaaaaaaaaaaaaaaggaaataagggagtgcctggtatgtagccttgctttaaaaatggtgctggatgaatgaagagctatatttgggttcccatattactgagttactcttttccataaatttgagctcaagaaagagcaattaaaaagacacaataggatgttcacaaaacacc

SEQ ID NO: 56427 - DNA, 2063 bp, Homo sapiens
caaaggacatatctttgggggaaaatgtctgtgtctgttttgctgaccttgaatacttcttctcggaaaaagaaaacagaataatggcacgtttttcttttttgatttattgtctggccctcatcagcccctgcctctcatagcattttgtttgacacctgaaagccagggggttgcattaaaattcttgcactttccatataatcgctggctctggggtgatttcagtaaaaggggcatggtgattgtcctggatgttagtgtggtgtcattaacattacttccagggtctaagtctatcgcgtggcaggggagagtgatacttaattggatttttgcaatcttaaaggcgacaattgctcctttctttagaagccatacattgagttcagagttgaacctgctcaattccagcattgcatctacctattaacttcacaggcagttaaacagaggagcataaaaccgcatgactaactgtgctcatagccgctgaaaaccagataagggaatcttgaaatcctttattccagcacactgtgagtactacatatattttcagtgataaataataatgcaaaatttccctttgtccacagtcctttgactgctccccactccctgtgaaaaagctcacatttattaattggaatgaaatttgagaaggtgattttggaaggccttaatagaaggaattgctaaaaagaacttgagaggacaggccccaggagagacacagaagagagagtaagcagcaatcctgaccattcatggtagcaatgggccaagattgcttgcagaccagtggttctgaaccctggctaaccataagaaccactgggaggctttaactgactctgatgcctgggccccaccccagacctaccaaatcagaatctcttggtaactggatatttgcgtatgttaaaagctcccaggtgattctcatgtgcagcgtgggtttgtgaacttttgctacagggcgatgacaatgctcatgcccgagggtttaggatatctgctaagggtgcaggtcttggaactatgattgttggggatcttgccaagctgtgcattcaagaacccttagaatcccattgtatgggctctcacccaactgtgtcggaactctgtgcactgaggtgcagctcatgccttcctcccttacctccttgattcctcaaactgcacatttgattttcttttttactgaatcagtattagcaaaaaagagttacaaatttggtggccaatgagctatgaatttgtgtcattgatggggctgtatgaaggttgacacttattcctgacccctagttttctcrtctgtaaaatgtaaataataataatagtaataataatctaaatgtacttcttgaagcaggtcgtgattaaccctcccattgacattttcctcactggttactctgagcataaacaaagacatggactacattcatttggaagttgggcattattttaggcggtcctaaagggttctaactatgagctttacatggaagatcccatctgctgcttctggggatcctgtggacacacggggattgtccaggatgtgtaatgatgccattcattaaaagctaaaagtccaacccagccatcagagacctgagaaagtcagggttgggaagggactaaaatgatggctttagaaatagtataacagagtatttaggagatttgtgagggtgccctattaaagacaccagcatattacctccttggaataataacacctcacaaatggggaatataaaccacccttgggaggtgtggggagcacagttttctaaatatgaacttgattatctcgtaagacagagaatatggcacacagggtaacttggttttgatggagaaacaggaaaaaaaaaaaaaaaaggaaataagggagtgcctggtatgtagccttgctttaaaaatggtgctggatgaatgaagagctatatttgggttcccatattactgagttactcttttccataaatttgagctcaagaaagagcaattaaaaagacacaataggatgttcacaaaacacc

SEQ ID NO: 56428 - DNA, 2063 bp, Homo sapiens
caaaggacatatctttgggggaaaatgtctgtgtctgttttgctgaccttgaatacttcttctcggaaaaagaaaacagaataatggcacgtttttcttttttgatttattgtctggccctcatcagcccctgcctctcatagcattttgtttgacacctgaaagccagggggttgcattaaaattcttgcactttccatataatcgctggctctggggtgatttcagtaaaaggggcatggtgattgtcctggatgttagtgtggtgtcattaacattacttccagggtctaagtctatcgcgtggcaggggagagtgatacttaattggatttttgcaatcttaaaggcgacaattgctcctttctttagaagccatacattgagttcagagttgaacctgctcaattccagcattgcatctacctattaacttcacaggcagttaaacagaggagcataaaaccgcatgactaactgtgctcatagccgctgaaaaccagataagggaatcttgaaatcctttattccagcacactgtgagtactacatatattttcagtgataaataataatgcaaaatttccctttgtccacagtcctttgactgctccccactccctgtgaaaaagctcacatttattaattggaatgaaatttgagaaggtgattttggaaggccttaatagaaggaattgctaaaaagaacttgagaggacaggccccaggagagacacagaagagagagtaagcagcaatcctgaccattcatggtagcaatgggccaagattgcttgcagaccagtggttctgaaccctggctaaccataagaaccactgggaggctttaactgactctgatgcctgggccccaccccagacctaccaaatcagaatctcttggtaactggatatttgcgtatgttaaaagctcccaggtgattctcatgtgcagcgtgggtttgtgaacttttgctacagggcgatgacaatgctcatgcccgagggtttaggatatctgctaagggtgcaggtcttggaactatgattgttggggatcttgccaagctgtgcattcaagaacccttagaatcccattgtatgggctctcacccaactgtgtcggaactctgtgcactgaggtgcagctcatgccttcctcccttacctccttgattcctcaaactgcacatttgattttcttttttactgaatcagtattagcaaaaaagagttacaaatttggtggccaatgagctatgaatttgtgtcattgatggggctgtatgaaggttgacacttattcctgacccctagttttctcatctgtaaaatgtaaataataataatagtaataataatctaaatgtacttcttgaagcaggtcgtgattaaccctcccattgacattttcctcactggttactctgagcataaacaaagacatggactacattcatttggaagttgggcattattttaggcggtcctaaagggttctaactatgagctttacatggaagatcccatctgctgcttctggggatcctgtggacacacggggattgtccaggatgtgtaatgatgccatycattaaaagctaaaagtccaacccagccatcagagacctgagaaagtcagggttgggaagggactaaaatgatggctttagaaatagtataacagagtatttaggagatttgtgagggtgccctattaaagacaccagcatattacctccttggaataataacacctcacaaatggggaatataaaccacccttgggaggtgtggggagcacagttttctaaatatgaacttgattatctcgtaagacagagaatatggcacacagggtaacttggttttgatggagaaacaggaaaaaaaaaaaaaaaaggaaataagggagtgcctggtatgtagccttgctttaaaaatggtgctggatgaatgaagagctatatttgggttcccatattactgagttactcttttccataaatttgagctcaagaaagagcaattaaaaagacacaataggatgttcacaaaacacc

SEQ ID NO: 56429 - DNA, 2473 bp, Homo sapiens
aatagcaattctaaatggaaagcatgatgaaagactttcaaaaagcaacaggatttacagcagtatttgaccggaagtgccatctagtggtttatggcaatcatttcagttccagttcccgaattaaattgtggagttgggcctttaacccatttatgcgcagtgttccattattggaacgctaagcttgtgggagttatttatatcctgctcaaagtcatcgccaaggtctcatttaaaaaaaaaaaatcacaacctccagcataaatgggttaatggtgttactcactgaacaatgaggccgctttctaggcatccttctcaaaaattgaagatgtggcagagctaccctttgtctgggcacggttggaaatacygtggttttaatctgtgatgaatacataaaatctaaagaatgtcacaaaaacagattcagtggaggacagaggaaaggagatattttgtgcttaaaggatattcaattttcagtaagatgcactcatatgcttatgagttaactgtgttgatataaaagctaataagaattgtatgaaagaatcgtgatctactttatgatctgtggtagacatgaaaaccgcttgctttgggaaccttaagagtacatcctacagctaaaacattttcatatgatgtgacacaaatattagagctcccagccagtcctgtgctgaatactctgtgttcccacctggtttacctctgcgtttctgagagcgaatagtacaatctatcctttagtgggggtgcagctacacaaactggagttattttacttgttaaaacacataatgccttactattatactttctatttgctctacagatttctcctccagagacttaagggtccaggtttgctgatttctttggggattgcttcatgctctgtacttggtgtttcctgacatattccttagtctatttcaatgtcctatctcaccccttctttactccatgttcttctgaccatttagcatgcagtgaaaaaggaatttactattgttagaagaacgtatttctatcccacacccagaggccaccaatggcaatagtagccgaagcgtacctgtagttcagcttttgacatgtgtctaaaacatgtccattaacatgtgcttaatctgttctgtgaaagtattttcagaaatgataaaaagtaatgatggttacatctgaatataagttagatcatgacactcactccttttttcagaaactaccagtggcatcacatcttactcagagtaaaaaccacagtgcttactgtgggctgcaaggcctcgtaggatttgccccccatgactttctgacttcatctcttgtcacacatctccttattcgctccacgccaagcacagtggctttttcactgattcttaaacatgccaggtacactggcctcagagcctttgcactggcttttccaggcactggcttttcactctgcctggaaagctctttcgccagatatttgcatggctagctccctcacattctcctggtgtttactcaaaagtcatgctctcagtgaggccttgtatcaccaccctaactaaaattatacccatttattccttgtcttacatctccctgcttattttgttcttagcattcaccattttcttatgtgcaatgtgtttgtgatgtttatatcatttattttctgtctttccaattggaatgtaagcatcaggaatcagatttttgcccttattttaaaaaaattactgtatccctggtgcttagaagaatgcctggctcagtagttatatttgtaatgaatgatgctccatgaatgataaagtggattgcatgtttgaatgaatggaagttgttttaaatttattctttggatgggtaatggcttgttgatctgtgttttcagttgctttgtgtcttattatttgacattttaaccttgagaatccacaaaatgacaaatattttacagaactaatgaagattccgtttttatcctaaaagtaacaataacaaaataaactagatgtagatccagagagataaggaatttttgttgttgttgctaaatttatttttatccatctaacttatctatatgaattcctcaccttgcccccaaccttccaaattaagtgtgttttctcaagcacacagagaatgacaggatgaaagaagaaagacagcaaaaggcaaaaaacaaagcaagaagaagagaggagggctggctgtttggaaccacaaaagcataggtgtgaaattaagttgtcaccacacacctaccacgatagactttattttagaaccaaaaagcaacttgggccagcattgggaatccaacaagtagaagattatatacttataatttagtaatttgctgataatattaaatttttccaatttaatatttcagaagttgggatgtgttttatgatcttaaaatgggtatatgtatacattttagctcggatcc

SEQ ID NO: 56430 - DNA, 2473 bp, Homo sapiens
aatagcaattctaaatggaaagcatgatgaaagactttcaaaaagcaacaggatttacagcagtatttgaccggaagtgccatctagtggtttatggcaatcatttcagttccagttcccgaattaaattgtggagttgggcctttaacccatttatgcgcagtgttccattattggaacgctaagcttgtgggagttatttatatcctgctcaaagtcatcgccaaggtctcatttaaaaaaaaaaaatcacaacctccagcataaatgggttaatggtgttactcactgaacaatgaggccgctttctaggcatccttctcaaaaattgaagatgtggcagagctaccctttgtctgggcacggttggaaatactgtggttttratctgtgatgaatacataaaatctaaagaatgtcacaaaaacagattcagtggaggacagaggaaaggagatattttgtgcttaaaggatattcaattttcagtaagatgcactcatatgcttatgagttaactgtgttgatataaaagctaataagaattgtatgaaagaatcgtgatctactttatgatctgtggtagacatgaaaaccgcttgctttgggaaccttaagagtacatcctacagctaaaacattttcatatgatgtgacacaaatattagagctcccagccagtcctgtgctgaatactctgtgttcccacctggtttacctctgcgtttctgagagcgaatagtacaatctatcctttagtgggggtgcagctacacaaactggagttattttacttgttaaaacacataatgccttactattatactttctatttgctctacagatttctcctccagagacttaagggtccaggtttgctgatttctttggggattgcttcatgctctgtacttggtgtttcctgacatattccttagtctatttcaatgtcctatctcaccccttctttactccatgttcttctgaccatttagcatgcagtgaaaaaggaatttactattgttagaagaacgtatttctatcccacacccagaggccaccaatggcaatagtagccgaagcgtacctgtagttcagcttttgacatgtgtctaaaacatgtccattaacatgtgcttaatctgttctgtgaaagtattttcagaaatgataaaaagtaatgatggttacatctgaatataagttagatcatgacactcactccttttttcagaaactaccagtggcatcacatcttactcagagtaaaaaccacagtgcttactgtgggctgcaaggcctcgtaggatttgccccccatgactttctgacttcatctcttgtcacacatctccttattcgctccacgccaagcacagtggctttttcactgattcttaaacatgccaggtacactggcctcagagcctttgcactggcttttccaggcactggcttttcactctgcctggaaagctctttcgccagatatttgcatggctagctccctcacattctcctggtgtttactcaaaagtcatgctctcagtgaggccttgtatcaccaccctaactaaaattatacccatttattccttgtcttacatctccctgcttattttgttcttagcattcaccattttcttatgtgcaatgtgtttgtgatgtttatatcatttattttctgtctttccaattggaatgtaagcatcaggaatcagatttttgcccttattttaaaaaaattactgtatccctggtgcttagaagaatgcctggctcagtagttatatttgtaatgaatgatgctccatgaatgataaagtggattgcatgtttgaatgaatggaagttgttttaaatttattctttggatgggtaatggcttgttgatctgtgttttcagttgctttgtgtcttattatttgacattttaaccttgagaatccacaaaatgacaaatattttacagaactaatgaagattccgtttttatcctaaaagtaacaataacaaaataaactagatgtagatccagagagataaggaatttttgttgttgttgctaaatttatttttatccatctaacttatctatatgaattcctcaccttgcccccaaccttccaaattaagtgtgttttctcaagcacacagagaatgacaggatgaaagaagaaagacagcaaaaggcaaaaaacaaagcaagaagaagagaggagggctggctgtttggaaccacaaaagcataggtgtgaaattaagttgtcaccacacacctaccacgatagactttattttagaaccaaaaagcaacttgggccagcattgggaatccaacaagtagaagattatatacttataatttagtaatttgctgataatattaaatttttccaatttaatatttcagaagttgggatgtgttttatgatcttaaaatgggtatatgtatacattttagctcggatcc

SEQ ID NO: 56431 - DNA, 2473 bp, Homo sapiens
aatagcaattctaaatggaaagcatgatgaaagactttcaaaaagcaacaggatttacagcagtatttgaccggaagtgccatctagtggtttatggcaatcatttcagttccagttcccgaattaaattgtggagttgggcctttaacccatttatgcgcagtgttccattattggaacgctaagcttgtgggagttatttatatcctgctcaaagtcatcgccaaggtctcatttaaaaaaaaaaaatcacaacctccagcataaatgggttaatggtgttactcactgaacaatgaggccgctttctaggcatccttctcaaaaattgaagatgtggcagagctaccctttgtctgggcacggttggaaatactgtggttttaatctgtgatgaatacataaaatctaaagaatgtcacaaaaacagattcagtggaggacagaggaaaggagatattttgtgcttaaaggatattcaattttcagtaagatgcactcatatgcttatgagttaactgtgttgatataaaagctaataagaattgtatgaaagaatcgtgatctactttatgatctgtggtagacatgaaaaccgcttgctttgggaaccttaagagtacatcctacagctaaaacattttcatatgatgtgacacaaatattagagctcccagccagtcctgtgctgaatactctgtgttcccacctggtttacctctgcgtttctgagwgcgaatagtacaatctatcctttagtgggggtgcagctacacaaactggagttattttacttgttaaaacacataatgccttactattatactttctatttgctctacagatttctcctccagagacttaagggtccaggtttgctgatttctttggggattgcttcatgctctgtacttggtgtttcctgacatattccttagtctatttcaatgtcctatctcaccccttctttactccatgttcttctgaccatttagcatgcagtgaaaaaggaatttactattgttagaagaacgtatttctatcccacacccagaggccaccaatggcaatagtagccgaagcgtacctgtagttcagcttttgacatgtgtctaaaacatgtccattaacatgtgcttaatctgttctgtgaaagtattttcagaaatgataaaaagtaatgatggttacatctgaatataagttagatcatgacactcactccttttttcagaaactaccagtggcatcacatcttactcagagtaaaaaccacagtgcttactgtgggctgcaaggcctcgtaggatttgccccccatgactttctgacttcatctcttgtcacacatctccttattcgctccacgccaagcacagtggctttttcactgattcttaaacatgccaggtacactggcctcagagcctttgcactggcttttccaggcactggcttttcactctgcctggaaagctctttcgccagatatttgcatggctagctccctcacattctcctggtgtttactcaaaagtcatgctctcagtgaggccttgtatcaccaccctaactaaaattatacccatttattccttgtcttacatctccctgcttattttgttcttagcattcaccattttcttatgtgcaatgtgtttgtgatgtttatatcatttattttctgtctttccaattggaatgtaagcatcaggaatcagatttttgcccttattttaaaaaaattactgtatccctggtgcttagaagaatgcctggctcagtagttatatttgtaatgaatgatgctccatgaatgataaagtggattgcatgtttgaatgaatggaagttgttttaaatttattctttggatgggtaatggcttgttgatctgtgttttcagttgctttgtgtcttattatttgacattttaaccttgagaatccacaaaatgacaaatattttacagaactaatgaagattccgtttttatcctaaaagtaacaataacaaaataaactagatgtagatccagagagataaggaatttttgttgttgttgctaaatttatttttatccatctaacttatctatatgaattcctcaccttgcccccaaccttccaaattaagtgtgttttctcaagcacacagagaatgacaggatgaaagaagaaagacagcaaaaggcaaaaaacaaagcaagaagaagagaggagggctggctgtttggaaccacaaaagcataggtgtgaaattaagttgtcaccacacacctaccacgatagactttattttagaaccaaaaagcaacttgggccagcattgggaatccaacaagtagaagattatatacttataatttagtaatttgctgataatattaaatttttccaatttaatatttcagaagttgggatgtgttttatgatcttaaaatgggtatatgtatacattttagctcggatcc

SEQ ID NO: 56432 - DNA, 2473 bp, Homo sapiens
aatagcaattctaaatggaaagcatgatgaaagactttcaaaaagcaacaggatttacagcagtatttgaccggaagtgccatctagtggtttatggcaatcatttcagttccagttcccgaattaaattgtggagttgggcctttaacccatttatgcgcagtgttccattattggaacgctaagcttgtgggagttatttatatcctgctcaaagtcatcgccaaggtctcatttaaaaaaaaaaaatcacaacctccagcataaatgggttaatggtgttactcactgaacaatgaggccgctttctaggcatccttctcaaaaattgaagatgtggcagagctaccctttgtctgggcacggttggaaatactgtggttttaatctgtgatgaatacataaaatctaaagaatgtcacaaaaacagattcagtggaggacagaggaaaggagatattttgtgcttaaaggatattcaattttcagtaagatgcactcatatgcttatgagttaactgtgttgatataaaagctaataagaattgtatgaaagaatcgtgatctactttatgatctgtggtagacatgaaaaccgcttgctttgggaaccttaagagtacatcctacagctaaaacattttcatatgatgtgacacaaatattagagctcccagccagtcctgtgctgaatactctgtgttcccacctggtttacctctgcgtttctgagagcgaatagtacaayctatcctttagtgggggtgcagctacacaaactggagttattttacttgttaaaacacataatgccttactattatactttctatttgctctacagatttctcctccagagacttaagggtccaggtttgctgatttctttggggattgcttcatgctctgtacttggtgtttcctgacatattccttagtctatttcaatgtcctatctcaccccttctttactccatgttcttctgaccatttagcatgcagtgaaaaaggaatttactattgttagaagaacgtatttctatcccacacccagaggccaccaatggcaatagtagccgaagcgtacctgtagttcagcttttgacatgtgtctaaaacatgtccattaacatgtgcttaatctgttctgtgaaagtattttcagaaatgataaaaagtaatgatggttacatctgaatataagttagatcatgacactcactccttttttcagaaactaccagtggcatcacatcttactcagagtaaaaaccacagtgcttactgtgggctgcaaggcctcgtaggatttgccccccatgactttctgacttcatctcttgtcacacatctccttattcgctccacgccaagcacagtggctttttcactgattcttaaacatgccaggtacactggcctcagagcctttgcactggcttttccaggcactggcttttcactctgcctggaaagctctttcgccagatatttgcatggctagctccctcacattctcctggtgtttactcaaaagtcatgctctcagtgaggccttgtatcaccaccctaactaaaattatacccatttattccttgtcttacatctccctgcttattttgttcttagcattcaccattttcttatgtgcaatgtgtttgtgatgtttatatcatttattttctgtctttccaattggaatgtaagcatcaggaatcagatttttgcccttattttaaaaaaattactgtatccctggtgcttagaagaatgcctggctcagtagttatatttgtaatgaatgatgctccatgaatgataaagtggattgcatgtttgaatgaatggaagttgttttaaatttattctttggatgggtaatggcttgttgatctgtgttttcagttgctttgtgtcttattatttgacattttaaccttgagaatccacaaaatgacaaatattttacagaactaatgaagattccgtttttatcctaaaagtaacaataacaaaataaactagatgtagatccagagagataaggaatttttgttgttgttgctaaatttatttttatccatctaacttatctatatgaattcctcaccttgcccccaaccttccaaattaagtgtgttttctcaagcacacagagaatgacaggatgaaagaagaaagacagcaaaaggcaaaaaacaaagcaagaagaagagaggagggctggctgtttggaaccacaaaagcataggtgtgaaattaagttgtcaccacacacctaccacgatagactttattttagaaccaaaaagcaacttgggccagcattgggaatccaacaagtagaagattatatacttataatttagtaatttgctgataatattaaatttttccaatttaatatttcagaagttgggatgtgttttatgatcttaaaatgggtatatgtatacattttagctcggatcc

SEQ ID NO: 56433 - DNA, 1296 bp, Homo sapiens
tctcaaaaaacaaaaacaaaaagaactaacgtgctatttttacttcaactaaaacttggaaagaggaaacatgttggaagagattaccaaagattaaaagtagagtgaatataacctagatagaacagatgttttgtgtgaaatttagtatctttaacttaataaaccagcaggaactgtatgaacacaacacacccaactgacaaacagagagaactaacatgtttatttagctgtatgtatatatgcttaactacacccgaggaagctgtagagttagaaaaacatgaaccattaacagatgtggcctccctgcagaacttttactttgaaaaagaagtacgtctgaaccagattcacatgtttgatatttggatgcagagaaaatggggcagaaagcatcgcaacagttggctctgaaggacagcaaagaggtgcccgtcgtctgtgaggtggtcagtgaagctatagtccatgcagctcagaaactgaaggagtaccttggatttgaatatcctccaagtaaactctgcccagctgcaaatactctgaatgagatcttcttaatccatttcatcactttctgccaagaaaagggagttgatgagtggctgaccaccaccaagatgaccaagcaccaagccttcctgtttggtgcagactggatttggaccttttggggatccaacaagcaaataaagcttcagctcgcagtacagactctgcagatgtcttcacctcctcctgtggaatctaagccttgtgacctttccaatccagaatcaagggtagaggagtcttcctggaagaaaagtagatttgataagctggaagaattctgtaacttaataggagaggattgcctgggtctgtttatcatctttggtatgccaggaaagcctaaagacatcaggggagttgtcctggacagtgtcaaaagtcagatggtgaggagccatctgccaggagggaaggctgtggctcagtttgtcctggaaactgaagattgtgtgttcatcaaagagctgctcagaaattgtctgagtaagaaagacgggctgagagaggtgggcaaggtttatatcagcattctctgacttggatatgtattatgtgagtggcctgtaagaggaaaagaaaaaaagattctaataagcaagctcacctatttgcatcattccagcatgggattttttttcatttgtttycccattgattgaaaatgattactgggatcaaagtacattcatgtcgcaattacagagagagagagaaaaaaagaaaaccctggctctg

SEQ ID NO: 56434 - DNA, 2738 bp, Homo sapiens
ggaggtgcagcaacttttagttcattcttttagaaaccagctgccatgtggcaaggaagtcttgacyacccctctggaaaaagaactaacagggagaggccctcggggatgagatatcacgtagaggagaactgagatgaactggctcagacgatagctgaataaacttcattgagtaacctcagccccaaatcatgatgatcagaagaaccgaaaagctgaatgctgcccaaactaaagcaggtagggcaaatacagggttgttatatttaagccactaaagctgggggtggtttgttatgcagcaatagacaactgatacagccaggattgcactgcctcctcttgagacaactcagcctcagcatcttgaaagggactcatagaatactgcagttcacattgtccacatcattaaatccacatatccctggaatgctttcatatatacctttggacgctttgtaacattacggcatgccaactgtttgatcccaatgtcatgatgttagagtctattgctgattctattaaataatttgaattacatgtctgagctgagatagagtggaaacattccttatcagatatttcaaaagtatatatatatatatatatatacttacataacttaggaccaaaatggccctttttaaaaatggtctcatggtaagcaggaaatttctattgctgcttgctctcagatacctaaaacgggaaagaaaaaaaatcttagataagtgtgtctaccagacacaatgttctcctttcaaggtgaagacgctgcagctctgaagaaggctgcagagaacaatgctgagagcagggcctctggagccagaacacctgggtttccgttcccagttctgctgctgctgagagcccaggagacctcgggcaagtttccgaacctctttgcacatctattttactcacttataaaagggagacaataatagtatctacctcacaggaaagttgggaggaacaaatgagataatatctagaacaggactcagctctgttagctataaatattactatcccatcgaatcccaaataacccagtcattttgaaaacaatacagttacactggtcacagggataatcttaaacaaaataagagtttatttacctacttaatataatttgaaggctccaatgtcttccatccacaaaatacctcacagatctcttacctctaaaaatagaagatgccaaggttgtaggaggttaagtaatttttttttttttttttttttgagacggagttttgctcgtcgcccaggctggagtgcagtggtgcgatctcagctcactgcaacctccacctcccaggttcaagcgattctcatgcctcagcctcccgagtagttgggactacaggtactttttgtatttttagtatttttgtatttttagtatttttgtatttttagtacagatggcgttttgccatgttggccaggctggtcttgaactcctgacctcaggtgatccacccacctcagcctcccaaagtgctgagattacaggcgtgagccactgcacccactcagttaaataatttttttaaggcaacaaagttatgagtatctgtgttaggattagagctcactggtatccagtgaataattttctcacctccctgtggttcttggaaccaaactaggttacaagaacgtcagcttctagaggggcaggaacctgtgtggatcctgccctgctgtagcttactcacttataggaattgggagttctggatatctacatataagacaagtggttggctggttttagaaaaagatgatgaaagggaatcaagagacggtattaagaagccccaaatgaaaacataaaataagtcataagtcattttcacctacatgcaaaattctacacggaaaatacagaatggagggggaaaacaaaagtcaaatcaaatagcataaaccgcaagcacttcccacctcatccttatttcctctatcccttttcattgtttttttctcctttttaaatccaatttttcctcaaaggggttttccccaacaaaatttgcattaaaatctgcatgaggtctctttacacaaaggtaatgttctataaggtaagaaatccttttgtaaaaaccagagtgggttaatatctcacaaagaaatgtctatccaccttgaggattgcttacaatggccaggtgaggtggctcacgcctgtaatcccagcactttgggaggcggaggcaggcggatcacgaggtcaggagttcgagaccagcctggtcaatatggtgaaaccccatctctattaaaaatacaaaaattagccaggcgtggtggcagacacctgtagtcccagctactcggaaggctgagacagaagaatcatttgaacccgggaggcggaggttgcagtgagccgagatcgtgccactacactccagcttgggtgacagtccagcttgggtgacagagcgagactccgtctcaaaaaaaaaaaaaaaaaaaaagaggattgcttacaaaacacatgtggctcctctgctttgtaacaaatggtactgtgaggaggtgagagcctcacgcttccttctcacctctcttttcctctgcctggtccataaagagctgtggaagtgatacatgctcagatctggccgttcaagtatttaatgagtggagaaaacgaggagtccaaaaaacacaaaagagagttggcttttagcaagctctggact

SEQ ID NO: 56435 - DNA, 655 bp, Homo sapiens
agccagtaggaatccactmctgtcagggctgctctccaacccatagctattgcctgtacagacaccatccttgagcttccatttcccacatcaagctatctcaccctggactgggcttttctcaatttcaactcaccactatcttttctgaatgttttctaacattctctattacacccaacctagaagtcagacaatcatctttgatttatccttttttatcattcacaaaatccattctagctataacaatctcatctctatataaattatttgaagttttttttgtcttagtgctgtatcacatggaacaagtgatgtattttcaccacatttggagttatgtagtatgattggaatcagaatatggattatagcatgttttaatacatatgagtctattttttattaaaaaaatgagtgaaaggaaaaactcttcttcatagtagaaagctaagaaacaaatgtataagagatattgggattagaaaatcaccatttggcaaccacaataatacgcaagaaaatagtggattttaaaactagtgaatggaagcatatttatagtttcataatatatcccatatttccacaatatacttattaattacaagaggaggaaatagcttcacagtagagaaaactgatacacttt

SEQ ID NO: 56436 - DNA, 655 bp, Homo sapiens
agccagtaggaatccactcctgtcagggctgctctccaacccatagctattgcctgtacagacaccatccttgagcttccatttcccacatcaagctatctcaccctggactgggcttttctcaatttcaactcaccactatcttttctgaatgttttctaacattctctattacacccaacctagaagtcagacaatcatctttgatttatccttttttatcattcacaaaatccattctagctataacaatctcatctctatataaattatttgaagttttttttgtcttagtgctgtatcacatggaacaagtgatgtattttcaccacatttggagttatgtagtatgatyggaatcagaatatggattatagcatgttttaatacatatgagtctattttttattaaaaaaatgagtgaaaggaaaaactcttcttcatagtagaaagctaagaaacaaatgtataagagatattgggattagaaaatcaccatttggcaaccacaataatacgcaagaaaatagtggattttaaaactagtgaatggaagcatatttatagtttcataatatatcccatatttccacaatatacttattaattacaagaggaggaaatagcttcacagtagagaaaactgatacacttt

SEQ ID NO: 56437 - DNA, 697 bp, Homo sapiens
ccatccaactcactgagagctacttctaccactcaataaaaccttgcacccatcctccaagcccacgtgtgatctgatttttctggtacactagggcaagaacycaggatacagaaagccctctgtcctggtgataaggctgagggtctaattgagctgattaacacaagccgcctgcagacggcaaagctgaaagagcacacggtaacacacacccactggtgcttcagcagctgtaaacactcaaccctagatgctgccagggggttggagccaaagactctccccatgaccggctggtctgcatgcttcggctaagggtttgagcagcagggcaccgaagaatcgagccactcccccatcacacaccctgccagggggataagggaactcctcccgtttcaccactaggttttggtgatctgtcctgctccctcccaggctgctgcctgttttcatcctcataactcctgaattaccattgatgtttcaaagggtctccacctcactgggccccagccatgacaggcctacacaggcattacctggtaattactgtctttagcatcttcttcccctgcccataaccttctccagaactatccaaagaaagctacttcctgcactaccctcctcaatacacagggaaacttcacttgaattcattaaacattgaataattatcccgtacgccttc

SEQ ID NO: 56438 - DNA, 697 bp, Homo sapiens
ccatccaactcactgagagctacttctaccactcaataaaaccttgcacccatcctccaagcccacgtgtgatctgatttttctggtacactagggcaagaactcaggatacagaaagccctctgtcctggtgataaggctgagggtctaattgagctgattaacacaagccgcctgcagacggcaaagctgaaagagcacacggtaacacacacccactggtgcttcagcagctgtaaacactcaaccctagatgctgccagggggttggagccaaagacwctccccatgaccggctggtctgcatgcttcggctaagggtttgagcagcagggcaccgaagaatcgagccactcccccatcacacaccctgccagggggataagggaactcctcccgtttcaccactaggttttggtgatctgtcctgctccctcccaggctgctgcctgttttcatcctcataactcctgaattaccattgatgtttcaaagggtctccacctcactgggccccagccatgacaggcctacacaggcattacctggtaattactgtctttagcatcttcttcccctgcccataaccttctccagaactatccaaagaaagctacttcctgcactaccctcctcaatacacagggaaacttcacttgaattcattaaacattgaataattatcccgtacgccttc

SEQ ID NO: 56439 - DNA, 697 bp, Homo sapiens
ccatccaactcactgagagctacttctaccactcaataaaaccttgcacccatcctccaagcccacgtgtgatctgatttttctggtacactagggcaagaactcaggatacagaaagccctctgtcctggtgataaggctgagggtctaattgagctgattaacacaagccgcctgcagacggcaaagctgaaagagcacacggtaacacacacccactggtgcttcagcagctgtaaacactcaaccctagatgctgccagggggttggagccaaagactctccccatgacckgctggtctgcatgcttcggctaagggtttgagcagcagggcaccgaagaatcgagccactcccccatcacacaccctgccagggggataagggaactcctcccgtttcaccactaggttttggtgatctgtcctgctccctcccaggctgctgcctgttttcatcctcataactcctgaattaccattgatgtttcaaagggtctccacctcactgggccccagccatgacaggcctacacaggcattacctggtaattactgtctttagcatcttcttcccctgcccataaccttctccagaactatccaaagaaagctacttcctgcactaccctcctcaatacacagggaaacttcacttgaattcattaaacattgaataattatcccgtacgccttc

SEQ ID NO: 56440 - DNA, 697 bp, Homo sapiens
ccatccaactcactgagagctacttctaccactcaataaaaccttgcacccatcctccaagcccacgtgtgatctgatttttctggtacactagggcaagaactcaggatacagaaagccctctgtcctggtgataaggctgagggtctaattgagctgattaacacaagccgcctgcagacggcaaagctgaaagagcacacggtaacacacacccactggtgcttcagcagctgtaaacactcaaccctagatgctgccagggggttggagccaaagactctccccatgaccggctggtctgcatgcttcggctaaggstttgagcagcagggcaccgaagaatcgagccactcccccatcacacaccctgccagggggataagggaactcctcccgtttcaccactaggttttggtgatctgtcctgctccctcccaggctgctgcctgttttcatcctcataactcctgaattaccattgatgtttcaaagggtctccacctcactgggccccagccatgacaggcctacacaggcattacctggtaattactgtctttagcatcttcttcccctgcccataaccttctccagaactatccaaagaaagctacttcctgcactaccctcctcaatacacagggaaacttcacttgaattcattaaacattgaataattatcccgtacgccttc

SEQ ID NO: 56441 - DNA, 697 bp, Homo sapiens
ccatccaactcactgagagctacttctaccactcaataaaaccttgcacccatcctccaagcccacgtgtgatctgatttttctggtacactagggcaagaactcaggatacagaaagccctctgtcctggtgataaggctgagggtctaattgagctgattaacacaagccgcctgcagacggcaaagctgaaagagcacacggtaacacacacccactggtgcttcagcagctgtaaacactcaaccctagatgctgccagggggttggagccaaagactctccccatgaccggctggtctgcatgcttcggctaagggtttgagcagcagggcaccgaagaakcgagccactcccccatcacacaccctgccagggggataagggaactcctcccgtttcaccactaggttttggtgatctgtcctgctccctcccaggctgctgcctgttttcatcctcataactcctgaattaccattgatgtttcaaagggtctccacctcactgggccccagccatgacaggcctacacaggcattacctggtaattactgtctttagcatcttcttcccctgcccataaccttctccagaactatccaaagaaagctacttcctgcactaccctcctcaatacacagggaaacttcacttgaattcattaaacattgaataattatcccgtacgccttc

SEQ ID NO: 56442 - DNA, 1861 bp, Homo sapiens
tgaactagcaattccactcctaagcaattccacccaacagcattggacacaagtgtttaccaaaagacatttagaagattgttcatagcaggacttttcttaatagcgccaaactggagacaactcacatatccatctacaataaaatgcatacatacattatggaatatccatgtgatggaaatcaattcagcaatgagaatgaatgcaacaacatggaggaacctcacaatggtaatgtggaacaagcacagaagacacaaaagaaaaggaaatcaagaaaaaccatctatagacaacgatatatgactggaagcaggacctgagctccaggaaacaaggctggtactagaaagccacaggcaatcccccagtggaatggatcatgtaaaagccagcaaagtagaaggtgctagataagtgctatgcccccatggggcattccggggccgagacccatcagtagtcctgaacacttgctgcttcagcacctgggacccatagagatagtgagactatttccaaacacccgatgaaagaagaaaagagagccaagcaactccgacaagcttctcattgtgttctgttaaagttcctctggcttayaaggatgaatggtccaattaaccgagctcaattaaaggcggagactatttttaaaattcccagaagagacgtatggtgagatcacggcagacaggaggcaggaacagatgcagctgtggacagagcagcgagggggggctcacattgtgaattttagctccagattgattgcaagaacaaatcagcaatcccaagaggacccacagaccctcttaaggacccaggagaccccccacaaaactgtgaatgccccaacagtggaagtgggaaagggagaccctcctctcccaaacacgtcccccacaactggagaagctgaaggtctgtttgtgggagaagtttctgactttacctggagctgagtcaatttggagagccaagtgaaatactggggtagaggaagcagcagaaaggccctgggagctcgcgggctcccctggcaggccgttcctgcctggaaccacagggatccaatgggagagaagcaggggataaaactacacagagagaaggaaatctctagctgaactttgtaacagtttgaacggggtgagaagcctcctggccagaactcgggggagggtgcaaatctgatgtgcagactccacaggctagggaagaaccaagcccttttcttatgcagctgggaggcagacagcctcatatcgcttacggtctgggggttgttgaggggggcatggtgggagtgagaccagcccttcggtttgtgtgggagctgggtgaggcctgtgactgccggctttccccggcttccctgacaacctgcatgactcagcagaggcagccgtaatcctcctacatacacaattccagtgacctaggaatctcactcccagcccccacagcagccacagcaagacccgcccaaggagggtctgagctcagatatgcccagccctacccccacctgatggtccttccctacccatcctggtagcaaaagacaaagggcatatactcttgggagttctagggccctgcccaccatcggtccctccctatactagcacagatgaagctctctggaaagcaccacctcctggtaggaggccaaccagcacaaaaatagagcattaaaccaccaaagctaagaaccctcatggagtccattgcacaccccagccacctccactggaacagacactagtatccatggctgagagacccatagacggttcatatcacaggactctgtagacaacccctggtactagcccagagcccagtagattca

SEQ ID NO: 56443 - DNA, 1861 bp, Homo sapiens
tgaactagcaattccactcctaagcaattccacccaacagcattggacacaagtgtttaccaaaagacatttagaagattgttcatagcaggacttttcttaatagcgccaaactggagacaactcacatatccatctacaataaaatgcatacatacattatggaatatccatgtgatggaaatcaattcagcaatgagaatgaatgcaacaacatggaggaacctcacaatggtaatgtggaacaagcacagaagacacaaaagaaaaggaaatcaagaaaaaccatctatagacaacgatatatgactggaagcaggacctgagctccaggaaacaaggctggtactagaaagccacaggcaatcccccagtggaatggatcatgtaaaagccagcaaagtagaaggtgctagataagtgctatgcccccatggggcattccggggccgagacccatcagtagtcctgaacacttgctgcttcagcacctgggacccatagagatagtgagactatttccaaacacccgatgaaagaagaaaagagagccaagcaactccgacaagcttctcattgtgttctgttaaagttcctctggcttacaaggatgaatggtccaattaaccgagctcaattaaaggcggagactatttttaaaattcccagaagagacgtatggtgagatcacggcagacaggaggcaggamcagatgcagctgtggacagagcagcgagggggggctcacattgtgaattttagctccagattgattgcaagaacaaatcagcaatcccaagaggacccacagaccctcttaaggacccaggagaccccccacaaaactgtgaatgccccaacagtggaagtgggaaagggagaccctcctctcccaaacacgtcccccacaactggagaagctgaaggtctgtttgtgggagaagtttctgactttacctggagctgagtcaatttggagagccaagtgaaatactggggtagaggaagcagcagaaaggccctgggagctcgcgggctcccctggcaggccgttcctgcctggaaccacagggatccaatgggagagaagcaggggataaaactacacagagagaaggaaatctctagctgaactttgtaacagtttgaacggggtgagaagcctcctggccagaactcgggggagggtgcaaatctgatgtgcagactccacaggctagggaagaaccaagcccttttcttatgcagctgggaggcagacagcctcatatcgcttacggtctgggggttgttgaggggggcatggtgggagtgagaccagcccttcggtttgtgtgggagctgggtgaggcctgtgactgccggctttccccggcttccctgacaacctgcatgactcagcagaggcagccgtaatcctcctacatacacaattccagtgacctaggaatctcactcccagcccccacagcagccacagcaagacccgcccaaggagggtctgagctcagatatgcccagccctacccccacctgatggtccttccctacccatcctggtagcaaaagacaaagggcatatactcttgggagttctagggccctgcccaccatcggtccctccctatactagcacagatgaagctctctggaaagcaccacctcctggtaggaggccaaccagcacaaaaatagagcattaaaccaccaaagctaagaaccctcatggagtccattgcacaccccagccacctccactggaacagacactagtatccatggctgagagacccatagacggttcatatcacaggactctgtagacaacccctggtactagcccagagcccagtagattca
